United States Patent Application Publication US 2015/0376612 A1 - sequence listing, part 23

SEQ ID NO: 57461 - DNA, 2115 bp, Homo sapiens
atttcctttcaaatgtataccataacaatccgttttttctctatggtgaactagttaatatataatatagactggtttttcacaaattctaaactaaccctaatttcttctaaggctggtctacttccctattcttgtacttactagttcaaactgtccagagaacaaaattgttataaaagataccttctctgtgtaatttcccttggattataatcatgtcacttgtttactccaagggaagtaattgagttttgatgtcaatgaggatggaatgaaataaaagcttacttacttcatgaatattatatgcttagaatatatttccctacatgctaattggaaagtcagagatcatcagattgaatttcagtgtttagttattttatgaattattttcatgattttatacaaagacttgattgaaaagtagtttcttatcagaaggtcattgtcttgataactgctaatgacaattttctaattgtattcagattaatttaaagtttggcatcagaaaaccagaagctcggacaggaactgagacagatacctgtacagcttgtgcaggtaccttgatccttgaatttgctgctttaagtcgattcacaggagcaacaatatttgaggtttgctttttacggtctttgatatcctgggtattgggcataactacctttatatcttcttcattggttaaatattaggattattagttggagaattactgttattttagtgaactttttgtctaaattcctttacatggtttttaattgtcaaaaacctagaacattgtgagagagctatgttaaatccaactttgcattttgttcaccaactatgaagtatatgtttaggtttagtcttagaaatttttttagccatattacttaaatgaatttgatgtctccttgatatcataaatgtcttacgaaatactatgtccctgtgttttatttgttagacttccatattgcacttctgaaagttctgaaaccttcactaatcttctaaaacacagtgaaatttttgttcttaagtcttgattgagactgtaatctgtaaatttgtttactgcaagggaaatgttattcattatccaaaagacttaatatccccacatagttgtgggctagctatgtctctcattaaaaaaatctaattatttaagcatgtcattggagtgcagtggtaacacaaagcaccctctttttcaagcatatgacttaggttaatgtttaaaaattcaacaaatggcaaacagaacaagcagaaatagggactgtatagtagcattacagatactagatctgaatgtaaagaaaacaaattgactttgtatgtatgtatgcctttgaatgtatgtctgtatgttcaaatgtctcaaggacagatttatcatgtttggttggttaatcttttaaacttaaggttttgctctatatcttgttcactaatattttcccttcattaaaaagtgtggacacttttgcatactttaataactacactctcagatattgatgcagttacaggtgaggaaaataaggctcaaagagtatgacagacctgcacagctggtagatgatgcatggagttggaattagaatccatgtctttctgaatttgaaacccatactctttccagtgggctattttgtgtttattaataaatctgttgaaagtcatgatttaaaaaaaaaaattcttgaatacgcagtaatttgttgtcagagaagatgcagttgacaaagcattgatataatacagggttggcaaactgcagtctgtgagcaaagtgcagccactgcctgtttttataaataaagctttattggaacacagccatgctcaattgtttgtttttatctgtgcctactttggtgctacagtgacagagttgagtaattgtgccatttactgtgtgacccatagcgcttaaaatacctggttcttgtccgaaaaggtttgctgacccttggtctaatatatataaagagatctgaattctcatattatttttttgtcctgtaattcaattttaaactctagctaatcttgaatttcactaggcctgttttcttagctgtaaaataagactagggaaatctt

SEQ ID NO: 57462 - DNA, 1035 bp, Homo sapiens
tagcaggtgatgtatagtttaggaacaattgaacatgccttgaagaaagtgctttcttctgagaataaaagcaacttttagaatgtatctggtgaataggatgggttttaattttgttttgacttagaagccaaattctactagaactcacctcatgtagcctgggtcattaagaatccagttaacaggtctgatgatggtagcttcaaagtcctcataatatttcggtgtatgcaaagaagtgtataaagatgctgtataattagatacttaatttttttagttttagacattattacatttttataatatacttagaaatattatttgtgtatgtcactttttagagttttaaagtagactgacttttaatagctcattctaggaacgtttctccttgtcttggtagaaaagaactttatttcataattttcttctcccaggttttaaataaaactaaagaatttgaagatgcagtgagaaaagttttaagagatgttaatttagataacgatgtagtcgtatcagtctttgaaacaaacatcagagttcttgggtaagtatgaaagacactaaagctataattttattttatttttatttatttatatatattttttgagacagagtcttgctcagtcacccaggctggagtgcagtgacaatcttggcttactgcagcctccgcctcccgggttcaagcgattctcctatctaagcctcctgagtagctgggactacaggtgcataccaccaagcccagctaatttttgtatttttaatagagacggggtttcaccatgatggccaggctggtcccgaatgcctgaccttaagtgatctgcctgcctcggcctcccagaatgctgggattacaggcgtgagccaccacgcccagtctataattttaatatcagaaaagtttaggatatactgtttatttcttgatggtaatcatgcaagaagtttcctgtgtttaaaagatgtaagttggaacattatgaaacacagagtctgtggcattaccttgtattt

SEQ ID NO: 57463 - DNA, 1021 bp, Homo sapiens
tcagggtatccttttaagcatgcttgaaagccagaaaccataaggtgaaagcaagataaagttaaaagccaaacaaaagagaaaaatgtttactgtgtgtgacaaacataatgtatgagagtctcttgtggccaaaaaaagcaaccaatggaaagatgggcaaaagatcaacagacatttcaaaaaagaaataacaatggataatacaaaaagatgtttatccttattagtaatgaatctttagataccatcttttacctaggagtttggcaaaatgtgaactattgatcatttcctatgttagtgagaatgtaattgagtgtagattggtgtcctcaatttgtagcatttaccaaaaattagttacacatacctttgaccctaatgggtctatttttaggtatctgatacatagaaatactggcatatgttcaaaagatacatgcacataggtgtttattgcttcattgtttgtatagaaaaaaattgaaatcaacctccatgttcatcagtaaagggatactttgaggaatgggtactgctaaggggatagactctggagtcagggtacctggctttgaattctggatcatttactagatgtgtgatctaggcttacttaacttctctgggcctcagttttttcatccatgaattagagataattgaatctacttcagagcattgtgacaattaactaaaatatatagatagaatatcacttagaatataagtactcattaaatattagctaatgttatcagtttgtagttattagaatagagtacatctgtaacattctaaaaacgtgggaagaaaactccattatttaagtgacaaatgttagagcaatatgtgcatatggcatgaacacctgttcataaataaaattttagaataatatatgtgtatgtatttgaatgtatgtgggataaatctggaaggataaatgccagtcttatcagtagttagctctaggaagtgagattggggaggggaggggaagcagattatcagtttt

SEQ ID NO: 57464 - DNA, 1034 bp, Homo sapiens
caaagaaataataaacttaattaaaaatacaagtttaaggtgaatttcagggcctgtaagtcatttacttttttgtagtcagttgcctactatcctaaaatataaaatgcctggtacatggcaggcttttaataaatgttgaaagtttttcctcatttctcactagttctttctaatactactctccagtctggtctacagtagaacaattcctttaaccttcttgcttcccaggaaagcagtggtgttttccaaagacaagcaatatagtattattaagagcaagaactctggacttggagcaggacaccctgagatggctctgccacctctcatctgggttacaatgggaaagttacctagtcttcctgagcctgtttcttcatctctgcaaaatgaagacaatggtttgccagcctcacaatgttgttagaaggattaagcaagttaatataatgaaagtgcttagaactaatatctggcaaataggaagcatgatgtaagaatttactgctgctactgataacgactactactatcattattatttatttcctgcctaaattgaaattgccctcctaaaatccacttagcctgtaactcagaacttgttctccagatagtacatagaacttgcttaaagcgcatacattctttcctgttcttggcatgtgccctttgaacttactttctattaatgtaatagaaggttctattaatgctatttcttaatagaaatgtcctgccagctttaggtagattactacaactctgccatctctggacttaaatctagggatttttgggtttttaacacttattggcatgactattaataacgactatgtttgacaaatgtctagccccagtcagtctgcagtttacccacagtgaattgcacagatggctttctcgtttaccaaatgacatgaatttgatgtttatcttagcagttcttgtgtgaccttatttaaccccaggccacagtcactttagggcttctgttagcatgttttgagtatttgtgttcagtt

SEQ ID NO: 57465 - DNA, 1307 bp, Homo sapiens
ggcatctatcattcatcagttttcttaggaaaaattataagatgaattgtacataaattactagtaatcattaaagtttggctcagctctgtgtggtgagttcatgaaagcttgtctgctagctgttgtagtttctgattctgtttatgtccctttctacctaaatttttcttttgtttttattggtatattttttatgaggaagaattaactttttgaaagataataaatagaatatacttacctttttttttttttttttccatttctgctcttttaaaattaggaatcaagtactggaaatgtttgatcatgcttatggtaactatatggtaagtaggaagcttatctttacctaccatttatgtgagttgattattatgtgagcacagtcaactgggaattttgaaacctacaatacaattacattttttaaaaggaagtttttaaaaaacagggcaaaaatagtctttctggtagtggtttttagggaaccagtttattgaacagataagaataaattgaaattagattatgaaacttcattatttaaacagcttccttgggtgccatcaacaattatcattgagtgctttatatagctagatattgtggatatatacatgaagatgttatctctggtcttaagggagattattctcttaatttaaaaaaatgtttacaatatttatacactgaagaaaaccattgcttaaaagagaaattgttacttagcctctgtcctaattgtatcctcatggactctgcactgaatatattttgctttttagtttgctgattcatattatttaaaaatgttttagggctcacttaagattaaatagcagtttcagttttacaagatgaaaagttctggagatctgttgtgcaacaacgtagatgaaatagcaaattctggaattcaaaaaaaattttgcacataaattgtaatttgaaaagagtttaagcatattatcctgaaacttatcccttataaccttgtttttacattttaaaatatgtcagcagattttcttctatgattacaacgtataaaatgtagttgggaaagtttggcagaggactagctttagttctgcttaaaatatttttcaactgattctgtgaatccattttttatcatatattaaccaaatatcttcatacactaacatcattgttatctatgaacatctaaatatatgtaatttatgcatttttagttttaaaacatgttttatatttgacagtcctcgttctcttttatattgtaaatttggagagagcacattttgagttcttaatgt

SEQ ID NO: 57466 - DNA, 1026 bp, Homo sapiens
cccagccctgcagagagagggagagataagctgtggagcggtttacatctacttaaagtggaggtgccaccaaaaactagttgaagaaggctccagcctcatcccttaatcagtggctgcaggtatcaaagaataggagtgcccacgggagatgacagaatgcttgctcagtcccatggccttgggttttccaacttcttcctgctcccactgtgaccacgtgaccatttgtttcacagccctggtgatggggtgatgttgccttgggtacccccaccgaatagcagccgaggggactcatctctgatggcccctactctgcagtcccacttagccaggcctgtgggtggtgatcccagcccctgactgttgtctgtttctgtgtcgcttctggtttctagctaatggagaatgcagtgttcacttttgagcagttgctttccccacatctccaaggagaggcctccaaaactgcagttgccattgagaaggttaaactccgagtcttaaaggtaaaaccgttctcttgtttgtgggaagcataaaaagagaacgtgacccctgtttcttttgtaaagtggaaaataccaagttctctccttggctctaatctttccccactcctttctctcccaagtccagtgactgtcagtccgctgcagtttctccagtgtgacttccatgcctcttctgccatctagcggccactgctggtcctcagcatcattacccacagctacaggccccgcgtcccagccttcatagagatccaactcgacaaacacgtattagctgtccactataagcactgcatgggatgtaaaagtaggcaaggcacagcctctttcttcaaagaggttacaatatagtaaaatccattaaactggcgaataatttattgattttgaaaaatcagaacctcatggcaaaggaaatactccaaagaaaagaaatctaccatatgaaattgttttaaatgtacttcagagtgtttattaaaatagttttaataataggagctttcac

SEQ ID NO: 57467 - DNA, 1034 bp, Homo sapiens
catatattataggggtttttggtcactgttttttgttttttgtttttttaaggtgaccatgtgatacacttttctctatttttctttttttcactcaacagggtctcatggaaatccctccaagtcaattgatactgttttaactcctttattagcagctatataatattctgtggtttgcaccctacatgattcaaccattctcttcctgatggcctttactctgttcccaggtttaccactatcacccatgattaaatacgtgtccttgtacatatatcctcatgttcttatttctatgaggcagtgcccgtgaagagagattgctgggtaaatgtatttttaacttaatagatgttgccagattaattttctgatagactataaaatttcatatttctacagtgtatgagagtgccctttttccagcagccctgccaatcataggtatttcggctcttgctttgtttttttttgacaagctgatggataagaagtgaatttgctttttattttgagtggcctttcccggattggccatgagtctgagatcttatctcatgtttatcagccatttagatgcactttcatgtgaattgtccgttgatgttctttgccattttcattttcattcatttattcattctttttcttcttcttccttttgttttgtaatattcttgtaagaactctgaacatttagatattaaccctttttatatcttttcattgtcattcattccttccttctttttcttgttctcttgttggtaattttcttataagaactctgaacatttagatattaactcttttttatatctccattaaaaatgtttttctcaaattcattgctcatgtgttattataaactaattatgttattattaacctttaattatgatatattttgccatgcaaaggtgtctatttttatgcagtcaaatatattaatctttatttttatggcttttggattttctgcctgtgtttagaagattccccttaacccaagattatatttctaatttcct

SEQ ID NO: 57468 - DNA, 1035 bp, Homo sapiens
atttcctgtttgtggaaagaggtattatggtgtggtgtttgtaagcttagtatttggaatttgattttgaaagactattttggattcagatcttggctccaccacttaggatctgtgttactcactctcattactcttcaattttctcatcagtgggacagaggtattgtcagtgcccattcatatagttattgtgaaaattacctgagataatgaaaagacagtacttagtacaatgactgacatacagtaaatacttaatatatatacactgttaggatttttaagatacaaaatattttcataaaataacacatcaatttttgtgatgctactccataaataatattcagtttttgttttttatcctaatagaacaatttttttcacaatgtctgaggataaataaaagcaatgacttctaagtcacaattatacaatttttggaagctaattttataatattttgaatttttttgcatgtttacaaaattaatttttgttttactctggaagtttgaggtagatctgcccccgtctccctggccccccgcccccgccgcagtgctatatttagcatgcttcctcccacctgcctacagctttgcataccctaaaatgcccattaaactccttttcattccttctgtctacagtctgggcctatattagtcctatggctttgattccaaccccactcacaccatagttctctggttcattttcagctagttcatgagtgggtctattcttccagccttttcttactttccctttgtggtctacggtccttgcatggacatgaccacttcccaatgcctccccacagtccttcgttccctgaagttctggctttggttccactttcccatggctctgacttgcaggagtgcttggttgtaggctaactgccttgcacacaccctcatcagctgtccgctttcctgatgcagacctcagctccttgctgagcaatggcatcctcaccatgctgcccatgaaacccccacccagcccttcccttaaaatatctac

SEQ ID NO: 57469 - DNA, 1035 bp, Homo sapiens
gctcttaaaccaaagtttccccctctgtctcgtggtggttatatactgctttgaatcacacacaaaaattttaaaccagaaatattggagcagagtgagaggaaacacttgttgattttatccaggactgtgagtcacaagactagaggtggagcctcagggatctgaagaaaaagggagtgatggccaggtgtggtggctcacgcctataatcccagcactttgggaggccgaggcgggcagatcatctgaggttgggagttcgagaccagcctgaccaacatggagaaaccccatctctactaaaaatacaaaattagctgagcatggtggcacatacatgtaatcccagctactcaggaggctgaggcgggagaatcgcttgaacccgggaggtgaaagttgtggtgagccaagattgtgccattgcactccagcctgggcagcaagatggacactctgtctcaagaaaaaaaaaaaaaaaaaaaaaaagagagtgatgtgcttgcagaattgaaggcatagacctgggattatcatttggagggaggagctgaatgactggaggtcgaggagaataaagaacaagtagaagtggagagagggcgaggtagaagaacagtcttaggaggattagaaggatggttgagtttatggtcatggcgatagtctattgatagaaaataaagcaaaactcaataggttacgggatttagtccttagggtcaatttagtccttagggtctgtgaagcctctcaggatgatgccagaaggagagggagagatggggcatgtgcagcaggtagcaaagttctccgggaagacagactactggcaaatatctgggaaacaggggtgactggagggatagaaacaggggtgactggagggatagaaacagagagactggagggatggtttttggaactctgtagataggtgtatattctgtgctatacttaagaattctaattttcatatttttctagggaaaactgaggctgccatcaaaaacttcagtccctactacagtc

SEQ ID NO: 57470 - DNA, 1176 bp, Homo sapiens
tgataggtagaattaagcttgaacacatggataataatattatgtatggatacatacatacgttgtaagagtctaaaatgattgacaggtgtaaacaccagttttagcgtagtggtgcctggtgatgttgtggggcagggtagagggggttgcaaatgtagctgtagtattttgtttaaaatttttttgaggcaaatgtggcatagtatcaccattttatttagctgggtagtaggtatatatattattcactttattattctgtctgaactgtttcataactaaagaaaacatgcacgtacaccaaactgttgttatagtagtctataactcaatgtatctcatctcttggctcatataaagttggatacagagcagggtccagagaagctttgttaaagactttttaaataccatgcagatgatgggactggttcatagcagtactttttaaccttgattttgtgcaaaacagattcttaatcagtagataagaaaatctacctaattagtgcattttcccagggagccttatggtattagccagcaaagactgcagctttaattgagacagtgatgcaacttaattggaacacctgaatgcgattaagggagggggtactcatataaggtcagctggtttccctggtgcccagagctctgctgggtctatacctttttgctgacaacctctgccaactgggatgaagctgagccaaatgcttttactgtctttcttagatcacttaatgaaatgttttaaatacagattccatgtatttcagtgtgtattgtgaaacacattggcatgctgattctactggtaaactttagaacttattacatagaagcactagatatttgcattgcttttaattgttattgatgcaggagtttaatatatattaagtgaaataaattgataattgtgttgagactcaataatgtattttagttgattacatctttatttgggttctccagagaaacataactaatgggatatatatatatgtgtgtgtgtgtgtgtgtgtgtgtgtgtatttgttataaagaattggcccacacaattatggagactgacaagtccaaggtctgcagctggtaagctggaggcccaggaaagctgatgatgcagttctagtctgaaagctagcaggctggagacccaggaag

SEQ ID NO: 57471 - DNA, 1049 bp, Homo sapiens
gcttaacccgctaggagatgtaggaagtcaacctgttcaacacatctcaagcagatcgaatgatgaaatgttgatgatttcaccataccttttccactaagaaatggaatgatcctcctcatatttttgcagcggttatctatttcatctattaactgagaatgcagagtgtgcctgagcatttttactcacagaactaatgaaaaaagttaaaaaatttttatgcaagtggtttgcttgactttcttgcaaaatgctcataggaagttaataggaatcatattattatcagaaggttttaagacaacactagttctccccctagcccactaccaaaatacactgtggtatactaatttacacaaattaggttactatatacttgttactatgctttcatcacaaaagtatttaaaaccaacacatcatagattgttttctttcctatattttaaagccactcaaagctgagtggtatgggagaagtctgtggtattatacaatttgaggaattcaaaaagttccacattactgccaggcctgctaaagtaatttggaggaatttatttactatcatgcttccttgctaccatttacaatcactgatttgttaaaactagatgttttgcagtggaagtggagattgtatttagcctctgaggtccagccacggttctgctggtgccggcaatccaggggttttggctcctggggtctcttgtcaacatcatctctgggtagccagttacccccaatgtcctttttcagggcacagggtgtctggccagaatccccacttagcccaggacctggccccttcacctattccctcttattctgcatctggagacattgccttctcactggttttgtctcatcccagaaacagtctaaagtctttcaaattcagaatcaccatctgcttattggatattttctcctgaagatattctgagacactcccggaaccagatatttgtcactgaaaattttaatttattccatattttccaaatgccataatggagtgtggagatacaaagatgaat

SEQ ID NO: 57472 - DNA, 1068 bp, Homo sapiens
ttactaatcctcagcttcctttttctgtaaccatatttagtctactattttaagtctgaaaatcactattcttggaagagaagtaattgcgaaagtaataggggagcagttctcctttcactttgttattccagcaacatgatgtcattggtgccaaacatctggcttatttctcccttgtgttccttttgtgcctaacataaccattagaatgcttcttgttgttcttacaaattataggtctcaatctatctgtccctgtttttggagagacccaaaactctcttgcatttgttcttgaggagcccctctttcttttttttttttaatcccagcgctttgaaatcaggtcataatagaactatgtaggaacctccatccttccttccttggtggaatcaccatctgtgactatacagacaaaattgtccatagtctgcggacagatggatgctatttgactctcattcagaacgctcttcccacagagtcatgatgctgtttctgctgattcttttgaaatctgccttcttgaagtccatgctttcttgtcatattttcagcgactctctatctggctatcagaaatgtcagggtaaatgtcttttgtctattgctgttggaatggagtgggacaattaaccaaaagaccgttaaagtagcaaatcattaaaagatacacatatcttgaatcttttaacttaaaatatgttaatgaaacaaatatattcactcgctactctttgacctagggctaaggtctttttttaaagattgcttgcagttccatattgtcatttttgcatcatctataattttcagtcttaatttcttttaagttgggcaagaccttgtaaagaaatctgatgacagaatccatctagatctgtatttatagttgttttacctacatgtaatttaacagtaattatttttagaaactctttatcaaaactttctaaagcatattttacagagtgaaaagccttggatgagtggagggtggttaagagggtttctgccatgttctctcatgacatcattgatttcacccaaggttcattattt

SEQ ID NO: 57473 - DNA, 1035 bp, Homo sapiens
aagtggaacatttgggggacatttctgtatgtcttatagtttaaggagattatggtaaaggaataaacatcacgtgcttgctcttttggaagggaatttaaaggtcattaaagataacttcatgcttgaatgcccttaccaagggggtaagcagctttcaatacctccagtaataagaaactcactatctcctgaagccagtcaattcatatttggacagttattttgttagtgaattgtgccaggactgaattcttcctaatttctgcaccaccccttggctcacacttagctcctgtgccaagtcctctgccacttcctcttgcctaggcccagccagctctctctggcctctggcccctggtcagcacaaggctcctgtctgtataggaaggggggttcaatatacaggaatctgggcttcaaacccaggattatttggtcaaagccaggccttttaagaaattattgctggaaaatatacatatttatcatgttaaacattggcaacttgcaattcagcagcattaactatattcacaatattgtataaccgtcaccactatctactcccaaaatgttttcatcatcgccaacataaactttgtgctcattaaataactccccattccttctcctcccagaccctggtaacctctatttcactttccatctatgaatttgcctgctctgtgtacctcataccgctaaataatacattatttgttcttctgtgtctgaagccaaacccctttttactacagcaccctaccttcatagcatcgctttctatcactaatgcaatttgtctacttaaccttcttaaagtcatttgagtacaagagctgtcatacttttacaaagatctcaaagacttggactacatgtcatttgatccaacagaaagcaaggtaggagaaacaatgcatttcttttcttttcttttctttttgagatggagttttgctcttgttgcccaggctggagtgcaatggcgcggtcttggctcaccacaacctctacctcctgggttca

SEQ ID NO: 57474 - DNA, 1016 bp, Homo sapiens
atctctagcaattcatctttttacctagcttaatggcccttgttacatattaggagaatgatggagtgaaaagacaaagtgtctggggcctgcctgcctaagaatgtggagaaaattacattggggaataaattatattaactccttctcatcattcacttaccttttgtaaatttcatctcactatgctaaacaatcctggatggcctgggaaaaaagtcgtgcaccttctcactaacaggctcagattccttgttcatcgttaagataatagagaccattatattatctcatgagattatctgcatctaaattaacagactcctctgcactagtgaacagggtgaatgcattcatttgggttggggttgggtggggttcttacctttataactcttgttttttttaaaatgattttggagataaagcaaataaaaaatcattatcttgatagagtagttttaaataaacatttgatggaattatctttttattgtttcattcttggcatccattcaataataatgatggtggtagtgatggtgatgactgttgattgcctgggggtgcaagagccttacctatggctggtctgtgacagagcagggaccccaacccagtactgcataattttctgtggatattgtcatccccaatttccccattagaaactgagacctaaattctagtctgagattcttcacttgattatgtgccccttagcataatcctagttcagttttaatagtcactctgaaggaaaactttttcacaggactaatgactcctctgctttcaaagggaagtgcagtgtgctatctcttactcttatttaaacttatagttagttggacaagcaggagaaaaacttgggtagccatgtgactcaatggaaagagtggaagaaggattggggcagcccatgtttgggtcctctttgcgcaagttatataactgagcctcagttcctttgtatgtgaaatgggataataacaactaatttacattttgttgtg

SEQ ID NO: 57475 - DNA, 1057 bp, Homo sapiens
ctcttcaatgcagggaagctggtggcaatgttaaccagtggcagtggcctgaagccatgtttcagttgtacattaattagaatggtctaactgctgaaacagacatcaacgctcagtggcttatagtgatttgtatctcactcatcacactatccagggtgatttggtggggggctaatgaagggcagtgggcttgtgtgtggacccagactcttttcatctagtgcatggtaccatggacacctttggtggtttgttaaagcctatggacccctttttagagtaacatttttaaatgaaaaaaatatagagaggatgataaaagaaaccaattttattgaactgtagttatcaaaatatttttaaaatctgtgatatggtaatatatgtgctctttattaatgcattcaatgacaaggtctcatggagggtttaataactactgtcattttgaagaagtgctattctaagatatgcagcaacttaaatgtgctacgaaaacatctgtgagctctattggtgacaaagtcacaagtactgctaaattacactgttttgttgcctacattcagggttggagaagtgctgaatttgagttgaaggttaataaaacacaggtgttcttttcctccattcagtgtttggatggcctgaattctatccacagagcccatgagggtctacaggctccagatcaataatctctgacctggctgggcatattccagcaccttagaaggcccaaggcaagaggatcgcttgagaccaggagtttgaggccagcctgggcaacatagtgagacctcgtctctacaaaaaacaaaaatgagccaaatgtagtggcgcatgcttgtagtcctagctgctaaggaggctgaggtaggaagatcgctggaacccaggatcaagagatgctgcagtgagctgtgattgcacaactgcattccggcctaggcaagagtgagaatttggctctaaaaaaaaaaaacaaacaaaaagaaaaaataatccctgacctaatggctagtggcttcatgattcttagggccacaaagac

SEQ ID NO: 57476 - DNA, 1055 bp, Homo sapiens
cagctagggatgtgtgtctgcatcgtgggggtggggtagggggcactttgtgcagatatcgctccttccttctggggggtcggagtcggggttccagtgtagaggagctcctcgacctcggggttcctcggggagaccccttcagcttcacacattcctggagtgccgcctcctgctctggagtatctgttgctgctttctaaaaccgtgagcttacccaggaggagtcgtggggggagggggtgtcttggttagtttctgcgggaagattcgcgttttgaaccgtgtcgtttacgctgagatgctagtacccacttttgccgggagcccacgtcctgctggtcagaatcgtttaccttctacagaagtctccttcttgctttcagagatggtgttagtaaaaattgatctcaaactttgaggttcattccagttatttgcccgctaagatcaattatagactcatctatttgaagcccctttgggtatctttttcgaggctgtcggaagttttagagaatgtaactttacattgtaaaatgatttgaagatgtcaggtttctttgaagtgccgtgaaaaggatatacatatgcactcagtattttagtaatacgctgtttttcaattaaaaaaattaaggcatggtttcagtgttctaaaccgaggatatgtttaaaacgaatgtacgagcgatttgcattacataatctacttttggtaattccaagatgatcagctggaatacttagtctaattggtagctaatctatctgttttgtattaagtgcagttgttgaatattctaataactgaggtgggtgtgagagtttgcttcttatagtgaaatttgatccttggatttataaagtatttaaatagcagcaatatgactcttggttattccctttttcccctgaaatttctacttttcacaatcaacaagtatctttaaaaatcttgattgtactcttaaactactttttagcaaaataataggtagttataggtgactcctttttctaggggtagcacagcaaatatggtccctcacttt

SEQ ID NO: 57477 - DNA, 1167 bp, Homo sapiens
agcaaagaagcataatttcttccagcaagagaaatgagttaatattaaaacgcactttattaaaattatggcagtgtttctagtatgacttaaagcgcttcataattttgaaatgactcattaaattctggataaactaaaaatccatcacagtttgcagcttttaaaagaaaaataagagattatgtactctgcgcacgtacacatctacaattggtttttaattcgtgttattgcacacactgtagaagacattgtcatcagacaatggttaatttctcgattgattcatttatttgacatctaagctgtcatagtaacttagtgtttatttgcatttaatactgagtaggtgcccatataatttggggtacaaaggtataatagcatttacacagtccattccttaagggtccagatatcctgactgtttgcctactggtcttctaccctttctacctaatgtgtctactgggtcttctggtatttcttgggggaagcgcagtttgattggtcttacataaatattttgactgtggtcatgggactcttggcatttaagtagaagctagtgttagtgtgttgccaggcaggagctaggtgatgagtccctgactataggtgctaagagcgtaggtgtgacccattatccagttttatgttgtgtggagcaactccggtagaattggccatgttcttaattctcctttgctttacggtttttagacagctgaggcagagtggtatgattaggcttagttatgtatcttgttggatgctcaaggagctatatacattactaaaaattctaagatttctattgcttaaatttacttctcccatttcattttgagaattaacatgtttgccatttatcataatttttaaaaatcagtttatctgtattaagtacaatggtgaaaagttatttttgaaattaaccttgggttaaattttctaatgagagcatactattaagtgaagtaaccagccaaatgaaaaacatgtaagcattttggtcatttgttttcaaaagatatgttacttacgggctcttctgcaagggggatttctttttgtttctatgctatagagtggagttgtatgaagaggttagattctaaagtcgatgcatagaatgaaaatcacatgtagtaaaaaaaaaaa

SEQ ID NO: 57478 - DNA, 1038 bp, Homo sapiens
gagagcagttagaattattgttttacaatgtgctagggtacagtagagaaaacggagactttagtaagaatttcaacagaaaggatttaatatagggagttggttagatgagtgtaaaaaaaaaaaagcgggggaggggggaacattacagtaatcagaacctaagagctcagagaagaggttctatggacccggtgctggacttttgagtaggtcagcattgtgtgcttgctgctagtacttataaaggcatgtgttattgctggttctgggagaaccacaaaaacctggagactggaaccatttgctaactgccagggtcaggggctgcatttgctactgacaggaactggaaagatgtcccgtctcccatcttcctgttttccagtcttcacttactgctgctattggcaaagcctaaggagatcccagctggcaaaggagttgatgaaatatagttgcagtctcagccataacaacatagagtctgggagggtagttttggagttgagagacaataagtaaatgatctggacgaatagtgtaggttaagatgtagtaatttaaatagggaattctgtgttaacgttgcctttcaaaaagtatttatcttctgtatgccagaccctgtgcaagggattaggaatagaaaaatgaatcgaaaaaggtctttgtccttgaggaatttatagtgtaagtggcaatgacaaactactgtacagtgttttcagtgcaatagcaaatgagtgctatgttttgggagcccaaaagacagcaaccaacttgcctcttctctgcctacctaactttataactactctttttatcttctatcctgattaaatccaatttcattctttctgactgctatgttcaacccaactcctgtgaaagctttttctgagatgtctcaatttcgtcacataattattattttgtatttctctgtgctttattcatctagattataaagaccattgctttctttgcacttttagcttagtactgtgcacatagatacttgagaaatactttttt

SEQ ID NO: 57479 - DNA, 2055 bp, Homo sapiens
aataaagaagctattaggctaccaagagtaatttagatgagtattccagatgttcagtacagtgacaagcttttcagtaaagaacactttgtgtctttagaagcttacagaaattagcgtctgtcttacagctgtagttttagattgaactgcggaaagtggtttttatgaggtgttaccgcaggcagtgttatgatggcagttggattgcttactcacaatttattatttgcctagtcttgagtaaatttctaaaatataacacctgtatcctgtaagcaagcattgctttaattaaggaagaaattatttgctcatttacatttgtgtaatataacataaaaggaaaagaaaaatgctaaagattgagagagttaatttgatgtgacctttattttactgtgttcagaagggacagtaactatgagagaaaaacatatctcattaaaagagagagaaggcatcttagtttttctttgtttcatagtgcttagggaagtgtatatcaaacaaatgaaaaaaatgctttgtagggaaatgggataattaagtaatttaaaagtatccttttttttttttttttttttgagacggagtcttgctctgttgcccaggctggagtgcagtgatgcaatctcggctctcggcaacctctgcctcccgggttcaaacgattctcctacctcagcctctcgagtagctgggactacaggcgcctgccaccacgcccagctaatttttgtatttttaatacagatggggtttcaccgtgttggccaggatggtcttgagctcttgacctcatgattcacccgccttggccttccaaagtgctgggattacaggcatgagccacagcgcccggccttttttttttttagagacagagtcttgcactgttgcccacgctggagtgcaatggtacgatctcggctcgctgcaacctctgcctcccaggttcaagcgattctcctgcctcagcctcctgtaaagtggttacattttctgaaatgtatttcacatttgtttaaaaacaaattaaggaaacagcatgtatgcaggataaagacttaagtgttgtctgtgggtagttggttatattcattggtgggttatagtcactcttactttggtcagtgtggtaggctgaaaaatgtcccccaaaagatatctacattctggtctctggaacctgtaaatgttaatttactttgaaaaaggttctttgcatgtgtaattaagttaatggtattgagatgagattgtcctggattatccaggtaggccttaaatgttaccacatgtaactttataagagaaggggcagagagagattacagccacagaagagcatgaagcagtgtgaccacagaggcagattggagtgatatggtcacaagccaaggcatactggcatttgccccaacctgaaagaggtaaggaacagattctcccctagggcctctggaagccaagtgcaatcctgccagtacttttattttggcccagtgatattgaattaggacttctggccttcagaactgtgagagaataacttactgttgttataagccttcaaatttgtgataatgttacagtagccatagaaaactaatatagcaatcattgttcagaatgtaaatggacatttctaagtaactcagtttacctaaactctttctccttttggggagtataatttatagctcactcatattaaactatagctttatttcagatactctgtatagaccagaaaatttttacgattaaagcagctgttaaacatttttaggtgcagaactcttgacagttttgctcaaaatgttacatttaaagttccttttttgagtaaaatgtttcatccaatttggaagctcccttattgctgccttctccctcataactactctggtaagagtacaatttaggctcctaaaattttacaacatagtgtaagctcttttgcctgttaatgtgctatttattatgaattcctctttcacctatactattgaaaatatacatttggctgggtgagtggctcatgcctgt

SEQ ID NO: 57480 - DNA, 1053 bp, Homo sapiens
cttctttttaatttttgagaaccagtgaataatttgttttttttattctcaagattaacaattcctaaaaatcagttttgagatttacttcctatcttaatccatttagcctgctataaaaaatactttaggctgggtaatttataagcaatagaaatgtattacagttctggagactgggaattccaagatcatggcaccagcagatgcagtgtctggtgagggcctattccttatagctgcttctctgtgtcagaacatgctggaagggccaaaagtttccatcaagcctcttttataaaggcactaatttcattcatgagggtggagccctcataacctgatcacctcccaaagtccccacctcttaatattacttcattgagattagatttcaacgtaggaattttggtgggacacatacattcagaccatagcacttcccttccaaatactaaaattgtttttctctcttctttatttccagcaatgtctcaggctgtgcagacaaacggaactcaaccattaagcaaaacatgggaactcagtttatatgagttacaacgaacacctcaggtaatgactaagatgactgccaaggggcatatgagacgtgtaaactgggatacatttttagaacatgaaaacttaaatagaacatagagtaataataaatttatattcaagcattcctgacttctgtatgttggctaacactttattcattgattgaacaaataatctgaatactctatacaagcttttgtggtaggtactgggtgaacagtggtgaataaaacagatgtagcaccaaccatggactttacagacattgaaaaagtacatatctataaaattcacatgtgagaagttgtagaaagttgggcaagtcctccttgctgtaataagtactgataaggcaccaaggaagactgttttgagatgatggcagactaggggaggagcaggtttgaaggcaacaaacatgcttaacactggattaattttgagattcctatacaacaggcaggcagagatgccaactatagatga

SEQ ID NO: 57481 - DNA, 1031 bp, Homo sapiens
tttgaaggtggacgttttctgagggttaatttagccctaactttctcattttgcaggtaagaagacaatgttaaataattatttagactcagctagttaatttgactagaactagatctaacctaaggtatatgattccaaattcaattttttgtattataccagactaatttcccactagtaagcttttaaatacattaatatgttatctttagcattaaagcaagagcatttttataacagtggtggtgaggctgaggggagctgtaggcgattatagttgaaacaaaattagctgtgagttgacaatggcagtggctgggtgatgggtacatatatgtttgtttttaccatttccagtacttttatatgtttgagcttgtccataataaaaaattaagtagcttttaattttaaagtgactcttttacaggaggcaataacagatggcttagaaattgtggtttcacctcgaagtctacacagtgaattaatgtgcccaatttgtttggatatgttgaagaacaccatgactacaaaggagtgtttacatcgtttttgtgcagactgcatcatcacagcccttagaagtgggtatgttgaaaagagttgttatactaggtacttaattgtaccacgaaagtgctttccagggtttgagaaatacattttcttttttttttttttgagacagagtttcgcttttcttgcccaggctggagtgcaatggcacgatcttggctcactgcaacctctgcctcctgggttcaagcgattctcctgcctcagcctccagagtagctgggattacaggcattgccaccgtggccggctagtttttttttttttttgtatttttagtagagacggggtttcaacttgttggccaggtttcagcatattgaactcctgacctcaggtaatccacccgcctcagtctcccaaagtgctggaattacagacatgagtcactgcacctggccgagaaatacatttcctttcctttctcctttttcttctttcccctttcc

SEQ ID NO: 57482 - DNA, 1546 bp, Homo sapiens
ggcgaggctggtctcaactcctgaccttgtgatctgcctgcctcggcctcccaaagtgctgagattacaggtgtgatccaccacacctggccttggagtcgcttttaaatctcttttacacatcctgtattccagtccgtaaataaacaaatattttttgctttctccatagtatatccagattcattcaggccacaacaatctttcatttgatgtattgaagtaagttcccaactggtttttctacttcccatgcttactcccacatagtctattctcagcacagcagccagagatactgttaaattgaaaggaagatcatggttttcctttgctcagagccctctaatagcttctattcacattcaggctaaaaactaaaagactttaatgatggtttttaagaccctatataaggtgggcattttccttaccctcatcttcttttcctctctgacattatcgtctgatttattcaggcctcaaggagaatcattattttccatagaaggagataatagtaaagtccatctcagtctagtggttttcaccttggctgaacatcagactcactcagaaaactttcaaatctcatggctttaggcatcatcccggtcccagtaatcagcatccaggcatttctgcttttaagtttccatagataattctggagtgtagtcaagatcaaaaaccactggcttaaaggttaaaagatgtgctccattctaacagtattaaactgacctaccactctgtttaccaaagtataatgtactaaatgttaaatgtatttatttttagaagaattttacattcctaagcgttggaaggactttaatggttgttcagtttagccttttactaaaagcaagactctccttgtaaatattcttttggttttgcttgtacatttctagtggtggggctgtatgataggcactcctttcttttgttggcaactttattacagcttccttactgttcttcagactcaccaagcatgcttctgcctcagagcctttgtacttacactactctatttcaggaaccttcttccaaataatccacatggcacactacctcactttcttagcaggtatctgcttaagttctcatcttccattctaggactctgtaattccttaccctccctgcctcatttttttcccatagcacgtatcactctctcatgtgttacctgctacactagaattatgacccctaagagggaagagactatgtcagtatcattgattcttattaacaccattatttagaaccatgcttggcttaaagtagtagctgctcagtaaatatttatctatgtgtgaatttttaagttcttcctttatattgaattaaaattagtctcttgtgtgcagcagtctgggtttgtcttatgttgaaatacttatgttgacttctacatacatttcagattctacttctgtgtttacaaatatttttatgtaggtatatgttcgtatatgtccctctaaaggcttaatattcacattcctcatttcttttttgttcctcatatgac

SEQ ID NO: 57483 - DNA, 1133 bp, Homo sapiens
acaaacccatggaactttattacgcacctacaaaggagcacaaatgagcctttaaaaaccaattctgagactgaacttttttatagcctatttctttaatattaaagatgtactggcattacttttatggacagatcttggatatgttgttcaattttctttctgagccagactagtttacgctattcaaatcttttcccctttatttaagatttcctttttggaagggactgcaattattcagtatttttttctttcctttaaaaaaatatatctgaagtttcttgtgtttttttttttccccacaaagtgtgtttccacttggagcaccattttgacccaggaatttttcatagtttctgtattcttataagattcagttggctgtccttttcctgctcccctcaaaagatttttagtcatacagaatgttaaatattatgtattctgactttttttttcccccggagtcttgtatatttatagttttctatataaactgtagtatcttcatgaagacccaaggctcaaatttactgtccttaaaaacaattctcataggattattcttttcatggtattttcttccataatatctcattttaaaaagaagttctttatgaacttagtgtccattgtcatgcaatgtttttttttttccattctttttccctgtaattttggaatttctggtcctgggaagaatcaaacaaaatcttaagttctatgagaacttggttcattgacatattctgctgaagaaagaaaaattaaattggtagtaaaatatagtcttcaagtatacgtttgagagtgcttttttttgtattagttctgctgtcacttcatttcctgtattatatgtgatgtttttccccattaaaataccagagataatggagatattttgcactttagccttgatgaaaagtacaagatatgttcaaagcttccctaatttttttcttatttgtagccacataagtttcaagaataacatggcacacagaacaatggaaaaaagtttgtttccattggaaaattatatcattttgggttgccacatcagtttataaatttggcgctcttttaattacactctgtagaaggttaatagagcttgagccctgctt

SEQ ID NO: 57484 - DNA, 1067 bp, Homo sapiens
aaagcctccgtacccaatccaggtccttctttataaagattataagagtacacttttggggagtttgtgccaaaggagtgaaagcatgagttagctctccttcctaaactcctctcctcagggaaaagtagtggttaaaagcatggactgtggaaccagactgcctgagttcaaatcccagctttatcgctttgatagttgtatgaccacaggaaattgtgcctcaatttgctcatctattaaaagaggagactactgctactaccatgatgatcagcattagtaccatctcagtataaatatggtaaaagtgatgaggtgatgcttctgattatttcccaagtcgcttggatttgaaatttgaatcatgttattactccttcttttcctgttactcttcccatatctactcagccaccaggtctgttctaatttttcttttctaatataactcacattttccattccatatccaccaatttaatgatttcatagcaagcctattgcagtagcttctaaatagtacccttgcttccagtcatttctctcctccagtttgtcttgcctgttactgctaaacagctattcctctgaagcaccacattaatgttatttatcaatcaaaaaagtcattcatctttattgccgggagtccagacttctcagactacatttaatatcttccatatctgatcctaacctgcttgtccaaatttatttctcagtattcttcaccatacaccgtttttctttactcttttgagacagagtttcgctctgtcacccaggctggagtacagtggtaccatctcagcttgctgcaacctccgcctcctgggttcaagcaattctcttgcctcaacttcccaagtagctgggatgacaggcgcctaccaccacgcctggctgatttttgtatttttagtagagacagggcttcgccatgttggccaagctggtctcgaactcctgacctcaggtgatccacccgccccagcctcccaaagtgctgggattacatgtgtgagccaccgcgcccagcctcttaactcttttttaaatctgaa

SEQ ID NO: 57485 - DNA, 1108 bp, Homo sapiens
aaacataccacattccagccaagggtggggtggcatggttgtatgttttctacacatggatttgttcatgaggttacttcagttcatgaggccagttagcaaatctctacttaatagtgttcatttcatcctatctcatatgatagttagaagttgacatattgccttctcccacctgattgaaagttctttgaagatagaaaacatgacttaacgtttccttcagtattttgtataggacagaaacatttttcatagaattattttgactaattagataaaattttaaaactaagtttatacagtggggtctccccccaacttttcattctaaagcacacttgttattttataaaccgagttgtggcagtattccccatctaggtccataacactgtgttataggaaataaacttctatacgatgtgatcaataaaaatggaactagaatacaaactgttaaagcataatcttctcaattttttttttcagagagacacatctcaattcaaaggcagcttgctgatctagagaatttagcttttgtaactgatggaaattttgactctgccagctcattgaactcagataatcttgatgcaggtatttccatgtttgggttttttttttttcttagtttctaataatttatcatctttcaattcacaaaaataagtttggtaagagtagacttgtttattcttactgaactagaacagtggtaaaatacagttttttattcaggaaattggcaaccgcttatgtgcaaagttgctatggaaataagttattttacaactcctcaagaaaattataatttcacggatgtctaggggctgtctattcggcaagttaggaatggcatttggctacaagtaacagaggtcccaaaaaacagtgtcttaagaggttaatattctgtcaggtaaatgaagtcccaagataggcaatttagggctggtatgagagttccacgttatcagtgccccacactgctctctttctgctctactctccttagtgtttggtttgtatcctcaagatcgctgactgcgtggtttttttgaagtagacagtgtaaaaataaaaattgtacctatactctatt

SEQ ID NO: 57486 - DNA, 1315 bp, Homo sapiens
gtaacactttcttaaggatcttctaacattttaaaatgtaaggtctaagaaagacataatttaagttcttttaacatttagtttgtggtcataagttgacctttatgtgctttctgaattggaacttaaaataatctttaattcattattttttctacttctaggccagttttgagtttaatatttataaaaggttagatagttatagataggattattttgcagttttgaaacaacatacaaattgttatagatttcagagtagggctaatcacaggaaagacaaaagtcagaatgcttcaggtaagccccttctcattatataagatcagagcttgtaggtacaaaataaggccagttgtttcttcaactacagtgggtagggatcggggaggcatggggagctgagagggttccaccctcctaagtagcctcctacctcacttcgaagttgtatttgtttatattagtcagaagtggttcagcagctttgggaaatgcatgcattctctacctcctcaccatcaaaaatatgttaaacatagaaaagacttatctatatattccaaaatttacaaatatgtaatttgaagaaggtatactatatgggaaactgaaaatgcattagtaggacaaatatgtaatgattgagaagtctgaaatgcattagaactaatacatatattaatcacattttaaacattatttttagttgatctagttagtcctttgaaatcagtcataactaggtaagatgaagatagcctatctgaaatagaattgaaaattgaggaaaaagtaatagaataagttgtaaaagaccctcctagcatcttggagacatctaatttaacaagaagtttgcctgttgacttctggattaatagtgtgttacaaaaagcagattgagtattttgcatacagattgtctgatacgcactatcttaaaccagaaggtgatttcagagatgtttataggcatatcatgcatttttaaacagatcttcaagagtttcttcagtagtagaccacaggatttttagttttctaacttaaccaagctcctttctcttattttgtgctatttaatagaataatttcaataggcacgtctttattgattgctgtttatcttgttttacatacacagatctttgaactctggaaccaaaagcctttatggttacaaattagataggttagtttgtacacatggattcatttctggaatattgctgtctgacctagcaaaagatttttatgaaacatgaagaagttttacctgtttatagaaattatatctcattataactca

SEQ ID NO: 57487 - DNA, 1972 bp, Homo sapiens
gcaggatcatcagcttcaaaggtaacacactcacatgcctggctgttagttggttctggttgttggcaagatgccagtagttcttcccttgcgagcctttccatgggctgtttgagtgtcctcatgacactctgactttccctagagtgagcagtccaagacagaacaaggcagacgtcatgatatcttatatgatttagccacataccactatgtagcagtaatatcttattgattacacaggtcagccttattcattgtggtagcagattacattaagtgcatgattaccaagcatcaggaatcatcaggagccatcttgaagactggccagcacatgaagtctcccctcatttatgttttgatttgcataaaatcaataggaatttcacactagtatgaatatacaacatttgtccgaataaacataaacataagtgtttttctgggatagtccacaatactgtcatccactaacagtattgacttggtccacagcagggctggaaaagtgagacggggatgggaggtggacagaggaactacagtgagtgaattggaagtggttcagaatgaaagagttaatattccaaggaagaagaattcactcatttattcactcagtaggcatttatgagcacctaagtttttaatacggcacactcaaggagctcagtgtctagtagaaagacaaccatacaagcaagtatgtatgtagacattactgtgtaccaacctatgcaagatgtatatgtacatatatatatgtattttaatatttttttatatttttttaaatttttgagatggagtttcgcacttgtcacccaggctggagtgcagtggcacaatcttactcactacaacctctgcctcccaggttcaagcgattcacctccctcagcctcctgagtagctgggattacaggcatgcaccaccacacctggttaattttgtatttttagtagagatgaggtttcatgatgttggccatgctggtcttgaactcctgacctcaggtgatccgcctgtctcggcctcccaaagtattgggattacagtgagccgtggtgcccagccacaagatatattttacatccattgtttcagtacctcaaaaaccctgtgggatgggttatctattttacaagtaatgacacaaagacttaaaaaaagcatgtgatttgccaaagtcttgttcaatgaatgactgaaggtattttgggaaaatgaaacttatgactaattggctttgaagtgtgggtggtgaagaatatagcagtcctggaggcagttgaaaatggtgatctgatgcttaagtgagaagtcagggatcaaggcatggtttgagactcattcctggaaaggtgatagatgaagctgaaggagaggagtgggtaattttgaaggagaatgaaagtgaagaaaagtggaataatgagagaatcttgtcatattgggaatggttaaaaagtagtaatcatagtgctgggagtggtcactcacacctgtaatcccagcactttgggaggcgggtggataacaaggtcaggaggtcgagaccagcctgaccaacatggtgaaaccctgtctctactaaaaatacaaaaaattagccgggcatggtggcacatgcctgtaatctcagctgctcaggaggctgaggcaggagaattgcttgaacccggtaggcagaggttgcagtgagctgagatcatcccactgcactccagcctgagcgatggagcgagactccatctcaaaaaaaaataaaataaaataaaaagtgatcatattgtaaaactccaatctttatataactgaaagaagacaaatttctattttctttttgagtgcaaaaacaaatcctatatttttaatgtttatgttagcttttcaggatgtccagcaaagaatcctgtgggaaaaaagagacatctcagaggaaagacaccaccacctcatcaccca

SEQ ID NO: 57488 - DNA, 1049 bp, Homo sapiens
ccagtgtttttccacttcatccagaataaaagccaaaatccttaccagggttgacaaagccacctcctctccccatcccatccccctgacactctcctgacataatttgcttttctactccatggcctccttgctgctgtcccaacaagccaggcatgtttctgcctctggggctttgcccttgctggcatcccctttgagctgaaaaaactctttccctcagtattctaatggtttgtttcttcactttatttaggtctccattcagatgtcagctcgtacctggggtctgactactctgtttaaaatggcgagtcttcccctctgactcccagccttttctgtttcctttctctgctttactgactcccagcccttcctgtttcctttctctgctttatttttttccacagcatcgtctgacacactaaatatattacttgtttatttgtaaattcctgtactagattttgaccttcatgaagaactgttattattttttcattcctctctctccactgtctagaatgtctttggtacatggtaggtacttcaaacaagtttgtcctaggtctgttgaattcagaatccagtgaaaaataagtggatgtgtggttttgcattgtagaagactgactctcaccatggcagtgccacctcacaacaaccttatctgagctgtcagctggcttcctgctctgatacctatatcccacctcatctctattttgtgagcatttaggggttctggcttctagttgaatctcccttccttttaccaaagtttgtgtatctgtaaacattgttccccaccgaagttcattattgaatgtaaatgttgatttgtaatactagtgatgaaatagttctgtttatactatgctttattttgtgctttttaaaattcattttctttattgcattcttaggacaagaaagagagaaaaaccccagcaagttctactagttcatcttctataagatcagtttcatcagaaaagagaaaactggtgagtgtctagatataactaactaaaagttatttatgc

SEQ ID NO: 57489 - DNA, 1068 bp, Homo sapiens
catacataaatgtgtagactttaaacctaaagatatcaaattgacaaatgctgggagcaagcttgaccatggaattaaaagccttagtagtcctaagattgccagtgatgtgaaacctaaagccgaaggccaggcaagtgaaaataaatggtctcatttacttgttcagagagagaagatgaaagaactcaagaaaggaagaaacagtaaatttagagacaattctgaaaaatgtgtcttagagaaatggaagagaaatcaattttctcaggattataactccaacaagataattaaggaacccttgggatctagaagacagaagatcagtttcaaaatccctataaaatcccgtgacaccctccagaaacttgtagaagaaaatgtcttcaacatagattctaataattcgaagactaagcaggaagaaagagaatacctggaaagctcccaggtttcattaaatgtgactaggcagaaaactgaacatttactttcagattttacatataagcggactgttcatgagtggaaacgaaaacatcattatgaccatcaagaaagtaatgattcacattctagggaaaacctaacccaggtaaggtagtaaaaaatgaagaatataggttttaactgagagtttattaatatagttaagttttttctgtatttctatatttttttctgtttttttttttttttgttgttgtttgttttttgtttttgagacagggtctcactccgttgcccaagctggagtgcatgcagtggcacgatcctggctcactgcagccttgacctcctgggttcaagcaatcctcctgcctcagcctccctagtagctgggactataggcacacatcaccgcactgggctaactttggtgttttttgcagagatgaggtttcaccatgttgcttaggctggtcttgaactcctgggctgaagcagttcgcccctgctcagcctcccaaagtgcagggattacagacgtgagccactgcacatggcctttttagttgtttctattactgatgataatcatagatggctgattcaaatttattc

SEQ ID NO: 57490 - DNA, 1027 bp, Homo sapiens
aatgagaatgaacttactttaatgtctaggtatttggctctgtgcaaggagcttcacctagcttatttcatttattcctcacaaaaatcctaaaggaaatagatattaaagattcctattttgtgaattaacaaactgagacccaaagttgttaaataatttgcttgcataggttatggaggtaagaagaaaactattttgaaaaccacgtgtgtgtttataaatctttgttcttttactatgctccttcagagttttataaaattttttctttccataaaccatctcaagtgaattaattaagaattaattgctttcctctcttgtcagtctgcaaagtaactcaaaatatttcactggggtcttttacactttagatgcagatagtagaagagcttcatgctgcacgtgtgggaaaaagtgtggatttacctggagagttaatgagtatggaaattgacttagaagatgatgtacattcctcctctggtataccctatatgttgatgtgtatgctcccctatgctttcctaaaaattaatgtgccaatattcaatttttataatatttagatgaaaaatgttaaaatgtgctcacttgaaatgaatgataaagtaatagtttattttttaggtacaggaattagatccaatatttgtcttattggttttacatatttcatattattggatagttagatatttttctctttttctgtcaagaggtagtaattagaattatgagttgtcttttattcttgctgttataactttaacaatttcaatgatgtaaagcactgatcagaaataatgcagaatagctggtgcagtggctcatgcctgtaattccagcattttggaaggctgagatgggaggattgcctgaacccaggagttcaagaccagcctgggcagcatagtgagacctcctgtctacagaaaataaagttagctaggtgtgatgggatgcgcctgtagtcgcagctactcaggaggctgaggtgggaggattgcttgagcctgggagg

SEQ ID NO: 57491 - DNA, 1595 bp, Homo sapiens
aaggacttctcttaagaatgctctcaaaaacattctccatggctggtttttcacagtcttggccccaggtttcccgtgtatttctgctttgccaacccttaccttctctgcccactttgacttagacgattctccaccccactcccactccaaacaggggttgcaattcctatccagaggaccttaattgattggggagaaatttacttggcaacaaggatacgggccggatagatatcagcttgagagtctagccaactgtgtaaatctctgatacagttaacaagacaaagaggcgttttaaatttaattgaattttcaatgcttctgtaatatcaaaattttagtcattatataagtctgttatcaagtgtcatgaaatatttgctctttttctttagcaaataatacttcagacagaaagcttctaattgttattgacacaaatattctgatgaatcatctcaaatttgttagaattttgaagacaacagaagtaccaggtatttacagaacatatttaaagattctgattttcttccttgagttgatattttatattaacaatgatgggctttttttgccatgaacatgtctccatttagatatgctatatattaagcatattcagtgttataagtttataaaagcctttacaggttaaactagcaatctgaactcactctttttttgatctccaagagtaattatttttttaacattcttttgacacgttattttctttttaatttccattttataatatattgtctctcaatttattgtgaatttcctaaaggtagggactgtgtgctttaaaacttttacctcttggacagcaattccatttagtagctcaataaatgtttgttaaattctaagaaatctttttattttttaggttttgacaaacttgtgttaataattccctgggtcgttatgcaagagctagatcgtatgaaggaaggaaaactactaaaacgtgcccagcacaaagctatacctgcagttcatttcatcaacgacagtctcaaaaatcaagatagaaagctatggggtcagtcaatacaacttgcatcccaaaaacattgtaagtattgttctctcagagtgcctcctgattaatacttgtttgggtgcagactcattattggagggaaatggtgcaaaacttttaaaacatttaaacccattggaatgtgaaatggaaggggcattgtgatggtttgtggcttagtttaggagtctttgacttttatttttctgcttctcctagacgtttttacattatgtctatatttcacagatagtgactgtatagttgtgtatgcataattatctatatcccagaaccttggactccttttttaaaaataccattgctgagtgatgaagtctgtaagtgatctaggtttctagtctgttaatatcaccatatgcagttaatgtactgtggagacgatgttgctttcctgtggtttgtcagaatcggtaataatgaatgaggtgtttttacaataaagtagtgtatagattttcccctcatttaatttttttcaatattagtttctattaaggcatttaaaaaattgctt

SEQ ID NO: 57492 - DNA, 1074 bp, Homo sapiens
taatttttgtatttttagtagagatggggttttaccatgttagccaggccggtctcgaactcctgacctcaagtgatctgcacacctcggcctcccaaagtgctgggattacaggcgtgagccactgtgcccagctgagatatattttttaatagagtttttgagagtagttttagtttcacgggaaaattgcacaaaagacatcaagatttcccacatacttcctgcccccacacaagcatagcttccccattatcagtatccttcactggagtggtacctttgttatagttgatgaacctccatttgacatcattatcactctgagtacatagtttacattaggttcactcttggtgttgtacactctgtggatttggacaaatgtataatgacgtgtgtccaccatcatagtatcataccttaactaccttaaatctcttagatatttttgttttgtaaatacagcctagattatttctgtgtcacccacatttctagtgtacttactgactgttgcctttactaaatttgcagatggattgagtgatgagaacaatgatgatcgagtactaaaatgctgtctccagcaccaggaattattcccttgttcttttgttattctgtgcacgtgagtttcatagtcatttgactttttatttttaaaaaataaaccaaataatttaaaaaaatcatatggtatccagcataccaaggatcaaaaacatacataattttccaaatctgccagtaagcatacccacttgtatctgacagtcttataatgtgtgagcactagaggaatgagatctcaactagatgaagtttcatttcagtttaatttttatacgattcagaaaacttgaaaaagcaggggaaaaggcaacttaatatccctccaaaattgtttaaaaatcagaatctgacaggatgagacaagaaatttatttacttacatattggtgaggtggagataaggtagtttatgttggagttgtgtgctgggtgcctattacagagttagactgcctggcttggagtcctgatctatcatttatcagcattgtgaccctg

SEQ ID NO: 57493 - DNA, 1068 bp, Homo sapiens
catattggcttctttcagcaaacagcaagtttgtgctatttgtcttatgcttaatctgagtaaatttgtacttgtctgcctactgtgaattatttctcatacatagctctctgtttatttctctttggataatcacattcctgtattcaaatccagctcccacttactgggtgtaactttggacaagttacttaactttacacctcaattccccatctgtgaaatgggggtaaagttaatactactcctacctcagaagtttgttgtgaggattaaatagatttatatatatatatataaagcactttagaatggtgcctagtacccaaagctcatatttttttaaaaaagttgttattctttcttaaggtataggctgagaatcacctgcctctgactagatctcatgtgttttgatttgccatgtggtttaccttataaaaaatattttttcctcctaatcccaacctcccaaccttagggatgatagaaacttaagaaacaaaggcctaataagtggtgtgaagtcactcagtaaagaagaattgagtgcagagttattacacttatctctgaacacagatgtgtgtcatcagccttgtattcctaagcaacagttgaaagcaggtagtatttttactataaataattagagatatatcttattttatacactaagattatttataacattagaatcgatagtaaatttttattttgtacatttaaaataacatcgtttggaatacttgctggcatgtaagtcattgaataaatggaagttatgatggtaatccaaaagaaaacataattaacattattaccttctatatgtacttttacaaattaatttgatgtttttgtctgcacgcttacatacatttttacattataatcactgtgtacatgctaatttgtaccttgcagagtgtacctgtatttttcaccttcattttcttcaagtgaaacagagtattccttttaaattaatagcagttataggagatatttagttgacatagagataattttttagtttcttttttaagttggctttctatttataac

SEQ ID NO: 57494 - DNA, 1154 bp, Homo sapiens
cttattgttttttaaactcatagtgccattgaacagccatgctgatatttcagaatacaatagagtctctgaaactgtgaacattaaaacaaaaagtaaacaacagtatagcatggttattttgaaaactgttaggtagcattctgctttaataatggaaataattttttctgttctgagttttatgatattacttaattttattgtttataacttttgaaatttttgaaattattgtcaccagctttcccaactagtttgagaagttaatgtaattagttttagttccttgagataaaattgttatacctttaaattattgtttgtagattttctcacttttaatttacaggaaaaaaattctgcaggcttcttttgcttctcactgttgcccaaactttttttctctcctgaagttgtgttgtacatatagagataactcatagttttcaataaacatagtattgagtttcatgcaatggagttgaagataaatcactatgtagatagctgaggtgatgacgagaggtaccatatataactgacatgcttaccagtgtagtctcactcttctgatctctccacagtactcttatgtgaaatcacctcagcattgaaatctgtggtttgacttgtttctttggtgattttctcttttttctggggagtgtaatattctttaactttacttttactttgaagttgaccgtgctgacagaactcctgaaatctgaattcagaataccagaatcaactcaaaggactttatctataactaaatctatttaattattgctttttgtaccagagggataacttaggagtggcatataggtataaatgtatactctttttaaatttcaaaattaatattagtgttccaaagacatttttatgatgtatactcattcttccatatttttctgtcttaattttctgttaccagctaataaggcagtggattttacaacagtcaaattcttgcttcaggattctagaagtttgttacatgctttcagtacaaggtcaaattatgatggtattcttccacagacctttgctcaagtaaacaacctccttcagacatttgcagaggtaagatgcctttggaatgccagttagagtagctaattatacatgttctgaaaatgtgt

SEQ ID NO: 57495 - DNA, 1034 bp, Homo sapiens
atttggtcatgtctcagtaacttgagcaacaaatagattacctccaaagatatggtatctcctagtaactgtaaaaactacctaatcttaatttattaagtgtagaaaatcaggaagagaggaatattcattatttgattgctttgagaaactaaaatggagataaactaactttatcattttccagatttttttttgggagacagggtctcgctttgtagcccagacctgagtgcagagttgtgatcatagctcatagctctctgtgaccttgacctcgtgtcaaatgatcctccagcctcagcctcctgaatagctggaaccacaggcatgtgccacaatgctgagctaatttttaaatttttttgtacagactaggtctcactttgttgcccaggttggtcttgaactcctggcctcaagcaatcctcccgccacagcctcctaaagtgctaggattacacgcatgaaccgtcatgccctgccttttccagattttcatgtaagaggggagaaataggaaaaggatacgtacactttcgttttatgggccttctaaccactaaaaaaaataggacttgctttttgctaagatgatagagtaattaaaatcaatcttgttaataagcttcagacttacatgcctcaggatcctgagttgtggtatttttaacctctagttaattaaactctctggaccttaattctctcttttgtaaaatgagtgtaataataatgctggccttagaattgtcacgtgaattaacaagttaatatttgtggagaccttaatgtctagcatgtagtaagtgctatgtagtatttgataaagaaatccacttgcgtagtatatacactactatttaagagctaaagaaaagaggcattaggtaaatgctgggctgtattttaaatatatttggtgataaaaaattatctcaggataaaatgtcttttcatttatgtctattcattaaattcagaatttaaggtaaacagacaaaaatgggaagaatcatctttttaacttttct

SEQ ID NO: 57496 - DNA, 1029 bp, Homo sapiens
gtatggttatatatttggcagcaaaatacctaattttgcaaagttagaaaagggatgaggatcttgcaaattcctatattttctgaacactttctttttaggtaggagaagaacttcaattagcttatttgctattcatttagaaattgcttctctcctcatcttttcttttatatgtatacaggattaatttgagcacttttgttaatagttttctcatctaaccactagatagccaaggacaatgttgataatttttttttcagatagacaaaagtgttttaagatttgtttttggtcagtactacatagtcttaatttatacttttgtaaacttatgtctagattgatcaagtaactcttaagaccacagaaaccttttgcttagtatataaagatgataaagtttcatttggaacaaaattaattggagagttgaattgcaaatttctaaaaatagggaaagttctactttctatattgatcaaaaacattgtctacatgtatttttgcttaaactgtcatctttgcagagttaactaaacaggtcatgtaatccaactctgaggcacactgtaaatgcgtgcagcttcaacttgaaagctaatattcaaagcaacaatacaagtgttgtagatatgtttctgtttctgtgaaatagatgatgagctagctgcctgatttagaagctaagaaggagggtgaaggtgagaaactttaacttgcttaggttttatgtttgtatttcacctttataaaataaggtagaaattatgttttaaaaaacaaaaaaaggtaatattttaaatccaaaaatatactagctcatgcccaaatatgtttggtttaacatgtaaaactttgcatatgtgagtttcatgaactgaagtagctttatttgaaatgtttgagataatgagtgttttcttggtttattattttgactcatatttggggtgggaaagaggcagagggaatttctattccttataaataggtgcattttgaggacatgcttttatattaaaa

SEQ ID NO: 57497 - DNA, 1249 bp, Homo sapiens
gaaaagttaaccattggatgccgccagctggttgagatggaatataccatgcagcagtgcaatgcatctgtttatatggaggccaaaaacaggggatggtgtgaagacatgctcaactataggatataagtactgatttgtaactttaaaggaattgcatttgtccttaagaataacagagtagttttcaatctggtcactcttttgggccaaacccaagagaattttaagaaatgtttcataggtataaaaaggtgatcgcctattactgacagtctcattgtagctctaaaaagcctaatgtatccactgtggaataaactccatagactcaactcttctggagttcacaatgcctccctacctctattcttgatagtgagccagtatctctaaggaaaggagagccgtatttttagtcatcctagggcaggagccactgtggcatctgaggaagacccagggtacagtattagcatttctttcaaccctaagtatgggcatgtgaccagagacactgccaaaccctaagaaatcattagggcatgatcatgctcaccatatttcacaaatgaaatcttaatgtgggctgttttttatgatcaaactgtcatccatgttgacctgatgaaaataacaccctccttcacctccctcagggtaatgaaagtagaaatttgactgaagctcctacttccttatacagcctttccttctgtgggcttgtcacttttcagtacatttctagtggggaagagcagggcgacccctctgctgggtttctccttaaatgtgaagcaaaataaatttatataatggaatttggtggcagtgactgatgtttgtctctagctaaaaccaactgtttagttgactttttagttataggataagttggaagtccttgtttactggaatatattatgcttttgttaacacattagattaaatagaatttggtattctattataaatgtttattttttaaagcaataaataacttatttttggtaagatttggctttttacttccaaattgtttctgatatgtacataaggtatgattataaaagtgactgtctgcaataaaagagaacttgttcaggatattcactagttggtgtagaacctgttaagctttgggtttgccagattagggaaccacaccaccagccgcacagatggggctcaaagtgctgtcagagattatgagcttctgggcaaatggggaagctttaagagggcatct

SEQ ID NO: 57498 - DNA, 1089 bp, Homo sapiens
aaattcaatctgtcaatgtagttttagtccagaaccaaaccagtgatagttaggaattacagagttaccaaccaaactgatttgctttcctggtggttctttgtgtaacagatgagagaaataaagtggcagagtaccagtgaacatttggagaaaatacctaattattttcttcctaacccaagttagccactgaatagtcatctcagaatagtcacctcatcccagttggcccattaggttcctgtgtgcttcatcttctgtgagaaaaaaaaaccttatatcattccttatttcagatgtaagatgccaggtgagttattttccacaaatttcttaagctcattactggaaaaaaaaatttctcaaaacttttagtaatgaatgagtgtacaagcagcaattggatattaatcccatggtgcaaggatttcctgcaaagtacctttaatgtgtttaaatcagcagcaagcattaggacatgctattttggccccataagttaggtgtgtagcactacacattagacaccaagtcatcccaaccaatatttatccatatgaacagataaactgaacaaaaacatagttctgataaaacctgcattcacaacctaatgtagtttaaagtaaattttttcacaattgagggctgctatttaggactgttttgttaataataaaaacaggaattatatagaagataaaacaccattttttactgctatataatgtcttgctatataaaacataccctcaacaagtcaaaatatttaaaaccagtgtttcaaataccaaaaatcacagctatgttactgttcagtaactccactcaaataaatgttagtactgcattcttgaaggaaaaaaactgcagccaaggcaagaactctgaagtttgcactcagagtttaaaagacagacccctactctgcaaactgaagactgccactctgcttcaataactccagcctgccacattttacttcaattggtaaagcactctgctgagaatataaaaagttataaaaaggcaatcataaaagattaaatattggtaggcatgtaagcttccttttaataaaaacaa

SEQ ID NO: 57499 - DNA, 2175 bp, Homo sapiens
cagtgcacagaactattctggtttgctacttagtagctgcatctgtaggataattgtccagcttcttcctgcttttcttcttctctgaaataataatagtaactaccacagagttggtgaaaattgtacttatttagatgctgctactgcttcctctccctcccccttttaagttgcctaagttccacgtgggaatggtttttttattgatttgattcccagctcttagagagtatttgtcatattaggcatttaataaattctttttgacaaaatgaacaggcatttctatttttaaaaccactgatttttaagcaaaagacagatttaggggagttttaccttattacactttaatctctggatttaccccatctcatttctcttttaggaaaactgtttgtatgtggtggctttgatggttctcatgccatcagttgtgtggaaatgtatgatccaactagaaatgaatggaagatgatgggaaatatgacttcaccaaggagcaatgctgggattgcaactgtagggaacaccatttatgcagtgggaggattcgatggcaatgaatttctgaatacggtggaagtctataaccttgagtcaaatgaatggagcccctatacaaagattttccagttttaacaaatttaagaccctctcaaactaacaggcttagtgatgtaattatggttagtagaggtacacttgtgaataaagagggtgggtgggtatagatgttgctaacagcaacacaaagcttttgcatattgcatactattaaacatgctgtacatactttttgggtttatttggaaaggaatgcaaagatgaaggtctgttttgtgtacttttaagactttggttattttactttttggaaaagaataaaccaagaattgattgggcacatcatttcaagaagtcccctctcctccacatttgttttgccaatttgcacattaaatgactcttccctcaaatgtgtactatggggtaaaaggggtagggtttaaagatgtagacagttgggttttttaagggccctttttcaataactggaacactctataacaaaggatacttatttaaatagatgacattgactatttttgtttttattaaaaggaagcttacatgcctaccaatatttaatcttttatgattgcctttttataactttttatattctcagcagagtgctttaccaattgaagtaaaatgtggcaggctggagttattgaagcagagtggcagtcttcagtttgcagagtaggggtctgtcttttaaactctgagtgcaaacttcagagttcttgccttggctgcagtttttttccttcaagaatgcagtactaacatttatttgagtggagttactgaacagtaacatagctgtgatttttggtatttgaaacactggttttaaatattttgacttgttgagggtatgttttatatagcaagacattatatagcagtaaaaaatggtgttttatcttctatataattcctgtttttattattaacaaaacagtcctaaatagcagccctcaattgtgaaaaaatttactttaaactacattaggttgtgaatgcaggttttatcagaactatgtttttgttcagtttatctgttcatatggataaatattggttgggatgacttggtgtctaatgtgtagtgctacacacctaacttatggggccaaaatagcatgtcctaatgcttgctgctgatttaaacacattaaaggtactttgcaggaaatccttgcaccatgggattaatatccaattgctgcttgtacactcattcattactaaaagttttgagaaatttttttttccagtaatgagcttaagaaatttgtggaaaataactcacctggcatcttacatctgaaataaggaatgatataaggtttttttttctcacagaagatgaagcacacaggaacctaatgggccaactgggatgaggtgactattctgagatgactattcagtggctaacttgggttaggaagaaaataattaggtattttctccaaatgttcactggtactctgccactttatttctctcatctgttacacaaagaaccaccaggaaagcaaatcagtttggttggtaactctgtaattcctaactatcactggtttggttctggac

SEQ ID NO: 57500 - DNA, 1372 bp, Homo sapiens
ttacaggactggaaaccgtggtccagtttaatattttaaacataaatctttatggttttattttttaccaggtggctataacagagaggaatgtcttcgaacagtcgaatgctataatccacatacagatcactggtcctttcttgctcccatgagaacaccaagagcccgatttcaaatggctgtactcatggtaagcgcattatgttgcaggagcaacccctatttagctttttcctcgtaacttcaggatgttagaaattctcatctctcacttttggcatagggccagctctatgtggtaggtggatcaaatggccactcagatgacctgagttgtggagagatgtatgattcaaacatagatgactggattcctgttccagaattgagaactaaccgttgtaatgcaggtaataatagttttctcctgagatatccagtatttaaatatgataattaaattatcaatatgtaactttattttatacttacataggagtgtgtgctctgaatggaaagttatacatcgttggtggctctgatccatatggtcaaaaaggactgaaaaattgtgatgtatttgatcctgtaacaaagttgtggacaagctgtgcccctcttaacattcgtaagttgattttttttcctttttttttttaaagaccttcaaatcaacagtatgtgtagtatacacttagagtctgggagatgtagcaataatcttgacttgacttttcttgtagggagacaccagtctgcagtctgtgagcttggtggttatttgtacataatcggaggtgcagaatcttggaattgtctgaacacagtagaacgatacaatcctgaaaataatacctggactttaattgcacccatgaatgtggctaggcgaggagctggagtggctgttcttaatggtgagtgttgggatttggagaggtgaagagtagatagtggcaagactttgttctaaaactctgagagaaaaggccaatgactatagttgtacagttaagaattcagaagcagtcatctcttttgatgcaatggagattagggtgatttgtcctttagaaatatattttctaatcaaagacttataatacttgatatataacttaattcaccagtcttttgatgggtgcactgagtgaatttccaagtcattttcttctataaaacatatccttaatgcatcatcttgaattttgagtttccccttctttacagccagaatttaaagaatctgatctgcaaaacaaaggcaaatccctagtcttttccaactgtctactccatacctaattggaaatacaacctttagactattttaacaagtttccaaagtattaaactttttaaatgtaga

SEQ ID NO: 57501 - DNA, 1846 bp, Homo sapiens
tttttctcaattacttgttatatggctttttgcttccactagcaacagaaatttccattagaaattttacctatccatgtgttctggccatctggaccagcacaagtgggatgagcaaactaggccaggtgctgaagttgctacctgttcatttggcagttcctctcagagtagtctttactcttccaattccatatgatcatatcctttggaagtggcaaaggctaaagtaattggaaggaagccatcaaggaaaactcatacatgagaacacatgtgtaaagtagttctcttacaatcatttggaaattggcagctttgttcatttctccctctttagtattcctgtatattctacttttgtgaatatttggttgtttttagtaatgtttcatttctgattactattttcttgtgttttgatgtaattttgtctagaaaaccactctataatacctataaggtaatcctaaagaaatattctttaagtgtttcttgtaattgccacttttttcctgtcaagtactttcagagaaactggatgaatctatatctgcttacgttttgctggcattgtatgaaggatacctgtacatatgatttagttaggtttgacaatttcatgaaaatagtgggttaaatgtattctctgttaattcacactattttaaatttatagcattcttttaaaagattctatacttaatataaaaataattatagattggttttttcttctgctgaggtcttgatttgcaacatgtttttcaaattgttaaaactgagctttttcttacctaggctaattgtgtaggcgtagttgtctcatcattgagtggagatggaagtatgccagtaatttgtgtcatttggaaagtgttggcttgagttaaagttagtgtcctataaatgtcatatataggtgaaggatactcagtgttgtggaatagctcaggaacaaaggtacatcagatgtggtctttggctaggtttctgtagctaccttttgattttgcagaaaaagccaccacgtgagaatggccataagcagataagtagcagttcaactggatgtctctcttctccaaatgctacagtacaaagccctaagcatgagtggaaaatcgttgcttcagaaaagacttcaagtaagtatatgacacttgccagattgttttcagcttacctatttttaagaaggagtgttgccaatttaatacctcttaaattgactactcgaggaaaaaactcagaagcaattaaatttggaaaacgagagcagattgttccagtctgggatgtggagactggagtccaattcaggatcatatacacaaaccaaaagtaataattacatcttaaacatggaactcttgtgcttacagataacacttacttgtgcctggctgtgctggatggtatattctgtgtcatttttcttcatgggagaaacagcccacagagctcaccaacaagtactccaaaactaagtaagagtttaagctttgagatgcaacaagatgagctaatcgaaaagcccatgtctcctatgcagtacgcacgatctggtctgggaacagcagagatgaatggcaaactcatagctgcaggtaagaacagaagcattcaactggctaagcatgtagatgggcatttttgtgacatgcaaactttcaaagagagggtttaatatgccatctttcacggcaatccaataagatagggaaataacaatactattgaatatggctaaccttcagttcaatgtctgtatctaatttttaaaaaaattatgtcatggctaaatttttctaatattcaagccaagactaagcagtttatttgt

SEQ ID NO: 57502 - DNA, 3619 bp, Homo sapiens
cccagcaatggcaaattatatacaaaggtaatcaactgggtgcagcgtagcatctgggagaatggagacagtctggaagagctgatggaagaggttagttttaaagtaaatgggattcaaccatttttaaaaattattttgctataacatgaaggattccctttcacttttattttataaccatgaccctaaagaatttaaattttgctataggtacccctaagctgagaaacagggggggtgtccaggtgagctgaatgaactgttcagtttggtcttctgcttttctttttttatttctttgcttattatgtgctgttaactttctttaaagtagcatgtaatttgctttagaaatgggaagtggtactgaaattttctgtagattcttaatttttcttcacaggtttttgctttaaatttgacaagtaggtaaaagcttctaatggttgttcctccccattgatttatctccccataggtttattaacaaaactaggatacccaagactgaagaaacaagaagaaacctcaagtgtattgacacgtaaagaagcagcagtcctgccccagttctcctaagaaaaatccgctgtgggcagagaacgatgatgatttaatggtgtttactcctttacaggattcttgtctttaaagctgtgtgtttttcaatggtgttgttcatacatatagtcactcacttaacttgggctacttttaaaaaaaatacacaagataaaattgatggagaaatggtgggaattgaaaacacgcaggtggagcagtggagtaaccttgagtttctctctccacttaaacctttcggagttcctttatgagggcttaccaaatctgttaggcctgcagaaacactgtcatcattatggtctaaaagggctaacagattatctttaaattctatgattcccacttgaaagtcagatgcatttgccatgtatttgcatctgtctcaatggagatgactctacagcttgcttgaatttttgcatttgttttttctttgtttttcttgacattgcttacaggaaggaaatatgtttatgcaaaccagaccacttatctgcaaaggtgtaaactatattcagtattttattgtaaatatgtatattctttaagagtatatattgtactagtgctttttttcttactgttatatgatagaagctatgaaaaaaatgaagatttctttcaagccaatcaagccaacgactcttcagccagtattggaagattttgtatttgattttggttttttgtttttgttttttaatttttaccaccatgacatgtatttttctttacctccggatcctgccagagtaatatgtcaagaagctcaagaagcacactggaggttaccttgaggcgtttgtgtaatctgcatactagtggagtagccatggtgaccgtagccacatgggtgttctgttgctgttttgcaggttcaaaccttgtactactcagctgatcacaagctgcttgatgggaacctactagatggacaggctgaggtgtttggcagtgatgatgaccacattcagtttgtgcaggtacacattgcacagtctgaggtaacctcaggttaaaatttgactagagaatttgatagcatacttaaattttcctttaataaaggaaagtggaccaatttcattggtataactggacagaaacatttttgggagaaaacaagcatatcttagagttagtatttttgccacatgaaaagatattaacaaattaggaaaccctattgaaatttttttctcataaagcaggaattacaaacagtaaaggccaataagatggaacaatatagaaattatttgggaagattatgaaaagcagttgtttgtgtcaggcatgactgatagttttttttaaaaaggggcagggggacttaaattgttgatggctatgaaagaaatttttggatgttaccttaactactgagctgtcttactggaaattagaaatggtatagttaagatggactatacaatgtaataagtctaaaagtggtggatcatatgttaaaacctgatctagatgtttctttaaccaagatgaattaaaatatagtagagttccactgtgctgattgagttactttgccttttataaaatccaatttcatttttcccctatgagtaaacacataattattcagacacattatcaacaattactagagaacaaacttctcaagtataaattttttaagtttatggacaaatacagaaaagtacacaagtcataattaccacatagtgaacctaccagtgtaaacactacccaagtcaagaagaggtttctagcatcccggcagcctttctcttgcctcttcccaaccgtttccgtatagtgctcccaaaggaaaccattatcctaccttctgacacattaaattagtttggctatgcttgaaaaaatttatataaatggtcatatagtatatatttttatttggcctttagctcaaattatgtttttgagggacaagctataaagcagtcgactcagcccagactaaggaatgcttttctttaaaaatcagagggtaagtggtagacttagtagtagcctatatggttacaaattatcaggtgttagctctctcaggtgtcctgtggcaacagtgagtgaatatttctaaaagttttggaatttgaattagttgagaacctatgtttgtgcattttgaatatattgaggatattttcccccttaactctaaacattttgagttaacattttaaaagtacattttcaacatgcagaggttgagtgcccaataagtggcaggccataatgttcggtatggcaacacaaaaatgtgtaagagacagtttctgcttgtaggaccttctaagagtgggcaaaacaatacaggcttataagaggtagctacgaaaggcctaaaggagaggacacagtgagacaggagagaagccagggatatttcacacaagaggtaacttttgagcagtgttaggatttagaggagtctgcatagcagataaagggagaggtgttagcaaagagtatctgtgaggatgatactcttggaattgcaggtcataagactgggaaagtaggtaaatgctccctgaatggggcttatactttatcctataggcagtgggaagccttaggtaagaatacagtgatacgaaagttttgcattcactttagtaatggtgaaaaactggggaacagtctattaggtggcagtctttgggctggaatatcccaactgatttctggttttattttctaaaattgttgccttggacccttcctatttttataaccagacacagaaaatcaataaaagtttgagcccagtttatagactattgccagcagtagttcaggttttaaaaaaatgatgagggattaatctaggggcatgaaggagaaaggatagattttttatttatgtctatatataaatagacatttatatttacaaaggttgacttagcaggccttagtgattgcttagcaagattagggaaaagaaagaatttgagaataagtgggattctgacatgtgtgactcattagaatgtgatgccatgaatagagatcatga

SEQ ID NO: 57503 - DNA, 2513 bp, Homo sapiens
gcccaaatccaaggaaacctatatgtactggctatttcaccctttcaggcttttagattacttattatatgggtttgggcaggatggagtttcgtttccttcccttcccttcccttcagaatgaatttgcttaatgggcatgggaacctggccaaaattgtcgagatagctgctactgtttgaatcctttaaaagtcttatgaccaaagtattagggaacaaagacttggacattcaacacaggtgttgtttcagctaagtttttgtgtgatgaaatttttatgtgttgtttataggatggaatttgagaataaagagactgtattactctttagcattatatttttaaaaccatcagttgcaagtaaaataactcagctttcttttcatcatctagccaaatttataaggaaaaatgattcccaatggatatttgatgtttgaggatgaaaattttattgagtcttctgttgccaaattaaatgccctgaggaaaagtggccagttctgtgatgttcgacttcaggtatttaaaacttaattcaaaatttatagaattttttattactaaaagccataagttcttagatttgcttatttctttttcataggcatttaatgaaatgattttttaaaagaatactgagaaatgtaagataaaggaatctgatatagtaattagctagagaagcacataatccacaatacttataattataattcttcataatttcaggtctgtggccatgaaatgttagcacacagagcagtgctagcttgctgcagtccctatttatttgaaatctttaatagtgatagtgatcctcatggaatttctcacgttaaatttgatgatctcaatccagaagctgttgaagtcttgttgaattatgcctacactgctcagtaagtacatttgaagtaaaccatataattagggaatatcttcagaaaattccaagtcttgctacatatatttaaattaagtgtgttttaaggctttggtatcataagtaactttttttttaaataggttgaaagcagataaggaattggtaaaagatgtttattctgcagcaaaaaagctgaagatggatcgagtaaagcaggtagagtatcagaagtaaataaaatcatttatggagtcttattttgtgtgattgcaatgctgaatttgtcataaaacatcttgttagtttcaaggacttgaacatgtcccttttttccctcagagtagtcaatatgttattttaactgtttggctataataatgtagcaagatcacacttcttctcagataatttgggctgaagtctgaccctttcagcaatcttctctggtagggtggctatgtcagcctttgatagcatgaattaaaattaatatttttcttaagagttaatcacataacttatatcctcaattctgtgttctcctaaacttcctgtgctctctaaaagtattccttctagaatttaatgccagtaaaaagtacttttggaaaacaggcatttaatcccctaatgcatgggggtcagtaaacttaaggcctactggccagctgcctatttttataaagttttattcaaacacagccatgtgtgttcatttacatatggtctacactgctttccagctacagtgacggaattgagcagttgtgacaaacagaatggcctacaagcctaaaatgcttttactatctggccctttaagaaaaagtttgatttgctagcccttcttctaataccactcctttgttcaaaaatccttccttaatttacagtacatatccctgcatttagtttctagattttcccttatatagttgctgtctttccaaaactatttcctagttatcttttctccaaccaaattaaattgtttgcagcatcttctctacttctgtctgcattcaacatcaacatcatctctcctgtagagcccagttcagatactgcgtttcatgaagccttaccaaattattctacttgaaaatacttatgtgaacttacatagcatttcaatttgttgtacctctccttaaactaaaacttacatatctgtatggcataattagatgtttatcatttgtatacgtgttattaccactattaacatttgttgtattaagacagtgatttttgattctttgtatcttcacatagtctttaccacactgaacattaaatatttgttgaataaaagatatgtaagtgttggcactcatatatttcttttccaaggtttgtggtgattatttactgtctagaatggatgttaccagctgcatctcttaccgaaattttgcaagttgtatgggagactcccgtttgttgaataaggttgatgcttatattcaggagcatttgttacaaatttctgaagaggaggagtttcttaagcttccaaggctaaaggtaaggagtaaagtctataaacagatatatactatctagttccaggcgtggaatcttggtctgtgtttcaagcaagtgagtaatgattatgaa

SEQ ID NO: 57504 - DNA, 1595 bp, Homo sapiens
acactggcgcgggtgaggcaggctgggaggaacaagagttttttgttcgaagggttttggggggcctgggttagggcgccgcgggcggggatgacccgccggaaggagggcgcgggactccccgttcttgctgtcaggaacggacgcctcgcctcgggtttgcctggggtttgggattctcttctggaagagctctcgagactcggctcgtgtgggcgggcagccagccccgggcctggagtagggtggcacggagtccccgatcgccgtgggccgcggggtcctttgttcccgctccacgttgcccgcttttcttgccaagcgcggggagaagggggcgggaggagggagggagcggctgccctgacgtgtcggtactgagtgactgcggggctggccaatccggggcgggggtgtgcgggtgctgggggcctcgcctcgcagcctgcggagtgggcgccggcctggctgcgcgaggaggaaggcctgggacgctctttcttttttatgaaagaaatcagtggcaagatttgctctttttccgtccctccacgcttttggttaagtgtctctgattataagctcttgatgataggaaggtatcaggctgagggttgaacctagggtaacttgaaccactacttgagaactacatttactttttcccccaataggtagtggacatatctattggtttgagacagctgacatttcaaggagaaatcagatgtccaaaagggcgcatttttgtgatggagcgtgcagtgatggagcgttagaacaccttggcatcaagctgttcgttgagtgtgtcgtggtcttctgtctactaatagatgacaactctggaagcctagtaccactcttaacagatgaataagtacagcatggactagactgccacaggccatgctttcttttaataattctagcaccagtgattgatttaggaaaaacaaaatactgatgattacttttaggctaaagcctgctgacacttctgtcttaaagatactgaaagagtagttgtatttgttaagtctggacgtgaggtaaacatggactttagaattgaattgagactagtatcatttaacgccagctggcaggctgcttatcaagcttataatttggtagccagaggtaaacggaacttgagccactgaccaaagagagccctggaatggttttcctctgtgttttcctaatagatgatatctctggttaactaatagatactaatttctatagccattgtcttaatttgtagttgattttctaactttccccccaagacaaaacatttcaggttttagtcttagttttaaattagtgtctttttggctacttgcttttggaaggtgggattttttcttgcttgaaggatttgttagatggtaattaaatgtagttttgcaaatacgtttttaaatataaatgttttcctgttaaggaagtatcttaattgatattaagatgaagtaacactaagtaagtcatttcatccactttttagcagtgcgattgtatagtcaaatcctgcaagtaggaattattaaaggttgggggtcttcccaccatgtcatgtgcatgtg

SEQ ID NO: 57505 - DNA, 1009 bp, Homo sapiens
gaaaacacacctgagaagtggtagttcctatcctaacctactggggccctttataccaggtgccaaacttcattatccaccccaccaccttgcccgggagggagatctgtgaaagcgaaacgtgatttaagctgggatctggcagcaacttcgtggactctgaagggcacgtgggaaaggagttttgattgaaggtgagggatttagtgaggtaaaattatatccaaattagagtttggtaaaggcttccaggttaatgtcctgttaacgcttatcctgatttgtggaggacacttaagctgtctaggcctaaccttgtgtttgatcactcaccttaatttgtagacattctaggagctctttgtcaatgcctcttaccatttttatcattaactatttatgcttatagaagcaggaaaaataaattgtgggagccttcatctgcaataggtttacaactttttttctaaaatcttgaggcaaggagacttattcccccgcccctttttttctcacagatttcttgtatgtctccctcgccccgcccgcaccccgtccccccgcccccggacaattaattgtaggaggaaacaagaactaagatgtctattcgagtgattttttatatctttcttaaggagaaaaagactgacatttgacactgtgctcttgttttgtcttgctgataataactgacagcaatgtttacttttcttacaaatgaaactatcagggtacgtacttttaagctctttaatacaatgggtttcatccttccagtgggagagtatgaattgcccactctgcgtagacacatgactgctggcctgttggacacatggtcacacttgctatactctaaatagtgtctttgtgacctgaaacagtcaacacttttcttaaagctacagtgtgcccacactcattgtatttttgctttgtatggaatttcaaatttacttattaccttctctatgaataatagcataacttatgcattccatttatg

SEQ ID NO: 57506 - DNA, 1052 bp, Homo sapiens
tcttgagcccaggaattcaagaccagcctgggcaacatagtgagtgagaccccctttctaaaaaataaaaaatccaagggttataattctccaaatacatgcctcagaatacttcggtcttgaattattcctgtcggctattacattatccaagcaaacttttactaataactttttgctagttttctaaagtaattactgttaaagtttttgagaacaattctagcctcctcatccaacaaccaggattccctaatagttgctctttctttcaacagtttcttaggaattaaaacttcttatgtcattcaagcatgtatcctgtaacactgtataaccttcaagcctgctccatctttggaaatgtcatattcagctgtgaactctgatgtatagcctaggcttcaatcaaaaaaccttattttttaatcaacttgattgctgagaatgagcaaggcatggaataagcagcctttatactaagctgagtttttaatgtaatcactaaattaaatgtataaacaaaagtgtggtaacatatagcacaatctatacaattcagaaagagatcttttgttgtgatcgcattcaaaactggatacctggtgaatgaaagttacccaatataattcagttggactcttcaggaagtagtgctgcaggaaataaaaacaaaaagaataataattcaattggactagctagccaactgttgcctgtgtaaactgatcactcaacatgaagtcaagagactacttcaatgaaaaaaaccagaaagaacagagctgttgggttgtaaacatgagttctcctttcttgtattcttattgtctaaagatgagcagagtaaagtacaaggagaaaatgatgttttgcaagagttgagtgaactggactttctttttttttttttttgagacagggtctcattccagtcacctaggctagagtgcagtggcacaatcacagttcactgcagccttgacttccctgtagctgggactacaggcgcgtgccaccatcccctgctaagttttgtattttttctagag

SEQ ID NO: 57507 - DNA, 1049 bp, Homo sapiens
aaaggtaagccacttggtacattgtaaatattcaacaaacatgaaggcctaatctaagagctgcaatcagatctgcgtgggcacatcccagactcaactggagtaagtggaggggtctaaagaagtggtcttcaaactggggtactcataactctggggatataaagaccttccaagggttcacaggcatggatagcttaaacagaagcaatgttcaaatccccagctcccacgtgtcctctcataacactgctctacagaagagaagtctgcagcggcctgtggttccctttcccacatcctctctcgcaaccaaaggccctgcaaccattttgtaaaagaaagggaaggcaaagccccactgggacctaagcttcctgtgtgcttgctccaggggtaaacacctctgggccaccaagcagagggaccagggaatggagatttcgggagaggtagggcaaggtgaagaaagccaaagcaaggctccatgcctttaccctgattttctctcccaccctccccaacattgtgtctcttacattcagaagtgaggttgcacagacatgcatgtaatcacatttattttcagtaaaaataaataaataaagtcaactttttcctgacagaaacagccagtgtaatttgatgcagataatttgctctatgaacaatttctgacctgagacaaatctgaaactctgtgattttaaggaaaaggtatttaaagcacgaagataatactgttaaataaaaatcacaagaggccattgttttggactaagtttctgcaccaggcctcaacagaccagataaaaaatcagaatgggatcactcatactaaagttcacttctaccaaactcaaactaagtatttatttgaccttctgagaaatcaggagaaagaggtaacagctgattttccaaacaagccagtttaaatcttcaatcagtacgaaaaacttctacttaaatccttacacatataaacagttaaaagttttaaaaagtggtaagttaaaatataattagatactatccttttttacgca

SEQ ID NO: 57508 - DNA, 1039 bp, Homo sapiens
ctgagtcaatggaggagcccgcagctgccgggtcacttggtttcaggtttgtgagagtcagctgagggacaagagctccgggaactttgaaggcaccctctcgagaaagcgttttctgtcttaaatattttcctgcacaggtctgaaattgtatcagtagaaattcatgtgggggtcttgatgccttctttagttttcagcaatctcatgatagaatgagaatgtacctggtcaccaggacgctgttgataggctgagaatgtggggtgtggtttctggaaaaggactgcagggaagccggcagtgaaggacagatgggccagatctttaggttctctcccttccagctttgcccaggaccagcctggatgagcttctcatggggcttacagaaagaagggtgttttggttcttccttgaaggtattaatacttacttctctgaatgtgaggctctgggctgggggcacaaggctacagtgattgcttcattgtttggtggtggagtctttgagatccttcttttgacctttcaggctctacaacattttgatcagaagtttttgctttttgtgtaagggatgtggtgcaattggggaaggtgctattggggtttttagtgtaagggatgtggtgcaattggggaaggtgctattggggtttttagtataagggatgtggtgcaattggggaaggtgctattggggtttttagtgtaagggatgtggtgcaattggggagggaagtgtggagaacaaacaaaggaaagcacactggccagccatacatagttcagtaaaacaacacacttctgtccctgccgctactaaagttcttaagctccccaaccttttttcttttaccttatctcttttttgggcctctagaaggaaaatatccgtctttttttcttactactgactccagtgtgtttataactttggtatttttgtttgtcattgttttggcttaaatgtgaatgtaaaggagagttcaacagcagtaaataaagtgctgagtagcctgtagaaatgcttttg

SEQ ID NO: 57509 - DNA, 1046 bp, Homo sapiens
tgaagccatcggaataaatgagatcatccaaggagagagtgcagactgagaaaaggaaggagacaggatagaacttagagaacacagtcatttaaaataagacagaaaaagggaagttcattatggactctggaaaagggagtccaggaagatagggagaaaaacaggaatgagtagtgtttggaaatctaaaacgttgttagttttaagcaggagaagttgtcaactctgtgcatttatagagttcctgaaaataaagggtaaacaatatggagctcaacaggacagttttactggagttgtggagcttccatagaaggctaaaatgatgagttaagaaaatggagctggtgagtacaggatgtttctttcatgaaagaagagcataggccccggagtctgatgtttggtttggaagtctggctccaccagttacttgctgtgtaatcttaagttctttgtgcttcagtttcagtatgcccaagaagacagggcctactcctagggctgctatagcaaactatcacaaaatgtgtgacttaaacaatagaaatttatcatctcacagttctagaggctggaagtgcaaaatcaagatgttggtagggtagtgaaggctgtgaggacaaatctgtttcatgcctgtctcccaacttctagtggtttgctggcaatctttgacgttccttggcttgtagatacatcaccctaatctctgcctttgtcgtcacatggtgttatctttgtgtgctgtgtcagattttccttttcctttttttttttttttttgtgagacagtctctctctgttgcccaggctagagtgcaatggtgtgatctcagctcaccgcaacttctgcctcccaggttctagcgattctgcctgccttagcctcctgagtagctgggattacaggtgcccaccaccatgcccagctaattttttgtatttttagtagagacagggttttgctgtgttggccaggcttgtctcaaactcctgacctcaggccatctgcccacctcagccgcccaaagtgttgggat

SEQ ID NO: 57510 - DNA, 1046 bp, Homo sapiens
ctacagaggggtttgcatttgctttttttgggattccaaaattagcttgtggactaatttttgggctttggattccggtgctgtacagctagtataacctctattatctgttatatgtttctggcttagggtttcaacttctcttaggagatttttttgacagatggcaagctttcttgacagtttttttgggttagtgggaggaatttttccttgttttactgatagggctcagctttataaaagagtactctattgtagctctctgaccaaaaaaaggctgataccataaaaatcgtgccgacatggacattaacactttaatagtcaaatcctatgtcaggatttttgtgctgctgtggtgacagttgaagtttatttctgttttgagcttcttttttattttgggcgttggaatatttccccttattcttacaactccatcctaactatttctttaaaaggaaattctatattttgcccagtgtttctgttttggaggaagagtgtcttgcatgtgaacttagtctgtcatgttactgaaaggtcacttctcatatcttcacacatttccttgcctctatattcttttcccatgtccaaatttctccctttcaaaaaaaggtctttctcatagtaaaatatttgcttacacagaaaactgtaggcccagatgatttctcagaagatctttaccaagtattcaaggaaaaataattataattgtaccaaactactttcctggcaatagaaaaaaggttatacttcccattaggctagcataaccctggtaccaaatgtcagatatgaatactacaagaaagaaaaattataggtcaacttcctttataaacctagaggcaaaaattcccaaatcaatgttagcaaaccaatctagcaatatataaaaaggagcagatgtaatgaccaggttgtttttatcccaataataaaaagattagtttaacactagaaaacaaataattttactagtagataaagaaaaaatcatatgatcatctaaatagttacataaatagtatttg

SEQ ID NO: 57511 - DNA, 1042 bp, Homo sapiens
ctaattattctttaagaatgtggtaatgaggtgaaacacactgtttgccagcaggcataatagatcatatttcatatcactcatttaaatcagggcattaattttcattacaagataaagtcagtgatagaaacagaggcaaactatggggaatgaaaagtttagcaagtataggcaataagccacacaatagttggctcttgaaatgctgatctcatttacttgcagccagacttgttgaaagatggctatcagaagaaaaacaaaaatcccctctgtggtgcaatattaatgttaatagcccttaacaaggaaaaaacatgaagttcaagttaactgccataaaggataattcctttgaatgcaacatgaagccagagagggaaatatagtttctactttttgcattattattattcctcaccatacgtttactaaacacctatcatgtcaaaatattgagaaagaagcccacttcgttcagaaaacttacaattggtataaccaagggccaggatgactctcataggtgacagtaagttggcttcttacatttaatgaatattttcatgttttgatttgcattttatctttttcctcctctgtgtatttcagtcatagattagatgatgggctggaaaaaagtaagaatttttagaggagagggatgatttgtttgacaggaaagcatgtaaaaacaggtgggagaagttggcttaatccattgtcatgtcctctgagaagagaaaaagcagaaacaaaaggtaggtaaaccccaagactgaatgatcaagagagtgcatacccttatgctgcatctgccacgtgaatgaatgagtaaacaaatacacttaaggaatgtgttctacaagttgatacaaaacttagtatatctaaggcataaggaatttagggcaagttaatcacacactctcaaagtcaagatggccagtatggtttggctgggtgtggcggctcacgcctgtgatcctagcactttgggaggccaaggtgggaggatcacttgaacacaggagttcaa

SEQ ID NO: 57512 - DNA, 1038 bp, Homo sapiens
gtgtgtgtgtgtgtgtgtgtgtgtgtgtgtgtgttcagtctttagtcaatgaaaatagccatattgtaatgtggagtaaatacaaatctcttttttagtaattacattcttgtgactttcttgtaataaaaaaaaattcctaaggatgaagcttacttcattaggtttctgctggggatgaattgttttgaaagcttggtaaaataaatagggtcattgtgagagtggaaaaaatatatatgcttttagcatcacagatgcttcatttattctgggataacagaaagcatgattacataaaaatgcataatatgaatggcatgtatgtttccctataagtggttgcctgtttcagatgtttgtgtttctatgatctccttcctgttggaatattcactttttataagactttacagattttctttcagtaattgctgctttcatttgatgaattacattttgttatattatttattgttaagaatagaattgcctttgaaagtatggtttgctcatagccaattaaaccataaatacaacagacagtgcagttatgcagcagatcttactcttatgacttactgttcaagtgtaaaagtgaattcgctagatccatacaggacaatatttattattatagtcttattttgcataattttcaatacccaggaggtgctacaagttccagtgccttttctgatccttattttctgcttttctccactggctagttatgtgataaggacatggagagatgagaatgaagagtgtagatggaaatttcgtgctgtctcctctccatcttcccctgttcgaaggcatcaatgcagaacattttatcttcttatacctctataaggtatcattcaatacattcaatagctcagtctccagaatcttacagtcttgctacaaagcaatctccaatttcaaatgtttgacacaatgttaaagtaggattattgggatctcagtatgcacaactgcggtgcactatgcttgctttctttttcttttttttttttctgagatggagtc

SEQ ID NO: 57513 - DNA, 1056 bp, Homo sapiens
tcaaatgattagatccatccttcttccacttatttcatgagatatccaacaactgcaggttgttctaacggttcagtactctaggtttgtagtttggtcatttgctcctttattcaacaaacactgagcttctgcaacatgctagatactcacttggccctgagatggtggaaaagcaaaaccagatgaagtcccttctcactttggctaacagtcttgtggagagacaaaaattgattaaatagtcacattaaacagttgaaaatgtaaatgcgacttagagagtatgaactagttcaatgattcaggcaagaatttcctaaggggagtgaagactgaactaaatggcaaggaggaataacagttcataagaggaaaggtagagggaagaacaatctagggaacggacagagaggaaaggtcctatggaataaaagtgtgcaaggcaagtaagagaaactaaaaggtgtggagggagttaaggatggctggaggcgtaggtagaaactagaccatgcaaggcattgttgtccatgcttaggagtttcagttgcatcctatgagcgatagaaagtcattggaaggatttaattggtagattatataatcatgtttatgtcccagaaaacatacttcagttccctgtagggaatggattagagaggaattcatagtgaatgatggaagaaatgttagggctctttacataccctaggttctctgagagataaaaaggactaaggttgtggttgaggagatgagaaaaagtagagaagttcaagagctatttaatggataaaatggataagatttagtgatggcttgggtaggggaggagtgaggctaggcatggggtgaatcatgtcaacacctaagtttttggattgtgcaattggatgaacataggtacttttcatagacatgggaaccagtagaaaataatcagattgaagggtagaggtgaaatgataaatttttgttttgacacatcaaactacagatgatttagggacatttcggtacaaatgtagactagacatcttgatataagagatt

SEQ ID NO: 57514 - DNA, 1049 bp, Homo sapiens
tcccaccagcacaagccccaggctttgtgctcttggcaggtccatttgaagcagacatcccctctttccatgggccagccaccacaactcttgacagacaggcgacccccagggatctgtaagcctcagcgctgaggtgtgcttggtagctgggttgcaagtgcatgtaaagcttgccccactgagacttggcctctggcctctactagtgtgttgtggtgctgccagcctggagaggggtttgccacctccatgccccactcaaagatggtgctgggcattataccccccagtctcaacctttcttgttcccatatacagattcctattggggaacctgtaggagcagagatggggctactgagttgggcctgggcatctaggagtgggagagcaggtagcagagaatcttgtggtggtgggaggtgggaacatgcatgagccaaggtcaatcatcccattgaacttcacttacaaaacacaaatccaaaagaaaaaaaatatttccctacagtgactgcaaagcattagaccccaaggtgaaaagctgttgagagcaggacattgtcataaatccatgcatctggctcttaaatttgtaagacacacccagatatttctgacttttgtagctgagattcctttctttaagtgtatttgtttgcttgtacttctgacaatttgaactctgctaagtatgtatactgcctgtttgttgaatgaattgaagcaagtatttagggaatacacatattatatacacacagacatctatcatacttttagcagtgtctctgattcccctattttgtgaataaaatgtttgcttcataaatatggttttgttttctctgaaaacacagtcaaagtgctgcatacatttgtttggttgttgtggaaacaatcaaagctgaagttaggtctattctcccaacatgtggaaatttcaacaatgtttaatgattcctttctaaggacttgcaagcagacttttctcttcttcatcaacattttacctcttccttcataatttttattttctttatccc

SEQ ID NO: 57515 - DNA, 1047 bp, Homo sapiens
acaaaaattttataaagataaattaatgaaatataccttgacactttaaaataactagcaggaatgatttcactgttcataaatgtctaaagtgtgcttttatttttttcggctgttgtgtattataaaactttgatcatgtagaaggtgtggaagttttacatgagtattgggtgctcattgagttgaaattgagagttcctcttttcactaatcccctctagagtccccactgagcccaaattttctaagccattccaatttctaagctcctccagagaatagtttatcctctatataaactgagtaaaattttagttccagcagaaagtctgttttttttttaaatcctgtaaattatttcttattttgcctacctttagcatgagcatttatggctatacaacacatcaccagccacacttgtttatgagcacttactattgttaaaactcactgtagaattttctaaattaaataggtacacaacacccaaagagtaatataaatgggtattatcaggggaagaccctctcaaaagtctcaagtggtgatatttcttggtggattagctaaatctgccaaccatgacactggatttgtcagcctctgtctgagtggatccatcctcaggaatagacttgaactaaccaaacttagaggagtgctgtataaaatctgaatgccagctcattcatctaccatgagaaatcgaattgcttgcaagtctagaacacttgtgttggcacaaataatacatttcctctctataggcacacgtacaaagagcaaatcatcatctgaaatttgccagcatcaggacaaggggagacttgctcccaggctcttttctgagccattatatattgatgtttaagtttattttcacgggatgatgtatatcttcctttgtctaagttcttgtggacagggtctgcaaggggattcatggctttaaattccattagatcagtgacctgaatctttcaaatgaacgacagattcaaatctctgagttcctccatcatattcccacctgggtgctca

SEQ ID NO: 57516 - DNA, 1002 bp, Homo sapiens
ttatttctgagaagcaatatgatttttccattcagcaactaatatagagtatttgaatgtaaccacagaaactcttgagccaaattttgtcctctgctttttaaaggaaactccctgcaaagacattaaataattgtcagcacccaatgggtttaggtggtacaaatgtttatattagtctaggattatcagtgtgatcatttaatttaacatatcccctggggtatgtttctattaagtacatttggataaactgtctttagataatctcccaagtacagaagggtgtgtacccaaccgcatgattatactgggattctgagactagtagaaatattttggttttggatagttatgttggtagccagagcctactaatgccttttctactgggtaaggatattttaaaaatcatactcaagtggcataagcttgtttaggaatcataattaaattaaccttgagtctaaaaggaccacacatgaagattattatgctggcctcctattagtctttcctggtgactcttatgaataagcctgtagtctatacaaggtgtgttaagtaaatagattaggtgtagcattaatgttttgggtcagtggcatgtttgataatagatttttcctggaaaattttccagttttttggccttccaatatcggactgtcaaccaaatagaatgcttcctttataaaaaagacatgtgtacacttaggtacacatgcacatttttatgtatatgtgtgtgcatatgcgtgtgtgcatatgtgtgtgtgtgtgtgtgtatttaagtagaatttatgttttggatacatttcctaatcacacatttctccaaatgcataatgcccaacaaaataatggtatttaaatctagcttctatgattgtgtctttgacacaatgcctagctcacagtaggttcttaataaatattttattgaaaccatctattctttaatttgtaaagaattcaaaacttaagagcaaatactttgaa

SEQ ID NO: 57517 - DNA, 1048 bp, Homo sapiens
ctgtgctgagttcagatttcattctggaaaaggtggagagccatgaatgaaatttgatgggaaattggttaaaggatcaaatttgaattttaaacaaattattctggcaacaatatgcaagatagattaacagctggggaggttggagacactggaacatcagttaagaagctattataatcccacagtggctgtggaaatggaaaacaggggatctgagaaacatatagtggcataattaataggattcaaagtaggttccaaaacctagatgactggaaaaatagtgggtgccattaaacaagactgggaacatgcaatcagaagtagactttagaaatacaagggaaaatatatgagcttaattttgtgcgagtgaatttgatgttaaatttaatgtactacctgtccagcagattgctggaaggacacatgtagagctcaggagagacagtgaggctatcctgtaaatttaggatgcattagagtttttcactgatgccatgagtttggataaaaactatcagacagctatgttccttgggtgtggaacaggaagaggaagcagattctgaaaagtaatctcctaagaaagtcagagaattagaactgagggaatgcttatctttaacacccagaaagtagagagtttcaaggagttggtagtcaaccacaccaaatgctatagatggtagaggagagtatgagcttactacctaggctggtgggtattgtgactggaagttactagtaacctccgaatagcatgtttcaaagaataacctctgaatcaccagtttcaaaatggcagaggccagttgcagtaggtttaagagggaaattgtgaaaaataggaagaaatttatctgcattctcataattcatattttataattttattgtttttctggttcccatgatcatttaataaaaagtcattgttttaaaactatgaatttttatataaatgtggccaggtttttttttcaaatagcttaaattttcatcacttacttcatagttcagtgctaaagtcttttattcagta

SEQ ID NO: 57518 - DNA, 1034 bp, Homo sapiens
attccatggggcgagttagaattttatctgggggcaggcaattacaaatttcaattgctgaaaagtctgatgcagcactctattcatgtgtggcgtcgaatgttgctgggactgcaaagaaagaatacaatctgcaagtttacagtaagttgttgattagccaggctttggcaaaatgttctcttaaatcttttcatccttctcatttacttttaaaaatatctttaatgttcattcaaaatggtatggttgtaactatcatatgacacacacatttaaattgtgctgacataactggagagcaattacttccttctggctgttattcggcattacagctgtccactctgcattagctcaccaatgacagacacatcaatgtggctgtaattttgttggggacagatagtggacatgtggagggggaagggggagcattttaacataggggatatttacaatatgtaaaaacattttattttaaagaatattttactcgtataagatcttagagtgcttaagatagttatatactcatttaatcttcacatgagctgttatataagacaaaactgtcgcctccattttgtgtatgtggaaatttaagctccaagaggttttgttggttgaacaaggtcgcgtggcttgtgtgtggtaggactggcactaggacattggattactgacactggcctacttttcttcccacacacatatgtattagaattgatctaatttttgttcctagaatcagtgacacgtgaattcagcttcaagtaacagaataactggttgtcagtggcttaaccaagtaaaagtttgtgttctcacataatgagaaagcagaggttagcattggtcactggagctggtcagcagcttaattgtatcagcataggagctctggcattctactggtccctccttcatggtctcaagatggtagctgttattgtggtatcaattccacatggaaggcaagagtaagggaaagggctggtatctttcccttttattaggagagcaaaaaattt

SEQ ID NO: 57519 - DNA, 1026 bp, Homo sapiens
tatttagttaaacatgaaggtcaatttagaatcattttacttatagatgaacactaacctacatttgaaaatgatttataatctatgcatatttttaaagtcaacataaccattattattataaaataagttagcttgcatagttatttttaaatgaatgattactgccgtgttttagacatgggatatgtaggaagacaaatgagtgaaaacctcctctttcaaagtttattcattctatacatgtaattattagctgactctcagaaatggatttttacagggaatccagtgccagaaattacatggcacaaagatgggcagcccctccaagaagatgaagcccatcacattatatctggtggccgttttcttcaaattaccaatgtccaggtgccacacactggaagatatacatgtttggcttccagtccagctggccacaagagcaggagcttcagtcttaatgtatttggtaggtgtgggcttttcttcatatcttaaagaatctgacatgactgtaggctaaattttcttttctttttctgttcaagtaatgtttccgtcgtagaatttcatcatgtaaggaggaccagtgcttgtgtacatttactatttttcctgaattaatttataaattaatttatgacatatggaatacctactatgttctaggcacagtgttttgtgctagggacacaactctgaataagatagactaatcagtagtaaaagataaagatatgttggtcaaagagaagcaggtaaagagtgattgggtctcaacctgagatattctatccttttttttgtgagacttagccattattggaaattggccatattatagtctttgtggactaagagtgatgaaatacctgtctgttggtatgttcagttctggcttatgtctcaggaaagacattaaaatagatttttaacttgtgctcactttttgaaatttctaccccctaaatttattgtattagattcctaatatcatataattctactaaaatcaactga

SEQ ID NO: 57520 - DNA, 1015 bp, Homo sapiens
tgtgtatttcctcaatagaagggtaatagtggaaaatgtgttcccaggatgcaacttggctttcaagacaaattattttgactatggattggtagcaattgaaatcataaaagattttaaaataaagtattaggctaagaaaacaatttagaactttcaaaatattaaacctagcaacttcattcctaggtatttacccaaaagaaatgaaaacatttgtctacacaaaggcttatatgcaaatcttcatacagcatcattcacaatagccaaaaagtggaaacaattcaaatgtccatcagctgataaatggataaataaaatgtggtatatccatgcaatggaattctgtttggcaataaaaaggaacaaaatattgacaaatgctacagcagatgaacctcaaaaacattatgctcatagtgaaagaagtcagacaccaaggaccacatactggatgattcagtttatatgaagtgttcagaaaaggcaaatctgtagaatcagaaagcagattagtggtgggctaaggccagggttgtgagtggggaatgactgtaaatgagcaccagggttcttttgggggtgatggaaatattctaaaattagattgtggtgatgtttgcataactctaagtatactaaaaatcattgaattgcgcatttaaatgagtgacccttatgatatgtaaattatgcctcaataaagctgttagtaataatttaagtactgtgctaggcacttcaggggatacaagtatgaatataagccaagcaccaccatgctatttgcagaaaacacacaaaagagagtcaaattttattgaactaaaaaaactgagatgcagtatatattaaaacattttttttcatttttaggagcaattgaaatacttgccacccaattaaaccatgctggaagatacacttgtgtcgctaggaatgcggctggctctgcacatcgacacgtgacccttcatgttcatggtatggaaggctatttactcattcaaag

SEQ ID NO: 57521 - DNA, 1066 bp, Homo sapiens
caccatggtcatatcttgaagtatggtctagaaaagtcccttattattttatttattacactggagcagttacttcccaaagattattctgaacatctaacaggacatatcagtgatggtttacagtagtgtagtacctaagatcattttcctgaaagccaaaccaaacaacgaaaaacaagaacaactaattcagaatcaaatagagtttttgagcatttgactatttttagaatcataaaattagttactaagtattttgatcaaagcttataaaataacttacggagatttttgtaagtattgatacattataataggacttgcctattttcatttttaagaagaaaaacaccactcattttataaaatatagtacagctactataaggcttgtttgatcccaaatggtgcttatcttgattgaacattcagaacaaggatattattttcagtgattttgtgagatcagctgaaccacttatgataataataataaaaaagactgctttgccctcacgtcagttgtacatggcatggaactttaaaaattttaatataaactttcatccagttagcttcataacttttacgttccagaattttgtttattttcctgtcaatgaaagcaatttttaaagataccagtgggacagatttggttttttaaaaatctcatgtgttcaaattaacataaatattacacgtcaatacactgtacatggtggtaatagactctaagcaattgccaagatgtattctatttttatgaagtgtatatatattaccttagtgtgcattttctatataatatcttgatggactcttttataaaattattttataaaaaacaatgttacactaaaatcagcctaaataaattttcacaactttttttcataaccttttgaagaacctaaaattcgtttccttgcagctaaaacagggattaaatttaaagtcgtacacgtaaacagacacacaatcatgagaccccttgagagagaggtagtattactcacattgtataggtcaggatcctaggacagaggtaacttatgtaact

SEQ ID NO: 57522 - DNA, 1036 bp, Homo sapiens
tcaaatatacatttcttgagtagtttcattttctctgagcacagaaaacatgctctcagttacctacaggtagattattgacactggattttctagcttcctttattattttaaaaatctgcttaaaaaatgtattgatattttccttagatccttcctttaagataagcatgtttggaaaaggtcttttaaattactaattttgtttccttcccacaatgaaaatgtgaaccatcaccattgcagagctaagtcagctcagcccaaggctttaccccactttcatacggaatgtatcggtgtaaaatcttacccaccaacataaggcttcgctcatgtcctagcacctccctgaaacctttccagatcaaattccaatcacatctagaattatagtaaacaattgtactacgttttactaaaatatctcttcatctgtctcacacccccaacagactatgatttccctaaggacaaccaacacctatatgttagtctattgccaacatacagcccagttgtttcaccaatgttatatgtttaaaacatgctcacgccgggtgcagtggctcacccctgcaatcccagcactttgggaggctgaggtgggcagatcacctgaggtcaggagtttgagaccagcctgaccaacatggtgaaactccctctctactaaaaatacaaaaaattagccgggtgtggtggcaggcgcctgtaattccagttactcgggaggctaaggcaggagaatcacttgaacctgagaggcagaggttgcagtgagctgagatcacgccaccgcacaccagcttgggcaacaagagcaaaactcagtctcaaaaaaaaaaaaagaaaagaaaaaaaagaaaacatgttcagtgaaccacatggttgtaggctggattctgctgtctactactcatttggtaggtactgcatttaattctcacaaaatgtcttaaagttaaatataatcatccacatttacaaataagaagatgaagacccacaaatgaagaatgtgtgacccatccaa

SEQ ID NO: 57523 - DNA, 1881 bp, Homo sapiens
tggtttttttttggtgttttttttttgtttgtttgtttgttttttttttgagacagggccttggtctgcctggttttttgggtgttttttaaggcaggatctcaccggtctccctggagtactgttagcttgatcatggctcactgcagcctcaacctcacccgggctcaagtgatcctctagcctcagcctcctgagtaactgggactgtaggcatgttccaccatgcccagctaattgttttataattttgtagaaacagggtctcgctgtgttgcccaggctggtctcgaactcctgagctcaagtgatcctcccaccttagcctcccaaagtgctgctttttttgttgtttaaccatttaccctttttcggtttgttaaatgttcctcattgtttgaaaaaaagaattgaaatcaaatgaacaagtctacatcttattcattcattcatttagtaattagtttgtatcattataaatgctttctcattttttcacttgcttttcttttatcttaatgtttttcttagatactagtagtagtcaaccaaagcctttcagacgagtaagacttcagacaacattgagacaaggtgtccgtggtcgtcagtttaacagacagagaggtgaatttctgacataactggattacatgatagaatgtggaatagtaataaatggaacaagttttctaatccttaagcctccaatttatttttttaatgttccaaagttttattaaataattacatgttgagcaggtgatatttaccaatctgtaaacttcatgtagacagatttgtataccttagatatataataaatatgtgcttatattttatatttattgatttcttccttaaatccaaattaagatttggaaaatatgaagtgttatagtgttatattcatttgttgtatctctacctattgccattatattgttaatttttttatacaacacgataaagctttgtgattatgttttagctagtaaaagtgtaaaattttaatatttccatgttttccaatataacttttagattgtacttgtgtcacaaaaagagggattaatctgcttgtaataatttccattgaagttgtagaatacccaacagttttatatccacaatgcctagatattttttataatgaactagggtaagtgaatacactagttttgaattcttaaaagatatattcaatttgattcttttttcttttacaggtgtgagccatgcaatgggagggagaggaggaataaacagaggaaatattaattaaatggtctgtaaacaataacaactgtgaataagattatcaaatctgttttagtgtaatgattgtcaagtttaaaaacatttttatatataaactggtatactcatgtcaatattctttattaataaaatgtttttcagtgtcaaaatttattattcatttcttcattagttgactcctcctttgctcatcagtctaaggacagttgtaccagactttggataaggtctgcccagaacgagtagtaattgctcttgctgttctactaggcacatcaatgttatagtattgatctaaatggaagagaaaacatttttttagttaaaaagaaaacaatgcccaaactaaaaaataacttatgttgactattatgctcaaagacaatgtttatcattttaatagagatgtttttactaattaatttgaactttataacaaaaagaaaaacaattgcctagacttttcagcttttttgatgtttcaaaagattgacatttcaccatctttttgtaaaatcaggttcagctctcctttatgaagtaaacattaaagagtaaccaagtttgaaaaataatttacttggggttattccttttaaa

SEQ ID NO: 57524 - DNA, 1049 bp, Homo sapiens
aataaaaaataaaagtttgagagatggatttttgcttgatggaataattaaatcgtggactttagtaaagttgtatatctccaataattaatatttttctttcacatccctgacttgttgataattttatgtttttttcagtcattcattaatattcagaattgtctttaggtttaggaatgtatgaaacacccctgttcctagctcatgaagaagagtcaggtggccgaagtgttcccactactccactacaagtagcagccccaggtagggatcaaaggcagatagtaggttctgttttattggtaaaatgaaaacctatgaagtatcttctggctaaaaatgtgataaaccacaaagttttaaagttctttttcttgtgttgtctttttaaagtgactgtatttactgagagcaccacctctgatgcttcggaacatgcctctcaatctgttccaatggtgactacatccactggcactttatctacaacaaatgaaacagcaacaggtgatgatggagatgaagtatttgtggaggcagaatctgaagggtaaaagtttattttgttgtttttgcttgctttagtctcaacagacttgtacatttgttttcctttagccaagaaacaatctgcaaagttgtgttttgtttttttttgtttttttttttgagacagagtctcgctctgtcgcccatgctggagtgcagtggcgtgatctcggctcagtgcagcctccgcctcctgggttcaagcaattttctgcctcagcctcccaagtagctgggattacaggcacccgccaccatgcctggctaatttttgtagtcattttgtactgaaattttcacatgacttaaactggagcagattcatgttattcttgtactgtctccctcatttgtgtcttgaatggaagagagaaagatggatgtagccactgagccaggaattttacatacccatagcctatctcatctgggctagagcccgtggtttggttactggtatactatttagtagtgtgactgttgtgaactttttatag

SEQ ID NO: 57525 - DNA, 1635 bp, Homo sapiens
cttgctaacacttccaactaaggaaataggaattaaatttgtttacatacaagatggtatcatagatctgttttaagtattggttaataattggtctgttggttaatagaatgatttttattggttaatattatagactataattaaaaatttgtcattgacaaaagtgatttcttggcaggttttcctgggaaaatgtcctaattacctgtctgctaactattttgttggcagcgtaataagctgtatctgttgatatttggtgtttgtttcattgcctcatttcttaaagcaaatgtaattcctttatcttgacacgcagagaattcagatgacccgaaggcagtctgtaggacgtggccttcagttgactccaggaataggtggcatggtaagtacttacccattatgtaaaagtaattcatttcttgagcagatatttatatagtccatatgtgtggtgttttgtttgttaactctgttttctttgttttagcaacagcatttttttgatgatgaagacagaacagttccaagtactccaactcttgtggtgccacatcgtactgatggatttgctgaagcaattcagtaagttaatgaaagagaaacatactttataactaatcaaacttttagtctttctctgttagtttgtttatcatttggttaactcattgtttgttgagtccctctctactatgtactaataagtacttggggtaggtcagttgaggatgtattgttggggaaaattatacagaggtgaatgacatacagttacttctaccaagaattttgaagttaaagacaatataagaatgtttaagaacatggcctctagagttagaatgcctgtgtttgaaacctaactctactgtttactagcggtagcaagttccttaggttctctgttcatgagcaccttcattttaaaaatgggaataacaatagaataatttctgttgcataagttataagaattaagtgaatcagttaatttgtgttaacatgtttaagatgttacctgacacatgataaattgctttatagttgttgattaagtgttggtaattacaatgatcataatttatagtattcttgtgaaagctaagcaaatgagcaactaactgtaatgtaaacaatgtagaaggataatagaggaataagcagtaggctttgttactacaaatgaagaagtaatttatttcaacaactaatgagaaagaatatgagatgatttaacgcggatgatattgaattcagtcttgggaaagaatagctagcatttattgagcattttcatgcattagtttatttaacctcataacttatgagagtagacattattaatgttgtcatcttatagtatactgaagcacagacatgttaacaaatttgccagaggtcagacagcaaggaagttgcagtttttagtttcaaaccagttagtctggctgtagaggctatgctaagtgttgtgctataccactcctcttaaacggttgaaaggctctccgtgtgaaagtatacacatttattcgtggctaaggtattagttgcttaacaggatgtatttgaagatcagaatttaaaaatttctacaaacttggggaaaggttgattgttctgtag

SEQ ID NO: 57526 - DNA, 3476 bp, Homo sapiens
ttttgtttcctcttggagccccatagttcatttttgtcatttttttatatataaagtgtattttatatatataaggtcaaattgtttgttttattttggggtttaatcctatattgacagcttcttattttagattaataaacattttttaaatagctcctgatatagtgtaattttatcattttcttcaactccacctgtttaaatttagaattaaactggaccacttgatattttgctgacacctgaggtctatattatctttgagcaatctcatgcaaacagttagaattcagaattgatcattattgcactaattccagtaagtatcacagttgtggtatttggtgctgctgtactaatcccatacaactctcaggacaattcctatcttctgattaatgagtcacttaaatttctaagtgtggtatctagacatgcagagcatgtgggccatattctaaacttttatttatgcctggggaactttctactaggattatgaagaggatgaggaagatgatgatgatgatgaagatgacacagggatgggagatgagggtgaagatagtaatgaaggaactggtagtgccgatggcaatgatggttatgaagctgatgatgctgaggtaactggctagaattttaaccattcatagttctttctatgagctttctttcacttgctgttttccaaggatatagaaaggcttatgaaattcactaaaacctttggttgttttgttcatttgttttgttttttgttgttatggttacttatttgtttttgttgtggtttggtttggttaattattctgtccggtttttttaacatatttattttatttgagcattatgttaccacgttttgtttttagggtggtgatgggactgatccaggtacagaaacagaagaaagtatgggtggaggtgaaggtaatcacagagctgctgattctcaaaacagtggtgagatttttattagccttttttgaattgaatatctctggtattttctaaactagaattgcacttaattctaatatataaatttatttattgaattggtaaaaagagattggcccctgttctagctttgtgactgttgtgctctcataaaaagtctactatatttatgattgttaggtgctgtcattatactcttttctgcctcattgggctgctgtaagatgcaaacattttgtaacccttacggtattataaatgctatatgctgccattaagaggaaaaattaaattagggactacttgtaacagcagttcacaaccagaggaggtcagtctaatcaagctgcatgcttcaagatttggggctattggagctttgcagtatggtctgcttttccaatgaataaaagatttttggatcaatatagcatatattttgttaaatcttggataagtcctggaggtccactgaaaagttgtgggcattaaaagagtatggaagtcgtagaaaataattttattttgaaatgtgtattaaataattagtgattatctggtaatagataactaacaactgatactaagctgaaatcattagtgttgacatagtaaaaccttagctgtttagactaatgggaaaatactgtatctgggtttctgtagaggcctgggtatttaaaagggcaagatatattctcattttaactaaagaacagacaaaacttttaaattttttaagagaaaaatacattaatgaatattaagccatataataggtaatactattcttacttttaaagggagatgagaaattgatatactttgaacaaaaatttacatttataaacaatttgtaggttaagaaacattttttgtgtatcacgtagttgaaatatagagggaggaatttttgctcctctaggtctccctccctccctcccttccttccttccttctttttcctatttatttttatttttatttttgcaaccaagcaaaaataggcctagtgccctgaacaaaattaatggatggatttgagtacatttcaagcaactacacttgtattgaattgtttaattcttgtagtaaacttaataaggtttaggtatcaatgaagaatctgaatcgcagaagtaaagtgacttgaggtgtcgcatagcttactaagtagctaagtagcttaagtattagagcaaggatctgaatctagacctcagacttttaaactatgaaattctgtgacatcctgttcaacttttcatagttgaagatggcttcttttgttgctacagtgtatgtagaagaatacccagacatttgagagacatttgttaaaattcaaaattcaggaaaaccaaaagattaaaatgtagttgtaaggcttctcctctgtctttatcctttttgattgttacactgattctctaatggtctaacctttaggtaatttgtctactttattaaaattaatccagatttattaaatgttaattttagttttattttattttattaaatgtttactttaattttagtgtttttaatgtttatcataggtcgagctaagagctttatgttcattatctgaaatctttagaaaaaccattttagaaacaccagacttggaggttacatttgctctattaaccaaccaaaaaatagactcaaagaggttaagggacttgcccaaagccacacagcgaataagtacacatcccattgtctctgggtgtaaaacccacatttgcttccatcacacctcactactttacttctgaaaatattcgtacggtgaacattcctgttggcaagatttatacttctagggattgtccaagtttttttgtggtaaatttagcagttcaaaagtaaatttctcttttcctacaggtgaaggaaatacaggtgctgcagaatcttctttttctcaggaggtttctagagaacaacagccatcatcagcatctgaaagacaggcccctcgagcacctcagtcaccgagacgcccaccacatccacttcccccaagactgaccattcatgccccacctcaggagttgggaccaccagttcaggtattaaaagtactggtcattatgaaaaatgaacttgaaaaaaatcttggcttttctccctttccattatgtatttctctctctctcttggtttttttaaattagcaatcccatgaactttttggtattttggcatatttttataaaattctttgaactaaaactaatctctgagggatgtttagaaaggcaagtgttactaaaagttgtgcatacattgaaatggttatagtcatagcaaataaaattgttatttctcaagtgagaaaagaaaaagattttcttgggttttaattaaagtacattttcgcagctcaccattatctgatttgaaggtttctttctctacagtgcacgtatttataaaagataaaggaatttctgttgtacttaacagaagaatattttttctcatttcttggtaatcac

SEQ ID NO: 57527 - DNA, 1050 bp, Homo sapiens
cttctttcttcaaaaatacttgaaatgccatttttaaaattaaatgtagctggctgaggtagctcacacctgtaatctgagtactctgagaggccaaggtgggagatcacttgaagtcaggagttcgagaccagcctggccaacatggtgaaaccctgtctctaataaaaatacaaaaaattagccagacttcgtggggtggtgcctatagtcccagctactcaggaggctgaggcaggagagtcgcttgaacccagtggggcggaggtttcagtgagctgagatagcaccattgcactccagccagggtgacaagagcgagactgtctcaaaaaaaaaaaattaaattaaatgctgctagtccataagtactcattattctttactttgacctataataatacctcacatatagttttaggtatgtttatagggctcttaattcttttttaacttttttatttttaaagggagttacccagggagattatacacctatggaagacagtgaagaaacctctcagtctctacaaatagatcttgggccacttcaatcagatcagcagacgacaacttcatcccaggatggtcaaggcaaaggagatgatgtcattgtaattgacagtgatgatgaagaagaggatgatgatgaaaatgatggagaacatgaggtaagtttgatttgaaatcatctagtgtttttaaactattggatgaaagtgctcaaatccttgggatactaatgcattggctgtaaattctggttcccagtcagcttaaatagattatatttatttatattatatattatatatttaatatattatatattatatatttatatatattatatataaatatatatattatatatttatatatattatatatataaatatatattatatatttatatatattatatatataaatatataatatatatttatatatataatatatatgttatatatttatatatatttatatatataatatatatgttatatatttatatatatttatatatataatatatatgttatatat

SEQ ID NO: 57528 - DNA, 1680 bp, Homo sapiens
acggaagtcctgaggactaaaagacacctaagataagactatatactgatttacatacagtgtacattttttcttattcaaggagtcctgagttttatagaaggtcccatgtaaactttgtagataacaacatagtaatacaatctcagtgaaccagatatattgtaaaaattggctggctttattaagcaaagcttgggttggtataaaaacattgactcagagcataagttgctctttgtttacccatagcttagcagaaacaaattatgttgatggacattgatctaggagttgattgattgtattttagtaatctgtacaattaaatgtttactgtgttctcctttagttaagtgaccatattgggtaaactatctttatctaaattgagttattatcatgctctaattcaagatttatataatttcaaagtttcggctacccccagttcttctttgccaaagcgtacacgtgaagaggaagaggatagcaccatagaagcatcagaccaagtctctgatgatacagtggaaatgcctcttccaaagaagttgaaaagtgtcacacctgtaggaactgaggtgcgtaaagttctttctgtgtattttaacttttaccagtagagttaaggtactcttttcagctacagcctaaagaaaattaaccttttggggccaaaatatattatctggaaaacacttttattgaactttctacaaagattccactgacaacccaggtattattaccaacagtgttttatattcttgcatatctttaattgcatttgtttctatttcaataaaaaagctcagtcataaaaacataagttgaatttcatctcgaagtttctaagtctcatggacataaactgttacctgctatctttttctaagattagccaaaattatattcctttttgtggttaagattaaattgtaatgaagcaggtttcaaatcaaacattaaggctactaaattaattgtattagcatgtattaatgttcataaaccttactttgtgtatactgaggaggaatgtgattataatttttaaataaaatttttttatttttctatagtttcataaaatatagatttgaagggttttttcaaatgagagaactaacaaaaacaggtaacccttcatctactacactgatatggttaatatattagtgtattatgatacaggaagaagttatggcagaagaaagtactgatggagaggtagagactcaggtatacaaccaggattctcaagattccattggagaagtaagtaaaaacatacctaaagtaccacaccgttgcttttcgtgaatgaaattagctttgacaaattgaaacattatttggtctttttttttttagcttgttcttattatatgtaatgaaatactactagaattaatcattgcagagtctgctttcttttactcctatgagtatagtgtactgccttctaaacttatattaaagaaatgtttttgttcatatatagcacagatttccagattttttagagttgtgagccaagatttttccctattttaattacatgaaatacaagagtgctggttgcatcttgagttaatttatagtgccccatttgctggttctctcttactcccctgtattatttcccttacagaattaaagtaatccataaaagga

SEQ ID NO: 57529 - DNA, 1050 bp, Homo sapiens
agtaggtgttcagtaaaactttgctacctgcatatttccttagattcttatcttgacaaatgttagaattcagtaaattattcaagtatttctgtgctgtgaaagtagagaatgttttatttcagctacatccaataaactaaatatattactaatcaaatttactatctgttatatcaattaaaaactaaatgatgcttaatgaaaaattctaattttactttgagcttaatttcattaattttattcaacagtaatttaaatgaatagatgcaaaatcagttacagatatttatttaattcaggcaacattttattgcatgctaccatatcaattacatagggaatataaaaatgcataatacattacctttacctacaatgtatttgtctaccaagtgccaaatctgtgtgaaaggtgacatgtaccacagaataggaaggataatttcagctttgataaaagtagaaggcttatattcagcattataattatttttcagctatgcagtcagaagggcctgtggaacatgttccagtttttggaagcacaagtggatccgttcgttctactagtcctaatgtccagccttctatctctcaacctattttaactgttcagcaacaaacacaggctacagcttttgtgcaacccactcaacagagtcatcctcagattgagcctgccaatcaagagttatcttcaaacatagtagaggttgttcagagttcaccagttgagcggccttctacttccacagcagtatttggcacaggtaaaattaattttaaaatgaagtcagagtagacctatgcatttataagatcttgagtgtatcttgagtatatatatcttgagtattctttgtacaaatgaagttagaatagacctacgcaattataatatcttggatataatacgtatcacaagtattctttgtgcatacatgctttctaccaggaattagaatgaatgaatatattactaacattttatttcatgtttactactgaatatgactattttaaatcagttgtttgtcattaaga

SEQ ID NO: 57530 - DNA, 3686 bp, Homo sapiens
tatatttttaaagcattgtttaagaaaaatacagcaaagactttgtggcttgcaaagcataacattctatccggcccttttacagaaaaaatttgacaatactcagtgcagtaggaagagggtaggttttgctcttaaagcaagtctgaattaaaatctgggtaccatcacttgattttagtttgtaaaattgcgcatgttacttgaccattggtagctctgtttttctcatctctaaaatgtgcatgtaaacctatgtaataagatcttgccgaagggctgtaaattcgtaaggtcttacctttgaagtatatgggtattttttaggattttcaaaaaaaaaagttattaaagcagtataacataaagttacattggacttcaaactttgaaaaatgtctcatatatttaatctttcttctttcctccattttttaaagatcaaatgcatctttgactaacaaccagaacttaattcagagtctgaaggaagatctaaataaagtaagaactgaaaaggaaaccatccagaaggacttagatgccaaaataattgatatccaagaaaaagtcaaaactattactcaagttaagaaaattggacgtaggtacaagactcaatatgaagaacttaaagcacaacaggataaggtattttgaagaaacttatcttacaaaaaaaaactaggatgaatgttatgaaatcttatttctttgtaattttgaatattactagcttttagataccgaaatcgtgtaagcatatatgatatctttatttaagattagttctttaatatgtctgaaaatgcattataaactcacaaattttggtaaatactagatagttcagtcttcacctttcaaatactctccattttcaaagctatgttcttataactcattgctaattagaattgtgtatattaaaaaatgatgactaatctggttttgtatagttttaaataaattgtttatgttaaccacctatcaaaaaaattcagaaatctttgttatatttatattttgaatctaaatattgtttttaattcctgaaggtaaggaatttgtatgttgagaattatgtatttatttcatgttggattagaaaataaatataaagaaaaaaaattcacaattaatacccctttgttttagccactattagtacattagtatcccttttcatacatgtaagcgacgtttttccaaagaaataatattatatgcttatattcttttgtatacttttttcacttgattcattatcatgaaaatacagttaagtgttgaaaattcaactataatgcatcattttgattagctgtttagtattcagttatgtggaaaaccataactagttccccatttttggagattacagttgtttcatagaaaattctgttttgaataccttcagggataaaatttctttgcaaagctgtgattattttcttagacaaacttgcagaaatggaattactgaatataaatatgtgagtgtattattactgtttgttgtcttaggttatggagacatcggctcagtcctctggagaccatcaggagcagcatgtttcagtccaggaaatgcaggaactcaaagaaacgctcaaccaagctgaaacaaaatcaaaatcacttgaaagtcaagtagagaatctgcagaaggtatgagtgtgagaacagtctgttcctaattctttcctgttatacacctaaagaaatatgtgttaactactgacactttgtcttaccatgtgggaatggatacattttattctttttactttgaatggctcatgtatgtaagtagtacccaatcatcttcaagtgtgcatttagttggtctgaccaccatttttatacttatacttccatttaatcttttaaaaagcaaattaataagttatactttaagttgctaccacatacagtttatattgaaatgattgaattccatggtgaatactttgttttcctttaaagacattatctgaaaaagagacagaagcaagaaatctccaggaacagactgtgcaacttcagtctgaactttcacgacttcgtcaggatcttcaagatagaaccacacaggaggagcagctccgacaacagataactgaaaaggaagaaaaaaccagaaaggctattgtagcagcaaagtcaaaaattgcacacttagctggtaaatatctgtttaaagtttgaacttggtagtgaaagttgattatgtgttgcaggcctaaaactaaatggaatagaaataaaaggtatctacttatgaagggtgtttgtgtgtgtatgtgtgctttaaatattaggaataattagttggacacaaagagcaatcctaattttcaagtgatgaggatatccttgatatgatgaaatttttctcaattgttggctggcagtagataatggaatactgctatccttctgctttcatggataacaattctatcttgtgacagagatcctttgagcccagaccgtgctgtctagaaaccttatgtagactgcataaagatctttaccagcccagggatttttttgtgcctcgtttggtggaggacccctctagcttttcagggagagtatcatgtcaaatttatgaagaacctagttcttcaaggctcagggctttattcagccttgcctatcagtctgctgagtagttaaataaaatgtcaaatcagttggattttgttacaggcatttttttaaaatgatctctaagacagtgtcctaacaacttacttgattttaaaagttcttgaattatttttaaacagtgctgtagattatatgaaataaaaattttgcaattcatagtaatgaattgcatgatacattgaaatataaacgggcttctgttaactaggatctttagctttttgagattttagttaggaaaaagtaaatttttatgttggagtaagtatattttatattctagtaataagttaaagcatgaatgtacttagaactttgctcattgagatgtatgatgtatcataactaatgtagatgttatagtagtagaatctgatgtgaccatgtgccaattaagtgcataaatgctgttttaaatgtttgattataatattaatataatcgcctggttacttctttaggtgtaaaagatcagctaactaaagaaaatgaggagcttaaacaaaggaatggagccttagatcagcagaaagatgaattggatgttcgcattactgcgctaaagtcccaatatgaaggtcgaattagtcgcttggaaagagaactcagggagcatcaagagagacaccttgagcagagagatgagcctcaagaaccttctaataaggtgattagctaattctgcttaagtaacaaattgtttttctttgtacattttacttgaaagtgcttggtgatataggagcctttgtcagtgaattttggctaaaattcaatatatgcggagagaattaacaataatgacaatttttttgtggcatttttagtggactcttgtgggctaggaacaacaatcaagagctttctctttataggtccctgaacagcagagacagatcacattgaaaacaactccagcttctggtgaaagaggaatgtgagttttagttatttcatagtctgttatttttcttttaaagctcagggaatatctagtgatctttctg

SEQ ID NO: 57531 - DNA, 1020 bp, Homo sapiens
tatgacttgggagagtttcttaacctcttggagctttagttttcccttatcacctttcgtgtgataaaaatttaacaaatgtgaagcacattacctggcatctacagaaggtttgtgtgtttaacttgtaatgcattgtctatattttttttcttgtaaatgtcacttcaatgaaattaggtacttaatattgaaagttttgattcttcagatccctttatttggcttcattgtaactaatatgaaatgtttattcacaaatatgaaaaaataatgaacatttaatgacattttatttttttttcctcttgtattgtgggtagacttcttagccaaacaagccaaagcttagtttgatcttagtatcttgtagttccatgcttgattactttacatgcaggacacctaatataaacataatcagatattctgccattttattatagcacatttgtttcataaaacctaaaaaaatcaagtatgcatttttgttattctagcatctagtaagtcaacagaaagatccagatacagaagaatatcggaagctcctttctgaaaaggaagttcatactaagcgtattcaacaattgacagaagaaattggtagacttaaagctgaaattgcaaggtatatggaaagaagccttaaatcatatataatataaaagaagtttattttacttatttacatgactccccaagtgcctgcctcctggttttagaaagaatggaaagtgctagagcacctatatctgacttccatctactttgtagagtcaagcagtgatttaatattatgcctttgtatataaaatatatatgagactatcctcataattatttctctatattttattttttaaagagctactcagaagtctaaagctaaatttacagctatcaaaaacttacaaggaggttttttttttcttttggttagcttatatttgtgactctataagggaagtgggttttattactttggcttttgtgttcctttttgtggagaacagtgtt

SEQ ID NO: 57532 - DNA, 1449 bp, Homo sapiens
aaaattataatagtaatgtaatgtctgtctaagcatgaacagtgtagcatggcaaccatgaaatatgctatagctttaaaaacagtgggggaagaaagtaataccaagtgcagaagatggataattataacctatgagaaggaaaaaattcttcacagataattcagtaaaatttctcatggccaaagtgatgaaacaatggatcaaaatgagagatttctgaacaagagggaataaactgaggattagaataacattttagaactaataaatttagtgcagcaaggaaaaaaagatacagaaaggtaaatagagatttggattaatgtttttacctaatgttaatactttgttggtgggatttgtagcatcttttcacttttgtctttgtaattcttgtatttgtttaaagtctgcagttcgcatgcctcacagaaaagtaaacgtgaactttcaaaaattttagttctaaaagttgaaacttaaatcctctttattttgtcatagggaggatttgagctcataggaacaggtagactttcaactattgttagatgttggtatgtatatttatttgaaatgtttaggtaactgcaaaaacaatggctcagcatgaagaactgatgaagaaaactgaaacaatgaatgtagttatggagaccaataaaatgctaagagaagagaaggagagactagaacaggatctacagcaaatgcaagcaaaggtttgttgcttagttatcaagagtggaagcatgttgtttttaataataaatgaatttttacatttgttgttaaatattggcatgattttcaggtgaggaaactggagttagatattttacccttacaagaagcaaatgctgagctgagtgagaaaagcggtatgttgcaggcagagaagaagctcttagaagaggatgtcaaacgttggaaagcacgtaaccaggtaaatgcagttaaaactcttccaaaacatggaaacacgtgtttttaataataggggaaacttaggggaataaaaatatttgaggaactagtgaaaattactgtgtttattagtgaaagtctattatgttattaatacatgtaaatacgtgacagatgttaaacttataacccaatttataaaaaattttggttatattatatatatttctaaaaagcagttattttccataattttaaagttttagcctttcattttatctctaaaatatttttatacatgaaaatagaaatctgaggccagacacggtggctcatgcctgtaatcccagcactttcggaagccaagatgggaggattgcttgagcccagaagtttgagaccagcctgggcaatgtagtgagactccaactctacaaaaaattaaaaattagctgggcgtggtggtacatgcctgtagtcccatctacttgggaggctgaggtcagaggattacttgag

SEQ ID NO: 57533 - DNA, 2502 bp, Homo sapiens
gggtgtcatgttaatagctattcatttgcttactattctttattgcctatatatatgtgacgtgtatattgctattttaaaatgtaatacagggaagaaatgcttcaaagtaaatttcattaaaatcaatggatctataatttagtacttaatatagctgagttatgtttagcttcttatatcaaaaagtttgtccaaattgctggtcttctaagcttcatttctgacagttttataatattaagtaactaaagcattaacttttaattattttcttattttgctacatttagattgtctttacttttattatttaaaaagtccaatgtgtatctttggacaagtgctaactagttttatggatttttaatctttggtatcaattgggtaataatttcttataggctaaaatagctgtggaagctcagaataagtatgagagagaattgatgctgcatgctgctgatgttgaagctctacaagctgcgaaggagcaggtttcaaaaatggcatcagtccgtcagcatttggaagaaacaacacagaaagcagaatcacagttgttggagtgtaaagcatcttgggaggaaagagagagaatgttaaaggtattattgtaaatctgaatagaatgttctgttgaattgaaagagttgtttttttctttattttataatgttttgagatggagcctcgctctgtcacccatgctggagtgcaatggcgtgatattggggtcactgcaatctccacctgctgggttcaagcaattctcctgcctcagcctcccaagtagtcgggattacaggcgttagccaccgcgcctggccaagttgttttttttaaatatgcattggaaaatctgttattctgatagactcttggcttgcaggatgaagtttccaaatgtgtatgtcgctgtgaagatctggagaaacaaaacagattacttcatgatcagatcgaaaaattaagtgacaaggtcgttgcctctgtgaaggaaggtgtacaaggtccactgaatgtatctctcagtgaagaaggaaaatctcaagaacaaattttggaaattctcaggtaaatcatgttcttactgcttcatttctgtggtataacaactatgaaatgaaactacaaatatataaattagagaaggagattatacacgattttgatataaagttcattcttttatttgtcaaagaactcataacttttaacatttacacatattaaacaagtgactttaaagttgaatctgatagtaagaactagagcagttttctcttgaaaaactaaatgcctttcagatcattttagagataaacattctaaagccagtgtctataaaagaaaatagaaatacatctcccattattatttattattaatgaaaacgtgtaatagttattaaagtcaatgatttttgtcatcttaccaaattacctacgttttgtaatgttggctttttaaaattcacataaaattttaatatctgtatttttgtagatttatacgacgagaaaaagaaattgctgaaactaggtttgaggtggctcaggttgagagtctgcgttatcgacaaagggttgaacttttagaaagagagctgcaggaactgcaagatagtctaaatgctgaaagggagaaagtccaggtaggtatactaagctttaagaaagcacttgttaaatcaaaagagaagcactcatttatatctctaccatttaacgtaatgtaaaatttaacttgaagtaagcattcttctaaacttgtaaattcattaagcatttgttaaacactaatatagtatagtgcttaaaagtaaaggctctgtaaccaaactgcctggtttcagattctagcttcataccattagctgtggccttgggtacattgtttaacttccctgctcttagtttcttcatctgtaatatttggataataatgaggtttaattgagtttgtgcacatgaagcatttagaagcatgtctggtatgtagtgggtgcttaataaattccagctatcttaatttattatagttatggattatacgtgtggatagtcattctaggataaagtgatttaaactgctacagaatatctttctcacccaaggagcaaaaagtagtaaaaactaacaaccaaaggaaaagaagctgtggtagtgaaatggatgataataagacaagcttgactccttaccccacactaccacccaaagcttattgttgagttacttcattcttaggagctacagtaatatacccccacctctagaaggaaggaaattaagatcttaaaacatttatcttcttttaactgatgagtagtcaaaatgactgttaagaagaaaccattggacagggaaaagtaaataatgaattttatgggatttatgtgttcagcaaaagctaaaggttccagaattatatcctgtttaattcaaatgtatctcaccatggaaataatagagcctccagttcaatagagttaatac

SEQ ID NO: 57534 - DNA, 1691 bp, Homo sapiens
ttttttaacatgtcataatcagattttttttcttttttctggttagaaaattaatgtggtagattggaagataccgtgttcattttgaaggctgtagcaatagtctagggcttcaattttaaaagatccttttgtggttgacatcattgtaaataaatcaaaatgtgtgaggaaaatacctttcgattgtagaatagatggatttggcaagtggatatgaggattgagggagaaatgagagattggaaatttcatttcaaaagagaaaaatggccagtagccaagatgaatggtaaatgcttgtagatttatatggtgtttttgcttgttgttgaatcttctaatcacctttgatggattctttttttaatatacaacaaacattaattttattacttctcaaattagttttgatttggagaaaataattgtatgactttaaatgtgtgtaatttttatatcctactgtttgtaatatggtaaaggtgacagaagaagtgcgtaagaatattgaagttcgtttaaaagagtcagctgaatttcagacacagttggaaaagaagttgatggaagtagagaaggaaaaacaagaacttcaggatgataaaagaagagccatagagagcatggaacaacaggtaaataggttaaccgtattaattttttttttaacttgtaaggatttgaattctttcaactaagtcattagttgccatttagttcatctcaacagaaatttattgaacacataggcaaaattttagttttatgttttactcttttctgtacctctatatacatttcccgttgaaatttttagactactttacagaaataggtatcactggttctttttaaaagcccctacctgagacttgacttatgcaaatgttagggaatggatatggagttgcaaaactgattatatcagggtgtaaacattttaaatttagcagcagttttttgggctaattggatcttaaaaaatgagacttcaatttagtaacactacaatacagtattttccaagtaagtttgcaattaattttggttttaatcttgttctttctgcttagttatctgaattgaagaaaacactttctagtgttcagaatgaagtacaagaagctcttcagagagcaagcacagctttaagtaatgagcagcaagccagacgtgactgtcaggaacaagtaagtatagccaattattgagaaatgagcttcgatcctagagaatgattcttgaagtatatttatgcattataagaactggtggaccttacaaaaattcaagataatttccacttttgtggaacttagacaagacaaattgaaaagtatagatggaaggctaaaaataaatacatagggcaatattcattaacaaagcaatcttgacaatgggaaaataaaaacaggactaggagactaaaatttgtacttggctctcatttgcaaaaattattttactattgtccttcactagatctgattataaaattacagatacagttgattagaggcaacctttgctaacaaaacaagaacctcttgataacattgttaatgcattaccaagtttgcgcagatatctatatactatttataaaatgttaaaaaagtatcattattttgagtgtatgtatgtatgtgcacacagtattgaagctttttataatttttttatga

SEQ ID NO: 57535 - DNA, 2813 bp, Homo sapiens
gagctttcaaaacactctccctggtccccttgagactcagactcttggggttgaggggagggagaaactttaaatagatcaatcatcacttttaaacaggtactttgaaaccggcttggattctaaaagttacataatttaatagtagtcaggtatgaatgattacagcagtcatgcaattctgctttcttcttctcacatattaaatttttcttgctgttattttttaaactgtggattgttagagcaaggaaccataagtatttgtaattgaaagattttttcattgatgatccccaataatttttgcttcgtattttagcacatgaaactgttttgtatttccttatacaatgaggagatatagtccctaagagcattaaaaaaaagtagtgatgtatgaatcattttaattttataatcttaatacacttgacaccatgtttttcagcattttttatttcatttctacttatgtttaggtaagagcagaaaatttgaagaaggaaaaggaaatgcttaaattgtctgaagttcgtctttctcagcaaagagagtctttgttagctgaacaaagggggcaaaacttactgctaactaatctgcaaacaattcaggtaaccaaataaaaagcctatgtagaaaaaatgtataaaagttaaatttagattttttttatcctctcaatttccttaattagaaaatttatccatcacttttgtcatccattatgatcattgaattttgcagtttattaagacatttaaatattttaaataaaatattgaaagagaattgattgaaaccatacattggtaagtcctcaggtatatttacagtgtcctgtgcagttttactatttataagattaattctttggtttttattttctttaaaactttgggaaatctgaatgacgattataatacattccatctctttcctgtataatagatgttttaatataaaaaataccagaatactttcttgataaatactgtagattttagctgcttcatgtagaaatgggttgtaatattgtaattctttcttgccttcaatttttatttttttgtattgcctttttcttaagcataaccaaaaatcttttctttgctttagggaatactggagcgatctgaaacagaaaccaaacaaaggcttagtagccagatagaaaaactggaacatgagatctctcatctaaagaagaagttggaaaatgaggtggaacaaaggcatacacttactagaaatctagatgtgagtccatcagagttctgaatttctgtagggtgtttatgttcagtaattaatctggtgtgtggacagtctgccatccaagatgaagcatgattttgaaaaactttgttactaagtttttcttgcctcactctatacccagtaatttttttattgggtgccatatattgtgagttttaccatgttgggtgctgagtatttttgtattcctttaaatcttcttgagctttattctgagatgcagtaaagttaatttaaaatgatttgattcttttgacttttgccttttatgatgtattaggtgggcccagagcagtgtgcattctggaactgaggccaatactttcatgagtattagtgccagtgtccattgcaattgtggggtttttttagtctggctgcagaacaggcattattcttgactttctttgagtaacaggtattcttcactcttaattcctttggacaattcttcccctgtctggggtaagctccttatatatttgcagcgatcgctactctgatgaatatttaaggaggaccctctgtagagctccagggtactctgtgtgtgcaactctcctgtcttatattctgtcttacaaatttgagctactttggtctccctggactctcagatctgtgttctcaattcagagagtctcctgggctctgcctcatttcctctttcctgtgtcatagcctggaaacttttaaatcagtaaactaaggcaatctaaggttcacctctttggttttctgtctcaggatctcggttgtttcatgtgttttgtctggttttttttggctgtttcaggtgtgacggtaaatctgttttctgttactctcttggccgagctccaaaggtctataaaaagatagtttgaacctttagttacttaggaacctaaagaatgttataagattaatgtattttataggttcaacttttagatacaaagagacaactggatacagagacaaatcttcatcttaacacaaaagaactattaaaaaatgctcaaaaagaaattgccacattgaaacagcacctcagtaatatggaagtccaagttgcttctcagtcttcacagagaactggtaaaggtaaataaaataagtagaccaatataattgtaaataaacaagtacttcttgggattataatatatcctgtcagtaaatagcctaattctttgtgaatgctagtaaaatgaaacaaacacaaaaaaaaacccaactttttctttatatagtggtactcaattttgggcctaaactagtaaatttgctgtcttaaaagattcagaatagttcagcttggcatttgatcaaggtatgtacccagctttctaattcttgaaactatttattgatactttaaaaattattctttctgaagagggttatttgattttttaacccgggccccttggaaataaggttgcttaccaaatctgcaagaataagtttctcttaaagaatgagttgatttgtgatctcctttaaagcagtattcccaatatttgctcgttggtagcctcaggtaa

SEQ ID NO: 57536 - DNA, 1097 bp, Homo sapiens
gtgttatcaatattgcattgtcattactttaaatataattgattttttaaaaataagattaaaaagttacttagcatgaaatactttgcttacttagaacttgaaccactacatttggaattgggaaaaaagaatgaaggttttaccttattacacaagccacttcttcataaatcataaaattaacccctttcccatttagaaaaaaaaaagtgcagcttgctgccagcgctcatttaattttacataagcatgctgtttgaggttgaggcaaatctgacagattttcagtgtgaaaataaaatataaaaactgttcctggagttatttctaagcagaattcaacttaacagaaatatgtatgatgttacattaggattagagacaatattctcagggcatttggggaaatgggttaagctattgtgaaatttcttcaagggattaagctaggatatcatttcagttacttgtagaattacttttttcataccagttatgaaatgctgcaagataatgttgaaggatatcgtcgagaaataacatcacttcatgagagaaatcagaaactcactgccacaactcaaaagcaagaacagattatcaatacgatgactcaagatttgagaggagcaaatgagaagctagctgtcgcagaagtgagtccaatatcccttgtccaacttgcattataagttgcatttgacatttctttagtttttactttgaattttactcactgataggacttaggtatttaagaagtttggaggttacaccaagtaattaatacatagtttgcaaatagccagtgtgcgttagtggggtgattgtttctattaagatagaagagggaaaggaatttgtttttctgctgggctaagatatactcgcaagtcttgcatttcaaaataaatttgtaggtcagtgtttggttctaacaaagacgtttttttttttggttttttttttcttgagacagagtctcactctgtcgcccaggctggagtgcagtggcacgatcttggctcactgcaagctccgcctcccgggtttacgccattctcctgcctcaacctcctgagtagctgggacta

SEQ ID NO: 57537 - DNA, 3175 bp, Homo sapiens
atttgtgggttttatttgatcactgttttacaaaactggagccatgttttgggaattgtaatttggctactttgtaataagtaatagccttcaatacatacttaaaagtaattttattctattaaaatttgattgtttagattttaatatccaaggatgctttatttttaaagataatttgaggcagtacaagttgaaggttttataagtaatgttttaatttgaaaactttcattctaaacttgtccagaattgtaactaatactattttataacatattaaaactttgtttttagattagagtgcttttgatggaacttgaagaagcaaggggtaaccacgtaattcgtgatgaggaagtaagctctgctgatataagtagttcatctgaggtaatatcacagcatctagtatcttacagaaatattgaagagcttcaacaacaaaatcaacgtctcttagtggcccttagagagcttggggaaaccagagaaagagaagaacaagaaacaacttcatccaagtaagtagtcacatacctcagcttgttgagcaaacatttatgaaaacctcagctaggctcagtgtctcatgcctgtaatcccaacgttttgggaggcctaaatggggtatcatttgagcccaggaggtcgagaccagcctggacgacatagtgagaccatgtctcaaaaaaaagtaaaaaattagctgggtgtggtggcacatgtctatagtcccagctactcaggagacaggctgaggtgggaggatcacttgagtccaggagtttgaggctgcagtgaagcatgatcatgcaccacactctaagtgggacgacagggtaagaccctgttgcccgcaaaaaaaatctatgtgttcctaacagtgctagatacttgggatatagtgatatagggaggaaagaattgagcaacaataccaaacaaaaaatttctactccaagacctcaggttatgggtaagacagatgtaataaatagataataaaataggcaagtagacaatttgcattcactgtgattagtgcctatctgtgggatcatagcggtagaggacttgtcctagatttcagggagcagaccggcttcatggagaacctggagaacctatgtaagaattagtcagaggttttttcaaaatacatgtataatgtcttctagaagaggaagaatggctaagaaagcaagaagactagagtttggagtgagtggaactgatttaatttttacaaacaaatttttcagattgcattggtaagtataagtacctgagtcctgtgtggtggggatttaaaaagtagttcataaaatactcagcatgaaaaaaaataatgagagagacaaaaatggtatgatgaatggtaggcaaagatgcttggttaattacagtagaaattacaatcagttaactctcagttcagtcctgtgaattaggccgactttttctacagaatcactgagcttcagctcaaacttgagagtgcccttactgaactagaacaactccgcaaatcacgacagcatcaaatgcagcttgttgattccatagttcgtcagcgtgatatgtaccgtattttattgtcacaaacaacaggagttgccattccattacatggtaggtttttataaagttattttaaggaataatttagaaatgtatattaagggattaattttgcaacataagcaatagccactctaatgatggtagcttcaaatttgactaccatatataattgcttataacatcccatcaactgtaaaacataccattattttatgtattgctaaaaagaaatgctttctattgttgaaaaaggtgcatttcagaatcaatgaattacagtatttattttggttatgttttaatgaccaaaacagatatgttttaataaaacataaatatggattatgttttaacccataaatactgaattatctctaataaccatcaaaaaatcttaatacattgtttagtagattccttatttaaaaactcctataatcttattgtttcatttcaataagtttagcttgtttatttgataatagtgtatttgcaaagaagcattagattaaagctgatttatgaaagccaacaaagcattttattagtctttactttcctgaagcttcaagcttagatgatgtttctcttgcatcaactccaaaacgtccaagtacatcacagactgtttccactcctgctccagtacctgttattgaatcaacagaggctatagaggctaaggctgcccttaaacaggtaaagatcacacctttgtcctgggttaggtttttagagaacacagtgttaccttctcataatctccaatatttagttgcaggaaatttttgagaactacaaaaaagaaaaagcagaaaatgaaaaaatacaaaatgagcagcttgagaaacttcaagaacaagttacagatttgcgatcacaaaataccaaaatttctacccagctagattttgcttctaaacggtaagttttcttttgtttcaaattaattaagtctaaatgttatactttacaattcaaatcatttaaattcaagagctaatttgcaatagtgttgctttttttgtgaactgtgttccagaatgagaacctctggtagttcatttttttcatattgattaatgattctctaggcagtgctaagggtttagcttgtttgataagttgaagccaggcgcagcagctcacgcctgtaatcccagcactttgggaagccgaggcaggtgggtcatttgagggcaggaattcaagaccagcctggccaccatggtgaaaccccatctctactaaaaatacaaaaattagctgagcggcagtgttgcatgcttgtaatcccagctactcaggaggctaaggcaggagaatcacttgagcccaggaggcagtggttgcggtgagccaagattggggccactgcactccagtctgggcaagagagtgagattctgtctcaaaaaaataaaataaaataaaaataagttgaagttcatgtgaggaatgttggtagtttaccttcctaagattaaaggacttgtttcggtaggacttaattcttttaaaaatgcaccagatgatgagagaaatgagagcaaattttattccaccttttctattctaggtagaagag

SEQ ID NO: 57538 - DNA, 4535 bp, Homo sapiens
atacagtatgtattacagttaattttatgcagttatggtttaataaagcatatttatatttgcttatatttctcttgattgcagatagggttgtgtagtgtttgtgtgcataagttttgataaattttttaagtttgtatcatggatttgtgcatattttaatggtagtaaatgataaaatacactaatatctacatattagtacatattatgcacttacagtagctttttcttagtttgttcccatttctgggctgcctggattggtctgtggtctctgagtttttcaaattgtaagtttttgggaaaaaattccaatatatttattgaagaaaatatgagtggaagtgaatctgcatggttccaatctgtgttattcaagggccagctgtgcatactttgtattaaaggtttatattcctagaaatatatttttgatatttggttcccctgagtgttaattagttattattttttaattctcttcaccattctagaggatgttaaacgtctgaatgaaaaacttaaagaaagcaatacaacaaagggtgaacttcagttaaaattggatgaacttcaagcttctgatgtttctgttaaggcaagtaccagatgattcctaatgcataaactatagctttttattaaaactcacctaaattaaatttcaaatataggcaataaagtaattaaaagctgcattttgttttgtttttaatgtcagaaaattaagcattaggacaattctagttcatctgttttgcttgtttgaaatttaagtttgttacagttcttaatgttttctagttaagaatctatgcaaatacttaatttctgttttgaaataaaattctgcttgtgtcccttagctacagacaaaatcttttgaataatcatatatcatctttaactgtacgtgttattttcttggatttctttagtatcgagaaaaacgcttggagcaagaaaaggaattgctacatagtcagaatacatggctgaatacagagttgaaaaccaaaactgatgaacttctggctcttggaagagaaaaagggaatgagattctagagcttaaatgtaatcttgaaaataaaaaagaagaggtaagttagtaaaattgtgtttttcttcatgttgagtataacttacatttgtatgtcagtttattaaatatgtattcagtagtgtgtacctgattagttgtaagatgagtggttaaatgtgaataatgcattacatttggcgtaaaaaatcaaccaattgcgtttacataaagaatttaagattctttgtcaaatctggttagtatctactgtcttacgatatatctttcctaaaatatgtgtttgtttaagaagtggtggtaagtttttgtgagctaaatctaaacattgttctgtgagcagttactcttagttttcttaaatatgcatattttaattgctttttcaggtggggagggggagttacttagcttttccttagcagcataaacctcatgtcagagtaatttcagttaatatgacatcctttccccctgctctattttttgtttttaggtttctagactggaagaacaaatgaatggcttaaaaacatcaaatgaacatcttcaaaagcatgtggaggatctgttgaccaaattaaaagaggtatatatgaccattaaaatgtcttttttacaaaatactaaagcacttacgaagctgttatttcacaaaatgatgtcattttttaatctgtccttggccccataaaacagtgagagtcctccttccatatgctgtagctaggctaaaatagaatcagaaatagcaattatatgttatattgaaaatactatctaaaaaatgagtatgggttaattttattgtttaattattttactttgaatttaaaatattagtaatattttatccttaatttatctttgtcatgaagactgatttgaatttgagtgttttagatttagctcttactttacaaaaatggaatttttcatcttgtcatttgataagcattctaaatttagttcaaagtagactgctataattgggctatttttttcaggccaaggaacaacaggccagtatggaagagaaattccacaatgaattaaatgcccacataaaactttctaatttgtacaaggtaaatatcccaccacacatgttagtatctaaatgttgcattgttgactgttaggtaactttttaagattaacttttagagtgccgctgatgactcagaagcaaagagcaatgaactaacccgggcagtagaggaactacacaaacttttgaaagaagctggtgaaggtaagtgttttcagttatgggaacattatttttgttattgtactctttttttttttttacccttgttttgtatagatgattggatttaggtgttagactttatttgggacagaattaggtacagaagaaagaactttggattaggaaattcagaattatatcttaagcaaatgtaagtttatatatttttgaaaatacagacagcagggggttttgtttgttttttatctaataatcttgtataatttgctgatttctaatgagaaagttttcttttttgaaacatttactctgataatgtttgaatactcttactttataaataagacatcctctttatttgcattttgtaaagtcttttatttcctcaaatttttgcttttttcaatgtattatatttatggtcttttccaataatttcctttacttaggattaaagatcaaaatcgaaatcaaagatatacctagaaccactttttaccctttgggtttccttattttctttgtgggtaagagacatcaaaaggagaaacaccaggcgaagacaattccaaaattataagtagagcaagaactttcaatagatactgtcagctgaagcctctctagaaatttaatattatctgctgaggggagaagtgactgatctgttgcattttgtaaactaaaattttaactgtatgtttgaatatttggtctttaaaattgttttttagccaacaaagcaatacaagatcatcttctagaggtggagcaatccaaagatcaaatggaaaaagaaatgcttgagaaaatagggagattggagaaggaattagagaatgcaaatgaccttctttctgccacaaaacgtaaaggtatggctaatagatgcttgttagtgagttgaaatactacagctttcctacataaaagtcatttaatttcactaatagtatttatctgtcatgctgtgatgtaggaaactccatcgagttatattaatagaatttgttttaaaattaatactcttacctgtatctttacagaatcgggcatataaataccatttgatcacacacagtcttgtaaattcccaggttattgcatgattttttagaattagatgtgttacatgactttttgatgtcatgtatttaaaatttttataggaattactatataatgtacagtacatgtcacttaccttgaaaaattattaatggcttttagtttggaattttacaaattatactagatgtgtatttgttggcacaggagccatattgtctgaagaagagcttgccgccatgtctcctactgcagcagctgtagctaagatagtgaaacctgggatgaaactaactgaggtaagaatggtattaaatgttgttaaattctttttcttcagcaaatgtatacaaatctcttcaaaatttaattctcccaaaacttatttttaaaatcatcttataattagtggatcattctaggaaaggctttctttggttcctagtgctgtgtaactaacatagtaaacattgccattttgtgttagtgttaaagaatgtttattatgaaactagatcaactaaatatttgcgttgttatggttagatttgaaacaaccctttgtctactttcagctctataatgcttatgtggaaactcaggatcagttgcttttggagaaactagagaacaaaagaattaataagtacctagatgaaatagtgaaagaagtggaagccaaagcaccaattttgaaacgccagcgtgaggaatatgaacgtgcacagaaagctgtagcaagtttatctgttaagcttgaacaagctatgaaggttggttccattcctaaaatttagccgtggtaacaatacaaatgagaaatgatttactaggtatttttttttcttaaggtgattgagtcagaaaaatctaaatacgattttcaataaacacattttgaaacttattaaacactgctgatctcaaaacgtcatacctttatttagcaatttttatgtatttcaatttttatataaaattgtgaaagcattttaacctttttttaatgcatttactatgttttccttaggattctcaactagagaataatagccaaatctcctaaaactgctcttcaaattaaaataatctctgtgtaataaaactctcctatttgccataatcattctttatcagacagttgtaatagcctgcctagaaata

SEQ ID NO: 57539 - DNA, 1033 bp, Homo sapiens
ttttaaaaattatattttttctagttagcctatgtttagaagagaaactgcatgtaagggaaaagagcccattttgagtggcaattgagagattgataagtgcgttatcaagcataatgttttttctttaaaggctctatttagagtgataaatgataggaattgcaaatattcattattgtgatttgctgtatatacatgttatatagtttaaatgctttttctctcttgatcctgtctttttaactccattttcttactgctaagtacagttcactgtttcttatgatatatgttgacttagaagatggcactgaaaaataaaggaattactaattgcatgtgactttccccataaatgttggctaggattattatacatttgatttggagacaggatagcatatttaaaattttggtctagaacacagtaaattttgaatgcattcatgaatttggaatgtgatgtacaatgcagtctttctgggcttctgttttttcatttattaaaatatgtaaggttggcagttgcataaaaacactcattgcaagttttaagcaaatgtgtatgtattcataaaattccttttatccagacaatcaactgaaggcactaactgagaaaaacaaagaacttgaaattgctcaggatcgcaatattgccattcaggtaagagatatttcttagaataagctcattgtagacattttacttgaagggacattctattctgattgtttatcagttattagtcaatgggaagatgtaactgatgtcctattaggggaagctaccaacaaaaatatgtaaatataaattccttaattggatctatgttttattgatagattggacatctcttttattcaacagaaattatctattgaatgctgactgtagtccaggtattatatcaaatgtgatacagttgggaatttgggtgaatccacattggtagtcatttccttagggtagttttataagaatgacagtttgaatatgatcacagggattgctgacaaatttgttaat

SEQ ID NO: 57540 - DNA, 1056 bp, Homo sapiens
atttgcaccataaatattgaatgtcttacatgttcctgatactatgctgaacatgatattcaatcccttcccttggaaagtttacacatttacttttacatatatttagtagttttatgctttcaggtaatatcttgactactataaaagaagtcttttaaaacaaaggagtttttttttgtctaaacaattttttctcgtgtaataaatactttatttattaagcagtttactgatgtctggagaaaatactaagataaatgaggttacctgccttgaagacattgatttgtaaagccccttttaggccttatttttattttttattttttgtcatgtaagtcgtttggaaatgctttaagtccttttcagtgctcagtctatttatctttactcagattctcttatgtggagcacaattctaatactgtatcttaagttttaaaatcaaggttattagaaataaataacagtattcacaatgtatgtacatgtgtttgattttgttttttgttttttgcttgtctgctgtagaacaacagtattttgaaatagaaaagaggttgtcccacagtcaggagagacttgtgaatgaaacccgagagtgtcaaagcttgcggcttgagctagagaaactcagtaagtatttaattcatctttgtaagtattctcggagtatcgaaatcttcagagactcctttatatactttggaaacatttgcttactaaacatgaaaatattgattaagcatcattggtttttattatggtgatattttgatttttcacttagtggtaaagattttgtgagaacacagaatttaatggtcaggaggtctggattcttattctgattttgctattaaaattgcttttgccacatgtaaatcttaacagtatctgattattgtttataaaatggttagacccacatgtctgtctacctagacagctttgtaaatcaaatgagataagagttcttgaaatctttttaaaaaggtgaaagcattatgcaactaaagaagtagagagtggcttgtttttatgttgaagaat

SEQ ID NO: 57541 - DNA, 1154 bp, Homo sapiens
gaagtgcgcgcgcagccgttggaagctacgaaccctgggaacccgagctcagaggctatccctgatcctcttgcgcacccaattttccggcttccagctccacccacttcaggccttgtagggctctgggaaatgtagtgtttttctcattcttttccgggagcccaatgctgcaccgccctctcagcttccgtttttctccccgctcccctggctctcctatctcggccccgtaaccgctgtccgcacggtggcgccacatacgtactcgtcaccccttggccctccctgaagagctggtgaccttaccgtcaaagccccgggatgccatggatcgtcctcgttggcggcttctggacactgagccactagagggcatcggtcccggtagggccggacggcaggctccgggataccgccacgctctctatggcgcccagaagggggcggggtggcgaccgcagtcgctttggctgaggctctgcggggaagggagggggggcttttacgtcatcaatctgcgccacctgactcccaagtccctggctttggagtgggaagtgaggtgtgggaagtaggtcgctttctgatgaattcagtggcagtgaattgagaccggagggaatctggcccctagaggctggtacttgggcccgaaacccccatctccggcggagagaccgtccgaggtaattgtctgccacgagtgcacattctgaaaacaggtaagtcagcctaagtgtagtgtgtgtgtgtgtgtgtgtgtgtgtgtgctctcttttcaagagaaaaaggaagggacagtgttggaaccatatggacagtcactccggcacacacttctgacgaacttaccttgtgtgaaacggcgtacctaaatggtttttggtggtggggaggtggcactgagtgattcagtacccgggaatttaaggacccgggttaattcttcaggaggagaattaaaagaaaccggtagcactttgagtgtagcctatgttttaaatttttcgttgcagaaacggttacctaacattatattgtttttaaaattgaaaactgttgtaactgaagtttttaaacacattgttaatttctacagtaacagaacttgtatggttccagatcataattctgtagttttaaagctcaat

SEQ ID NO: 57542 - DNA, 1015 bp, Homo sapiens
ctgaacaagctcattgaaacaataaggaaacagcctccagtaggacatttcagacttgaatccattctctgggctttagttttaaaatgcaaaaccgttttgtgactgacagtttactggtatcagatataccaccccagcatatctctggtagccttaactttgtggtactgaataagattcacatttttaacagaatccaaatgatgatgattcctaaattgcagtgttcaaaatactgtaactgtgttcctgcagtctctgtttgttttatagctcttttggatatcatctcttttacattttcatcctcactgattatgaactccttgatttaatcattcattatattgcctagctcttttattcaatatctttggttttaagctatagaaatgcaaatcaaaggagcataagccaatagagggaatgaatatactgacttccatccacagaccagagggaaaacagagtaagagctacccgtagtaatgatttaattgaaggactggttacgattcctcattatgagcgtggtgttgaaaaacatggattctagagccagagtgtctgaatttaagtccctcctttgccacttacccagctttgtcactttggcaagttatttaatcaacttttctcatttcagtttcttcatctataaaatgaggattataataatggtacccacttcctggggttttatgaattattaatgttacatggaaagtacttacaataatgcgttgtacaaagtagaagctatatgttgttattgtattgctatttatctacttaaataactcttactgtagtatgtattgctcaaggacagagattgtgttgctcatctttgtgttatcccacttagcatagtttctaagcaaatagtatagttctttcatatatgcttatcaagtaaatgaatttgactctacctcctaatgaactattcagaaattcatgtttacgattttagcaatgagaacaccaagacttagcaatagagtatcaa

SEQ ID NO: 57543 - DNA, 1027 bp, Homo sapiens
tgggtgacatgcttgatttctttagttaaaatcacttatcatttctcattctaattaaagtctctgttctatagtttatataaattctagttgccccaaattaattttttgtgtccagttaatctctaatgatagtgaattaaatttttttatttaaacccaatttttctgtaatttcctaaaaggaattcaaaaatgttagtaattagctccagtctttaatttgaagaaaagaaaaattaatggtggcacacacctgtagtcccagttacttgggaagctgaggtgagagaatcacttgagcccaggtgttcaaggccagcttgagcaacatagtgagaccccttctccaataaataaagaatcatggaattttaaagctaaatgagagttggggacattataattgcctatttcaacactcatctttttttttcattttacattcaattagtgtgtatttttctctctttcagctaatgtttgctgtggaaaagtctataaatagaaagagattgtggaatttcacagaggaggaagtctcagaacgagtgacacttcacatttgtgcttctacaaaaaagtatcttttgttcagtttatggtttaaaagtacaaagtaccaaaataatattcttgcaaggtttttttgctatttatttaaatcatcatttaaaaaataggcatagttttgtaagatttttctgtaaataacatggaattagagccaccaataataataatagcaataatggttgttaatcatgtcccaaggtgataaaaagcttgagatctgtaatatgaaagactcaggattctgaattttttaccagctatctgccctgtacatccaagcacagcagattccctacagagataaatgcctaactgatggcttaggcaaagtaatgtttttattatgttaaagttttcacctccagtttctatagataaggatgtacaattcaaagcacaggtgcacagagctggatggtataggacatcggagaaattcttatgtctttgg

SEQ ID NO: 57544 - DNA, 1041 bp, Homo sapiens
tgttgaagctagaggatcaaaggacctttcagaattctaaacatggaaatttctgattctttttctgcctaccattgggaggagaagtattgccaaggatgtattgaagagtactgaacttaacacatgctttattttgtgtttagttcaacctatagtcttttgatcaagggtttagccatatatgttagatatgagtttgtatgcgttatttaggttgtatatttaataatgttttgttgatccatgtattttatctagactacatcatagttatttttctcccttctccactgctagagttcagcaagaccagcagattggaagtatcaaagtggattatcatcctcatggctttctttagagtgtacagttcacattaatattcacatcccactttctgctacttctgtcagctatactctggagaaaaatacaaaggtaccagggtaaaatgaattttcttcagtgattgctgagtgaacaatctgcttttattctgcttacatgtgtcattcattttacaatcctcaaaaattacattctgcttacaatgttgttatgtgagtaacttattaccgcagccaaattagaaatttttagaaatttttagaagtggaacaatgtcataatactagtatattcagtttaataataactaataatttagttgttagactaaatatactagtacttattatgtgctgattaagtattattatgtgctttgtcattaaactaaatataacagtattcattaattaacatgtaaaatgtaattaatgtaagaagctatactgtttggacttttagctttctcttagtacttaggtttttttgtcttcctttttccagttcttttttgtatttctataccattcttttatttttatcttatttttcttcatttttcccattgaagatgtcaaatagagctttttttttttattttttagacttatttgatgcttttttctcacttttttttttaaggtagtgggcattaaattttatttaactgatcatgtacttaataacctc

SEQ ID NO: 57545 - DNA, 1050 bp, Homo sapiens
ctattaacaaaaacctaaaattttaccattttttaatcttatattttgtaattattaattcgattttaactgataatggcctattgtgcagtccaaatgtaccatataattggtgtgaagattttcatatgtagagtatctattttgtgcctttttaaaaatgatggctatacaagtttagtaagtgttccactgttatacatattagtatctaatttggaacactgcaattatttttttagatgtgaaattttattcatttatctgtttttaactatttagataaatttatcattaaactataaatttgttaataagtgtgctaaataagtggaaataaaacattgaatgatgtatcagttatttagtgggcatgattgtactggaaagcaaattattttttttgttagttaaatattgtaaatctaaagtattttatttcttactgtgttttttgtgtgtttttccctgtaggcagtaaagagggatatattgaacacagttgctgatcgttgtgaaatgctatttgaggatctgcttttgaatgaaattccagaaaaaaaagttatgagtataaaataagtacttttttgcgtatcttcaactgatatagtaataagatatcaagatatagcagatacgtcatcttttatagctacctatctatattttcaagcagtatatcatcttttattattggatgaaaatttttcagttgctactcagatttttttttttttttttagacagagtctcactgtgttgcccaggctggggtgcagtggcacagtcatggctcacctgcagcctcagcctcttgggctcaagcagtcctcctacctcagcctccctagtaggtgggcctgcaggcacatgccatgatgccttgctaatttttggtattgtttttttagagacagggttttgccatgttgcccaggctagtttcaaactcctgaactcaagtgatccactgtctttggcttcccgaagtgctgggattacaggtgtgagccaccatgcttggctctagaaaaacgttttagaaca

SEQ ID NO: 57546 - DNA, 1037 bp, Homo sapiens
taaatatcatgtctttagattttttttaaagctagttctgtttgacacttcgaaatattaactgagacattttaaaatacatgtttaatttctacatgtctagacatacagtgagtatttcctgggaaattgtaccaaaatttaagatactaaggtatttttcaagcttagcaagtagatcttaataaaacaagttcaggattaagtaggtaaaattacaaagctttaaggtatttctttcaatataaaagttttctcaaaactcattatcttacttggtaaagcatcatgtcagaacagaaggttttaaaacactaatttattaaacattttctccatattatttgccttttttttttcatatacctttcatgtaattgggatactaagccaaaatgggcagttccagaaattagatgacttttatagagcatagatttgctttactatccaggttttgtaacacatttttttttccctagccatcactttcacatttgactttatactttggaagactgtttgggttttttgctttctttttgtttctagtgagttcagtgtatgaaaacatgtctataaataaatatgtaagttccttttctgatttcttagttattctttgcatagttaattctcccttcaggaatagggtgtttgattcagagtgtgcttgagattatagtgagtcaagtaagtatttgattggggaacttcaaatctatagtaaactgcctcaagttagttgcaaaccaccctttagtttttcagcaataccagatcgtgatgtagagcaataagcttgtttcagtggggaaaataaaatttctaaattgcccaatgcctgatgttaaaataaagaagagctactttctaatcccatgaaaactaatatttttaaagatacaactctagcatagttccatgaaaactaatatttctaaagatataactgtagcagatggaaagtatctgctttttgaaagtagactggtaaaaatgtttactgctttccaaaatttattttccttggttag

SEQ ID NO: 57547 - DNA, 1285 bp, Homo sapiens
acacaggtggctttatattataatgattgagaactactgcctactggagctgccgttttcttttaacctacgtagcataagacagctggtatgccaatataaatatttatataagccctttaaagtgtttgttattttttctcttagatacgtctcagtgcacatgtgtgcaagagagatactttgtccaacatttgaaatctagtttttcaactaattgctgtatttttctctaagatgttgctgccttttagtatatacatatgtatgtctatgtatgattgtgtgtttgtgtattgttttttaggcccatcagttacccacatttcagagcctaggattagtttggcctttcttttgctcattccattttcatttgttctgtgtttgttttacttttaggtgtgattgcagcatttacagttgcagtccttgctgcgggtatctcctttcattacttcagtgattagggtgaggcacaaagagtttcttgatcatccagagaacattgacagacaattatgaataataaagatgttaacaatccatctgtatttaaaacactagcagccagatctgctgccatgatgcctatttggtgtgtttctgattaaaatgaaatcacaagctgccttgtttagcctgctttacattgtaggtggcccgcatttccagaaataacgttatgcatctagatggaagctgcatgtaacaaatcattattatctatttttaaaagcttcaaaatgatgggatatgatcatagattttagtcttactaatctgaatcacatattaatcaggacattaaaaactttaacagaggcatgatggctcacacgtataatcctaatgctttgagaggctgaggtaggagcatcacctggggctgggagggagttggagaccagcctggatgacataatgagattctgtctctactggaaaaaaaaaaaattagctggacatggtggcaatcagctctagtcccaactacttggaggctgaagcaggaagatcacgtgagcccaggagtttgaggctgcagcgagctatgatcacatcactgtactccagcctgggtgacaaaatgagacattgtctctaaaatacataagtaaatttaaaaaaaaaagaataataatttgaacagtgaatgttgatgtaacatcttaataatagagcaccagaaaaatttctaccaaatgagacaacaactttaggataagttcatcctctaggagctttctaatgtgcactcagttcctgtatactgtgtgttttg

SEQ ID NO: 57548 - DNA, 1745 bp, Homo sapiens
ttaatatataaaattaagacttttgcttccagcaagtatgttagactagatattataaaacaactagatcctgaataaaatctgcttttaataggttcactggaagtaggagaattttcaagaaccatacttcgacatttcctctgccacaaaaaatgaacgcattttaagttaggagtcatgaatactgtattgaccatacaagtggattatggttgtctggatggcagataccaatagcaacattgtcatatgcagtttgcctcaaatcagaaacaagaagacatcggaatctgagatgctgccctagagaggacagttaaagaaggttcagtggtcctcagtttgcagtgctctagctcctggcagaagcaagagggaaacattcctaatttagttccaagattcctacagattattatcaagtagtagtattttatgactagagatcacaggcacaagttgaaacaaactaacatgacaagaaagctatagaaaaaataaacattgaactcagttcttcaaggtttcatcaccaacataaggaatgaagttggaaccacaggcagatctgaaaaagaaccaaatagagctcctaaaaatgagaaatatttattgaaataagaaaaaagccctcagacatgttgaatattttattagactcagctgaagagacaagtgaactaaactataagctggatctaaagaaattacccagtgagcagtgaggagaaacaaggagctagaaaacattggaaagttaagagagttcgagggaagaattataaagactaggagtcctagaaagagaaaatttagagaataaaggagaggcagtacttgaaagataacacaattttacaaatttgttggaaaaacatgaattcataaattcaggaagcacaatatataccaaacatatatttaaataaaatccaggcctagactcaaggtattgtaaatgacaagataccaaatacaagattttaaaagcaaccatggggagaaaaagatcagtgaaagcaagacagtcaaatacttagtaggcttcctaacagcaacaatgtacccaaaagagggtagaattctgagaaaaactattagcttagaatttgcaacaagcgaaactgaaacaaacagatgctcagatgaaaaacagatgttatcctcagcacaaattcagtaaagagactacaaaaggatgatcttcaagaagggaaatgattctaaaaggattatctgaaattgaaaaactagtaagcaaataaatgataaacataagtaaatttaaactgttgtttgtataaaacaattataatgaagtgtttataagaaattgtaaacaaatgtaaaactaaataaacattgttatgcaacattaataatgtggaatttttaaataaggatataattgtaaaattggataatagctgctggctggcagaagggtgattggaattagagtggtctgaggttcttttattcagaaaactggttaagatactgtttaaccttaaaattgactatgttataataaatatgtgtagtcaagagttcaagggtaactgccacaacaatagataggggatcggccaggcacggtggctcacacttataatcagcacttttggaggctgaggcaggcagatcacttggggtcaggagttccagaccagcctggccaacatggtgaaatcccgttctaccaaaatacacaaaaatcagctgcgtgtgatggcatgcgc

SEQ ID NO: 57549 - DNA, 2470 bp, Homo sapiens
gcgcctggcccctaaacttcttaaaagaatcaggggtcaaatggaaacagagaagttggcagcaaattgagcaaaagaatcaaactgttttttattttgtgaagtttgacattggttgtatctctgtcttcatcgccttcacaggagaaaaggaaatgtctgcagagttggaagcactctatggtgacatcgatgctgtggagctgtatcctgcccttctggtagaaaagcctcggccagatgccatctttggtgaaaccatggtagaagttggagcaccattctccttgaaaggacttatgggtaatgttatatgttctcctgcctactggaagccaagcacttttggtggagaagtgggttttcaaatcatcaacactgcctcaattcagtctctcatctgcaataacgtgaagggctgtccctttacttcattcagtgttccagatccagagctcattaaaacagtcaccatcaatgcaagttcttcccgctccggactagatgatatcaatcccacagtactactaaaagaacgttcgactgaactgtagaagtctaatgatcatatttatttatttatatgaaccatgtctattaatttaattatttaataatatttatattaaactccttatgttacttaacatcttctgtaacagaagtcagtactcctgttgcggagaaaggagtcatacttgtgaagacttttatgtcactactctaaagattttgctgttgctgttaagtttggaaaacagtttttattctgttttataaaccagagagaaatgagttttgacgtctttttacttgaatttcaacttatattataagaacgaaagtaaagatgtttgaatacttaaacactgtcacaagatggcaaaatgctgaaagtttttacactgtcgatgtttccaatgcatcttccatgatgcattagaagtaactaatgtttgaaattttaaagtacttttggttatttttctgtcatcaaacaaaaacaggtatcagtgcattattaaatgaatatttaaattagacattaccagtaatttcatgtctactttttaaaatcagcaatgaaacaataatttgaaatttctaaattcatagggtagaatcacctgtaaaagcttgtttgatttcttaaagttattaaacttgtacatataccaaaaagaagctgtcttggatttaaatctgtaaaatcagtagaaattttactacaattgcttgttaaaatattttataagtgatgttcctttttcaccaagagtataaacctttttagtgtgactgttaaaacttccttttaaatcaaaatgccaaatttattaaggtggtggagccactgcagtgttatcttaaaataagaatattttgttgagatattccagaatttgtttatatggctggtaacatgtaaaatctatatcagcaaaagggtctacctttaaaataagcaataacaaagaagaaaaccaaattattgttcaaatttaggtttaaacttttgaagcaaacttttttttatccttgtgcactgcaggcctggtactcagattttgctatgaggttaatgaagtaccaagctgtgcttgaataatgatatgttttctcagattttctgttgtacagtttaatttagcagtccatatcacattgcaaaagtagcaatgacctcataaaatacctcttcaaaatgcttaaattcatttcacacattaattttatctcagtcttgaagccaattcagtaggtgcattggaatcaagcctggctacctgcatgctgttccttttcttttcttcttttagccattttgctaagagacacagtcttctcatcacttcgtttctcctattttgttttactagttttaagatcagagttcactttctttggactctgcctatattttcttacctgaacttttgcaagttttcaggtaaacctcagctcaggactgctatttagctcctcttaagaagattaaaagagaaaaaaaaaggcccttttaaaaatagtatacacttattttaagtgaaaagcagagaattttatttatagctaattttagctatctgtaaccaagatggatgcaaagaggctagtgcctcagagagaactgtacggggtttgtgactggaaaaagttacgttcccattctaattaatgccctttcttatttaaaaacaaaaccaaatgatatctaagtagttctcagcaataataataatgacgataatacttcttttccacatctcattgtcactgacatttaatggtactgtatattacttaatttattgaagattattatttatgtcttattaggacactatggttataaactgtgtttaagcctacaatcattgatttttttttgttatgtcacaatcagtatatcttctttggggttacctctctgaatattatgtaaacaatccaaagaaatgattgtatt

SEQ ID NO: 57550 - DNA, 1030 bp, Homo sapiens
ttgagtggaagaagttgttttaaatattctagtcagttctttcctgctcccaggaaagcccggattatgttttaagataagcaaaatgtcttaaaagtaagctgttttactttgaatttttccctaaatgttgattagtgtactagatccattttaatttggaaagtgaagtgctacttatttgaacttcttaaaaatgctaattttaacatctaaagagttaactaagaaaagcttagtaacatgatgtaccaagttgaatatgctgttatccttatttagaatagaaaattggtatttctacgttttatccattctaaggcaggttaaaaaattgtatttccatgactacctatatatttcttgaatttattattgtaaagttgattcatagtcaaacaattaaatgtttaaattaagattaagacactagagaatgatttatttgctgtcctttaattgcagcaaatccttgctgttcccacccatgtcaaaaccgaggtgtatgtatgagtgtgggatttgaccagtataagtgcgattgtacccggacaggattctatggagaaaactgctcaacacgtaagtttgtcctttggttgcctcattaggagtggggctggatacagttatcattgtatagatttgtgtcttataatgagtcccattaatttctccctccctttcttcgtcttcttgcagcggaatttttgacaagaataaaattatttctgaaacccactccaaacacagtgcactacatacttacccacttcaagggattttggaacgttgtgaataacattcccttccttcgaaatgcaattatgagttatgtgttgacatgtaagtacaagtgtctttctaaggtttttagccttctcaaagaaaaatatgctttataatactgtaagcctaatctaaaaacatatttccaagcttatcaaaaagactttaagatagcttttaagtttgccttccatcttaatcgccaaaaatattgacatttagtcccatccagtttatacag

SEQ ID NO: 57551 - DNA, 1012 bp, Homo sapiens
aaacaggtagggttcccagcccaaatgacatttaaactggtacctaaaggagaagtatcttggtcatgagagcaagaagtcctaggcagagaaaacagcgtgttccaaagcaaaaagaccagaatgcttgtgaggagctagaaccgacccaatattactagagaatagataacggaggtgggggctggaagggcagatgagactaggatgataagccctggtaagacaaagacttaggactgagattttttcattaatgcaatggaaagaatttgatggcatttaagtagtaagtcacacaactgaattttcatttttcaaaatgttgtgactgtagtatgttaaatatattggagaggaatgtggaaaataggtttttcttttttttcaaagaacaggagggacttcagcctgttgaaatggcaatgaaaatgccagtaaagagggaggagttagatactaagaaaagaaagaatgtgagcttaaggctcatatcatcagtgaatgaggagagtccaggaagttggtaaatgtctgaagcaaggagaggattgttaggtagaatctaacagcaagagttttggctgagcagtggttttcatgacaggtgaggagagcaatggcaatttcttcaaaactagcttcgatcagatgtttacattttaaattttatctcagacttcagtttaacccatctaatcatccctttattaatatttttctgaagttattcttattttgctttttacagttcttttcattttcaccattttaaatgagaatttactgaaagaaaggcccctgcgaaagagaagcctcattagaagctgtatttagacactattacccaccatactcttaagaaaaggcgtgcgttttacaaccaaagaggccacgctgtgtgttggaaaagccattcttaattccactaaattctgtgtcagtagcttgtcaggcatgcaaaagacagagctaatttgactttcaaaaatacagctattatctgttagat

SEQ ID NO: 57552 - DNA, 1030 bp, Homo sapiens
agcaatttttatttcctaccatggaaaaaacattttaatcagaacaataatgcacgatattcaattataataacaaatataagttattggttaaaaaaatctgatgcaataaaatattgataagtaaacaggtcaagttaattaatagaagaacagaaaacgattaaattctgtaataaggtgacatcaattttacaaaatgaatagatctatgactatcagaaaaagaaaattgctaaaagaaaacatctttgatgtaatttatcatgaagacataactgaatgctgaaaaggaagtgcaggaatgtacttcaatagataaggttagacttttcctaacggattcaacacatcccttgatattcttgaatacattgttgagttcactttatgctgccagtcaactcttgaatattcatattgttataataatacatcagcacagaaaggcaaagtttaatctgatagtagctgtggttttgtctgagacacagtcagtgaaggaaagtcagcccctgatgagtaatggagtagagataattgactacctgtatagtgaaaagtggttatttggagatgatcctcaatcctaatttagacacgtatagtcagaagttgattaactgcaatattctaaagccaacattttaatccatagagaaataattaaatactactctgtgccaggcacaaccatttgtaagaaaatggtcaatagctttctttagcattagggtatctaatgaacaattaagcaattaggtaattacttaaagaattcctagggtcattctaagatgctaaacattaatatttctgaatgagaaagagatacattcatttcaacaactacttttaaatctgcttcctatatgcattatttacattattaacacatccaaacaaaccaaataataaggtcatttcaggtgagtgattacattaattaaaaataagttgacagaaacaaaaggtcaaatttgtatcatgaaaaattaatgaattaatttatcaagagaacaaaatgtat

SEQ ID NO: 57553 - DNA, 1034 bp, Homo sapiens
acagttaaaatatataccaagaagtcattaaacattttcaaaggtaagcataaaaattacttaaacaaataatgaaattgttgaatatttacttttccaaatcacatcaagacaatctgttgataagacaaagctgattttattcttaccactgcacgtgagtgtattaccataacagagactttaatagtagggcagagaggagaagggaaaattgaaacattaattgaagttttatgttttttaagtggatttattaatgtgggcaatgtaagacttcattaggattagataaggaccctggatatgatagtttaggattactggacagagcaaaagaaggattaagtgaagttatttgaaacttaccttcctaggcaagaatttcctggaatgataaagttatgtcgtttaagatgttaatgtagacagtaggttgtttgcatggaggctgtttgtgtctcacaactctgtggttttgttggaaatggagaaaagcccaaaaagttaaataaattgtccaaggtcttgtatctgttggataagagaactagaaaccgggtattttcacaagtaaaatttcaaaatatttcatattttgattttttgctgaaaaaatccattgaagtcatttactttttaatgaaaacatggtaatataaaaaccaccatttaaagaagtagccagtttaaacaatattgattatacagattgctttgagcaatactcaggtgaatatttgccttcataaaatgggcagatattgtaaaacttctgtaacttatattgtaatcgcttatgtatctgatagtattacccaaggctatatgtttgttgagagtaaatatagtatcttgtttattattatagtttcaggatgtagcacaaagacatgtgcataacatatgctcaataaatacaataatgacacaataagagcttccaccagatggcacccagtgtctgtagttcagattaacttatctgcttattttcagctatggtcaattgagtcaattgagtctcatgattc

SEQ ID NO: 57554 - DNA, 1059 bp, Homo sapiens
gacactaagcttattccttggattcattttgacttcactttaaagacaactgaaatattttctcattgtttccaaggggataaactagggtctactttggacaacaaggcgatttatttaagttccctgcatatataaattctatatatatatagagagagtatattatatgtatgcaggcattatacatttgtataggtattataggtacaaattcaactatagtaagagtcggtttctgattatactctaagaaaatgtttttaaggaggagaagaatatcacagatggctttgttatattttgtatgtaaaagtaatataaagcttttataagtgcacaaaatggaattttgaaagaaactggacacagaaaaattaagtggaagctttattaaaacctaaaatcatgaaaatctctaagctcttatttctatgctcattcttcagatttatatcaccttctctgtatcaaaaactgctattataaaattagtttatttttattctattttttattgtagagtactagttaaatatacaaatacatatatatatatatatgatgataatattagggtaatgtgctttttaccattttattttctaaaaaggaagaaaaagataataaagttaagtctgaaacagtacagattataaggtattagcatagtgttttcctgccccagatacacacacacacacactcacacacacacatgcacacacgcatcacttcaacatcaaggagaaaacttcttatgggcagagaagcttgagtctgttttccaaaccccaaattcaagtgcctacagcatcacatgctaagagccaggtggcactggcatggtgagaggggcttgcgccagaggagaagacctctggaattatgaaactcagggttcatagagaatgtgcaggcacatatatccatccttgcctctgaaaatgaatagccgttgtcttttactctgaaatgtgaacatattttctcttggggtgggggaaagggctctaacttggaatgtaggcagtgggcactgggtaagataaaatattt

SEQ ID NO: 57555 - DNA, 1056 bp, Homo sapiens
ggttttggggtggaagtaagcttatcaaagaatagaaggtgattgccttggtactgtgggcaatgtggttcacttagtcctgggtgctgcagcagacacttccatcaatgcccaaggatcttttggactggaatctgagcagatggtgcctgagagctcagctctcttgtttccccttccctgatcaacttctccttcttccatctttctcaactctcttttcttggaacctccgtaagttagaatacagaaataactgctgcagtgttgtcaggttgaaacacgttccccattgattggtggtctcttgcactggacacagttgtatagcttctttttgcctgtggacccaatatcagctgcatcctcctaatctcacttttgagtttattttggaaacaaagattggaagaagattttgctctttgttttcatttccattatttagctgatatttttcactcatttttttttactcataattgattccttatctaaggattaaaaagtaatttcctcagctctactcatagtcttgtatcattgtaatggttttactactgattttttttaaaggcagagatagatgaataaaaataaggatttttacaaactgtgcaaccatgggtaaattacttgacgttgagtcaagagggatcaatgttctcacctgaatcacaggagtagtaatagcacctgactcactgggttgttgtggggatggaatgaagggcattatgtaaagcaattagcaccttgctagaagtagtaagtgctcaatagaaggtagctattattataattgctttatattagattccgtttcagtaggtcaggggtggaggctgagaaccagtaccttgggtgatcctgaagcaacccatttctgctctaggcattattccctatcttttttaatattaataaagtaaaaaagattcatagactcaaatatgatagtggttatgcttttcacatccagtgattaggaaacacataatggcaaagttgccctgaatgtattaatgctttgaaataaatttgtatcttttagtt

SEQ ID NO: 57556 - DNA, 2152 bp, Homo sapiens
tttgaggacagaaaactttgtatgagatgcgatacacatatcaaattacaaattatgcttgttaactaaaaacgttgatgttggcaattaactttattatttttaatatgacacacagactatttgctcttattcattctaaggcacagcactgttttatcatactgttaaataataattatactacctaatacattacaaaaagagattgtaattgttttaattgctgtattttttatttaaggacgttttaaaaaaagttgtataatgtagaagtctaattcattgactcttctgaagtggcacagtggaaaaatattgcattgtagtactctaaaatcttgcttttagaaatgtcttctgaacaccagcagaactggcatcatctgagagtttgttagaaatacagaacctcaggcattttactaaatcagtctgcattttaacagggtctctaagtcattggtatatacattgagaagcaatgctataaagcatatgtctttgatctgtattgaggacttactgtatactagctgtgggactttggtcaagcttgataacatctataagctctggctttttcatttgctaaagaataaaacaagtactgtgttcaagctatataattgtaatgaagatctattgaactagtatgtaaaaacatttttttttaggtcatataaataaagtttgttgacaccaaggatacataatcctttagtgacattatgttaaagtcacttaaactgttatgttaaactcatttattcacatttgcagaaactaatgtaagatttttcttatgctcatgtgaataggaaatgggcaaatatgtgtatatatattgttttggaatactcatgaatgagtttgactttatggaatttttaaattattacaattataataattcatttcaccttcagataggaaagaactgcaaaccaaacatgatcctttcttagggcaaagaataactatgtaattgtccaggaaaagtttgttataagtctcaagttataaaacataatgctttagaagtcttataaacaatgtatttcaagcctttcagcttgagaataccctcttaggcacattttattctaatatagtctaaaactgacttttaaaattttgtaacatactatttttaatttttaggcaaaagaaaaacagaacgcaaagaaagctcaggaaaccaaatgaagatgttttcagatatgtacacatttctgcttctgcacatattttcatggaaaccattatgtataaagaacttagagcaacatcctaattggctcagtgcacgtttggcaatagtgccagcctgtcttgtctttaatgcatggattcataaacttcttccctacctgcatcatgtgcatgtagtgcatattaaatgaaagtgatattaagaatgctttcccaaattccattatttgacattgagtctgacaactgttagttttctggttgtctaactaccatatgaagctagaaaatgcacaaacgatattccttatctgtaatttaaatacttaaaatttgcaattgtcagatcttgattaaactggttgtcttatttcttctcatcattaacggaaaaaaaatcagtatttctatctttgatatctaagtgttttgaggattttaaaactgaattttatctgctataccagttatttgagaaagtatgattttaatgtaaatcatttaaaaaggacaaaagtataatttccagtgattttcactgctgtcagtagaaaagtaataaacatctcaattttattttagtaaattttcttcaagtgtttggggttatttgtttatgtattagagaattgtttcaggaaggtctgagtattatgcttcaaagcaaaatttcaggttaagaagaaattgtaaatcttaaagaatgttggtgttactctcaatggaatattgtttcaagcttgtaagctgtgtataaaaaaactggaggtctgacagttcatgttatctgcttttttaaaaagatggtagtggtgatgggggtctttctatgccaatttgaataaatttcgtacagcctgcagttttcaagagccatatgtaatttgctcacaattgatttttaaaaattgatttgggagttgctttgtaataatct

SEQ ID NO: 57557 - DNA, 1102 bp, Homo sapiens
gaataagtaaaatgcagttaaattgtttttaagttcatactgtaaatcagtgtttctgaaagtgaacatcagtggatactctttaaaatacatgttacctggcccctccccagatattctgatataggggaaggattctttaataagttccccaagtgattctaatgcaactggtctgtgtaccacagtttgagaaacactttgagaagacactactaggcaaataaaattttggaccattaacttaaagacgagaatacatggtaggtatattttccttattaattttaaagtttacaaagcaaagattgatttcaaccaagctgtttcatgttatacattctaaataatatgagatgtgagctaataagttttttgtgtatattaccttattgattgaaacatgtgacccaacttttagcattaaatgtaaaaattattgcagaagactgctaaatcttctcttttccattataggtttttctgttcatgcatctcagggtgtattctaagatgggaaactgtttttaaagttttagattaatacagggtcctgtggttctcaaaattgcttggttaacaagaatacctagatatgatgttattaatcatatcaaatgtttttctgttaaaaatattaaaataactataaaatgtgctaaatatgtgatacatcagattttaagttagataaatgttactagggactaggacccttagataaatattaaatgtataaattttgcattaaaattgatctgtgaacagaattttttgtgtgtgcaaattagtaagtaaaagaaccactgttgtttgatttttaattacactatatccccagatttttttgagagcatagttagagaacaacagcttgtcagcttaacattagaataattattccttagttcacattttttggacacaaggtggcagcatataaatacctgatgttagtggaacaccaactctgttgtgtttgccttcattttcttaaggaaagtagttattgaccttctagttgcttatttctctaagctgttcttttattaatattccagaagcaatattgagatagatttatttcttatatacatgcaat

SEQ ID NO: 57558 - DNA, 1033 bp, Homo sapiens
ccccctttcgataaaaaataatctgaaggaaagattgtgcttgatcacaaaataaagctggtctcattagactttgcctgattatttgcacaggtgaagtagcaaatgttaatttagcttgtagatgtttagttgtttttataaatgacattttcataagtaatgttagattggacttttaaaggcctctattatttgctaagtcaggggcaggaggcccttgcccaagaaactccctccacatgttttattgtgttaatttttattctcagtgggaatggaatctcattatttctaaaatcattttcttatgagaatggatataccatttctattttgagttggatgcaaagaataaaatatcaaaattagcagaaatgtagttagtgtggattgatgttttattttcagattgagaatatcagaaggaagcataattatctgcctttcattatggaattgttaaagactttagcagaacaccagcagttaataccactagtagaaaaggtaagtattttattggtagatacttaaattaagtttagagtctccaaaaacataaaatgtattttttattttttgcttgaatagaggtaaaatttttggaagcttgtacgtttttattcttttgcttttgcctcttgttttctactctgtaagaattagttcaattgagactgtaaaacaaaaataaagaattaccccactgctttaggcttccagattcttagtgtcaagacctcaggttatgctgtattaaaataaaatttaaaacacttcctttaagcaaaagtagatttttaatgctgataattgaaataatattttcctatttagcaaaaatttgagttgatataacagaatttaaaagtagaatggacattgttgggtttaaaaaaaaaatagcctgtactacgaaataggttttcttatttctaatttagtatccattccactgagggaaaactagcataagttagtgaagaattctgatttctatgatttttttcataagtaacaataaaatatt

SEQ ID NO: 57559 - DNA, 1039 bp, Homo sapiens
atttatttatggaattgaaacaacataattatactaaaaagagttttactgctctaaatttattaaaatatttgtaaaaaaatattttgggccaaacttttgcattttaaagttgattgttcttatttttatttgtgttaactgttttaaaatttctttctaggtgcatgcaatcaagatgattggatcagtgcagtaaggcctgtcatagaaaaaaggatacaaaagtaaatgctcagctaatctcattggcataatattctgttttttaagtattttttaaacttgtattttattgttattttagcagtgtgcattgaacatctacttttttttttctttttaatttttcgtagagacgggttttcaccatgttgcccaggctggtctcagactcctgagctcaagccatccgcctgcctcgacctcccaaagtggtaggattacaggcgtgagccactgtgcccagccaaacatctacttttgattgggttaatgcatttaagaagtctatttcagaaaatctctaaatttcatgtagtagtatgtcatcttgtctttagagaagttaaacatgcagatttccattaagttagataattttttattttcttttttttattttttgagacagagtctcactgggtcgcccaggctggagtgcagtggcacaatctcggctcactgcaacctctgcctcccgagttcaagcgattctcgtgtctcagcttcccgagtagctgggattatgggcacatgccaccacacccggctaatttttgtattttcagtagaggtggggtttcaccatgttctccaggcttgtctcaaactcctgacctcaagtgatctgcccaccttggcctcccgaagtgctgggattacaggcatgagccactgcacccggctaggtattttgtactgttggataattgacagttattttgtagagttttatttttgagggtttatttttaatattaagctctttattttggggtaattgtatattcaatttcagataattatatatatattc

SEQ ID NO: 57560 - DNA, 1445 bp, Homo sapiens
aaatatgtggacattgtataccctgtttgggaatttaaatgagggtggaaactaatgtgagttgggttcagaatttctctacaatcacacaggtgaattgaagcttatgctcggttataaaatactaattgaatttgaataggtagaaatgagtctaggaggaaatgaataggagagggggacaagctctgttggcttaatcagctatgttttccatcaggatgattgatcttgttaccctaactggattggtttttggtaatattatgagttcattgagttcatttggtttcctagaattttcaactccagaagtgcagcaaatttctgaaaatagattaggatagaaattaaacatatttattctgtttatgctgagacttcataaaatataatttgaaaactgttcatgttttggggccattgtcaccagttaaaaaccattttttatttttttaaacacattgatatcttcacttttatattttataggtaattaataatgcttgtgctactcaagccatagtgagtgtgttactgaactgtacccaccaggatgtccatttaggcgagacattatcagagtttaaagaattttcacaaagttttgatgcagctgtgagtacaatcttcttattcctaaaatgtcatatttgtgaaagtttgtatattaataggctactttaaaaaattattttagatgaaaggcttggcactgagcaattcagatgtgattcgacaagtacacaacagtttcgccaggtaaagagactttatgttaaataaatactgtttctttctttgcttctttgagtttcactatttttttatttactgtagacagcaaatgtttgaatttgatacgaagacatcagcaaaagaagaagatgcttttcactttgtcagttatgttcctgttaatgggagactgtatgaattagatggattaagagaaggaccgattgatttaggtaatgcagttcctgttcctgatatttcacttttgacaggggaaaatctgttgggtatttaccctcattcagtgctgcttaaattttcaaggtaaaagtgactatgaggtaacataatataatgaaggccttaagctcttcagtgtgttatattaatatataggaaggacatcttgactaccatagttcagttgatgcctttgagtttttcccaagtaaaattattttttaacctataggttacataatttatattttattttccatttaacatttaaaaactacccttagtgaacgtaaatagttactcttgtcatttttaacccattcgtaagggatagcaagcatttcttaacatccgtattaaagtattttcatttggaattggataatttattgttttgcaatcaagaaaatatttttcttaaaatttctctatttaaatagtgcgttaatgtgttatcctttctgcaa

SEQ ID NO: 57561 - DNA, 1045 bp, Homo sapiens
cttaatttttcttcttctgtaatggctttgactcgttttagtattaaggttattctggcttcatgaaatgagttggaattttctcttatttttagtgccttgaacaatttgtgtaaaattaaggtgatatacttcttcaaatttttgtagaattgacctgtatatccatgtaggcctggtattttctttgcgagaatattttaaaatactgcttcatttcagtagttaagggactattgtggctctttattttttcttgagttggttctggtaagatgtatttttttaaaagatttcttcatttcagcttaaattttcaaaatcatttcatacggttgttattaatattcttttattcttttaaatcttattttatttttagttatatttctaattcctagatttctcacttgcatgtttgtgtgatagtggttttatgtattatattaacctaccactctttattatttcatacttttattagggtaggaacctggctgatcttatttctccttttagccgccttcagtccttcctgtaaattgacttaaactgaatctttctgaaccactgttttgattattttatttctatattcaaaatgtcttactctttgggtaaactcctaattactcaaggccagtgacttaacaaggtaaagaataaccccactatgactataaccacactagtacaaatgaccaatatgctcattgtctcttgaacaacaagcacatcaaacatcttaatttgttcttttgttcacactgttctcactttttaaagtgaatttccttctctattctctagttcctaccaagctttcaaacccctattaaaatttcacatttgtgaaaaaactttctctgatactccagtataaaatgattttttcctttactattttgtttttctggtgttcatcccttttttctgtgtatctttctttatagagtcttcatgagcaggacatttatactttttttcagtatcactttctcttgggaaagctactgttacattctcaacctttttccttgactat

SEQ ID NO: 57562 - DNA, 1010 bp, Homo sapiens
gtcacatagacctggttggccacccatgtggctggaccttagtctccagccccacaggaggttgagctgataatcttgacccaatacccccaccctaagtcacattattagactatcagtgtggcccaaagctctcaggtaaacaaagactcttaggcattcaaggacttagaactcatctcccaggaaccaagggcaaagcccagacctctctttgggcaaggttaatttctttactatagtcataaaagtgggacttcaccttgtcagagagaaagcctctctgagtaagtgacagttcagctgaaatctaaaggttaagtaggtattaactaggggagagaggttcaggatcattccagattaattacagctttatagcaaaagtgagtaagactagtaaaaggtacaggaagaagaccaatgtagctgaactgtgcagagcaaaggggagatgtcctgagatatgaagcagaacaggaaatatgttagccaggatattaggtacagttaggcataggcataaaaaaaacaatagtttataagaaataggtggtttttttttttttttttttttttttaatattcaagagctgtcaaggctccaggctcttttgttttgctcctttgtgtatgttttctattccaaaggttatttcatggtccaagatgatttctggggcttcagccattctttctcaattccgtattcagacaggaggaaggggaaagcacactcctttcccttttatagaatttgcctgtgtcacatgtatgcttgtctctggccaaaactcagtcatttgagttagcagtagaggacactaagaaagttgtcttcattccaggtggtcatgagcctagataaaatttatgtactctagcctacagatgcagacagaggtcagatcttacagggtattttaggctgtgattgagacttttgtctttatctttagagtaatagaaagttactgaagtgttctaagaagagtgtcatgaacagattt

SEQ ID NO: 57563 - DNA, 1569 bp, Homo sapiens
atcctatcattttggaaggctgaggtgggaggatcacttgagcccaggagtttgagaccagcctgggcgatatagggcgaccctgtctctaaaaaaaataaaaagttagccagacttggtagcacacgcctgtagtcttagctattctggaggctgaggtgggaggattgcctgagcccaggaggttgaggctgcagtaagctatggtcatgccactgtactccagcctggtcagcagagcaagacctgtctcaaaaacaaaacaaaaaatccaaatagtccatttgtataatatttttgtgcttatatatcattatacatatagtaactataattttaaatccacagttgtttgtaaattttaagatctacgtagtagagaaaagctaggggacagatgagtttaaaagtctgtgaggtgatttttctcctttttaaaaatgtttttattttttcaatgtatataagcatatatgccattataaaaatttaaacattataaagtggatgctgtagaaaataaaagtgtcttgtaatctctgctttagacataaccactgaaaacaatttatatttttacagatttttttcccatgtatgtttgtgtatatttgtgttaggttattcttgcattgctataaagaaatacctgagactgggtaatttataaagaaaaggtttaattgacctacagttctgcaggctttataggaagcctggtgctggcatctgctcggcttcttgggaggcctcaggaagcttttactcatggtggtaggcaaagtaggaacagacatctcacatggctgagctggagcaagagagaaagagagagtggggcacacatttttaaatgatcagattttgagcaacagctcacttaacaccaaggggatggcctaagccattcataagggatccacccccatgatccaaacacctcccaccaggccccaccttcagcattggggattacatttcaacatgaggtttgggcagggacaaatttagagactgtatcagtaaattaattaattgtgtttcttccacactaaactgtaaacctgggagttagggattttgtttttatattcagtccttggtacgtggtaggtatccaataaatgcagaccgaaccgttcatctctaagaatattactattaaacagtgctagaatttactaacactaagatactaatgatgtctgatttatagagacctagctacttttaaggtataagaaagtactctataaagaaagaaaaaaatgatagtagagtatgaatttataatttctggagtcccttgatattttttagttctgtgttacatttgtattattccagttgtgtttatgaaagtctcagattagtgattccccatatcattgttttggtactttattttgctaacgttcatattaaactgacaggtcaataattccccattaatatctgtcagtctttttagtatatgcctcctataagcctatgctaggagagttataatatatattacatcaatatgtaatagttgattttaggtttcaagggcttacagtaataatt

SEQ ID NO: 57564 - DNA, 1033 bp, Homo sapiens
gaggatttttcatgaatccaataatatatgaaggttacttcctatatttaatatagataatatatgctatcaaccgtttatctataaacatgttacatgaactttatatattttggagttcagccagcttctggttttactatattcttattttttaagtgaggtaatatcaggtagaaatgaatagtctacagatttgagaataaacctttcactacaattttattttaactgatataattttaagttgtattagcatcttctaaggcaacagtctagtaactatgaatggcaatagtgatcttttaaaaatttcccatatttacttcatttgtattatatttgttagataactgactaaaattttatagattaacaatgtattatgaaagaagcagggtttgatgtcattaatttgtattttattttgtaggccagttcatgggttaatttttcttttcaagtggcagccaggagaagaaccagcaggctctgtggttcaggactcccgacttgacacgatattttttgctaagcaggtatggtccttggatactctgaaaagtctcaagagcaaccctttttataaacaagactctagtttactactgtttgctactagtgtagtagtcctcaaactcttacactcttaaaaattattgacatctccaattacagtcttaaaaattattgacatctcaaaagagcttttgtttctgggattatctatcaatgtttgccatattagacattaaaactgaaacattttaataatatttacgccaggcatggtggcttataactgtaatcccagcactttgggaggccgaggcaggaggatcccttgagcccaggaatttgttttttctttttctgagatagagtcttgctctgtcgcccaggccagagtgcaatggtgcgaggctcattgcaacctccacctcccaggttcaagccgttctcctgcctcagcctcccaagaagctaggattacaggcacataccaccacaccaggctatttttgtattttta

SEQ ID NO: 57565 - DNA, 1223 bp, Homo sapiens
aggggaggaggagacgtgactctgaagtagttgaaaatatacagttggaattcaggataaggatcagaactaaagatgtgatttgaaagttactgttaagtattagttatttactttcccagaaaaaaaagtatagagtaagaaaaaataataataatataaggctaaagacagagctggagaaatggaacagttgagtgaaaagagtggatagaggtgccagagattgagagagagagaaggaacagtcatagagtggtaattcaatgaaaataaactcttgaaactctttaaattataaatatactcccactgtaaataattgggatatattaaagagagtaatgagatttggctgtgagctttattagttttaccattttgttttgtcatgtgttgcatttcctttagttaatattttatttcatgttgaaggaaaaaatgaattatcctgtttactgaagaaaataatttattatttcaggttgccgaggagcccaagtagaagaaatatggagtttagagcctgagaattttgaaaaattaaagtaagtataattttagttgtgttaatatgtatatatatatactttaacaaacttaaaggatattcagatttgtttgtttattttacttggattactctaggttgaatacgttatgtcctttaagtctcttcaatcctgtgagatagatattattattatttttttataactaagaacctgaggctgataggtaacttgcaagggagtcaaacctaaggctctgtaattccatatccacaaagtactggttagttgatttttttttttttttttttttacaaaattcacttatatatcaatagtgttagaacatggaacacattttaacataaaaagcaagaacaatagctcagtgtactaaagcatatttgatagataatatatatttatagtaatccagaacttgcctacacactatcacattacctctgggaaagttatatttaaagttccaaatgttgatgccagaaacaacttttctccttcccccatctttctgaccagaatcacctcttttaacttctccttacccctgactaccatgccctcaaacattgaccctgtatcttcaaatggagggctagaggaattttcactggtgggagtcttggagtctggaatggggtcagggaatcttttaaaagggaaaatagggacttaggaatatgctaactg

SEQ ID NO: 57566 - DNA, 1015 bp, Homo sapiens
ggagcacagccagaaggaaaagcataaacagtagtgatgttaaagtatatgggttagccaacagctagcaaagtgactagaacataatatagcagactggaggaatatttatttggatctgaaactgaaaagataaactgaggacagattgtatgccatgttgtatagtttgaattgccctgtagtgactggggatttacctatcaaatatattttaatgctgaaatgacattattttcataattaaggtttattgtgcttttaagtgtgcagggcaggttggaataaagtgagagaagctagacatctcttaaaatggttggagtccgagatgattggctaaactagtgggttaggaaggaggagttagattcaataagtttgctatatttaaatcaacagttgcatgtggtaatgtctgctcttcattcctttgggagcagaaatacatccataacacgctaaattaaaaaaggagttctcagggctgccaaccttacagtagaggttgagtggtagtatattactcctacataagagaaaaaaaatcaaaaggactgcttactaaaagttggggaaaaaaagaggcaaaaataactccctggtttctagcctgggtggctggtgaaacactcttacaagtgaagagcaggcttgatggacaagaaaatggattcagatttggacagacactgagtttgacatgtctgcagatttagtcatatattttacgttcaaaaccttaacaatatgttaaagttaactttcagaaatgttgtactaggtaagtttgtttttactccttcaatttcatatgtgcagaaaacttggagatcatgcatgaaagaatgatatataaattcatcttctgtacatgcacatatgaaaaatcagcagctattaataaattggcttcattagcagaagaacctgcaaacaattaaatggtggtagtttatgtcaccatcagatgcttcaaagagaaaatcagtttattccaattatttccatcatt

SEQ ID NO: 57567 - DNA, 1605 bp, Homo sapiens
ccgcctccgccccagaggggcgaggatcccggatgttgcctcctcggcgctgtgaatcaccgccctttcttctcaggccccagcccttccgaatccgctacgggtgctgcaaggcctgggaagagtttcgatgtctctagggtggctagagcgtcctcccgcgctcagtcgcgctgcaggtgacggcgcccggaggctgtcgggaagtaggcggggtgacgtgtggttgacgagctcggcggcgggtttgctgagatctgtggccggcggcagctggtgcggggggcagctgagagcgagaggtggatcggggcggtgtgtggccagggccatgacgggcaatgccggggagtggtgcctcatggaaagcgaccccggggtcttcaccgagctcattaaaggattcggtgagaaccaaggggaccgtcctgggcctggggtcacgggaggaggcccaagctgggcatggagtggttccctgcggccaccgccgccccgcgtctggagaggtgacttcaggaacctggagtccgggtgggggaaatgtagatgttctgccctctcctcagctcgagacagtcgcgtttccacagtaatttgtagagccacaccacgagggcaaggatcgtgtcagtcttgtgcctgctgcatcctcaggacctggcacccaaatcctgtaattgacttgagggccctcgctccccaagctcttaagcacgtattgccctttgcactgccccttctctgcggcgcgcaccttatcccgggctggtgaggtcaagtgcattgctcaggccattagtcctgcagaagccaccctagggtgcgccttctcaagggtgaggtgtctgcggctcaagccgcccaggaactcgagattctggttattcaaagcagaacgccttgaatgtgtgaatagctcttcgggacgtccacacacgctgactgcgtgggcctgaaaggccacttcactggttccgctctctgctcatttctggcttccggtgaagtgagttttcttgagctagtgttctagactagaggccacatgctttcctcacagtttctctctggctgtatttagtgcctttcgtcctaaataatcaacacattttactttttatccttccctatttatcttgttcttagtctcttctttggacagtacgtttttatctatttcccaagtgttattgactctacgatgttaaaacttttacgcgggattaacaattaaacgttgatgtagatattgcctgttgtacacagcttaatatttggaatgtcatttatcaagcatatgttgttcatcttctatatctcaggcacagtggtaaggattgggaaattttcttttttttgtttgagacagagtctcgctctgtcgcccaggctggagtgcagtggcgcgatcttggcccactgcaacctccatctctcggggtcaagcgaatctcctacttcagcctcccgagtagctgggattacaggcacgcgccaccatgcccggctaatttttttttttttagtagagacagggtttcaccatgctggccaggctggtctcagctcctgacctcgtgatccacccgcctcggcctccca

SEQ ID NO: 57568 - DNA, 1221 bp, Homo sapiens
aatctctgaaggagcacactgtatctcaaaaatgtgacgccttagttgcttctgattatcacaccactgtggctatgatttgtttgtttgctgtgaagggcttttagtttctttagattataaaaataggaatacaaaacaaaaacactttaaaaactgaagatattactggtagtcatttcaaagtattcagatatggtttttttctttcattttctgcctttcctgatttttcttcaggacatttatattgattttgtactaagggaaaaactatggaacttaaaagatgtttttaaattaaaagagttaataacatttcagtaaacctacattttgttttccttttgtaattttattgtgcccatctagttgtaataacattttgcctttttgttaggtttcctaaagacaaaaaaaaatggaggaatctgtaaaccaaatgcagccactgaatgagaagcagatagccaattctcaggatggatatgtatggcaagtcactgacatgaatcgactacaccggttcttatgtttcggttctgaaggtgggacttattatatcaaagaacagaagttgggccttgaaaatgctgaagctttaattagattgattgaagatggcagaggatgtgaagtgatacaagaaataaagtcatttagtcaagaaggcagaaccacaaagcaagagcctatgctctttgcacttgccatttgttcccagtgctccgacataagcacaaaacaagcagcatttaaagctgtttctgaagtttgtcgcattcctacccatctctttacttttatccagtttaagaaagatctgaaggaaagcatgaaatgtggcatgtggggtcgtgccctccggaaggctatagcggactggtacaatgagaaaggtggcatggcccttgctctggcagttacaaaatataaacagagaaatggctggtctcacaaagatctattaagattgtcacatcttaaaccttccagtgaaggtaagcataagatcttcattgggaagaagggtgggtaagggatattcaataaatagcaaatttttatttaacataagacaagtgtgtaatattttctagaaatagccttttattctcaaaatatacattaattcaaatatatttaatgccttcctgggattacacccctaccacaggcgatccagacattaataatcaagaatcaaatgacaggtttata

SEQ ID NO: 57569 - DNA, 1069 bp, Homo sapiens
agtgtaaaagaagctaccctgtccacttctacttatttctgctgtttttgtaaatatatatattttattcaacagcaaaaagagacaagtgaatataattaatataatataatacattacaatacaatacaatattaattgagatagatctgtactctcgtgagttgttctgagattatggacctgaaactttctaatgctggtgtctttaaaaagaaaagaaagaaaagcctctgtaacaaaatactcaggatacaggtttttttactctaaagtctcatatttaaatagtaatgatggaataagaaaattaattcaccccatttgcttaattgttatatcatggaaagcagcatcccagtgtaagggcattaactcttgtgtatccagttatgttgatcatataatgcattttgaggaaacatgttctgtttttttacttggtaatcctgcatgctttttcaattctttatcttgttaaaggacttgcaattgtgaccaaatatattacaaagggctggaaagaagttcatgaattgtataaagaaaaagcactctctgtggagactgaaaaattattaaagtatctggaggctgtagagaaagtgaagcgcacaagagatgagctagaagtcattcatctaatagaagaacatagattagttagagaacatcttttaacaaatcacttaaagtctaaagaggtgagtgaattatatgttacagcatgtgattaaacatgagtaatttagtgtaggtgctaaaaggataaacttggggtagctatatatttatacttttaaaaagaaattatttaaaatatatcttgaaattgatgtctgtttaaaacacctaccatgatgtccaacatgatgtaggtggcatttgtgttagtttcactccagaaaatctactgccttgctaattaaaaaaaaaatcatctatgcatttccttcataaaatatacttcacatcctttttctagtaaaaaacaagttagcttatttgataagccttttacttagacatttttcattctgaaagtactttgaaccccaaatgaaagcct

SEQ ID NO: 57570 - DNA, 1285 bp, Homo sapiens
atcaaagtcatcagccaaaagttgatcatcccagagatatgtccttatatatactcatacacactgccccagcatttgatatgttgataaaaatatctggcacccttaataacctgacaggtttcataagtacaaagtgcctaggctgctcaataatgtacactgcagcccatagaacaagtaaagtaattgaagagagaagtagaaatttcaggcagattcttatacaattttattgtcccttcttctaaaactcccatattctagccttaaaagattgacccccgcaaaaaaatgactttgtatttaaaaagctctggtagagaaatgttaaagtgttttaattttggaggtattttgcatttccttacatttatgtttttaatatgtattttggtctttttctacagaaaatggatattccagctaaattgattgtttgtggaatgacatcaaatggtttcaccattgcagacccagatgatagaggcatgttggatatgtgcggctttgatactggagctctggatgtaattcgaaatttcacattagatatgatttaaccataagcagcagcacgatccagagatccattgccatcagtgatctcactaaaaatatacagctacttcccagctaatctccacccaatgaatgatgatggtatagtatgtgcataatggaaagttaccttactgaaaaaaaaaaaagaaggaaaaataagatgggcccaaaggtctatctactaaactagctcttggggaaatagcttcaggatactgtagtttcctctatctaatagagaactttttgttaacagacactgtaaaatagttttgctttgttgaataatacgtgtgtacctaaaagaggtaagagcaaaaagtgtaattccacatcatgttacttgagaagtgcttaacgttttcttaaatgttttcattgggaaaggacagctttgataatgtccaaatactctgaaatgcactagaccatataactgtgatgaaatatgaaactcatctgtaaacttttataccaagggggtaaaaaaaaaaactaaggcatttgattaaattatgaatgagttttacaaattcctttcagagttttactaagatcacacaaataacagctttcttattcagtgaaaaagatattttatttctgatgttttatttgcacttgtggaatatgttaccattaatcagaaacatcatggcaacccctaagaatagactaagtttgtgttggctgagggattctatttggtttgctttttttt

SEQ ID NO: 57571 - DNA, 1051 bp, Homo sapiens
agtagaaaaatagaatgggaacatgtataatcttgtaattcataggaatcctcaagcacaattaacctgtgttgctatatatatctacatatatagagaaaaaacaaaaactttacctcattatgaataaaatgtactgaagtgataagttttttatttcctgagttacttttaggattactgttaaattaatatttgggaaaatactgcttttaaaaacaatcctgcaagaataaacaaactttatttcctaggtagtatgtaaatagttccaggatatagttgtaattagtaaaacaaaaactaatcttataatcccaccctttattagttgaaagttcttggaaattccatttattaatacttatattatttagtaatctatcttatgagagtgttagtgaggcaagatgctagtgaatggaatttagtgttaccctttgacacctcctttgctttatctaacttactgtgtgactgtagacaaccagtttaacctaagtgatttgattatttttatccttaaaaagtaacatatctgtgcttggatcatagaagaatcagtgatttaatatttgtataaaaattgaaactgggaagagggcttgcaatacaagttagaattctttttttttttggttaaaaacattcttgttaataagatacgtatttcaaaagataaaatgttttagaaaaatagctcactcaataggcctaacagtgttttaaaacattcctgttcagagtagaaaaatttagaagaaaaattttcacagctaaagtattacccaaaaagtcactattctctactgaagagggagaaaaaatatactccaagatcttcttggacagacctagaaaaacaagcttatactctgaggaaatgctgttaacaaacttttttttttgagacaggctatccctctgtcacccaggctggagtggcatgatcacagctcactgcagccttgacctcccaagttcaagtgatcttcccaagtagccaggaacactggtgtgcactgcactaccacgcctgcttttttttttt

SEQ ID NO: 57572 - DNA, 1048 bp, Homo sapiens
acttactttaacttgacctgttgtagccacaaataacaaatttcttggtaactgatgctattacagtaggtaatcaaaaatgaaaaattctagtcttatatactgcaggtttggggtgattgttaaggcactatcccctctggagaaatgtcatatggcatcagtgtaaacatgcacaagaaagaatttgtaaaaaaaaatgacaggttaatcaatgaaattagttgtatttactgtttggattttatttagtgtttccttgatgtctgtttcctcatctcttatttgttggaagattacttttctacctcttttttttcttttaaaattcctttcttacatttctgttgtttctttttctagtccttctctatctggataataaaatgaatgacaggaaagtcacccacatagaggtttgggatgaaccttttgcagattgctttttgtttcatacaagtataagatcatattttctttttcaacttagtaataggcaggcttcttggaacaataagtagattgatacactcctccccaaatcaaattatattgtatatcttttatattagatgtttgcagaaattctgtggcctttaagatcagttattcagcctttgtaattatgttatctagctatgttgaaaagataagtgcttactatataagcactcttagaaaaataattaactgattactctttcagaaaatagcaggtgtctcaatgctttttttccataattataaagaccattgtcaaaatctttggtttactaaatatttcactgagcatatatagagatacgttgcttgtggcataaaaagtcttgtagataacttactcacatttggcttttttttaattggtgcattttttaatttgcttttttgaaaattatgaagttaaaatttaattctaaggtagtatttttcatgtataaaactaataatgtagttaagcatactgtttgaataaaattataataaatggcacaattccttaaaccctgaaaataccaagttatattggaaaatagtggaaagaaaa

SEQ ID NO: 57573 - DNA, 2154 bp, Homo sapiens
gaaattacgatgattattttcagtgagaatgaatttatatatacaacaaaaatatacaaaagctaaccttctcatcctaaaaagatttttccctttgcttctgttttatttagccctgccatgcaccacattaattttatgaacataaatgatatttaacttttctttttttttttttttttgagacagagtctcactccgtcaccaggctggagtgcggtggcgcgatctcagctcactgcaacctccatttcccaggttcaagcaattctcctgcctcagcctcccaagtagctgggattacaggcacgcgccaccacgcccacctaatttttgtatttttagtagagacggggtttcaccatgttggtcaggctggcctcgatctcgtgacctcgtgatctgtccgcctcggccttccaaagtgctaggattacaggcgtgagccaccgcacctggccaacttttcatcttaagttgtttaaatttatgcacttttagatatcagaatatatgcttgaacaaaggaaatagtaaattagctatatgtctgctggtttcacttcgatgtggatatggatatgtggataaagacagtaaatgaaattaaaaccctgctgttttaaatatcattaccagatataattgagggaatattatatcaacaaacatattgaaacttggctttatttgtaacgtaaactatatataatccatacgtagccaaattagatttaaaatatacaattaatgaatagtactcaaagtgtttttgttgcactgttactctgaatatggactctctatatctggtatggcgtgactgggcataacttctgtaatgtatttcagttatatgtttttccttttattgccagcttctgataatgaaattttccaaagggatgagatataagaatcatcttttataaaaaccagtggggagtggggtattataatctagttctaaactgtccatttgctttatataaaggctttgatttcaataactgaccatttgatgaatatttaaattacacagaataatgtctacatagaataaacttaagtattcaagagccttaaagtgaaaaaatgaaccttttgactgccttaaaatactacttgctctgtaattcaggcatactagttactttccttggggtctgtttaaataatgccttaatagtgttctaatgtttctgaaatacagaactcaaagggtcttttagagcttttaattttacatagtgaatggaaatttaagtattacattttaaaacctgattgtacattggtaatttaaacatccaataacaggaaaatctagatacagtgatgtgttatacatacatgactgttaacatcagtaatattttatgatagtttaaggttttttattgttttctataacaagttatccaacaggttggactttgtaacatgatatccaaggaccaagttgcatatttaacatcgaatgaaaatgtagttgtacagttccaaaaataattaattttttaagggaatttttcaagacaaaaggcaaatattttgtttcaaacctacaagcaaattcattccaagaagtgaatatagtagtaaaacataaagactattgcaataaaaagtttccaggccagtgacttgtttaattacattcacatttttacattcactttgcctttcaaagcaggagtattttataaaactgaaataaaactttaaattgtcaagctggtgcttaaagttatgtaaaatctgatttaagtttatttcatttccaaggaaaggaccctgaaaggaggggacagggagcttcctaggtctgttgataaactaactgatgctttgtcaagtcttccaagttttcactgtaaataatacaactaacaatgtaattttgctgttttctaatagagaatgaatgaatatattaatgtattacatttgtttcatgataaaacagttttcactgatactgtgaaatcctttctctcctttctagccttgcaaaataccctactaaataaatcattttagacatggagtgcaggtggacactgtgtgaactgtttttggtcagttattgtagaaattgatagatgtaccaaataaactctatgcacattaaacaagtgtctgtctatctct

SEQ ID NO: 57574 - DNA, 1130 bp, Homo sapiens
actctttcccttcagtaaacaaatgtaagaaataactaaatattactgtttatctgctttagtttatttaaagctttagtaatcaggaagaaaggttttagaatcagattgtttggatttgaatcccagtctgtcatgtaccatcattgtgattttgtgcaagttcctgtgcctcattttcctccaaaacagggctaaaaataatacctaccttaaagggtaaagattttaagatttaatttgtgaaagagctttgtggtgccaggctcataaaagtacccagagttcaaatgtctcgttattatgtgaaatgatcttagttctgatactagagtaaagcctaattcttcttttgtttgtccaacaggttccaagaatatttgtcaatggtacttttattggaggtgcaactgacactcataggcttcacaaagaaggaaaattgctcccactagttcatcagtgttatttaaaaaaaagtaagaggaaagaatttcagtgatgtttatactaataagtttgctagtacagtgtcagttatttaaagtggtaatgcccgataatgtcttttaaatgtttgaggatgttttaaatacatgcattgtcttcacgaagaagatgtaaaaataatgaacaataaattgcggtggaaacctcttcttcccacttgccaattcttgagaaaaagggatggtattaaaaaaatgaaaggttggagttgtatcaagataagaatgtattttattaggaatttagatatgaattttacaaccaagagctagaaggtaagcatttggaattctttatttcctattcaggagttaactctttatctcacatagtttttaagtggtaaggactgatatttgatttctctttaaaatttaaggcttttgctgatacacttgtgaactaggcaggaatatcttatacgatattgtgaaaagccttcacactttgtacttgtagagtaatagaagtatattaaatttttagcatggaatgaaatttatcttagagaaactaaattactcatttaatgacttaatagttcattaagtcattaatgacttaatagttcatttgtcattaaaactatacctatgggcagaaattaaaaggagaagatt

SEQ ID NO: 57575 - DNA, 1001 bp, Homo sapiens
gtcgtaggcgaggacggctgttagtgctgctgctgttggttcgtcgcggcggcgaaggaggaggaggaagagggcgaggcgacaagagaagaaggaggcaggcgcggcggcagcggcggcgccccgagccggcggaggcgaggggggggaagatggcggacgtgcttagcgtcctgcgacagtacaacatccagaagaaggagattgtggtgaagggagacgaagtgatcttcggggagttctcctggcccaagaatgtgaagaccaactatgttgtttgggggtaagtccggcatggctgtggcccaggggtggcagggcagagttgggcgcccccaggcgacctctttcttaacccctccccccgtttcccctggggatgggataaaacgggtgttcggggaaaagaaagtttctctctagagcagaagttgcacttttagggtaaggaaagaaggggcggagctctagagcagttcatcacttaaaatttttgagaagcccaaaggaaaggtaccgtgggagtttctgacttttacagttaatttttatcagtaggtatgtgtaccagcgaagtgtgggactggtgcgcaagggatacctgaacataggtgcacaaaggagcacaccgtctggtgccgtagacgcctctttttgttctttattttttttttctcttttccaggctgctatgtaactatctccgctggtctttgcaactcctggtttatttcatctcctttcattgttggggtgggggtgattcctgtagaagagaaaagggaatcaaccctgaagttaggaccggaaagaaatttggtgaatttggaagagtcataaaagtctgtgttagagaggtcttcaggagttggtgaaatgagtgagctttacagatctaagaaatagatggtgcgtgtgatttttcggaagtgtattttaaagggaaatgtttgggaatgttggtccatgtgaagttttatcagtttaagtcattcaggaaa

SEQ ID NO: 57576 - DNA, 1058 bp, Homo sapiens
agccaagaaaattattaaaagtaacatgtttaatacattttcaggatttttattaggttcttttagcctagtcattttgttcaaatgtgatttaaaatatattgtatcaagatatattggaataaaattcagacattacatgttaatatcaagttgtaagaaaattattaaaagtaactaacatgtttaataaattttcaggatttttattaggttcttttagcctagtcattttttacaaatgtgatttaaaatacgttttttcaagatatgttggaataaaattcagacattacatgttaatatttattaagttgtgtatcattgttattcatttcatatctcatttaaaattttggttttagactgaaaatattcctgtggttagaagacctgatcgaaaagatctacttggatatctcaatggtgaagcgtgtgagtactttttaaattgttcccagtcttaaacagacattgtttcttttttcccctatgaaataatgattagagggaagagaatttgtatttccaccaaaaaattaacctaccttcatttttgtccatgtgctcacctttttcttatacagtggatgcactgtctttgcccttatggccagtcaccccttccttgtgtgtggattccatctcctttcacagtctcaaagactttgtcttcgtaaattgttgtttctctgacatcatcagttttctactttcttctggatcattcccttttagaatacctacagtaagatttcatgtttaaaaaatgtttttgatcccacattcctactgtctactgcttcatttatctcctccctgatactgtaaaatattctgcaagagttcgtgtggtatcattgcttcttttttacctttgtttctttcttgaagccactctagtctggccttcatccttaccatcccactaaaatcactccttgtaaggtcaaaactgatttaaggattgctacatcctttggtctcttgtaccatacttgacctctcaacagcatttgatactgttgaccactcatttttgaaagcctttcttcatt

SEQ ID NO: 57577 - DNA, 1052 bp, Homo sapiens
tgttcacctctcagtttattttggttacttctgtacctgacctctaattcttgaagtttccaagacttgatctttttttttatcttttcttttaacctgtattctctaggtgatctctttcagttttatggctcagatatcatatatatgctgatgaaatttcaagtgtttttttcagcattgatttctttcagggcaccagatttataaatttactgtcaacatgtttccttgaatgttgaataggcatctgaaatttaacactgaaaatggaatgcctgattccctctttcccttctgccctcacacagaacaaaaacaagtctgttgttttctcagtgttcccactttagtaaggggtagtgagacgctcttcctgcagttgcttaggccagaactttggtgacatctttgtcacatctcacatccattctatcaacaagttgtttttttctctttttaaaagtatgacaacttcttaccattctacctgccctatttcatccttgctttttagattattgtatagcttcctcacaggtccccactctttatttcctatagtgtagtcttagcaatagagtgtcctgcttttgaaaaagtatataaacttgattgtgtcactcacctgtggcttcccatcactcttagaataaaactcatacttgttaccctggcagtcatcttgcctctgcctaaatctctgtgactccatcttctaccattcttcctttgctcataacagtcagtctttttggtcttttagctatgctaatcttagcacctttgcactttctctttctatcttgagttgtctttctctacattatcacatggctcacttgcttactatttcatttagatctgtgctcaagtgtttttccaaatgttgttccatcagagaagacttctctgaccactcttatcgaaaatatagtattcctttcctccttctgtggtttttatatagtgccatcctgatttatttttcaccagatctcatacattgacctgaaattatatatctgtttatgtacatagtgtctgtcttt

SEQ ID NO: 57578 - DNA, 1030 bp, Homo sapiens
tttatgtgtttacttacacctttttaggtgtctgtgttatgacattggagcatatactttgaagcaactaatttcagtcagatcatctcagtaatttgtaagctaaattgttaaaaatagtttgtcctcttagagactttctagtatagattaatcttttaaataacatgtttttgcagagctgctttaaaactgaattttttacctagagaaaatcaccatatagaagtatataaaaaacctaaagcatttcacttgtaataatatccaatatatatgttgaaatagtaatccttacgtgaatctttttatgtcttcagcaacatcggcaagtatagacagaagcgctcccttagaaataggtcttcagcgatctactcaaggtatgtcttgttgcatatttatattgaactttcagaagcccattccaaaactacacatttatttacttctctttcttttatagtcaaacgagctgcagatgaagttttagcagaagcaaagaaaccacgaattgaggtaaagaaactgtattttaaacaattttatttatattgttattgaaattgggattctttagtaacaaggattctttgattgcagtaacctgaggagctttttttctggaaaaatttttgtggtagaaagaacaattgattaataagtagctcaagctatagttttagctctctcacatgcaagctatgtgagggacaaatcattttattttctttgcttttatattcttatggatgaacctattggctcaagggtcagaattctttttcctttctgttcttttttttttttttttttgaggcagaatctttctctgtcacccaggctggagtccagtggtatgatcatagcttattgtagcctcgacctccggggtttaagtgatccccccacctcagcctcccgagtagttgggactgcaggtgcctgccaccatgcccagttaatttttgattttttttttaatagagacagggttttccgtgttggccaggctacagaattctttctt

SEQ ID NO: 57579 - DNA, 1085 bp, Homo sapiens
ttagttggaagcttctaacgttctaatgaccatcctttgaaaacctttaaggttttccttagagcattttgattagtgctaatggattcaggacctgtagcaacagatgaaaaaaaaatggagataccaaaatgaaattgttgactctggtgaaggcttgtcataacatttggttattaactttctcaaaaagatgaatttatttgttgtgtctttctgaagaaagtcagctatgatatgggaagagcacttaatcataaagaaaaaagtagctaagcaagtttttcctaagcttttcgatgattccagtcttaagattcaacatatatttattgttattatctttacgtagccaaaagtagtcttgaagttggcctaaagacactgatacctagaattgtagaggtaggaaatttggtaaggaaaagttacatgtagcgttttttcttcctaaaagttcaataaaaattttaaatgcattaaccagtggttatttccaggatgaagagtgtgtgcgccttgataaagagagattggctgcccgtttggagggtcacaaagaagggattgtacagactgaacagattaggtaagaattctttttaagtagaaagtaggtagtttagatatatgtaaaagtataaggaaaaggaatattaaaatgctctccacatttacatttacctcttggattcattttatgcctctttgctcttaagttcgtaagaacatgtgtggggattggaagtcattgtgtttatcatgctttttgaaaagtcttcttgtttctattaccatgttggtctttctttttaaaaattgcgttataagctgagaaattcattttatgttacctcttattgattacttacaccagaagtcagcaagctttttctggaaagtgccacatgttaaatatttttagctttgaaggtaatatggtctcttgaaactactgaacttttgtggtgtggggaaagcagccatagacaatacatgaatggatgggcatagtttcttcactttttaaaaatgttttcatttttctggattccagctactcaaactctacttgaagttgtttg

SEQ ID NO: 57580 - DNA, 1115 bp, Homo sapiens
ctgcactatggcatacaagtttgaaaccttgaaataaatttcaaggaaaacctaggctttgaactttctgtaggatggattttttacctccttccaaagtggcatctgtgtgtgtgtttaatttccatagatacagaaaatataaagaaaagcacctatattaatgagtcctgcttttttgtggggaagagatgaaaaaccatgaagaattttgttgtattgatacttctaagaaattactaatttgctcttagagtaatatctcgacatgaattctttataaaaattttatataattgcagaatagcaagtcagtcttacagataagaaaaccttaattattgccatgtaagtgtttttaccagaaatttataaatgtaacaaaatatatttatgatacactccaggaatgcctgctgtgaaaatttaaaaaagaaattgcttttaggtctttgtctgaagctatgtcagtggaaaaaattgctgcaatcaaagccaaaattatggctaagaaaagatctactatcaagactgatctagatgatgacataactgcccttaaacagaggagttttgtggatgctgaggtagatgtgacccgagatattgtcagcagagagagagtatggaggacacgaacaactatcttacaaagcacaggaaaggtaattaaaatattttactcattcattggagtgagagagagagagagagagtgcgtttaatctgtggttatagaattggttaaactttgcttttaggtggaagtttcaagttttatctctttgaaagctcagtaataatgtagatttccagatggccatttttaccattccattcttgaatatggttgttagacatcagagatgctgatgaaaaagtaggaatcaaaatgcaagctccttcacagatcatttgcaaatcaaagaatggcccagttttcctgttgagtcatttttgcttaaacctaataaatggaataatattgatggcaagttctctggttattaatgccatcattatttttttttctcacatggtagagaacttatggaaatctgtagcaaacatttattgagtatattttacacactatattctgttgtgtgggtata

SEQ ID NO: 57581 - DNA, 1050 bp, Homo sapiens
ctattgcccaggctggagtgcagtggcatgatcttggctcactgcaaactccgcctcccgtgttcacaccatattcctgcctcagcctcccgagtagctgggactacaggcacctgccaccacgcccagccaattttttgtatttttagtagagacggggtttcacctgtgttagccagggtggtctccatctcctgacctcgtgatctgcctgccttggcctcccgaatgtagcagtttaagtaaaatgaaaatgatgaaatgaataccatgggatttacaataatcagtctctggatcaatatcttagtagtggttggtttttacatatgtgtataataatgataccttatgacatatgtagtagggaagaatcgatagtaagataacttagtcttaaattatcaactaaatttactattgtatatttaaagtgggcttaattaaaatccatttatattttagaatttttccaagaacatttttgcaattcttcaatctgtaaaagccagagaagaagggcgtgcacctgaacagcgacctgccccaaatgcagcacctgtggtaagaatgctttactgctttacagtagatttaatgaagttgccacttatattgcagtgtagtaacgttgaagacatcttcacattttaaaatcagtggattctaaaccttttgctcctttagcatatctgaaagatgtgaaagccctccccaacattaaaagttacttacttcagcagtaattcttaactggagcagtaattcttaatatacctgggtcagagtctgaaaaaggttaattagggaaagccctctatttattttaggtaaactgtggctggcctactcattgttgcttgggacaattgctaaccattgttaataacataaatccctgttaactcccagtttggggttctttttggcattgtatctattacatcttggtgaatgtatttctcttgatcaccagccatgctgtcctttaattgtacctccatttcagctgctctgagagttgactgccttctctttgaagtgccactt

SEQ ID NO: 57582 - DNA, 1203 bp, Homo sapiens
gccactgtactccagcctaggtgacagagtgagaccctgtctcaaaagaaaaaatatatatgtatgtatgtatataaaaataagtatatgccttatgactgaaactttggaacactactttttataactttgggtcttttcatggtattagatgcttttagtggtactatcattgagtattagtagtaagtaatttggggttataaagtattcaatcttaatttttgaacataattgcagagatagtcttaaccagcttctatacaataggcttgctggtctgtatttaatatattaatattttttaacctagagtcctttttaaagtttttatcttcacaagtacgtaatttaattttacatagtagattcaaggctttgtatattattgaaccatcacattcaatgtagattattactttagatttgttataggtcataagatacatgatctataaaatcttaacaataagcctcttttttttcgtagaaacggaaggcttcaaaattgacactatgggaacctaccatggtatgacactgaaatctgtaacggtaagttaatttggctgtagatgttcttttgttccagggattttatgtgagtagcacatgttgaagtaaatctttagtctctcatattttttatttcaaacatttttctttattgatcacttgtgctgattgatctgtgtggtgtattatttgattcatgggtatcctgtttcatttttcttttccttcaaattaagttgaatatatgtaaataaaagctgatttgattaacttgcaagtagggcaatgccacctggtcagtatttaaagcctttaagttatgaggtcagtttgggagagctttttcgcataatatcttttgtttttatttttatttatttatttatttttttgagacagagtctcgctctgtcgcccaggctggagtgcagtggtgcgatctcggctcactgcaacctccgcctcccgggttcacgccattctcctgcctcagcctctgcgagtagctgggactacaggtgcccaccaccatgcccagctaattttcttgtatttttagtagagacggggtttcgctgtggtctggatctcctgacctcgtgatcgcccgcctcagcctcctgaagtgctgggattacaagtgtgagccaccgtgcccagccttgtttttaacaatgtaatgtcttt

SEQ ID NO: 57583 - DNA, 1056 bp, Homo sapiens
tactatgcatgtgtattaaatagagtatacttaagacactaataccaaacttttgtctttgcttgtgaatcatcagatctttacggactctatataacatggaatcattatatatgtgctgtggtttctcagaattaacatataactttatatctacgtgggcttttacgtgttttactcactcatttccaaaagcaaatagcaagtatagagatctgattttaagtttgtttttttctggacttcaaattgggattggatatcagatattttgttaatatacttgtttttaaattgtcatcagatttgtttttgtattattaaattatgtgtagattaatgaattcattcaacaagtacttattgagcatttgtgtcagatcctgttcttgttgctggtcatacagctgtgaataagacagatgagccttgtttagagagagaagtcagagatacttctctcaggaggtaacagttgagcagagagacttggatagcattcctctacgtcaaggcagggatcaagactgaggtccagtagagcaacagcaaggaggccagtgttgctagagtttggagaactaagggaaaagtcatcagggattagatactcccatcttatgcgatctgcctggttcttcctgacttcaatatataattcatggctgaagatttagtttaaattcttatgtgatttggttattgacatcttgggaacagaacttgcctactaatcatttccctaagtgcgacagaacttgcccgctgatcattccctgagtgaattagtcgtagaatgaagttgttacccttggggagccatcaaagtaagttttttgttatttttgtgattgttgtttttacttttctcatccatccctgtacctctgaaatgccatgaaatggttttattatctgagcttctttgcaagtagtaaaatctgtgatgggttttacagtgatgctttgtacagagcagtttttctaaaatttaaggatagcttctttattgatcagtatgagaatgatgtgattctgcggcatcatcagagactg

SEQ ID NO: 57584 - DNA, 1051 bp, Homo sapiens
aggcatccattataatttaagtttttatcttattcaccaccatttaaaaattagagcttgtcacataaacagtctggatttccagcttccttaaaatctatctggcatgactgcgtactgggtctgtagtctcacatggcaacagccacatccacctgagcaggagctacctcctttagataagaggttttctctagattgccacaggcctcattactctgttatcttttatttagccttctttacttatttctgctacatctatagactgttttggccgtctagtttgaaatccctgctctagaggcagcaccagtttgttaaagataagttaatcagttggaaatacaacaaatataaggctttgaagtcagtgctggctttgattttcagttctaccattcattctcctgcttgtgaagttgaggaggttatttaacctttctatcagtgattttgtttttattttataatatatataatagaacttacatcatagtattgttgaagattaaaggagacactgtataaaatgcttagtacaaagaggcttaacaaatggtagctacttgtattattaatttatgattctgtaaacttaattagatgtatgtgtaaatgtaggcaactatatagctttattgtacttataatttattatatttattaatatatgtatttagtattgttaatgatataattttcattcaaagttataaagactagtttatataaatattatgatagtctttttctttcaagtaattggggtgtttttgcaacaactatgtatgtttatcttatagcagagatcttttgcatttgagagaaagtagctgcaaataagttgtttaaagagggtaataactaggttggccttttccatccatctgttaggactcatacttagaaagaaatgtaatttcttttagttttaagttactgattttctggacaggatggtggctcacagctataatcctagaactttgggaggctgaggcaggagggtagcttgaggccaggagtttgagaccagcctgtgcaaagc

SEQ ID NO: 57585 - DNA, 1896 bp, Homo sapiens
ctcagctcagtgcaacatccgtctcctgggttcaggtgattctcctgcctcagcctcccaagtagctgggattacaggcgtgcaccaccatgcctggctaattttttgtatttttagtagagactgtattggccaggctggttgcgaactcctgacctcaagcgatctgcctgcgtcagcctcccaaagtgcttggattacaggcgtgagccaccgtgcccggcctcctttcactgctttttgattgcagtatggaattaattgtagttattgcataaatgtttttatattaaacatatataatattttgtaaacgttttatactgaataatacagatatactctttttctctaattggctagtatttagactgaacacttatttagatgggtaaatattaaatcatttcatgccttccttgtagtaagaggtgttagaatctgatttaaccttaatattttgccagcattattagcattttggtgctaatgtacttcaagaaaaatgaattacagcaacaacatattcatgtcagggaattttaatacatataaagcgaatattatttttatgtggtttagtttatatatcttaactgagatttattgaaaatccattgcacactggttgatacattttgtgtaagcctgtacaattcaactcaatttagctttgcattttgttaaagaataactattagtttacccaaaacatattagaggttttagttaatatctgtaacataacttttaaaattattctgccgatgactatggagttaatgccacaatcacaaaacacttgagatttattttagaaagaaagaaaagttattgttgccacgtatatcagagtaatcttgaaatcaagattactaataatttttagtaataaatttaacatcactttgttttaaaatgctgtaatattgatcgttgtaagaataggaaacacagaaaccagtttggaaatatattttgttaaataacaaaaatttatactatgaaacatagttttggttacatatattctcttatagtttagtatataatgctgtagttatagatgactttcagaattgcacaaagattttagttttctttcagcttaatagagctttttattccactttctatttacctgcatcagtgtaactttaattcaattttaacaaaattattgtcagtgttaaacatattttataacttttaatttcctactactccttgtatttttagattaaccactgttctttaacatacaaatgcttttattttctgtatttctctttattattttgaacaaatattaatctttaatgtcccttttaactttatgacagatgttttaaatcaattggtttatatgaaaaaaacctagtatatttaataacatgctatatttgggtgtttgggtatgtccttgatgggaacttttccattggctattgctggctgaacattagtttgttggatcaatttctcggtctttgtaaattgatttagatttttgagtgactttttaatcttttatataattcctgcattcaaattttttaaattaattgtctcagtatttttgtcttagtattcattgaagtgtctagttagttcatcccctttcccctcccccatcctaccaaacctcatttgatctttaattctaagttttggtttcttttccaggtctttttcttgatggatgtttcttttagtgttgttcttcttgtctttcctgcttctcatgttcctctgtgagtgactgttcccatgttttttttaaatacctgtttttaaactcttacttgcttctggactggacaaatcttgctatttagaaactaagttcttatttgaaatttcagaatggtgctttgcactgaatccattgaagac

SEQ ID NO: 57586 - DNA, 1063 bp, Homo sapiens
tcagtcaacatattttctgtgtaacagatcaaaggagaaataactgctggtgatgaacagcagtgtggaggttttgttgcctatggttgatcagctgcctgaatcctgagttgtctcatagggtggcattatgttagtaatttgctgtagcccagagaaaggctgagaaactaagtaatgttagtataccatgagaaactgattcattttaattaagcttatgagagtagcatttgaaatcaaatgctgatttattaatttgcagtgataaatgtaattaacaagggcactggattctcacctctagcacataacatgttctctgtgtaaagctacattggaaatcacagtgtactgtgcaatgagcatataataaattatatccttcaaatgtttagtggtattaaagtagtctgttatttttaactcttcattaaaaaaaaggacttgttgcaagtccagggtacctttccccttgggcactgcttagataggttttgatttgccattgtgatttctattccttgttgtgtctgactaatcccttgccagatggatatgatgtgttatttctttagatgtatagattactgagtcaactttaggactgtgtttcattccattctatttgatttgttaaaaagtgttggtgagggaactagctcttttgaatttgggatttataatgtagatatccaaaggatctgatttatcacaggagaggtgaggagcgatagactgacctttctgcacgtttgagctgtaaatttaggattagtcacatttagctttgttgatttggaaggggagagaagagcagggatttcctgctgggttttggaaatctttctttctttttaaagagatgaggtctcactacgttgcccaggttggacttgaactctgggctcaagccatcctcctgccttaagtacctgagattgcaggtgtatgccactttcctcagcatggaaatcactttctctacctttcacttattacaggttgatagtcaaattaatgaggctccttaaacctcaccctcccaattagtaatttcagt

SEQ ID NO: 57587 - DNA, 1127 bp, Homo sapiens
ccgtgggttccacatccgtagatttaaccaactgccgatcgaaaatattaaaaacaaaaaacaaaaaaaccaaacccagaacgcctgtgctgaacatgtatagacttttgtgtgagttatttttttcttaaacaatacagcataacaactatttacatagcatttaaattgtattaggtatcataagtaatctagagattacttaaagtatgcaggaggatgtgcatattttatatgcaaacagtatgccattttataaaagggacttgagcatctgtggattttggtgtctgcagagagtcctggagccaattccccacagatacagaggtataattgtactctaaattagaggttttgcttatgacctttgattaaaactttacttttgtaaaaatcaagtttacttgtcttttttttgctcagttattagctttctctctgaagtatataggagtcattctcttccctctcttgcatgaatctgttaggaagaagattgtagttatttttttttcattaaccttttcagaagacaaacagatccctgataagggaataaaattttaaacacatttttaaaacaaattttaaatgttaagcaaatgtgaaacattgggctagttttctttgttcattaatttctaggctcagacaacattttgcattgtatcaggcccaggcagtcagtttttgtggttacttttggggctgtgttggccctccctcatggtggtgtgaccctaggaacataggcccctaaaccgtttccctgatcttttcccagtaataaggcatttattgcaacatagcatcaactccattatgttgtatacacaagaactgttttgcttttttgaggcttggtcatggatactgattatgaacagacaaaaaatcttcagcatgtcctctttaggagaagttgtccttggatccatttgccaaggatttgtttaggtggcatagcagacagaggacattgtcttacagagcattaaagaatcatcataggagcagcaaacaattttattactgtaaaatttggtggtagtgggttttctatcccattttagtatttaatatacatcatctgccttctgggattaatgtctaaatgatacatt

SEQ ID NO: 57588 - DNA, 1638 bp, Homo sapiens
actgcttgtacaatcagtaaatagtttctactgctgttactggtattatttttgtagaatttgctggaaatagcacattaataaaattgcagttgagattatatgtgattatgctgtatacaaagaggtgtgaggagaaatctcaattatttggttgaattagaatttcaccacttatatacttgatcaaaataaataagtattctaagtattgaaagttttggtgttttcatcttcttaagtacctattaacactttgaacataaagattagttatttgtgtaccctttgaccaaaagcaaagctgtcatttaaaattatatttttatgtatataaaaatcacatagtgtcgggatgaagaagacacagttaacaagtggtgagatgtttatatacactatcagcttattttgcttaagaaaacgacttgagtattgttgcggaaaagtcaaaagtaaattaatagaatatttattttaaagtaaggattttcaacagtacaaagacactttactgtttgatccagtcgcctttgagagctcacagtgtctgatatcagattactatcgtttttcaagataatgttaggaatatagaaatttacatagattttataaattttatagattttaaattgaaacttgagataggaagaatttaggtgtctgttatctgtttttcatgagtcattttttaaaaaactttttccagatggaaattactatcttttaaagatcctgcaaaatagtcataatttggacaaatagaacttgagttctctttctatgtacacacctgtgtatgcacacacacacactgtttttaaaacttttgaagcataaatcagcattattctacactgagggaaggattccttttgtcttctgtcaaacatgctgatctgatttggtattatccccttatgtgtgacttttattaagtaattctggtatttctgtagtcatatagaataaattaagtgaaagacaggcttgatccaagagctggggtgtgttacatagatcagctctcagaatcacttgatttagagtagaacacttaggctactgatttgaaatggagataagcacttaaacagttttagtgttttcaagtttcacaaatgttacaattctcttctggtgatttatcccttaataatagaataagaggtaaaaatgattgttattagaattaagaaacattctgactaaattaagattgacagatttacatacttgtatggaataaaaacactattttagttagtaggttggtatttcttgattttaaaattcatgatggagtcaaacaaaattattgtgaaaatacttataacactcagtaaagttttttgttttcctttatttttaaaaacttcataaaagtgcattgtatacattgttcatcctagaattgtgtttgtcaaacgtttgtagttttccccatccctcccaaaaaggtttttaattggtgattcagaatatttgtcatctaccaaattaaaaactgcaggtttgcaaacttggcactccaagaaagaaataggtgccataaaatgattaagtgttggcatgtgtacacctgctgtcaggaaataaacttcccgtatgttgcattttggcagacatgcatct

SEQ ID NO: 57589 - DNA, 1034 bp, Homo sapiens
tattgcacgttgaaggtagccatttagcttaatacttaagcccaacaaaaatattcttgtgatttgaataccaggtgctagactttcattgccccaagtttgccgaatagctcttctagcttctatttgtccaggctctgcagctattagtagtattaaaaaaggacttttctcttggcatttttcaggctcattaataatatatttgaaatggtaagaatttggatgtccagtacctttttcattgtaaatacttccattggcactaagtgtattctccaggcctgtaactccttgtggtgacaggtctgtgttattagagttagttgctgtttgaggcctcagggtttgagggactgtttctttccaaatgttccgaagggagctgtggtttgtctcactttttgttgaccgaaatcctcggaaagtgtatgtcacagggttttctttgaatccagctctgcctggcagccagtcatgatgattgaaaaacaaaaacatagcaaaaagaaacactagagaaagtactccaataagatgagtgcggaacagagaccttttggcattccaggtcatctttgcaaagcagcagtgtcttctcctccactgaagcatgttgtaaatatccagtagtggtatatgagagattggtgaccaaaaatgttttcttctccttaatactattctttggcaatcattttctaattcagtcacattgtctctcttgtagtcattctataaaaatgaagcacaaaagtttacagaactgcctgaaagggactttgggtactaatatgatcagggcaaataggaatgtcttaagctgtgaaaatataacccaggaacgaagcttgtaatttatttccccttggcaacataacatcactgagaacaagattaatttatttaaaaatatacctttgtagcacagtgagcattttaaagagatgaggtgatggattcatttcattgtcttgttacactggtcatttgtacttttgacccaagttaaagatttaaaagttgaatgtatt

SEQ ID NO: 57590 - DNA, 3417 bp, Homo sapiens
actatttttaagcttttatttccaaatgacatatttggtaaataataatgactctccgctccacttcataaggatatcagtagatataagggttatgtatgtaaattcaaaagaaacaaaagttgcttttaaaatttatttgataatctgttctaagtgttacaaagataagttatctgttttctgctgatatgataatacttggaatctggttgaagtccaattatacagattttttttaaagtgtaaatttgatggtgtaagaaggagtaaacaataaggtcagatgtttgaatggatgtttgagttaaaggactgagtaaataaatgatggaaaataatcataatttatgttgcttttataagaacaatatacctgaagatgtctctaaagtattttagtattacagaaaacagcaaattattgcatattgtaatgtagcataaatacatagttttggtcctaatatgattttgtaacagtatgtgatagagatgcatcttaatttagacttcatggtatttgtatgttttagatgttaagctgttgagatattaaatccatatataactataaatctcccattgataaatgaagtgcatgtgtctagcctttaaaaaattccttattaaaagattctcaggtcttataaatttttttgttaaaaagaatataaaattaaaataaccatgcctgctttttattaaatgataaaattattctccagttattgcctgttgtattttaattcttaaaaagagagagcaaaacaagaaagttcagtagtatgcaaaatagttctgcacttttacatttttagaagagaaatagctttggtttatctcttcttttttgatatcttcacattattaatgtgtatttatagcttgtggatgaagttcatggggagaatgttactgtaaaatgctgttcagtacacactcagtttttatcatttggcttttaaaagtgttgatctctttagtctgttggtgatggtttaatagaaaaacttacacttttgttttgagatgtatagcttataaaactgcttaattggtgacttcaatattgagagattaaggtaccaagagggacttgaaatttttacaaccatattttttagtactatttattattagtctttattagaataaaaattcatgggtgagagtgatgttgaggtgtaatagagtctggtaaacttgtttaatcttcattttggaatgcagtacttacatatttttaaaaaatgtttgccttttgtgattattagataattactgagttgtgttgtgaaattgaggaaaaatcaggatctttgatagatttgtagaattttagaaatatctttaagttcttgagccctgagttgctgttctatgattgttgctaaaatagtttatttggtttatctgtgccctgcacacacatatagtggcggtagttcattactgcatattaatatagcctggaagcatagtagctacatttatatttaattttttgaccttgtattgccatttgtggatatttttgtatcaaagtatttccatattatgtttttgaatttcacttctgaaatgataatcagagacaacgttaaatttgatcatttggaatcagtcttttacataaaatgtaagctatttaaaatagttaatttttaaagccactattgatgtccctttgtttaaagttctattcatggtcactataataacacgaggctctattgtggggttatgcataaactcacactaccttatgtgatcttatgttaatgctttccttttagtatcttcttgtagcttggtaatatttaaaatttgttgatactctctttggttgtgttcattatcttcatttagggagatgttggggaagattttgttactaaaagctgttacatattaaggttttgttttaaaaggactttgaaaaaaaaactcttaaggttttccttgctactatttaatgaaatttcactgcattgtgtcttttgatagccatttttaagagagcatttaatttactagataaggattcagtttgacctaatttgatagaatattgctgtgttttttgtaaagggctacagatttttttttaagtttaatttcttaaggaatcctttaaacacatcttcttcttatttgccttttccctctgatgtctattacccagaattactccaagctacatatttagctgcataaagcagtgacagcttgtcttctaaacaatgacaaattttaaaatcagatattaagaaaccttttcatagtttcaagggcagtgagctgtatgaacttgcttatcaggtattagtgcctccagggctataaaaaggtaacacatttaaatgactatcatacacaagatattgacataccttccttggtcaggccatttatgtgaagaggattatgcccactgaaaatacttttggcacgccatcacttcagcaaaaaagatgctatcgaacatgcgcacatcccccaacagtctgcctcctgcgattgcttttcacagtatccaaagtgtccatctgtctgcttgtcttcgagttaccctccttgttcatatgggtcctagtcttctgaaattttccctttctttcattttctctctttcgttaaacaaaagagctgtagttgcccgttctgcttgtagcactgttgactcttcccgacagttgatgcattgaagctttttacatctgctattttcctggctggacaatgcagtgctgtgttctcgtctcagtatccatatttctactaataacactgagctgcaatgtaaagcagccagagctaaaatgtagtgcttcagttgtattggaaaagaataggatttacctctcttctttcgttgttgcctggcagctgcaggaaggattttgagcagttttaatggggttttagtctataatatgaaatccacggttcctcagctgctgcacaggcaggcagcagtttaaatgtgggcttgacagatgctctctctgacagagcagaatttaacgtcactgcttggctgaatcccacgtgattgtttgcattcattttgactaaaaacctaaggtagggagaagcttagagattttgcttttatgtgataaattatatatgttgaatgcaagtgtagtgatgagtgaataatttgaaaatgtgatgattatgaaatggttatgattttattttttccagcttacttccttttttaactttattcttaagtacaggctttctaagtgttttctgtgttagatgttggttttcatgtttcttacatgcttttgtagggtgtaagcagtataagcttttgtgtgtaagttggtgtaatttaaccccttcagtgcattctcttcttgaagttttttttctctgctttcaaattgctcttgattt

SEQ ID NO: 57591 - DNA, 1022 bp, Homo sapiens
ttttatatatttatgtacctcccctgataatttgtcaaatttccttctgttatgtaccactagtgtaaagtctttatgaattcatagttatgaaatttacacttgcaactttctataaagaaaaatgtattatgaaatatcactgtgaatatgattgaaacttgcactaaaaacagacattttaagaatcttaagcatttcagaggcatctatccttgagtatataattgatatacttcaacacttaccatatttccatgtacatcttacattttcagtaattattgagatttgttgtttagtttttaagatactctcatctgctcttaattcaaatgtaacatctcttctttataaatgtgatttttcctgaatattttaaaggcatttaattatttgaaatgtttgttttttaaatacattccaatataacatattttaggtttttccaacaggagggtatatatcatttatttattttgagattgtctagagaaaaaaagattgacttgattttagaacaggcagtgacatttctgagaatattaaaattgtcagcagttaagcaaatcatttaaaaatattacatgcttacagtaactactctgtagtaactaagtttattttatgctaaagatgtttattatgatctcatgacttaatagcataaaagatcaggagagttttcatttttatttttttcttaaactgtaggtcataacatgttcagtggagtaaccaactgagtgagaaaaacagaacaagagacagagagatatgagatttctttggaataattaaagtgtttattatgtaaagaaactttgatcttatatatcaattcttattcttttaaaggagggtgcatctgcccggaagactcagactcctgcagcccagccagtaccaagaccaggtagaaatatagaactttgctttttgttttctttcaaaagatcgtaacagtgcaagtttttagtatgcgtataatgctttgaacaaacttaaattttacttaaaat

SEQ ID NO: 57592 - DNA, 1968 bp, Homo sapiens
tagtgcagatttggatatcctcattcatagtatgtacacaggctaattctaaaattatgtagattatgaatattaaatattttctggaggcacatcaaaagtatggtacatggggcttatattgggatgtttttgcagtgtgatttccctgtgtcttgtattcatactcctcttagatgtggctagtatttcctttttttgtttttgttttttgtttgacagtaggtttgtttgaaatttttgtcattgctgttattaagtaggtgtggaaaagaggagtgctctgtcagccttgttatacttagactagattggatgtagttaagatgacatgactaattttcagtagggatgatcataccagaatccatcgtgagagcataagaagaacaattaaattcaacaaatattatttgaatttctatataataggctcttgtccagaaactaagagaagctaaaggagctttttacaggaaggaagaaaaaagtgaaggaaatagggatggacagatggggttgggcccaaagaatactaaacatgaagtataggaatattgtggaggcagttgaaccacagataagagaattgtttgtttttctttgtaaggtagggatgggaggttatggtatgtcagaaatggtattatataaaaggggaaaagccaccacctgaggattgtaacttagtatctgtgatgtaaaattttttctattttgcattttcataaaagaagttagtatgtaaggaaagggctgggagaggcactgatacctaaacaaaccattttgttcatatgtgtcttgtgataaaattaaagggactggattttactagccaggtatgtggctaggggaagatcatatgtgtaaagtaaggggttctaagtctttcacctcttaatgttctagcttactttttagctaaagtgccctggggattaaaccaatggaaattactctgaatgagtgtctcatcatacctcagatattctaatgctcatccatgtgaactttctgctttctacttccacttaactgcttcacacccatacatccacatttcctacccatcattctaaaataattaaggtttttgctctcattcagcaataagacttgattggaatggatagtagtagtttgaagtctttatttgtcctaattagtgtatttttattttgctgccaaaactgttaaatgcatctgcttatggggtgtagcccagttttgaagggatattgtttaatatctgacatgtacactagtattatttctttaaaatctgaaaaatgtgaatgcccaaaatatatatggccagtgtaagaagggggattatagaagtataactgttatttgttgggtagagtttgcataatttggaaatgagagactgtctcacctattctctctttgagtgagatacctcaagggtggagttctgttttttgagcattcacaaatttttatttctcatttcatcaaatatttatttagtgctgttgtgccaggcaagtctctgggtaaatttaatgttttaaagtgtttacagttaaacactttaaacctataaagctctaaaaatttccaacctctcaaaattcatttagggaatataactaacaagaggcacatgttttccagtggattcataaatacaggcagttgaaagtatcgggggaaccagcccccaatatttaaataggttctttttattttccctaagtgtcagcctgtctgagaaataaaaagagtacaaagagaggaattttacagctgggcctccaggggtaacatcacatattggtaggtctgtgatgtcccctgagccacaaagccagcaagtttttattagggattttaaaaagggaggggtttttattagggattttaaaaggggtatacgaacagggagtaggtcacaaagatcacatgcttcaaagggcaataaagatcacaaggcaaagg

SEQ ID NO: 57593 - DNA, 1059 bp, Homo sapiens
ggctgggcacggtggctcacgcctgtgatcacagcactttgggaggccgaggtgggtggatcatgaggtcaggagatcaagaccatcctggctaacacagtgaaaccccgtctctactaaaaatacaaaaaaaattagccgggcatggtggcaggtgcctgtagtcccagctacatgggaggctgaggcaggagaatggcgtgaacctgggaggcggagcttgcagtgagctgagatgccgccactgcactccagcctgggcgacagagcgagactcctcagaaaataagaaaaaaatagattattttataagctatttggccacttagattgtttgcagttgggatacacttgacattagaaataagttttaatgtttttctaatcagtgatgttgatgccttaactatgagacagattcagatgaatttagtgataactctcatttggggagattgatgtgtatattgggtttgttgtttcaactaacatctacagagcaataactaaaaagtaaattactctagatgaatatacaacacgcccaaccttctaggagctcacatgagagtggtactggtttgtcactagttgcagctgctgagaaatgtgtttagcacttggtgtaaaactcagtttcaatgccttattctaagtacagtgaaaaatatactgtcttttgactctctgcaaacttgaatcacattctgaagataggttcagaaacaaattagacctcaacagttagcctttaaaagctttatctagcttctctcaaattatgtgctgttagtgagaatgtatataatagtgatttttcatagtatataaacaacttgaaatgtattgttttctacaacttgagacctaaaaatgatatacagtatatctagtttgacccactcttattcctaaacaaaaatactgatatataaaagaaacttaaagtctattttagccttttacctctgccatttagttgcagagcaggaaatacaaccagatctcctgatgatcaatttagtagtcttattatttgtactgtggagatacctaaca

SEQ ID NO: 57594 - DNA, 1033 bp, Homo sapiens
tgcttcattacacttggtattgtgttgtttttttgttttttgttttttttggcatttactgtatttttttaaccaattttatgatttgtgaatttggtgttatccaatctcacaaattttagtaattgacaacttttaaaaaaataaatatatctaactggttatacaaaatttacagtaagtttgtggaatgttaaaaaaaagaaattgtcttttcattctccactctcaagaacctttgcagtgttcatctgaatgtattacaaatctaatacttaaacactgttttatagcagaaaatagtgaatagtgaaagaaatcacaaagtaaattttagtgtcattctctttagtcttgtttactacagagaaaccagacaattaaacagaccacattcttaggatagaccatgcctaatgtttcttccaagtttaaaacactcccttcattgtttaacacctcattgcaactgacatctcccctacagtttgagtcagctggaggctttgctatgtaattaatgcataattgaaacctcctccacacaattatggtactggctgtaactcatagctcaagttggatagaaatatccaacttgcaaatagcatagattctatttagttttatgtacaactgaggattctttagttttgtatatcccttcaataagtaaatgaaacaaaaaaaaataataaaaccctttaacatgctaacaaacaaaattgagattgtattatggaagtattttaaaaaatacactttacatctataaacatgatcatgaaagttgtttattggaactgtaaggttatttaaaataaacgattgggtgtaacttcctgattttggccatgttggcagccacatggggccgagttccaaagaggaaagattgtgcgcagaaggagctcagacgctatgtagagggttctccttacatccgccaaatactattcagcacatgtatgtgagaaaactacatgaggcctgggaaaaagtcaccgggaaagaaacaggcagaaaaattacc

SEQ ID NO: 57595 - DNA, 1050 bp, Homo sapiens
atacactccatgatctgtacttgcagagcaggtttatttaaaaacaaacatctttagtttaaaactaattaatgtttaaaaattatttcagaccgggcgtggtggctcatgcctgtaatctcagcactttgggaggccgaggcgggtggatcacaaggtcagcagttcgagaccagcctgaccaacgtggtgaaaccccatctctactaaaaatacaaaaaaattagctgggcgtggtggcggtcacctgtaatctcagcaacttgggaggctgaggcaggagaatcgcttgaaaccagaaggtggaggttgcagtgagccaagattgcaccactgcactctagcctgggcaataagaaaaaactctgtctcaaaaaaaaaaaatatttcaaattatagtttatcttcccattttcatcacgtggaatacattgactttttctcatctctgttttttcaaagatttgtcccatcagatgaaaagaagaaacaaggttgtcaacgagaaaatgaaactctaatacaaagaagaaaagaccagatgcaaccagggggcactgcaattagtgttacagtaccttatagagtagtagaccagccccttaaacttatgcctcaagactggtaagatagtctctatatatatatcttttcacaggtgttgaacccaagagaatgaatgttgttattgccgttgatgacgttgctttttaagagatggggtctcactatgttgcctaggcagaacttgaactcctgggctctgtcagtcctcctgcctcaggctcccaaatagctaggactacaggtgcatgccactgcacctggcagcctatattttttaaatattcgtttgttttctgtatattgttggttgttttttctcatgtgagcaattatcaaattttatcatgggttctaaatagaaactgtctttgaaaagtgtgttgatgtatatttactttggtcatcaataatgttaacattctaataattcctcaataactttatattttggataagtaaacttgattttacttataagaagaa

SEQ ID NO: 57596 - DNA, 1707 bp, Homo sapiens
ttttaatgaaagtaaaatgtcaacgagaattcttttttacctacttgcttgccttgttgaataatgtttcaacaaaaaatgattaggatgtctttaagatataaatgttgtatgaaattcattaagaatataaagttttaatttttgttcaaatttagtcttctgaaatttagataagaatttagagaattttaacaatcatcagtgatttactttcatgaactgttctttctctttcacctgttccttctatactgactcctttttctcagcgtttaagaatactctttccccttccttcttaaacaacaaaacaaaacccttaccgttgacctcaccctttcccctagcttcttctttttccttttatagctgcactttggaaagaattgtctctaccaactcattttctgttcatatcccctgtagtctggctcttgctctgtactaaagctgttttcactgaagtcaccagtgactcaaatattggatactgttaacttaccagaatttgattctgttgactcctttactcctttttaagttactttccaagtacctgttacactttgtctcagattttcttgctacttttcctctggttatcaactggaatggacccttcaatatcatgcagttgaaaactcccatataacttttgacttatcccaaacatacatactaatagcctactgttgactggatgccttaactgataacataaacagtcgattaacaaatattttacatgttagcattgtatactgtattcttatgataaagtaagtagagaaaaagaaaacgttaagaaaatcgtaagaaagagaaaatacatttactgttcattaagtgggagtgggttatcataaaggtcttcatcttcattgtcttcacattgagtaggttgaggaggaggaagggttagtcttgctgtcccaggtggcagaggcggaagaaaatccatgtataaatgaacccactcaattggaacttgtattgttcaaggatcaaatgtatatggttatgtccctatttctcttctcccataattttaaataccctctcaagaagatctcatagctttcaattaccatttatattccctcattctaaaaattatgtctttagctcaatattctggacctatatacctcactcactatgagataacttctctgtgatatctcattggtacatcaaactcaaccttttccaaatggaattgatggttttactctcttccttattcctcaaactatttcttattatctgttagtccttttcagtaatttgcctaagccagaaacttgggagtatattatcttagctcttggttgatctttctgctttcactcttctggcttccagttgttttctccatcagattacactgtacagcattgggggaaaactgagggtatttgggagcatctctgtgggccttgatagaaaattatattatattttgttaatgttgcataattataatgaaatacatcgtttgagagaagattaaatactgatttgcataaaattgccaaataaaatctttacaaatttagaataagtttaagctgatatctggatatattttagatatgttatacttgacgtggctatatttatttgttggttgacatttaaaatttttttttgttgatacataatatttgtacatatttatggtgtacatgtgatattttgtta

SEQ ID NO: 57597 - DNA, 1072 bp, Homo sapiens
aattaggggatgtacactgttttttagacataatgctattgcacacgtaatatagactgtgatacagtgttaacgtaactacgtaacttttataaaaatgcaatgaggtaccaggaaatatgcgtaactcattttattatgatactttattgcggtggtctggaactgaacccacaatatctccaaggtatggttgcactcttatgtttctgtgataacgtaccaaccttatagtctttcttactgtccttcactagactatatgcattttatcttaccttattcctcattttagtgtccagtggctggcgtgtataaaccctgaatgtttttaaagataatattttaaaagatcactttagttataatacggcttcagttggtggaataaagaaatttttttctttttttttattttgagtaaaaatgataacttctctccaccctctctatagttaaagccttccatctgaagtatgatgaagttcgtctggatccaaatgttcagaaatgggatgtaacagtattagaactcagctatcacaaacgtcatttggatagaccagtgttcttacggttttgggaaacattggacaggtaattccgattctaaaatatgcttgtgtgtgttttattgtaatttttctgtctcagttaaattttaagttccatagagttgtcagtcttattccctaattcccttctttcaacattaacttgatgcttatcttcagtacataattaacaattttttattgtataattactttagttggagaatttagcctgatagaagtaacactaaactgagtcagaagacttagactttagtcttggttttgtaatctgtctctaattatctgtgtgacctttttgaaccttattttctatccaaggaactttggattaagagaaccctgtgttttttgcaagtactgaaagatctatgattctggatttatttgtgttacggatggttcacaaaaggaaatggttttttaaaatttattttaattactagtatagtgttcataaagccctttacattaataacagttttgtaatcggcaaa

SEQ ID NO: 57598 - DNA, 1318 bp, Homo sapiens
aaaaattctaaaattcctatagtcattataacctaccataatatttttttcaggtacatggtaaagcataaatcgcacttgagattctgaattatttggctcctccatttctggaaattgagactcaagctttatgaatttatcaagaacttaaaaatgaagaaggtcacagattgatcttttataagaccttatttgatgctttgtgcttcaaggagatgatacctgtcatccatataagcaaactttttggcttacaactatttttttaatattagccttctagtctgtaatggaaattgtatattttgatagaagttttttctccattggttaaattagcattacttaaaatttgtttctttagaaaataaatgcaggttataaatgtgtgtatatttagagattataaggctctctgagccatcttctgatttttcattgctctataattctttttactgaaaatactatgttatgaatggtattaaattttagtctctggaacatccaaaaccaagcaaagggatgtgactattttgaatgaatcagaatgtcaacttgtatgtacactatatctacacttactcattatttaaaaagaataatgaaaaatctagatcaattcttcaatttgattgaactgttcagccttttcaagatttctttatttacaaatgattacatttaaatgaatgtacattcttctcactgactttggtgattttgaaacctagaatgatgtgtttctatctgtaatatctttccatttgaaaaaaatctcaaaacacagattaaaaccacaataggctgtagtattttttattttgggagccagagtatgatttgggggaagaatatgtatcagccctattgcagtataactttaagctccttttctctttagtccacttttgattgtaatttttatggtataggattttgaatcttctattttaggcttgtcagtcttggagttcttatcttccattatccctaaatattgataaactcccaggcaccaaagaaaacatttgcttaattgtctgaaaagaaacaagagaaaaacactggtatttttatgtctgtattcaatatggtataaaatataaaaactatattttaacttagtgaaatattttactatttctctacttcagacaaaatgttgcatccaaggtacatcaagtgaccatttgccttgaaccttgatttcactttgttttttttttttccttaaaggcaactaggaagctttactttcctaaagtgtttttgccattggaatttttgctgatcacagtcttatgtcattttt

SEQ ID NO: 57599 - DNA, 1883 bp, Homo sapiens
cttccttcttttctgtatgtatgtgtggtttttgattttttgttgttgttgttgttttgtggccaccctttgcactagaccatcccttttattggtggtattggcctatattcccattgacaaatgcaatttttaattatttatttaatataggagtattttactgtttaatatttaaacaatgtttaatgtatttcattattaactagtattatagtttgtttttttcccatgtctccataacttttactaacatttgtttttagcagcacaacagtaatccatataaaaacaactaattcataatgaggaaaatctcataatttttaaggcagaaagaagtattaatttttgatctgccatgtagaatgagacaaatacagtttgcttatgaaaggaaagtggcatacttttaaattggtctacacagaaaagtaaaagtaaactattcatttaaataagattcattatctaataaatattgagggaatatttttcctaaataaaaatttttctgactgctaacaaaaattaaagtgattacattgttcttttttggaggggtggggaggaatatttgttgaactaaagtatataaaattttttgagactagcagtatattttataatattacaaatacaacaattatttataaaagctagtcaaattaatggcttagaaagtagctgtaaactttgtgttttgaaattgcttgtttaaatgcaaaattatgagtaagataagtctttttaaattttttatttttaatttttttggaagtttattaaagcccttcatatacacatactttttaaaaaaagattcttaataaagaaattattggtttgtctggttaaagtccatatagaatgctgagaaataatttataaaataagaactatagaaatttgttctcagctgaaaagttggcagctgctctgtttctttaaaaaagtacaacatgaaaatttaattacattagccttaatattacttgactgaatttctactatttattcacttgtgtttgagattcacccagctattctaatgatagaaataaaaagtggagaaatgactaaagttgacttaagttaagaattggagtgggaattttgaaatgccatgtcctatatattctggcatatttgttggcacatttgcaagtatgttgatcccagcattgtttatatctgttggaataataactaaggaaaaattgaaaatgtataatagatgtataaagatttatatttagttagtatataatagataatacttgcaggttttttatgtgttttgggtttctgtgtattattttaggtaatctttataagggcatcttggaagttataaatatgtgccatttactgaaaagtgggaagcatttttatatgagtaaagctaatgaaataaaactagttttattgccaaaattcaaaaagtggggttcatgctatgtcgaatttaagcaaatgatctgtctgaggattttgtttgccattgaattccatttctgtccactttaaatttactaaaagctatttaacctgagtttgattataatgcttcataagtaatgcagttcatgtacatagagtaagtgctgtaagtgattttttaaccaccagttggtgctgtttctcaaagtggttcttaattagagtttaagtttgggtgccatgtgaactcataaaatattctactcattctttttgtttttctttgttttgttttctttgttttatttttcattctgtttgtttttctttgtttgtttttgagatggagtctcactctgtcacccaggctggagtgcagtgctgcgatcttggctcactgcagcctccacctcctgggttcatgcagttctcctgcctca

SEQ ID NO: 57600 - DNA, 1692 bp, Homo sapiens
aaacattcatacgaagaagttagaagctgtattgtgggctggaatgctatctttacatgaaaagattattgggatttgtcaggcatagtatttctctgaggaataaatgaaatataaatttcactttggaaactaatgagttaaaaccatttacagtttctgttaacgagttaaataatgtatagaatcatagttcgtaatggtagcaagttcatgctctgctgaacttactgtttgattatggtcaaattttctatgttattattatagtagaattaagagtgtgtcctggtaaattacattaccttcacagtttgagcattctgattttaacattttgtagtttcaaaacaaactgtactcatataatcagagcattaacagcagcatcatgtcagtggtaccaataattgtgaatcttctgcaacaaaatttctttaatgatgagtttaatgggctatattcaaacctaatttttattcaattcataagtgcccactaaatatgtattttatttctgctgttctgttcctttgattatctgcttttcagtgagcatctgcatagctaaaatagatatagcatgtgttgtaaatgctgttgaatttttttaaggctcaaaggtgctagtatataaataacagcacattgccaaataagcattttttctttcattttctgaagtactttcatatttactcatgtaattatcagcatttatggtgagttggaataatttttcctctttattttcttaaatgaccctagaaaacaatgtaaagtagctctgaagaaggctttgttgttgaatctgtctcataattacttgtggatcctttgacacagaattatttatagtttataattcaccctcatctagagaatgatgatttctattacataagtaatgtaaatagagctgagaccatagtgaagcagaagacatttgggagatacttttgattacatttggatattttattggactatgattattttgccaacaaagtacaagtcaaaacattgggttatacaacatattcactttaataaaatatagtaatggatactcacagaagaactgccttcatggagttcacaatgttaatactctaagtgtaatggccatctatttctctctttttaataatacaaacatttttctttaaaatggaatagtttgaaagtgtttatcgagtcagtgtaaatggggggagatcaagtgaacttccttgtggctcattcagttgttttagcacaattaagcatcactaatgtttttaaagggcttgactatatcacaattttaaaatatttatatttttagataatatatttttattccataatgcactactgaggacaaaaaggaagtgtaagggtcactgatgatgaaataaatttgagatgcattaaagtagtttaaggctaaagcagtttgatgtaggaatttgaggagaagacgacttcagcttaatgggaaaatactaatttggacagcgttatatgcttctggggttgtcatgaatttaagaaaagctaggcaaacctagtgtgatttttctccagtgacatttagttgcttgatttcaggtatagagaattgcagttagatttttaagctattttgatggcagtagaagcaggccagggagttggagatattttcaaggtaataattgtagtactgaa

SEQ ID NO: 57601 - DNA, 2282 bp, Homo sapiens
ggtaaccggtgactggttggcattagctttacaggatccatgctttaaaaactttgattagatatttaaagatgaatatttaaagatgaaaatatatttaaagatgaattaataaaatgttaaaggtatagatcatttcagtgcctttctccaacatccaaattgttaaagaattacatacttgtcccattagcccagatgatgaagacttttactaagacactattgacagccttcccaccctctgagtcttgttttctaagtttgctctcatgtgaggctagttcttgtattctttgctacttttgtcgcttaatgatactgaaagtggttaaaacctttgttggaaaatctgagctatgccctctaaggtttcattaagtgctggggtcacttgccccagttggggggtcacttcccccagttgtatgtgcaattcattactaagagagaatatcctgagcagttcccaatggtgggtggctggctaaaaggaatccctggagattttagtgtggtaggaaagcattttcattcttgaggatttttctttgacttttctatgggctggctgatttcctcagtttgctttgttctgggttttaggggagaattcttgggaggttgtgaattttctttgcctacagtgagatggttagatgctattctgaactttatctagatcttacccaaatccatttccatgttagcaagcatgaagttgtttaccttttcttttttggcgattgatgttgagtttttcgttctcactcactcccttgccagttccttagatgttatgatccagctatgacccagctttacactttcttcacccagaagtgacctcaccttttcatgacagaggaaacagaagccatggacttcttaatgctatatgtcacaaacctgtatgcatgtaagaatcttttatttcctcgtattccagtgttttaaacatcctgtcacccatcagggacttgtccttcatatgtatttctcctacacctttcctactctgtcatgcattttgcactattactgtatctctttcttgtattttcatcttgtcaccctgtatttatttattttccacccacttttaaacttagttacatctttcatggtaaacaggttctagggagatggtttgattatgtatcttaaattccctcccctcaatctctgtttccatctgccaactaccctgtcttgaatagagcagctgctgtgagcctggagcctttgggcaaataagagtgtatacagtcccttgattttaccagaagatgggaaagagagcttgctttgattttcttcctgtaatccagatgaaggtttagagacgggcagctgtgaagccttcagcaaaggtctgaacggaaagaaccttgctttcaaagatacatggatttagaggaaaagcggtgcagttcatatgtatggtactaggaagactagcttcagagtacctgtttggttgctgcatggtgggcacaattccacatctccctgtgaggctgggggaggggaagtaaatagcaaaaaaacaaaaaagacattggaagagattttcctcctgtcatctgtgatgaggagtggcaacttgctggttagtagataatcagcctacagaagagagctgccttctattgctcacaagtttgtttccgctcaagagtatcccacaatttgatttatgctaaatggggagtgagtggacaaagaagaatatctaaggaaacctaaagaaaaatagcatctagagagaacaggaacacagaagaaatggatggtgaaaaagaattgctggtggagatgaatgacaactttaattttgaaaaagcacctgagaaaattcagtcagtataaaataaactttctagcaattaaactacattaaaatgtggtagaaaaagagaggcatggccactattggggactaaatagtggccttggatatcatgtagaagtagttatctttggaaaagtaaaaatccaaagacacggagatttcaaaaatcaaaacacctagaagacgagtctaagatatttaatgtgagtaagtgaagaaccacaaggagaaaaagggaaacgatacaggagggcacaattactaaatactataggaaactttagttcgaaagggctctcactctaataggttccaagcaacatgggtggggttggagtgtggggacacacctaggcagataaatttcattcaaatatttattgttacttcctgcagtgacaagtactgttttagttgctgggaatac

SEQ ID NO: 57602 - DNA, 1138 bp, Homo sapiens
ttgggacaaaattatggaattttttttatttataaggtatatagttattaggctaggcagaaataaaagaaccaaaatgaaaatgtacatttaataacatcttaatttggcatggaaactgaaaaagtagtttgattttctaaagcaaagtaatctttagattattatttattttaatttccagaagtttttattattacaataacagaacacacaaacccaggcagagacgtgtccaacgaaatgatggttacatttcactgttatttgccctttggtccttcatcttctaagcatttattatattttcttttaatgctattagacttttattttgataagaaatatactccaagtgttaataaataaatatattatcatgtagctacccctttgctctaccatgtttctttcaatagaaaaaaaagtgttaaatgtgtctaaatgtgtcttcatagcctatttggccgtagctgtcgcatctgtggttttaaaaatagactttagccagatcttctggaattcttcttgaattatagttcattatgttaaagaaattctgggaaaggagtcctactgatattgtccatagtctccaaaaagtgaggatggtaactcggttgaagacaactagaagagttcttcagcaaatattcagaagcaaattttgtgaacaagataatatctccttcagttcaagctagaagaatgttactcatcgcagctgacccaactatagccactggtccatttcttgctgccagtatggctcccgttatggcaccacttgtaatagagttccagggatcttcttttcctctgacttgagccatactacagtcaatcatgggaaacagacctctctgaatgcaaagctacctcccaattatggaacatggattttaatagctgtcaaactcctttggagtttgtgatttactcctactggagaattgtgaaaacttaattgcttgaaagataccaccaccaatggtgcttgttgtaaaggcccccacatagccttgctggggggcgagcctctctagcatgttcttccagggcacaagcaatctggattatttttaattacagcttcaattagaaaacttcatgagtatttccagaacttataaagttt

SEQ ID NO: 57603 - DNA, 1097 bp, Homo sapiens
agtcccatagaactttttctattaagtgtttgaccaatcacagtttggcttttgggaagttgaaggtatttagaactagacagtgtgggatatttcactgtttctgttgagttgctcttttattcttccacgtcttcacttattttttccaaatattttttagctcacataatacagaattcatgctgctatttctttattttatactgcttttaaacaatcatatttttatattgcacacaacacatgaaatgcatttgtttatttataaaattaggtatagactatttaagcacttataagaaaaataagaggctattatggcctaaatataagtacaaaaataaatagtagttttctaaaaatatctgtcttatatgagatatgagatcaacttacacaacatcattcagctctattctggtatctggagatgggttaatcaggatgtaggagagggtactttgatgatcattcatttcatctagaagataaataaatgccaagtttgttatactgcttatagaaaattacaggaattactagtgaacagcttatattcaaaccatataactgtcaacaagaacttggtatagttttgtccacagcatgattgtgcacataagtttggctattttcaaattgctgtcattgaaaatatctgacacatacttattttttgttccaatagatgataacaataaagtatctaattctgttcagaataatcacagttatagtttaccgtttattacactgaaaaagtatttttctttaataaatgactggataagatgtttacttgattattatgctttatcaattacaaaaaataatcatggttatagataacaatcctagaaaagaatatccacacaggaaattcttgggaaaaataatataattacattatgtttagaaaacatgctagaaatgtgtctaaaaagcttgaagaccctaaatatgtgtttggcttcactacatgacacatctcatgtaactcatcctaatgcttttgcagaatgcaaagaatcctctagaacagaatttaaccatgaattttaagggaagtgtactcctgaatcatttgtttttcc

SEQ ID NO: 57604 - DNA, 1133 bp, Homo sapiens
tgggtgacagagtgagaccctgccccccacaaaaataagcaaataaagaaatgtaaagttaccactaggtttttatttctgacacatttaatatgtaaataatttgtgtgtgttatagatgaaaatcactgcagatgacttatggatcagaacttatgccagactttatcagaagttgtgttcttctactggagatgttcccattggaatctacaggactgagtctcagaaacttactacatctgaggtttggaaataacaaaatattcttgttttgatgtttaatctgatgagtgcaatcattcataagcttataaactgatttataaaaaatgcaagagaaagtgaaaaagaatgctacctgaatacgtagtgttaaatctcagaaccaaattttttttcaactatttgttttactaaactatgtcagtcttccaaaaaatattgttggctaaggggctgttctaagtttatggatgttgggctttagatgacttttgtagatctaggattagctgttttggaagattatcaggaagcaaattaattacaaataaccttgaggttctgacacataagaaaagttctcagggcaagcaacctagatttctaatgtatacccctactgcatatattagcattttgaaggaagcaaagcaaagataatttagtaagtgttaaaattcacatttctcaatctctagattggtgaccactctaaagccaaaagaaaactctgagtataagagtagtgtcagatcttcccaaagtaaacctcagtaaatttaacagcaaacttgatcttgttagtatggaaggagaatctctggtaagttcatgcacccgaaacatatttgcattttgatttgatcacttcatgtggttcatgttgttctaagtaatttttatagccttagtgtaatatcaccttttaggtcagactcttttttgaaataaagattttggatgaattcatcattctatcaatatctataaaattatttaatgtaaattatggtttgtattcttgaatttttttttcttcagacacttcaaagttattacaaattaaaaagaaattttggtcagccattttttttggtctgatacaaaattacctcaactttgaggct

SEQ ID NO: 57605 - DNA, 1051 bp, Homo sapiens
tatatatatatatatatatatatatagttctagttcactctttcttccgaagtttcagaaaatcatgcaatttcctgtatctctatttataacataaacgtgaggcaaaaacaaagagaaagaaaaaactactgctttccatttctatagaacagtttttagaacagtttttcttctatttaacttatacatgagatttccttacaagattttatttaaacagaggatactgtggctaaaaaaatcttaaaactactggtgcataatggtacccaagcatttggctcctattgatataaaatcttcagtttcaacactgctcttcaaataaaccatcccctgcaatttaatctctttaagagatcagaagtatgtgtgtttggtaacagtgtttggagtgggagccctgcctcctgtagtacccagataatatgtctggaaactttagggataataggggtatttattctactttgttgtgtttgctccagctctcatctgacataagcagatggttcctgacgttgctagaggcataatcatgggcaaaattagcccaaagttctgcagaaaagctttaactttctttggattagtttgttcagtcaagcaattatagaagacagtacataaataagcaaaaagaataggtacaataaaatgctgaaatgcttaatttgagattaatgttatcaaataatttaaaactctacgaatatttctttcttcttaatggaaatatttagagattgtctgattacttgaatcagaaaaaatgagatattactgctattcagtttctggcagagacaaaaacgatgatattagtgtgaacaaacacctccacaaacctcttagctatgataaaatgaaaaagttaacttggcattcaggaacaaactcagtggttttagttgttgtagtcttttcatatttttctaaaataggcaataatcagcagattcttaaaatgtccttagtttatcagtttattgacatcaatttggtattttatttcaaacctggaaaaaatgtatactataaggaatgc

SEQ ID NO: 57606 - DNA, 1048 bp, Homo sapiens
caaaccattatcatctaggtggatcattgcaataatcccctcactggtcattgtctcttcttcaatctgttttcaacacaatgaccagagggattttataaaatatgaatcagaccttttgtactagtcttcaaaaatctccaatgattgccaagtcatcccaatgaaaggtcaaagccatagtacagttatttataaagtcctacatgatccctcctcccagctagttacctctgtggccccattttctccccctccctgaattccagctaaactggcttccctgctcttccttagccgcatcaagcattaactgtctcagggaagtgcttgtagctacttctgcctgtaatggtcttctcccagacctctcttgccttcttcaagatttttactcaaatatcatcttttccctagtcacactatttacattttattctacctgctaaaatattagctccctttctgatttatttttctccccacaattatcacctctaaacacaacacaatttgctttttcatgtttattgttggccctctcccactagtggctctatgagacaagatatttttaccttttttgttaactgccataacctttgaatctaaagcctttcctgacgtttcacaggtgctcaataaatattttgtgtattagctaatgagtggggactggatatacacatcagcattagatgtaatattgatgtctagcatttctcaagcaaataacatgcgatgaaaataacaaagtttgtatactgacaattagattaatttagagattccaggttaactattagaggttttgaagaaatcataaagaaaaaaaaaattccaacgaaatgacatcctaaaaaaagatgctgcctgaggggcaatgtgccagcataaaatagcaaggcaataagcaaattatttaagaaaatttatctgaactgtcctagtccgattccatccatttctgttcccttccaagttaccacattgtgttcccctgtcagcttctggaattagatttctaattctcttgaatagcttttag

SEQ ID NO: 57607 - DNA, 1044 bp, Homo sapiens
tttctccatttctcctgtggcaacaaacaaacaagaacaaaaaaaaacctactacaaggctggagatctgagtggaggtaatcacaggaaaagaaaataatagtaatagtaaataataaaaaagtaagttcttaatcttactttttaaaaaatataaggcaatgtgtattaaaaatctatatggaaaggcattttatttgatgtatcccaaaatctacttgactgagaaatgttttcctaggcagactcattaaaaggtcaacaggaacaagtattctattaaacatattttgaggaatctggatgttgacccttgtctggcagtcccatgcttggaaagtgtttaatagttcagcattcattattaaattagatttaaatatatctgccttaattctttaaggctgtctatgctctagtactaatttatttttgtatccttatctcttgattctcttatatatagcatgtactccaaattacatgatcctaaatatactttgtggtttccgccttctacatctttttttaatgctgtttcctctgccttcctagaaggttttgttaaatcaaaaattctatctcttcatgaatatttttaatctccttaattcagtgtgatttcttccttctatgaacttgcatagattttactatgttctgccagagcaggtattattcatttttttctttacttatgaggttgtaatttcattcaatatagagaacatatcttgcttatctttaaaccttccataatgtttttcacacatgcatcttcaacaaatattagttaaataaatgaaataagatgcactaaagattgagatgatttattctttgggtctatgccctggttccaagtagtttatgaaccatatgcatttatctgctctctctcatgagactccattgatacaaggaaaaagaaatttttaataaattataagcttttattgatgaaaaataaatagaagaagtgagaattgaatgaatttctgggagatggaaagtaaacaaagcaatattttctgttggaaatca

SEQ ID NO: 57608 - DNA, 1028 bp, Homo sapiens
acagaacagaggcaatgacatctcagtagcaatgagcaaacatgtcttagtaaatttgtgttgctacgacagaatacctgagactgagtaatttataaagacagatttattttcttggggagtccaaaattcagggccagaatcttgtgagggccttcttgctgtgtcatcccatggcagaaggcagaaggccaagacagtatgtgtaaagggagctaatgaggagggtgaactcatgtttataacaaacccattctccagccataggatgttaatccattctatgaggcagagccctatgaactaataaggccttattaggccccacctcccaacactgttgcattgggcattaagtttccaacacatgaactttagggaacatattcaaatcctagcaacacttaaggctcagatcttgattggtaaacatcatcctccaatataaatatccagggctccttggagtattggttgattccaggaatggggcagggaaaatacaagataagcctgaaaaatgttgtggtggcagaaagtaaggaattgctcagaattatatgggggctggtcaaaagaaacaacatgaaggaagtcctaatgggctaagatggaatcttttgggccacaaaataaataatgatattaggttttagcccataaaataaaataaacatccagtagtccatactaatataaataagtaaataagggataaggcatagctctttcttactgaagaattctaataaatatagaaggaaagagaaaaatatgaagtcaccattaggcaaacactacagtaataattgtgactcctcaatgagtactaatattaggggtgaaagtttgaggagaactagtataattgtgtgcttttgacatgcctccctaaaatagttaataactattaagggaaaatttgtaactttatcatggaggaacctgggagacaccatctaaaccaagggatcaagataaccacaatcaataaagatgttttcatgttgcctttcatatgatgcact

SEQ ID NO: 57609 - DNA, 1052 bp, Homo sapiens
aggaagccagtctttatcagacattgagtcagctggctccttgattttggactttgcagcctccagaattgtgagcaatacatttctgttgtctataatccacccagtctatgctattttgttatagcaactcaaaacaagatagtaactttaagttacaagaaagttgatgaatagtagtccagcatggtttacatgtaccatatgttccttacaggcaaatattcaaatatcagaatgagcccaataattctactaagattcatcaagtgaatacttgttaatcaattttacatgcttttaaatctgaggtttgagggttatagataacttaatggaggattactgtcatttctctttcactagaagtacacaattttaaaggaaagggaaaaaatagaaagtaaaccactatataagtaaaaggatgccaagttataatttttattttattttatttcattatgtttagtgttgtgttgaagataatgggccattctaggggttttaatcctgctttatccctcagtatctaattagacttggacaagttaaatttcctcattagtaaaatgcagatattctgtatcttacaggatttctaaggtgaaatagacaacacacatacaccttttaatagaggttggcagtcagttatcgaaaaaacataagttgtttttcttattatgtgtatcatcttagtaatagtgaagtaatatcattaaggataaaagataaagaacaaaaatgaatttcttaggaaaaatttaaagtgagacttatctgctgacaccagcaagaaatgtaacattaataataaaagaagaaatagaagaggccaggacgtctatcaatatgaaagaataagctcctaataaattgtccttgcatatgacaactattaaaaaatctatagaacaagcatacaaaggccctagtaaacgaactaaagtaggcagattttagaggaaaattaaaacttggaggaagtatcttgcatgttataatttccctgtttttgctgctgtgacctgagggcagctgtggttacc

SEQ ID NO: 57610 - DNA, 1060 bp, Homo sapiens
atatgtatagacatcagagagaaaagcctgaaatcaagaatcctatacccacttctctaggtgtaagaaaattatttcaggaaatataaggattaaaagagtacacattccatctgagaaaaatacacagggaagaataataaaaaaaatggaaagatgacaaaatatgcaattggctgtgaattatgcaatgcattcatttaatcaatatttattgagaaactaaatccatttcagaacttctagggggctaaagatagagaaatgagcaagtagagaaagataatgctttcagatagcttatattacatttgggggtgggcacagatgggagatgaataataaatgtttatcttttctatgttgagtaccgataaaaactatagggaaagatagggaggtaaatttcagatagtttggtgaaagaaggctctaaggagtaacatttgtggtgacacgtgaattatccccccattggatgtggcatgatctaagatatgactatagaggttgagtgaccaagaagtggaggaaggaaagattaatgtgaaaacattaaaacaacaatctgagaagtcagactgtttcagtcagtatccagtcaagaaaacaaaaattactgtctattggaagggggaactggtggcaacattatagaagtactcaaggaacaaaaataagaatatgagaattttccacttctgaactggaggaattaaagtaaaatgatgaagttgtcagtatcatggcgctgccttacaagaatttacaagccacacaatcactgactttggagatccaaggagtcaaaaagcatccctcaatgttgctgcgaccacctgagccaaagtcctcaagtgccgtagtgttgaggctatggaaaatccactactgtgattggagtcagatcctaagaatatcgttctactgcagtctctggcgtgccttctgctgacacactccacaaaagccaggcttccacacacaccagctattggtgctgttacttaaaaggccaaaaaaagataaaacaacaaaaacaataacacaaactgaaaaa

SEQ ID NO: 57611 - DNA, 1049 bp, Homo sapiens
cattttgttaatcaaagaaataagacatatatagaagtaaaatataatggtagcacaaaggacagaatggagcaaatagaattgtattgttttaatttttatactatacataacgttaaattctggaagcaatcattacaaatgcaataaaacaaaataaaacaaaaggattttgtcagtaaatcaataatggagacaaaatggatctttaaacatacttaaaaaaaaaggagtgccctacttaaagtgtagtagaaaaaaacatgaaaacttggcaaagtgcaagaaagactcccggaggaagtctgcttaagacatccttttcctcctccacttccaatatcagcttctacctgttcatgcctcctgaggcaggcaagaaaagtgccaagaaggaagcagttgggatattttttgccattggggaaactggagagcctgagactagaataaagttactagagtgaggactgaatgaatcggaaccagataattgtttaaacttggagatccagtgtaggtggacatcggctggagtgaattttaccaatctgcctgggctccaaagagttaaggatgaactaaagagcttggctgaggcctctccatctactgaaagtgggaaatttgagaacagggtcagaaaggtttcttgctggtgcctcagccaggttttcacagccagtgtactgctggcccccaggagcaaagacgcctctgctttcctgagaattgccaccacttgctcaacaagcagataaaagaaaataatcatctaagagggccaataataaaagaagggaaaaacaaataataatctagataggtctctaattaaatagacttgctcatggaaatagaacacactatggaatggactttgaagatatatgtggaataactaatcaatactatagatgttcataagagagaaaaacaaaagatagaagaaagataataaacaaataataggaaaagaaggtatgctgttttgaggaaagatgtgagtctagagattaaaatattagaaaaaaaccaccatctcagca

SEQ ID NO: 57612 - DNA, 1019 bp, Homo sapiens
cctttactgtttttatgtagcctggatgagggtgataaactatgctcacaaaacctattacttaatttcttagtatatggagacaatagctgctctacaactttcctttgggatgtgcaagtatattccatcagtgcagtttttaaacctttggggccttaaggaaaattaagaaagagtcccaattttatagtcagtgttataatggataattggagattacagtatagcagatttcaaattgcctttctaatacatagatctcttcatagaagaataaactgctttaggaaagtctgtgctcattatcgtcagacaccaatcaagaaagtttcagtggtgacctcttaatgttagggtcagcttcatggacacgtattctgtgcataatatcagggtcagcacaaggttccacaaccagaaggtcctcgtgattagttgaatgttctaatgttaccttcttgaaattgttaatgtcttattaggaggcctcatatttttcattttgcactgggtcctgcaaattatgtactcagtcctgtttaatatgtttgtattatgagggtagggagattagagtctagatgattgaaaaagtcctttctttaaattgtattaaagtgaaaacaattttaataccaatgattgttaacaagggtacgtttcacaaactaatatacttgatggttagtgaatatcattattatagtaagtaaaacttcaaattgtcactttttaattgactgtaggttttgttaatgtgttttatttttactagtacttttcttccatgacatattacttgataaaaaatgttatgtgcaatattcctggtttctacaaacatttgttttacttcttaaacttacaaaattgagagagcacaattaccctaagaaaaataatctctaaaagtcattgctacatctctatataatattcagtattctgttaatggaagcatccttattgctagagaaattctaagtgctgtctttttccccctttaataggaggca

SEQ ID NO: 57613 - DNA, 1012 bp, Homo sapiens
catgtgtgtcacttcactaagactagggaggaagaaggttcaggaagcatagaaagtgagagctgaaggaagaaggacaaggcctggaggcaaggcaaaagagagcttagttaacgtaagagttgttcatttttttcttaaaagtccaaatgaatattcttgttgaaaaattgtacgataattaagtctggttgaggaaataaagcgatatcatagtgtgctagattattcatattatccccagcaaatcagaagcatgcattttaaaattaacaaatgtgttcctttttggagcaaggttatttgggagtttctgtttctcagcatagatgccagatggcagaatccacagattgccaacctctgcatgctgatagttgtcaactttggatgctaacagggtgttagaagtaaccactgcagagtaacttttaattcagtatatattagtgagcattcactttgaattaggtgctgagcatacagttataagcaaaaacttctaagtatctcgtcagtggagcttgaggtttaatcgaactttaagaagctctgtgatgacaaactttactgtgacttaaaactaattctaaatttttatggaatcctgaatgccataattagaattaattgggagaagaaaggataggcatggggaaattagcaggtagatcagagtacctcctttttcagacacgataaggtgatgggaagaagagagtgggtgtttatttcctttccaatacttccttctgtgtcactatacatcactcaccctagggatccaatctggcagtttttgcagtaatatctaattaaaggtcatgccttagaatagaagactgcacatcacagtactttcaatgatgtgaaatactttgttgctatttttgtagattgataaatggatggagttcagtttgggttcaatatttccatttttttacttaaagttttgttttgatttgtttcactgcatcttggttgaaaataaattttaatttgaagtcaa

SEQ ID NO: 57614 - DNA, 1005 bp, Homo sapiens
actttggcatgatgctaatttgtaacattttgatgacaacagtgagataaaatattacagaacattctctgtcaggttgtgcaacttctcacattttgctacataaggacaatgagatctcattgctttttcttagtatttctgaaaggcattctttgataaggaagtttgatttcatttggaacaaaagacgcaccttaaaatagtaaatttctttttaatttaaaagatgtaaataactgaaaagttggcttattgacctacttgatcatggaaattacatgagcttattcacaaacaagtcttcaaaaaattgaagttttttttaatttaccctctttaataatcctatacttttatttttgcatacttatcactttgatgagattagatgctcagtggtaagtaaaatagaataacattgctattaattaataaaccttgtgtacatgatgggccagactattattctattgtcagcccaccattttttttttctacacgagatcttgttgagtcatgaactttgtatgaggagaatatttgcaggggccatgaaaaatgacatcttgactattaattaagactaagctacagtgttcactgagaccattagattcctcaagaaatgatatgatggcatttgctatgatttttaaatcctcattcaaaattatgataaaaatccaaatactatgagaattctagaaaagttgaattttgtaccatccctttatgtcattctaaaacaaggaacgttttattaaaacaaatttctaacttttgcgggtacatggtaggtgtatatatttcaggggtatatgagatattttcgtacaggtacatgatgcataataatcacatcatggaaaatagggtatctataccctcaagcatttattctttttgttctgaacaattcaattatactgtgattataaaatatatgattaaattattattgactatagaccccctcttgtgctgtcaaatactaagtcttat

SEQ ID NO: 57615 - DNA, 1572 bp, Homo sapiens
gacccatccattccatttatttgggcaattgaattatcgactgagtggaatgacaaagagaattcattagtattaattgtttagataaatatgtgtggtccaataatcaaaatataaattaaatatatgtgtagaaaacctttagaggaaacgtttcttttcctctcttcacagtttatttactcactaccagttacttgatgtgtaagtcaagtcccatcctctctttgaagagataatttgtgtaaagtgtttgacacagaacaggattgcatagtatcttaaggttatagctagtttttaattttctgatcttccttttgcctcttcctcactactgagctttcttcctagtctcagtttttgcgcttattatttcatttttataactactcccttgagttgtcattttttaaatatctgcagtttctccaactagactccaagtctcttctacatcgtattgtactcatacttgaaaataataaatgcttggcaaatactgaatgataagcctcttctgcctgtgaatggtccttgttctgagcagaacacatgtgtgctgactctttttcatgggacccacgcctactggaagcaccctctccattcggagttcatctttgcaaaccccacccccaaacaaacaaacaaaatgttttgtttggaaccctgggcaaagtctcctgaatattagactgggtgataaatcatgaatcatatttgtacttgggtaaaatttaacccaaattccatttggaatcttcaagctaattaacttcctcctgagtcccaaggttctttttctagcaaagcttatatatttactattaaaataaaatctgatataaaagttgacaggaattttctcttgacaacattatttctagttactacaatgtttgacaatatacttttctgaaaatatgttcattcatctgtactctttctgtctcatcctcatactctgttgatttaatggtccaggcatgcccctctctgctaatcttttcttctaagcctcttggaatacgtgcacccttacaaataaattttccagcaccttcagttttttcaaggagagttcatccatttgttaatttgaataggaaacaaactgtaacattagaatctttttaataaaagctgctcattttcatactgctccccatatatcacaggtttggaaatgtgttacccctcttcttacaaattatacaccattacatttccccttatttgaggcgtatgttatttattacagcctttgcttttttcttgtcactgtgttttgtcaacctttggtgattcctccacaattatggagggtttgggcgggagcttctattctttttattttattttattttattttatcttaattccagatgctagtatcattgttttcgcattctttgcccaggtaataccctgttccagaccctgcctttatagttcctttagtttggtgacttttatatccaattctgcctggcaccctcttgttaggctggacctgagtatgaccaagattgctctacttctggaaacttacgtggcaacatcccacca

SEQ ID NO: 57616 - DNA, 1111 bp, Homo sapiens
gaagggtgagggttaaaagactatatattgtgtacagtgtgcactgctcaggtgatgggtgtactaaagtctcagaaatcaccactaaaacacttatccacataaccaaaaaccacctgtgccccaaaaactattgaaataaaaataaaaattaaaagcctactacaaaaaataaaaatgaaaacccagtacagtattacaattatttacgtagcatttacattgtactagttattataagtaatctagatttatacttgatgggagggtatgattaagttatgtgcaaacgttatgtcatttatatcagagacttgagcatttgtggattttagtatccccaggggtcctggaaccagccccctctagataccaagggatgactgtttatatgcacatagatagagatatatataaagcacatgactattgtagccaacttctggttgctaagtaattcatatcatatgaataacctcaagctagtgcacagctttttaatttgtctatcaccattattatcactataattatttcaattatagtgaattaatatcattaattcattaatatcaattaattcattaatatcaatataattatttcaattctccatttcaaaaacttacagtagatttgtactatttttttcaaattccctcctcaattaggtattgagctccacctattctttcttggtacagtttcatcctatcttatttaaattactacagcacttgccagcatagctcattattccaggtctgttttatgcaccctatctccaataatcttcaatgcttaactcgagcctcagtcaacctatgcattttcatcatagtcttcttaaacatgattttaccatatcatattcccatttaaaaacctatggtatgccgttaatgctattatttgaaatataaactgctgactcaacattcaaagctctttattaattggcttttcttcctaaaatgctttttgaaatttgatctgtgtatttattcacagaaatcatccctcttttcacaagctgatgtctgctttagtgcctttgcttgtgtcataccatgatctgaggctgtctggtatcatgtcaccccctttttca

SEQ ID NO: 57617 - DNA, 1017 bp, Homo sapiens
aaaacaaactaaggcaatggttttatttgtgtgtgtatgggggtatagattattattgattgattgactgaaatagggtaaaggtagttagtatcccagaaacaaaatgaaaacagtatcccaggaacaaaataaaaacagcacaatggataatatgaaaaagcaagtgaataataaatgaatcatgagcatatatcaatcaaaaagacatcatgtaagatcaaatagttaacttactaagacgttttaaaatgtccattttgaatgctttggacagggtcatccatttatttgctactttagttaatccacaattattactattttttatagctatgtgttttattttttaatatttttctcagtaagactttaagatttcctatttatgcttctatctcctgaagtatttgtactagagtgaaattgatttttttctcaacactgtactgggataatgaaaacactatgcagggatgttatgaaatttacatatcataaagtgaagttacttgatttagggcttaacacttacacctacttattagtatgttttgcctattctaaagatttgcagtggttcacagaaattcatgcaatagcatagagtaaacagaaagtacaacagaatgaaaagataataaggaaaaaaccaagttaggagtatgtaggtacatagtatgacttccacaaatttgtatgtatttactggagatgggttgcgaggttagccagagcaaagataagggcatgatcagttgcataagatgagaaatgaactggtagttcagaagaaacacagctttccttggggctcaaatttaaagaaaatttatcctgtggatctttgattagtgtacagtattcttatccactctcctatcataaaatagcaagtttcataagactcataacattctcactccctggtgctgatataactatagagaattgttctcttaaagtagatctacaggacacacccagtactgtatttcaggtatatcccataggaaa

SEQ ID NO: 57618 - DNA, 1010 bp, Homo sapiens
taaacaaattgtcaatattgagcatagatactgttttactcttgcaattaaataaaatatagaacactgttaatctgtcattcagtgtgatccatatcaagtatggatatctaatataaatgtatttctattgttgtgctccataacatagaaaccaagaaattcaccacacatcataaccatgttttacttcgtcaaccaaactacatcattagtttttgttgcctaaaacaatcactgatagtgacaacttttctgatattatgtgttttgtcactgtagttttcttaattaaacgctcatgtaataaaaacaaaaactttgtgctcttaggagctgtggttcctttgcatgccttgcagccaaccacctccatctctccagcttacagctttgtttatgtgtatttggcttcacaatttgtcccagaaaattcggtattggcggaccctaagacacagggatatttcattgcatacctctcatgtagaagagtgatcacgtacatgcttgcagcagatgaatagaaaactaggctccatggaggccagaaaacaccgtgaaatgatgttggattctctgtagctggtcatataaaagcagaggagtgaattagaaatttctgaccctgactccttaataactaggtacaactagaacaagctgactcatacataaagtcttacatgtagtataatttcagattaaggaggaaccattgcatatacatgaaaaaataaatcattaacgtaaatgaaataaattagttcagtgatattagacttatttgtctctcttgactgggaagtggagatggctttggagtttggaggtaaagagttgagaacctggaaagccctagttgcctgaaagaaagaaaaatatgctcttggatgtgaggcagaagataatcagcaaaagagggagactaaggacagtgagatttctctccacaattttgccttagattgaacgtatttatcttagtcttttctgagaaatagaagcag

SEQ ID NO: 57619 - DNA, 1053 bp, Homo sapiens
aagttgtttgaaaaagcacattagaaacttaaaatctcctgagtctatttacctcctccttgtctgtgttgtcttgagtaggtatctacttggcactggaaattttatgctgtttaaacattttggagttttaagtagacaattggtttaaatatgtaacaggtagttagtgaaaatgacaacctttttaatacaatatactcactttgaacaggtgactctgaccattatgaataatgatgtttgtataacatgatacaaccttttcataactagtatatttttttaactgaaacagaatatatgtctcaaaattaaaattaagtttcaaaactagaatatttattgttagcaaaatattgttcatgtgttttatttatagcattactgctttgcacaaacttctgaaattcctctgtctatttctgtctcaagcacattttgtatttcagcgaatttagtattttctggaatagtcatcccatatatcacatgccacatttctttgttttaaaataatacatgtatactaactaggttctcaactcaattgaaatgtttcattgaagtttagtttagtattgatgtgctattttagttatataaaagatccattattggtccaatccaaaatcccctcctcattcaccactgaccaatacactctatttcttttcttcaccttttcagctcccaataccaactcctgtctctacacactgaggattttatcttgagcatcaattatgggcatcttgtttggtctcatattagtaatttgaaaggagatggatgttttgtagaggatattttggttcaatctcttttttaggcaaaaccacacatattggctaaaaatttaaagaagtaataccaatttctcagtattcttgtaaagtgtttgggtaaactgaagataaagaaaataatttttaagtgaatttgtaatacaaattgacatttagataaactgcattagcctggttaaatggcttagtaagtgtagcatggtgttcctagtgactgaatgtatatttagttcaggacctcagg

SEQ ID NO: 57620 - DNA, 1033 bp, Homo sapiens
ataacaatgatataaatccaacaagagtggagggagggaaataataaagaaaaaaataataaaattgaaaaacctagttaactaacgaatccaagaattgatttttttgaaattactaataaaataggtaaacctcagataagattaagattaaggagaactaaaaagagaacagacagaattaaataatattaagattaaaacaatgagacaattatgaacaaattaatgccaatatatttgaaaatgcatatgagataggcaaatttctagaaaaattagaagttgagaaaactgattaaaagagaaatagaaaatctgaagagtcatacaactactaaagacattcggtcttcaggtaagacttaaaacctgattccaagcaataccctgaacactcatttcacagtacaggcaaaacattgaatgtctatgtggaccattaccaatattccatcaggcagaagcctacctgtacaggatggatgtggaaatgagaatcacaaaaaaagagaatatgtcctatcttcttgttacaaatatttaagttagcttaggatgaatatagaagtgcataatttaattaataaaaaatgtttcaaggaatctcaggagcaataccagggactaggcatacttacagccaaggtctgcaaagtaagtgcacttggaaagactttgaatgacaagaatgctgatgtcagccaaagaccttgtttctccccagattggctcaagctgggccagatccttgctatactaccaaaaaaaaaaaaaaaaaaaaaaaaaaaaaaagagagagaaggaaatgagcctccaaaccattcataattttctctcatcccctgggggcactcattaagtgtaagtaatttagctctgattgacacaaactcatagtgggtttcacagtatgtctgggagtagagagggttacacagtattttctgagaatggagcatcagtgagaaaccacaagctggatccagtggaatgtaacatatccaaatttgtacaggatttatatcacaag

SEQ ID NO: 57621 - DNA, 1029 bp, Homo sapiens
gtgacagtaggtaagaggagaacaagaaccaggtttacaaggaataagacactgagagtttggctgatgaccaaaaggcagtggtcaagctaaatagcataagcttcaaagaagccagcattattttttagaaaggatggagagaaatagtctggaactagtgatgggcaataatatgaagttctcccacctctttgagcagtttgtaagggaaatgatgtgttcaggagtagctacaatttagttaagagaaaaaaggtgaaggtaactctaaagagaagaactttattaatgccagactttttttttttttttaacagacttaagccagattgggttttgagaagagataacatggaagaaatcacaaatcccctgcaagctattcaaatggtgatggatacgcttggcattccttattagtaaatgtaaacattttcagtatgtatagtgtaaagaaatattaaagccaatcatgagtacgtaaagtgatttttgctctccgtgtacaacttttaaaatctgactttgttttaaaaaaacataaactgttcattacattcttcatttttatcatttatagttttatgcatgtaataaactaatatgtcataagatgattatattattcctgtctattatcttaaagtattatagtagtttcaatgtaatcttattactaaaaggaaataatagctgattacaccttttttataggtaagttgaggaattttcataaaacaaatgttagaaattgaagttctgtctactcactaagaagtgagactaggataaaataatctcacaaattcatatcaatggcatccttatctatatccttgactggctaaagcatccagataagcaagtgagcccttctaggctcacaaaaagaatacacccaccactgtatttactaaaaattcttaccattgaactgatgggggttataatttgaagtggaaggaacatgctattgcttataatagaatcttgttgtgtagttatacaccacagacctgaaaatga

SEQ ID NO: 57622 - DNA, 1733 bp, Homo sapiens
tctttttctcatacactttgcccgtttttccattggctgttcttttttgttatgatttataggagttctttatgtattttgaagaagaattctatttgtttatatacattaacatacatttacatataaagtatttagtaaaaaaaatgcagaatgatacatgcagtttggtagaattgtaaaatgaagacattgttgtccaggattaaatatactcctgtgcatgtgtgtgcacacacacacacacacaggcacccaacatggactggaaaggtttttgcaccaagtggagtggggaagtaatgcctctgtggaaagctgaaagatttcttgatatactgttctatttctttcatttatgtataaatgtatatttgtatatttttttaaaaaaacctgaagtagaaatgaaaaacaaaattctatgttttaaacagagatggtttcgagcaagattacaagaaaagagatttattcagaaatatcatagcatcaaaaagattgagcatgaaggtcaagaatgtctgagccagcgaaatagggctgcatcagtaatacagaaagcagtgcgccattttctcctccgtaaaaagcaggaaaaattcactagtggaatcattaaaattcaggtaattgaaacttgtatagttttagttcaaaactttagtttgcaattcatctacatgatatctaacactataaaaacatagttaccattttaaaaagctaacgcattagccggtagaataactcataagcactatactaccataatttcattgctaagctctttattttcaaatgctctagaggaggtttataatcaagaagtaaaaatattttaacattttgaataaatttagacatctttggtcgataaatgctgtccagtttacatataggaatattatctgtatttctttttttgaaagttgattttgctatttatttgaacttgagattttaattgaaatgtatgtgatcatgtcaaataaatttactgaaaatgtttacattgtgaaaacagatgtagatataaatagaaaacattggctataatcttaaaattactctgttttatctctttaaggcattatggagaggctattcttggaggaagaaaaatgattgtacaaaaattaaagctatacgactaagtcttcaagttgttaatagggagattcgagaagaaaacaaactctacaaaagaactgcacttgcacttcattaccttttgacatataagcacctttctgccattcttgaggccttaaaacacctaggttagtttgtgttaacatgtttaaagaatgatgtaatactacattattagctaaaacttcattttgttgctgtaaatttacctgtgtgtgtgtgttttttttttctttcagaggtagttactagattgtctccactttgttgtgagaacatggcccagagtggagcaatttctaaaatatttgttttgatccgaagttgtaatcgcagtattccttgtatggaagtcatcagatatgctgtgcaagtcttgcttaatgtatctaaggtagtttttcattttattaatgagatattcactggtcaacaaatatgcccctgcaaattaagtttgggtttactcatcactagggcttaaatctctaagttaaattcatttatgtgcaagagtcttaggatgaaaaaatgtttattaacataaatgtagatttaagtaccaatttttatattat

SEQ ID NO: 57623 - DNA, 1722 bp, Homo sapiens
tgttagtccttttccctctcacaatgaaaagtatcaagaggatgagagggaaagagcaccaggtatctattgacccttgacccttggcttacaccttcatcttggctatagacctatgtgagtttagaaataatgcttcatcatcatttcatatctatgaaacatggcattcttagactataaatcataattatgccatctcattgagaaattcaagaacttctagtgggttggaaatctttttctttctacccattaatgttacttgtaaatttttccttatagagacatcgagctgcttgtttgatccaagcacattatagaggatataaaggaaggcaggtctttcttcggcagaaatctgctgctttgatcatacaaaaatatatacgagccagggaggctggaaagcatgaaaggataaaatatattgaatttaaaaaatctacagttatcctacaagcactggtgcgtggttggctagtacgaaaaagagtaagtattttcaagtagcatatctcattcttataaaatgaaagcacttgatgttaaatagtgttaagaaactttggattttagagaataatttcagaactaatatgaccattaacttgaattaattcagctgctagaaaggtaagtgacaagagcactgactgtcaaattttttttctctgaacctagtcctactatttctcacaggggttcaccaccaaagacgcaaaataaaatttctcttttgtaatgaatcttaacaaaggaactgaaaatatgagagagaggctccatatgtgaaagaggttaaatgttattctagtagctttttgccaccaccaagcaacttttgaggtgttgcaaccagcattcctgtgacagcttccacatcttcagcaagagagaattatttttagggaggtcatgatattcaagcttacaatatgtgaagtactggcatagacaaaacaatttgatttgaagttaaataggaggaatgtttgtattttgtttattaaacatcaagtgaaagtctgaagcccaacagcaactgtagaaagctccttctgcagggtcttatgctggagttgcactgtactatttaatagtagagaagttaattcatatactttttctgatttaatatcaccatttccaagagttctgcttggaattctgtaacattttttgagtttaatatttatacccttctctaatagggcagtctagttgaattagaagctatggttatttagtaaagtacccaaaatataattttgctttctacactctgagttatgagttacactactggaaatattgtatagtacaatattgtaattactttgaattacaatataagtaattgtaatgattaaaaattagtttattcttgctagtttatataatttgatgttgaggttatacaaaaaaaaacactcattgattaacttaggaggcagatacttgaatatgctttgttttttcacctttagtttttagaacagagagccaaaattcgacttcttcacttcactgcagctgcatattatcacctgaatgctgttagaattcaaagagcctataaactttacctggctgtgaagaatgctaacaagcaggttaattcagtcatctgtattcaggtttgcttcttctttgcagtaaaactatatgatataatttttctgttagaaatttttgatatgtaataaacaatttccaaat

SEQ ID NO: 57624 - DNA, 1108 bp, Homo sapiens
tcctctttctccccagaacctgcagtaggtcaatgtgttcattttcttttcttccaaatggattgaggtgatgaggataatttacataatgtggggcttttcagacatgtgtgtcttacaatttataaatactggttagggttttgttaggctgggctggcagccagccataaggtatgtgtgataaagcacataatacgtgttcactatagtaagcaccactgttctcagaagactcattacatgtcaaagtctaaaagagtcatgatatgactatgcaatttatttttgtctgcactaaccttattttaactgtctttatactgatttgtcttatttacaaaaaaaaagagacaactcattgcatacttgttatatttatgtatttaataggctatgtggaggagatatagagccaagaaatatttatgtaaagtgaaagctgcctgcaagattcaagcctggtatagatgttggagagcacacaaagaatatctagctatattaaaagctgttaaaattattcaaggttgcttctataccaaactagagagaacacggtaatgtatcatagttctgtggagagtgtaaaagtatttgtgtgtgatagctaagtctttacataaaataacactgcttattgatttttattttaaatatttgttatgcttaatttatatggttggttttgttgatattttctttattaaggaaacaaaatacatctctcgtactgtcttgcttttttgagatagagcatagcctttaattaatataatctaaaaatattatatacttgattaattcaggttcataaggattagagtaaggacagagacgtaggaagtgaataaaatcatttagttaagacttggttttcttattagtgctttgggccattttgctgggtgacttaactactggcaaaatttgttttcttactcattctttttttctttgaactttgtattattcctcatactctttgtcattaatgatgaagaccctaattaccaacctgtctatgctaattgtatttcactattcctagcttatttctcacacacacattttcagaagctgttaccagatcatctttttttaagtt

SEQ ID NO: 57625 - DNA, 2794 bp, Homo sapiens
gttctagcatcttaccagaaaacacgctctgctgtcattgtgctgcagtctgcatatagagggatgcaagccaggaaaatgtatattcacatcctcacatctgttataaagattcaatcatattatcgtgcttatgtttctaaaaaggaatttttgagcctaaaaaatgctacaataaaattgcagtcaactgttaagatgaaacaaacacgtaaacaatatttgcatttaagagcagctgcactatttatccagcaatgttaccgttccaaaaaaatagctgcacaaaagagagaagagtatatgcagatgcgggaatcttgtatcaaactgcaagcatttgttagaggataccttgtccgaaagcagatgaggttacaaagaaaagctgttatttcactacagtcttatttcagaatgagaaaggctcggcagtattatctgaaaatgtataaagcaattattgtcattcagaattactatcatgcatacaaagcacaggtcaatcagaggaagaacttcttgcaagtcaaaaaagcagctacttgcttgcaagcagcttacagaggttataaagtacgccagctaatcaaacaacaatctatagctgctcttaaaattcagtctgcttttagaggctataataaaagggtaaaatatcaatctgtgcttcaatctataataaagattcagagatggtacagggcgtacaagactcttcatgatacaagaacacattttttgaagacaaaggcagctgtgatttccctccagtctgcttatcgtggctggaaggttcggaaacagattagaagggaacatcaagctgccttgaagattcagtctgcttttagaatggccaaggcccagaaacagtttagattgtttaaaacagcagcattagtcatccagcaaaatttcagagcatggactgcaggaaggaagcaatgtatggagtatattgaactccgtcatgcggtactggtgcttcaatctatgtggaagggaaaaacactgagaagacagcttcaaaggcaacataaatgtgctatcatcatacagtcatactatagaatgcatgtgcaacaaaagaagtggaaaatcatgaaaaaagctgctcttctgattcaaaagtattatagggcttacagtattggaagagaacagaatcatttatatttgaaaacaaaagcagctgtagtaactttacagtcagcttatcgtggtatgaaagtgagaaaaagaataaaggattgcaacaaagcagcagtcactatacagtctaaatacagagcttacaaaaccaaaaagaaatatgcaacctatagagcttcagctattataattcagagatggtatcgaggtattaaaattacaaaccatcagcataaggagtatcttaatttgaagaagacagcaattaaaatccaatctgtttatagaggtattagagttagaagacatattcaacacatgcacagggcagccacttttattaaagccatgtttaaaatgcatcagtcaagaataagttaccatacaatgagaaaagcagctattgttattcaagtaagatgtagagcatattatcaaggtaaaatgcagcgtgaaaagtacctgacaattttgaaagctgttaaagtccttcaggcaagttttagaggagtaagagttagacggactcttagaaagatgcagactgcagcaacactcattcagtcaaactacagaagatacagacagcaaacatactttaataagttaaagaaaataacaaaaacagtacagcaaagatactgggcaatgaaagaaagaaacatacaatttcaaaggtataacaaactgaggcattctgtaatatacattcaggctatttttaggggaaagaaagctagaagacatttaaaaatgatgcatatagccgcaactctcattcagaggagatttagaactctaatgatgagaagaagattcctctctctcaagaaaactgctattttgattcagagaaaatatcgggcacatctttgtacaaagcatcacttacagttccttcaggtacaaaatgcagttattaaaatccagtcatcatacagaagatggatgataaggaaaaggatgcgagagatgcacagggctgctactttcatccagtctactttcagaatgcacagattacatatgagatatcaggctttgaaacaggcctccgttgtgatccaacagcaataccaagcaaatagagctgcaaaactgcagaggcagcattatctcagacaaagacactctgctgtgatccttcaggctgcattcaggggtatgaaaactagaagacatttgaagagtatgcattcctctgcaacccttattcagagtaggtttagatcattactggtgaggagaagattcatttccctcaaaaaagctactatttttgttcagaggaaatatcgagccaccatttgtgccaaacataaattgtaccaattcttgcacttaagaaaggcagccattacaatacagtcatcttacagaagactgatggtaaagaagaagttacaagaaatgcaaagggctgcagttctcattcaggctactttcaggatgtacagaacatatattacatttcagacttggaaacatgcttcaattctaattcagcaacattatcgaacatatagagctgcaaaattacaaagagaaaattatatcagacaatggcattctgctgtggttattcaggctgcatataaaggaatgaaagcaagacaacttttaagggaaaaacacaaag

SEQ ID NO: 57626 - DNA, 1555 bp, Homo sapiens
tatgtaattttcaaatacttgctaaatttggtaatatatttgcctcttctaatttatttactttccatctttaaattctctaatggcatgtaaagttgtattttagttctatagagatgatctaaaaactgagataagttacaatttactttagcctattttgtccatgaatgccctgacccttacaacttttgtctcaaatgcaatatacttctgaactgcaacatttgaaaattttatttgtgtatttatttatttactgtaacagggttgtgcttttaacttgagcctctacagtcctaaagcccataggtttcacaagggcattgataatggtgttagatgacttaatcaacttgttatatacataattcccctagcccgattttggaattgtctactctttctccccagaggaatgatccaatatatagcacttaccattccttagtatttatgtttcaatctattggtcaccttttttatatgtaaaaataacagtttgattatttccatagttgtttcccctattgcacaattttcatgcacagataccaaccactgattgttattaattaataattggaattatagctaatctctgtgtagagcctacccttgcatggtggacggtcccagacagcaacacaaaaagctgccagacatccctgccataagttattccttcccaccagaggaaatagttcattttctagtctccaattccagtgaagtaaattgagaaatctagtattggacagtatagcaaagttactttaaagccaaactgcctgattcgtatcctggctatattaccaataaactaacaagctaattgacctcattgcctcagttttctagtgatcgtaagagtagtatttgctcatttgttcttatggtggtggttgtgagatttaaatggattgttcatgaagtgttcagaatggtgctggacatagaatatgttattatttacagcaatttattatcagaagtaacaagtagagatatggggggtattgccttctaacataactagggagctgggtcctctttgaccacaaatgttgggcatctcagataccacttctcatagcccaaactatactttttcctcttcagcttgtatgacctaaggccacaatgtattctgtgctaaaggaggaggtattttgtttctcccctttagtgttttgctttgttcaaattgttacaattctctaacacattctttttttcatacaatcctcccctttcctaaaagttaatcatgaattcagtggacctgaatctgagaaacataccacattacacttcaaatggcctttatcttgattactgaggatctgtgatagatcaaacatgtctaatctttatcttagactatttcttaggaatctttgtttcatcatacaaaatatctgcaagcccacctatcagcgctttcgacatgcctggaattatcagtattccaaagatgaacacaagaagtgtaggggtgttttatttccagtatcaatttgattggtgtttaacatatggttatcttacaaag

SEQ ID NO: 57627 - DNA, 1613 bp, Homo sapiens
atatatatatatgtatatatatgtgtatatatatatatatttcaatctaatcttcaccacacctgcaaagtaggtgttatgtctacctctcagatgaggaaactgaaactacagtttacatcattgataaatcccatgggccccaaatcccatgttcttaaccactaaacattttatcacttcagtgtagatggtgtttgcctttggggaaaaaaaaagcgactgttttgtactaaaatatccatttcaggcactttattttctttgatttttttaacttcctggtttaaaacatctacagtttctctaaatagaagacagttactttgatttctgtgggttaaaaataatctatggaaaatatgaaggtatttatctttttttgtgtttgttttaggtggatatttcccttaacttagatcaattaaaggaagaaattgcctttctaaaacacacaaagagtataaagaaaacaatatctctactatcatgccattctgatgatcttattaataagaaaaaaggcaaaagggatagtggttcctttgaacaatatagtgaaaacataaagttattgatggattgggtaaatgctgtttgtgccttctataataaaaaggtaagtttctttgttttttgttttaacccaatatattttaataaattttgatgaaagtcacttaaacttaatgcctgaagtcttttcttgaatttcttagttcatctgtgtaagcaaactttccctcaaatgagtgaatgttttatcatacactgtatttcatctaatctatcaccaattgtgtgatacatgataattttatcaagaaaagaaaaatatgccctagatggaagtcttagtagaagatgcttgcatagaactgggacataaaagaatcatatcattattataaagttcaattcaaataagcccacattcagaaagggacaactaagaacttaccactagttagaggaagaagaacaaaatttgagtctctctataatcatttgttaggttaacactgtatttctgtatgaagtatacttcttagtgtaaatatatgaaaaaaatttcccctaaacacgtggataaactatctggtaataaatataagacagaaacagtgatacacagtatgtatagctaaatatggtaagccttgcaatatgattataccaagaagttattagtacaaaaattgttaaacatatggataatcttctatgttttaactaaatactagagagccaaagttgatcatcggtattaattaattccatatttggaatttgcatactagctaaaatttctttttaatgccaaaattagtagttgcagtattttgtggtcatttattgacgtgtgtgaatgcctgggccctcatagccagctgatgtcaaacaaggtggtgctctttttgtttcagctcttatactgtaaacaagcgtccttttcaggacctatttagcattgtacttttttgcatttttgtgctttttgttggtgagttccctgtttaaaatggctttcaagtgtagtaatgaagccctgtctagtgttcttaggagaagactgtgatgtgccgtatacagaaaatatatgcgttaactaa

SEQ ID NO: 57628 - DNA, 1773 bp, Homo sapiens
gacctgtgctttccaaattatcttggatgatttgcagatgttttctacattgataactatcataaaaatttgaatatttaggtttctgttataacttcacgatgtacttaatgggacagttataaataaatttgaacaacatgcctatatttgatagttctttaacttaaatgaaaaaattaaaatgggaatgttgctcgtcagatgattaagacttatcttagtcctgagctttgtctttttgcattgcaacgtatactatatacaataagatatacataaatcatatatgcatagtttaaagaagttatttagcaaataaccatgtcatttagaaagtagaacattgccagttccttaggttatggtctgccattcctcagtcacttccctttgtttcttagagatagcataattctgactttggctttaatttattttcagacaacttatggagaactcatatctttggaagataacagtgatgtcacagggttggctatgtttattctgaatcgcctactttggaatcctgatatagcagctgagtatagacaccccactgttcctcacctgtatagagatggtaagtatctctgcctctcctacattctctccacattatacatgaatggcttattgtcattcttcctgtttctgtttacattttcctttctcaaagaaaccaatctaaataagtctctgcttctagtactctcccttcctccaccctcattccccgttaattcctccatcactatttataattctatctgttgtctctacccatcctctccccccagtaggttgtaagtcctatgggggtcatgtttgttgtaatttggtactgtatatctaacacctacgatggtgcctgcatgtagtaggtgttcattaaatatttgttgagtaagaccaactaaatctcttgatgcctctgtgcctgtttcctcatctatgaattgaaaatattaagtggtgcatacttgtcccatagagatattgggaggattaaatggatttatacacataaagcactaaaaaaggcacatagtgttttatttgtgcttgctaccctacactttttgttttactaacaccttattattattattatcatattttaagatgaaacctacctttcatagattaacttgctgtgcttttttgtactttatttaaggtcatgaagaagctttgtccaagtttacattgaaaaagttattgttgttggtctgttttcttgattatgctaaaatttccagactcattgatcatgatccttgtctcttctgtaaagatgccgaattcaaggtatgcttttcattgtatgctttatattttatatttcccatttacgacttttgcttgctttcatggtatgttttctctttagaaaaaaaattagttttccaaagaataatactcagaggagtaaaataggaatgcctgtctggtgagtcccatcagtaattctaaccatccctcgtttttattggtttacctttcatcagcacattatcattactcttaattttgacttgaaaatggattaaactatgcttctgaagatttaatttttgagaaaatttcttccctaattttgatgtagtatataatcaagttaatgctagtttttatagtgtattattatgagcaacttttagaaagatcttaagttggaaatatgtatgaagtttgcattattaatgtataatatgaaactttttatattattttatttttatatgtacagaatgatttggaggattt

SEQ ID NO: 57629 - DNA, 1120 bp, Homo sapiens
tttttttcccccggctttattgacatataattgacaggtaaaactggcatatatttaaggtatacaacatgatgttgatatatgtatatattattaaatgattataacaatcaagctaattaatgtatctactcacatagttaccttcttgtgtgtatgtgtggtgaaaacatttaagaagtactctcagcaaatttcaagtatacaagtcactgttattaactatagtcgtcatggtgtacattcgatctccagaatttattcatcctgcgtaactgagactttatactcctttgacaacatcgccccagtccctctaccccattctctggcaaccaccattctctgtgcttctataaattcaacttgtttagatttcacatataaatgagatcatacagtatttgtttttctatgcttaggctatttcagtttgcataatatcctccagattgatccatgttatcacaagtgacaggattttcatttttaagactgaatagtacttcattatatataaatatatatatatttatcatatatatttatttgtatatatacgtacacacacatacacataccccacattttctttatccacttattcactaatggacacttagattgattccatatcttggatattgtggataatgctgcaatgaacataagaatgcaggtatctcttccagatactgatgtccccaagagattttgtatttcaaaactaggtatacatgctttagctttgctgccaaaaatcccacatacttgaatatgatcatgtatatttaagactataagtgtattttatttaaattaacttatttcatataagcaagtatttttttcccactgatatactctccttgaagttttatttcttgtctctatttgattatcaatttgaacttatttgcctttgacatgcatttcaggagaacgtcagaaagtcctgaattggctgttgtcctacaatcctttgtggcttcgaattggtctagaggtaagcatatatttcaggtttctaaaataatatttttttattatatactttttgtagaatagactcattttattacaatgtagttttacttataaaagttgaaagtcattaggt

SEQ ID NO: 57630 - DNA, 1312 bp, Homo sapiens
catcagaaaatagggaactattaaatgtacacagtgccaacgtttcaaaagtttcttttaatgagaaagctgtaactgaaacttcctttaattccgtaaatgttaatggccaaagaggagagaatagtaaacttagtcttacccccaactgttcttcaactttgaacattacacaaagccaaatacattttctaagtccagattcttttgtaaataatagtcatggagctaataatgaactagaattagtaacatgtctttcatcagatatgtttatgaaagataattcacagcctgtgcatttggaatcaacaattgcacatgaaatttatcagaaaattttaagtccagattctttcataaaagataattatggactaaatcaggatctagaatcagagtcagttaatcctattttatcccctaatcaatttttaaaagataacatggcatatatgtgtacatctcagcaaacatgtaaagtaccattatcaaatgaaaattctcaagtcccacagtctcctgaagattggagaaaaagtgaagtttcgccacgtattcctgaatgtcagggttcaaaatctcccaaagctatttttgaagaactagtagaaatgaagtcaaattactacagttttataaaacaaaataatcctaaattttctgcagttcaggatatttctagtcatagccacaataaacaacctaagagacgtccaatactttctgccactgttactaaaaggaaggccacctgtaccagagaaaaccaaactgagattaataaaccaaaagcaaaaagatgtctcaacagtgcagtgggtgaacatgaaaaagtaataaataatcaaaaggaaaaagaagattttcattcttatcttccaattatagatccaatattaagtaaatctaagagttataaaaacgaggtaacaccctcttcgacaacagcttcagttgctcggaaaagaaagagcgatggaagcatggaagatgcaaatgtgagagttgcaattacagaacatacagaagtgcgagaaatcaaaagaatccatttttctccctcagagcctaaaacatcagctgttaagaaaacaaaaaatgtgacaacacccatctcaaaacgtattagcaacagagagaaattaaacctgaagaagaaaactggtgagtcttgtttataaaatctactgaagtatacctgtaaaggggatacttccttttggtttagtaaatctgctattgataagcttgtattatagtttttacttatttgctgggtacatttccttagcaaatgtgaatacagctt

SEQ ID NO: 57631 - DNA, 1036 bp, Homo sapiens
atttctcctttaaaacagaaacttgtctgtttctcctgaaaaacaaaatttgttttgtcatgtcagcgtttaaatttggcagattctgtctacctgccagggtgtggggtgtagatgttaaagtccaaactctggcattagactgcctgggttctaataggtacctgcgtgactttggcagacttttctggatgttagttacttcatctgtaaaatgtgcataatcataatacctgcttcctagggatgttagcattaaatgagttttacaggatacctgcacttatgcctggaacaataatacctgtttaagaaatctcagtatgatgatgtggaccttagaggaatttgtaaggaagaaggaatttagctgatcatctttacatttctttttaaataaagtcttcataatgcagggtccttgtgtttgaagtagaagtactctacacatctaaaaattagaaatgtacaattaaatcttttgaaaccactcaaacaaaatgatttagagactatctgttctattgctttaatacagttaagattttattatttattttgttgtgaaccctgttatttttagtgactttttttcttataattaagcagatagggtaggagaaatatatttgatttattaaatgtttagtatatagagtgttggttaacaattattaagccctactatattgtaagttgtatataaggtgttttggttattatgtaattactattgtaattatataatgtattgttttgattatagcctaaagagaaaattgttatttctgttaactggacaccactcaaagaaggccgagtaagagagattatgacatttcttgtaaatgatgttctgaaacaccaagctatattactaggaaatgcagaagagcagaaaaagaaaaaggtaatgttttaaccattctgtgatttactctaagaaattgtttaataataaataaaacttattttgataacaggcttgaagtaatattgcttatttaatattcaatagctacaaacttaattggta

SEQ ID NO: 57632 - DNA, 1820 bp, Homo sapiens
tgattctgctggctagattgtactgattaatagatttttatttttatttttttttggttatgggtgttatgattgtgttgcctgctggttgggcaactttttttttttaggttgctttatgtttatataggcaaattggcactaagtgttagtgtgaatatttgtttttatgatttatatatcattttaaaaatctctgttgtggcctttatagttactgtgaagccactcttgggcctgtctctatatgcttattagaggaatctgacaagtaaaataaaatgagtagtgtgtctgcatctgtgtctctgtttctctgtcttttaaataaccagtaaccataactacacagccctgcactgaatgaccttatttcagtttgcctaaaactgaacaagaggtgatggtttgagatgagtttctcattaggagcagcaacatcccaaccaatatataatgagttgatcaactcaggaaaaattaggactttaaagaaggttgtatttggatattctaagattcagtgccaaatttaaaatgcctagaaatgtattctacaagtagcatttctaaaactttaagtagtgttatagtaaatgctacttgctgttagagtgaataatggataatgtgagaataattttctaaacgacttctagaaactagacagttcttccttatatcctacccttttccacatttctctaatgtggggttttttgtttgtttgtttgttttgagggtagagggaatcccctccttatttcctctaaaattgtttttacttaagataccttttccctataatcttagcatgctttctgctctttctctttggaagtagcattaataagatagatgtaataggattaagatgtgtggaagatgagaaaaagaaggtttttgtagagagagtgcttatgttttgtttactcatgtttcaacttgctgtgtatgatcataaatctatgatcttgagaaaaatcctaaaacaatttaaatttagcctatgcagccaattacataaagagaaattaaggattatattcagaggagaaattaaggattatatttagagcacagaggttatacaaagaatataaccttgtttggtcaaattcttaggtaaagaaaagtaatcaatgcttgcattgctgttggagattctaaaagatgtattgaatgaagaggatgtacacatctcattgttactgcgtatttttttgcttggtattcctgcttgcattaaagctggacaatgtactgtgatgtaattacaaaatttttattccttctaacgattgaactcttcttatccctattgataaaactgtattacaattgatgagtgtggctgccagaaaataatacaaaactgggcatttagctgttccacattgtgtagtaaatgttttgattatggggatttacagtgtatattaaagtagaaatgcttttgcacttgttttcagtctcaaataataatttttgtttttaattaaggatactttaaaagcaatgacagaaaaatctaaaatatcagaattaattattgtgaactgtgtgtaaaatatcttgtgagttttatacatactttggttgtctgatgtttcctaagtataaatgtctttatagaaaatttcagttctctgtgaagagtaggaagtgtactgtatattgaactagttctttgtgttactttgatatttaaaataaatataaagttctttggtcctaatacagcatatctaggttttattgaaccacattttcacaggatgggaatgcagtactctgaaaccaagtaacttgcagcacat

SEQ ID NO: 57633 - DNA, 2104 bp, Homo sapiens
gaagttgggtagcttgctcaatgtttggctagtaagtgttatagtcagaattcaaacccagatctttttaatgtttaagcttcttatttttaccagtttattgtactgtctgcattttgtgatagtatacagtattattgctattatcaagttctggcaagtattcacattggaagtttgctacttgaagtcattgtcttatcaagttgagtacattttacatctaattatattcttgttcattcatataggtgaaaaaccatacaagtgtcaaatttgcaatcagtcttttagaattaagaaaacattaacaaaacacctggttattcattctgatgcccgacctttcaactgtcagcactgtaatgcaacatttaagcggaaagacaagctgaaataccacattgaccatgttcatgaaataaaatctcctgatgatcctctcagtacttctgaggaaaaacttgtatccttgccagttgagtactcatctgatgacaaaatctttcaaacagaaacaaaacaatatatggaccagcccaaagtttatcagtcggaagccaagacgatgttacagaatgtatctgctgaagtatgtgttccagtaactctggttccagttcagatgcctgacactccgagtgacctagtgcgtcatactaccacactcccaccatcttctcatgagattctgtcaccacagccacagtcaactgattatccacgagcagcggatttagcttttctggaaaaatatactcttactcctcaacctgcaaatatagttcacccagttcgacctgaacaaatgctagatcctagagaacaatcttatcttggaacattactgggccttgatagcactactggtgttcaaaatatttctacgaatgagcatcattcatgagtaaatctaaacattccacagatttttggatggttatatgctaatggtagagatgatagcttttaaatttgtggggctgctattttcttgttttctctagtttctcaagtcctcagaacagtttcaaatcaagaaaactatgtgtctctgtttactgaacatgaatatttggacaaaatttctggcataatatttgaagtgcacatttttgtgatttttaaagattatttagtgctaacttttaatggtttcttaaattttttgcaattattagctgctgatattatggaagtattttttttaatcatcagtggaaatttttattcttctttagtctcattcctctccttcttcttcctagcccttcttacaaacaagtttgaggaccatgtagcctttaagaaggaattaagagtacactgataattgcaactgtttcttatcctaagattcaatattacgttatacaaatttttaaaattgaaattaggaatttgaatttacaagaatgccttggatatttctgtgttgtctttccattcatacataattttaggttatcattatcctttggacttttgatatactcaaagccagaaagcttaactaatgtaagattagctattatttgtaggactgaaataataatccagataattggtttttgcctatacttcaattgttatgaataagaaaggcaaacataggtctgggcattaaattatacaaactgaaaatgtgttacaagaaaaatatgagagttttaactagatgtttttcaaggtaagttcaccttttgtactttactatttatttcagaaatgttgacaatacaacatagcatatgtcttcatctcactaagaaaagagcagttgtaactcaatgaaatttaattaaacatgctacttttgatttcatttacttggctgatagaaactctgggaaacagaacctagatattttgtgttcaattgttagaaaaggtgccaaacagattatgaaatttgtgcctaatttaacttaacattgtttaattaaatggaaccactacttatatacagatttacatgcaatccagatctttaattttgccttcacaaaagcctaatgtctgtaattaacctttaatttttatttctgtatgagacaaaagttgaggacttggtgaaaggaaatagcagttacagcaaaacctc

SEQ ID NO: 57634 - DNA, 1015 bp, Homo sapiens
actaatatttcatttttaaatttaggtataaaattttatttattagttcaaatttataatttttttgttaggacatgaactgatgagagcaatttcacctttttgataaatgcgggttttaaaattgccgcagattctttttaatcagcctgagcatctattttttaaatttagttaaggtgtaatttacagaaagtgaaattcattctttttagtgtataattctgcaagtcatgtaatcatcaccacaattaagatatggaatagtttcatcaccacaaaatttctgccatgtccctttctagacaactcttcatttcccctttaggccactcttgatctgtttctaccttataatttttctttttgtatatttggatagctagtaataataaaagttcagtgacttaaagcagttgaaaatctacagacctctttttatagattcgtttgttggatgtaactggaagaggaaaaaccagaggcaagctcaacatattaaaagtatttccatgtttctttggagttctatactttgttaatgtgagaattatatacacagttgtaaatgaagttgcaacttattttcattatgttagttattaatataattattaatattgtcatatttattatagttattaaaattatattgaaaaactcaaatctttttattttcttagatataaagcaacatttcatcaatgtgatgtttgtaagaaaatttttaaaggcaaatcaagtctggaaatgcattttcgaacgcattcaggtaaaatttaatgagtggttcatagatatatatatatagagagagatatatatagtgtaatcagaagtaaaatataggcatttaaactttgttgttcttggttaaatttctttggttttccccattaagatttttacttattatattgaagttcatgccatgactgaacaatattctcatcttctattctctattatgtaagcttcaatacttttaaatattttacaaaacttgagaaaactt

SEQ ID NO: 57635 - DNA, 1076 bp, Homo sapiens
tagctgcatgcaaaactggatatccagtataggaaaaaaatgcagttgttattttctttgaagaatcctgataagtaactgaacattaaagagaatgcttcatttcttcctttgcccagctgaagccgccagctatacagatagtcatattttataaaaagttttactagtagatatttcattctttgactaaccacacattttgcataataaccttattttggcacgtgtatttacttcacctttttttttcagctatgtaagtactgactttcgttttctcaatttcttagagcctttttttggttcagaggaggtggagagatttttcataatacttaacacagtgcttgatgtgaattaagaataaataaatacttgttgaatgagttaataaatgagtaaaatatttagatcccatgaaaaatgaaatattagaggttttaaatgagaatccattaaagatacttaatacaatgtacattttgaggtcatctctcatttctaatgtgtaaaacacattgaaatttacccagagctactgtggctaccaagcaattttgcttatagttacgtttctgaatttcagcatcttaattctattttctttccattgtgctattatgattaattcattagaattctttcttcagtttgtccttccatatactgagacatcttcttgctaatatatagcttctttgagctgtatttactaaacttcttttttacgcattctttgtctttcttatattttgtcagtcagtagaacactgtcttgtctccagttttttatttggtaaaatcatagtgaaattcagtatccaactaatgtcagtgttactatgagaggcctgggcttaattttgtatcaccaaatagaaatatttccaaactataaactctcttaagtcctccattcattcttccaaagttttttattacccgctttcccaaaaactttagtatgcagccatttctactttgttccagtctgatttcaaaccaggaattggccatttcaatttgttaactcattagtttgttcagcattcattctgtttgttagatgctga

SEQ ID NO: 57636 - DNA, 1554 bp, Homo sapiens
acaataaagataattttatcaggataagtatagaagactaaggaaatcaggagaagtgtctcagagcagatagtatttgagctgagactcaaagaatagggaacagtttacaagacagaaggaccagcatgtgcaaaggcattgaggtatgttgtattctggaaattgctcaagtgtgagtggtttcaaggtggtcagggaggcatagtgaaaataacaggagatgaaggtgggcaagaaagtggtggtcagattttgtatgtcttgtatgttctacagaggtgtatactttggacaatctaatttaactagactagactttattcagtaggtgatagggactgttgaaaagaattttacaaaggaaaccatggcctgtaagaattttagaaagatcatggtggcttcagtgtggagaaggaaattggaaaaagggatgaaaaaagagccagggagacaagaaggagcatataacaaaggaccagaatgataatgtagcttagacttggaagatgagtggcgttgggagtgggatgtagaatgagagtaaagcagagagttatgatacattgaatgtagactaagtagactggtgatgagtagaatgaaaagaatatgtagcagaagatccatgtgtcttaagtgtcctctcttaccatctttattattagaagtacagtttatttaaaaaaataacaacacaggagttcgagcgccaccttcccattattctcatatcatccacattcctttcgtagaattttaaaatgccacccagattttggggtatttatctgtcttagattgtgagcctggaggttacgtatcttactcttggctagtattctttgtaacatctcaggtcatttcaaataaatttttagtaagcacttgtttatttgagctaagttgaaaagttggtatctggcttgactttgggcttgtaagaagccaattagccttctttaagcttctaacttggcttctttggggtgggtttatgagagatgcataagctttgagaccttctgctggaaccattagttccacaataagtaatctactaatttgattccattactttgcatcttttatcctttcttccagttatatttttccttaggctaccggctgtcttcctctcagcaaattatcatgcaaataagagtcctttgacctttccccttataccaaaaacctagtggataaacaggcaaaaatagggagatgacagatggggtgagagagaaaatttggataattcatcttttttattgtttccacagagaactaaaatctttcattagattaaattcacaatctcttctagaggtagaacatgttttatacctttaaaaaaaaatgtgactagtccatcgtgcagatattccacttagttcttaatagaaaagggttataacaatggcacaactctctaaggctaagtattttaattacatattctttagactaactcatatgaatatttcaaggtacattttaagatgtagcaatatcagatatataatgaactcatctggtgatatttctctt

SEQ ID NO: 57637 - DNA, 1077 bp, Homo sapiens
tttggacattatagatgcagtgaagttgttaaataacgaaaatgttgccccttttcattcagagctaactgaaaagtcatcaccagaagaaacactaaatgaattaactggaagactatcaaataatcatcagtgcaaattctgtagtagacatttttgttataaaaagtctttagagaatcatttggctaaaacccataggtcccttttattagggaaaaaacatgggttaaaaatgctggagagaagtttctccgcaagaagatcaaaaaggaatcggaagtgccctgttaagtttgatgacaccagcgatgatgaacaggaaagtggtgatgggtcagacaatttgaatcaagaaaattttgataaggaaaagtcagatagaaatgattctgaggaccctggaagtgaatataatgctgaagaagatgagctagaggaggagatgtcagatgagtactctgacattgaagaacaaagtgaaaaggatcataatgatgcagaagaagaacctgaggctggtgattctgtaggaaatgttcatgaggggttaactccagtggtcattcagaacagcaacaaaaaaatattgcagtgtcctaaatgtgataaaacatttgaccgaataggtaagaaaagaaaactggttttctatctctaatcacttacttttcttggatattttaaaggtgataaataaaaactaaacttggaaagtaacttctaaaaagactgtttaagtagggagaataccttggttttcaatagtgtttatcctgttactttaaagttgttgtgattcaggaattaatttaagtatttatattagcctttacttttcttcatctcccagtgacacatcattagatcatgtatttgctatgaaagactccagagtgtcaataattatcatgtagagctttgatttatatgccggtttaattccagtgataaatactatttttaactcattaaaaaagtggattatattagatttaataatgtgtatactgttttccccgtgcatggtaatatatgagttataaatgttgtcacttttccagtatctagcactat

SEQ ID NO: 57638 - DNA, 2906 bp, Homo sapiens
cccatattttctatggtaactaaatcaaatatttgtaagttcctctgctttttgaaattatttttcaaagaagcaacacctgttatacaacagaattgtataaactaaaaagacttttggccttggtacatagtctttatctggcctgcaatggagtcatggttctttctgaatcccactctcacttttttctttttacccttagatattgcatccgtggtatttcaggggtatagagaaataatattggaatttaggagctatttttttaagtgaaaatattactaagtggtatcttttgatgattacctactttaatgtgtcttagaaaagcaccaaaacatagcatgattattttttcagttaattaaaattagttaataacatgttcatttaaaaactattcattgactttttgtaccagtcatatgcagggtacagtaactgaggatatgggaaataaaataactgacatagtccctgctctgaaggaacaaaggaaaaggaattgcaaatttttattaaaataataataataataataataataataataataataataataatgtgttttgcctggaagttattagctgagattctaacacacaaaaagttcaaaaaaaaagaacaaaaactggctgcttaatttaaagcatgctctaagtatgaaccatagtatcatttctaatttcattaactttctcaattattatgctaagtatattatgctgctaagatacccacatttaaggggcagatttagagactcttttagaaactgagtgtctttatcttattatcagataaccaggctgcacagggctctctataatggaatgatgctccttttcaatacttagagccactgtactcagtttaggagtaactgaaggtgtggatgcatgttaatgggaatccaatttttactatttttatatgaataacagcgttctgtagaaacagtctctcccttctaaataaaaactatgtgactgctgttactagtgctattctatgcgaatatcctaataataggattcaggaattctaatgaattgtttcttaattaaggtgaacaagtagactcctgatcaagaggagaacactgtgaatgtctcataatcaatagaccttcattctcttgtagaaaatgtggattttcaggaaaagactgattattttcatgaataaattttcttatacaaattccattttgtttgacataaaagaccctgaatcttaagatatttgtaaatcagaatatttaagaatgtaaaatgaatccccaaatctagtttcctccaaagcacttcttaatgtaggaaatagtttttacaaaccctatgtcagtactaatgttcctgggtcaaacccagtaatattgttagtgtatgttgttacaccttatttaagaggcagagtggttttgagcaagtcagttaacgtgatttgatgaagaaataaggaattatatacatttagacagaagaatattttattttgaaaataggatttcgtgcaataatttttcttgcataacttagttcatataaatatgtacatctgtttttctggcagatgccttaaggtcatgtttttcagtatttgagtaaatctgtatgtagcaatgttctcattgatttcagaaaaaaatatattctttatattgttgccaggagaaatgtttttgtttatttaaaattattatggatattgtgttgttgtatcataactaactgcctcagcaacaataaatatgcaataagaaaatcctgtaccttagattagattgacaatactgttactttaaaagaaatatatacggtacaaattgctgattctacatgtgtacatttaacagatactcagttctgcaccacctaaatcaaaatggcatttgtatgctgatgattacatatgtggattgtagtatcctttgtgatgaatctttgataagatttataaagggcattgccaatactttttgactgtgtaaattaattttttgtatgatgtacagtttgtttaatcttagagcttctatagatttctactttattatacttgaatgaggcagaaaagcactgtggaaaatctgtagctctggatgcaacatgcagacataccaaaaaaataataataaagcaaggtactgaagagcaatgttaacagaatgctttatatccagaatgctatgtttttttcaagccacattttagttgaatgaagtaaagttattcaatcttttattttaaaatattggaaagtcacaaatgattacttctttgatatgatgaacctataagtctattcatctctgttatttcatttctcaaatgtgagccttgttgaggtccattatcaaatctacactttggttgattatatgatgtttaggacaaggcagaatttaaaacctgcatgtttagtgcatcacatgtcaagtcaccatccttctgacagtgtaacttccataacgttattttgagagccatttaataatcatatttgaaaaagtggatttcttgagtctgttgtagtttagtacttacagcagtgcctaaaacagcaactaatatgaactgcctgagtcctacaacataaatgcataaagcttttttatgtaaaagccacaggaggggttcaaaattgaacttttccaaagtttatttctcttgcgttagatgaaaaactatttaaaaggactgaaaaccctgagctttttgctcgtcttggtagcagatatctgtaaaaacctacccagaattgtgattttacttcattgttcttgcatccttgaggctacagtataaatcatctccaaacttgactactattgggaagatgtgtataaaagcatcgctttgggaatttttttaaaaatatgcaaaaataaatattga

SEQ ID NO: 57639 - DNA, 2304 bp, Homo sapiens
tttgacagattctctgtttatcctgaaagaggaaaacagtaacaagcacctcggtgctgacaatgtgagtgaccctacttcaggactggatttccaactcacttcccctgaagtttcccagactgataaaggaaaaacagaaaagagggaaacactaagccagatttcagatgatctgcttatacccggtcttgggcggcattcatcgacttttgttccttgggagaaagaagggaaagaagccaaagagacttcagaagatattggactgctccatgaagtagtgtcattatgtcatatgacatctgacttccaacaaagcttgaacatttcagacaaaaacacaaatggaaaccaaacttaaatcttgcatccaagcttctatggagacattttgagattcaatgcaatctgtataataaacagaattatttgtaggaatggcaactcatactatttaaatttttttttgcatttgcaacatttttctcacttgttcatttcgaggatatatgaaatgcattgatttttaaatataaagcgaattctactgtgcttttaaatcaggtactagtgtgtatgtatgtttaaagtatgtattgaccatgagatttcccagtgtttggtgcttaatgccgtttattttatttaagctaagaatgcatatgtaacccatgcacataaccagtagctactatactaatctggttgagcatgaactgatcaagatatcaaaacttatcaaaactagcctgaagctgatgaaactgttaacccactaattgccttaatcttaaagctgttttttaagcatacttaaataatgtatgaaagtatgtataaagtttgaaggataagttattagtgttctgcagagcaataatgcctttttctattcatcaaatcaaggtcaaaattcatcttttcaagattaaaaagctctcttaatggaaatatttaatttgcttatataaagcactatagccatgttttccaaaaagtataaaaatatacacttacctttcattcagtgaaatataggaagtgctgaattacaatgtgaagttaatgacttctgtttacaaatgagacactctaacgagttttcagtctctctgtatgcctttgctatttaggggtccaccccaagaaagccaaatacaacataaaccgtcctgacaaaaaaaaaaaaaaaaatctttttttaactaataattctctatcaaaatgcttcatatcatcatctcaaatttactttttaaaataattgactttgtattttagaagttttagatttacagaaaaattgcaaagatagtacagagagttcccatctacccctgttactaacatcttacgttactatggtacatctgccccaattagtgaaccaatattgatattccatactttattcagattttcttagttttctcctaatatccattttccacatcaagatcctattcagaataccacactatattgagttggaatgtctccttaggctcctcttgcctgtgacagtttcttagactttccttatttttgatgacattgacagctttgaagagtactgtcagataaattgtagcatgctcctctcttggagtttgttgggtatttttttcatgattagactgggattgtgggttttgaggagatgatcacagaagtaaagtgccattttcatcaggtcatatcaagggtacgtactgtcaacatgatttgtgaatgctgacagggaccttgataacctggctgaggtagcgtttgtcactctaaagttcttcctgccctttccatgctgtcatttttggaaggaagtcactacatgcaggagtgaggagtcataattccccttctttagggcagagaagtatctacataaataactgggaattctgtatagaaaatttgtttcttctttctcaaattcactgttgagctttggaattcatctgagaaggaatcatgtactaattacttcatgatagactagattaccaggcacaatcagggaaaaaagcagtgatagtatggttaaattgttattagcattttcagtatatccactttatacatccccaatcatgattttttttacatttctttttagaaaagatgttcaagaaatcattaaagaaccccaataagactatattctaaatatttattgaaagaatataatttcagctaaaatcctagaagagggtttgaaataatttaaagaaaatgaccaagtttttttaaaacctacgtttcaaaatctaaatggatatgtgttatttgggacacttattc

SEQ ID NO: 57640 - DNA, 1048 bp, Homo sapiens
agaaatggctgattccaggtttgatgcagaaaaattctaagttgaaatgagacatcttattgtgccaaaaacaggaaacttactaaacacttctgagtttatgtcaaaggacacaggaatcaacttgaaagggctaccactggtaacagatggggccattaaaaaaaaacaactttattttgaaaatttcaaacatatgcagaaggaaggagaagcttacaaaaatccccagaaaccatttatgtagccttcaccaattatcaactcatggccaatcttatttcagtcacagcctcacctattctctttctccaccattaaattattttgaaataaatacccaaaagcatatcatttaatctgggaatatttcaagttatagctctaaaagataaggactattttaaaaacataatcatggtgtatttcaaagatggaacaatttgaacatcaagaagaagaattgtggtgggttgaacaacatcaagtatctactaataatgggaatttaaaaaaaagaccctcatgacttgcctttagagattgttaggacactagcttagctcatcactctcaaaattgttaaaaggaaagaaatcaaggatttgtcctgcctgtcccatacattgtattttggaatagtcaaatagttgataaggtaaagctcttctttatagaatgccagcaaataaatatagaaggaatgctctagaaaagcataattctttagcccctaatgaaatagtggatttagccagtcgttatcatggaatgctaaaaccttcaggtcaaaagttgataatgaaatgtataatggatcgcttgacgaatcatacctgaagtcattaatgaatcttagtaccaccaaaaatgagatatttaaacattatgtgcctatacatgttacagtaaaaatgcacatatcaatacccatgtaatattcttgccaaaatcaaaggaagatgaaaaagaaactgagggtaagcttccagaggtagctaccaatttataggaagtgaggacaggatagcatgttaaagggtatgga

SEQ ID NO: 57641 - DNA, 1051 bp, Homo sapiens
tcttattattctgaaactaccacttgccttaaaaaatgagatttatagcttgccatttttagagctagcctttctcaggctagttcttggacatttatttcttctgggtctctctggacttatttatctagcatagttatgatgaaaacagttctgttcatgagtcagaacacttgggttggagtcacattctgtcacttatgatttaccttgtcttgcccaagtcactttgctttgttaatcttttggtttcctaatatgtaaaatagagaaaatgttcaccaaatttgttgtatagtagatatttaaatgaaataaaatacagtacataaagtagctaacacattgaagcaagtcaatcatgggtaagtcttttaactctttagttattacctatacaaattaaaacacatctttttaaagcttgttttgaattataaactgccatgcattttaagatgtcactattataattatacattattatttaatttattcacatattatttcatgcaggtatttttttcttaggctgcaaaatacataagcttggggatttgttgtagactttagataagcaaggtaacacttctggatctcagttgcctcaactgtaaaatggagggtagtacagattgtacctactttcaaaaaatttatgtattacaagcatcttaattttcttatgtctaaaaagttatattttctcattcgtctgcctatatcccttattccttcccctcccaaaccccaggaatttaaatttaccctgcattttgcctttttaatatttgtctgccacctggtgatcaaaatggtaactgcaaggttaacagtctccttggtgcatcaggggagtgattttcatcattctactttctgattcactttctggaaaccattgcagtgaaaagaaagatttattttgcttactgtaacgaaactaaacttatttcttgagatctcctcagacattaagttctatgattttgtgtcttggtccttctacctctgtcacattttgtgtacattttcttacatttttttcttt

SEQ ID NO: 57642 - DNA, 1016 bp, Homo sapiens
atgggacctgttctagttctgtacaatatacaccagtttacaaattacacaatgaaaagggaggaaactcagaaaagcgtaagcttgctcaggtaagtaaggttatttacccttcattcccccacattctcaaattatataattccagtaaattatttaggaacaatttggatccactaattttttatcttatatgaaaacctgcagtattggtcaaggggaggagttagtggaacctgggaaggctacaaggggattgagagtcaaatgtttcagatatcggtctctacatgctttgttagcccatgccctcatagatctcatagtccagtgaaggaaaagacaattgaatgtgtgattcttatagagtgtgaatagcttgatgataaactggaaatcataggattcctttactacaaaaataaaatcaatcttatacatgggtatttggccattaaaatagtctatagaaattaaaatctgaactactataagtctatcctattctaaagttagattattttatttgctataaatagttaaagcttctttttatatgctgatgctacttaaaatattgtttcaagtgactgagtgttcagaatcatagctataagtgttcctggtttttttttcataagtacatttatgaaggctctaactaaacaaaattggtatatacaaaattgtatcttaagtggccttagaaaactagcttcaaaaaagaattcttgagtggactgtagctacaaaattacagaactggaagtggctgcaaagcttcatttataacagttgccaaggtttgcagatgagaaagttgatagctagaatggtcacaacacttgccataagtctcataactgatcagtggcagaaggaggcgaaaagccatctctgatgctcagttagctttcctggatagccaggcaccacagaagtatacatggccataaggtgcttccagggtctttgtctttgagcccattttgtgctgctgtaccagaatacctgag

SEQ ID NO: 57643 - DNA, 1167 bp, Homo sapiens
tactagttcttgataaattttggtttacagatttatttttgatcaaccattcctggcatctcatttttatatattccagggaacccgaggtcatatcaacaatgggtgcatacagtcaaggtaatcataagctttcaaatgttattctttcactctaatataaatggagaaatgttcagcaaaagtatgctgtttatacttatgctgtttatttgaaatatttgaaatgtttgtatattttgtcacattttaaatattcttattttacgtttatagtttgttgatactcattaagataatttttaaatggaaagttttggtccaaagataaatggctcattttgaaaagcaagattttactgccaaatgttgtttttcttatattattttccagaagaagaaattaggtggggtagaaggatttgatggcaattttataatttgtggtaatatagttttgttaatatgatttttaaatatgaaactttctcccccagactgagactttatttgcccgatattaaaacagctgataaacttgtatttctttcttattaagctttaaatatattcaaattactagtcatattgctcaagtctacctaagcttcaaggaagaaatgatttttaagtgatgtattatatcaactaaagaacaaggtggaaagtgtacattttgtttgaaattattaaagtacatagaaacttgaaaacactgaacactgaacatgaaataatttgtataggtctttaagttgtgagtaaagccctttttttaaatatgcaacttactgtaatactttgttttcaggatattttagctaaaagtttttggaaatatgtttctgtttttcttttgcagaaaggaggtgcactgttcaacacagcaatgaccaaagcaacccctgctgtacggacagcatataaatttgtaagtttttttgatatttaacaatcctatttatgaaattataaaacattttcctaggtgatagacatataaattctgaatattttctatttttcttttaaataaacctaaaaaaaaattaggattaatattgaccaaagcaaattcaattgttaaaattataacattgcatgcagagggtagtttcttttatataatctaaaaatggttctcattttattccaaagctatcggca

SEQ ID NO: 57644 - DNA, 1001 bp, Homo sapiens
ttatagtaataacgatcatttatgatatttcttcaatatactatgtaccatactaaacattgtttaatcgttatctttcatcctcacaataatcctgaaggacaatgactattatgcttatttgatgaatgaagaagctgatgctcagccaagttaaggacctcatcccaaatcacatccttcacaaagatagagtaggcctgagctctaaaggtccattggactccaaagcccacttccttctcattgaactgactgcttatggcactgtttgcctattttacagtagaaaagtacagttcaaataatgtagataaaaacatgcgatgacttgtacagagctgaaaattagcttttttaaattcctcatagttctaaataagaccctaacctttctacgatagtttgaaacttttatcatagctagtttctttgtggttcagaggtttaaaagaattgttttctggattgacaaaggttacagaatgctaaactggtgtttgtttcttcttccactttcttacattcattttgggaaaataattaaaacactttccagaatactgtgaataataacaaagtcttaaatatgtgatttccactcagccatttttagtagagaagtaaaaagtatatgaactgatgagagctttttaatacagaaacatatatgaataatctggatgaataaagatctgcagggttttttttgttgttgtttaaaaaatctccttgagaaataaattggtagaataacttggaatgttttattattttacaagggaaatatacttttaaaagtttggtcaagccaaataccacctgaaactcacaccttttaaacagggcaacttatttttacaaaggttattttaggtagttacattttgctgtagttatttcacaagttaagaaaaaaaatttgtcttcatgtttcatcctccagaaaaggtgcaatgctgtgttctgagtagtcagagatgtttttcagaataaaaatt

SEQ ID NO: 57645 - DNA, 1003 bp, Homo sapiens
tagaatcctgaaattcagttgtcatagagttttgatggagtgattgcaattaaatatttatataacatgtgtctagaccactaagggaattagaacactgataatagcataacttgttttaggatttttagattcaatgctggaaatacactgactggtaaataattaaagaattgtaaaaggcatatgacttatctcttagaggacatatacattcctaccagtttactggcagctatattgaagtgtaatctgtgactttgatcaaaacatattctttatattttttggaaagaagcctcctatggagtctattctttatattacatatttgaaacattcattttatatttaattgtatttaaaaaatgaatttgaatagtgaatgttaattttcatttaacagtattacttactgaagtatatttaaagcaacagataatttctttaaattgactcagtgtcgtattaggtggctattggaagataaaaacacttctaaaaaccttagtgacatcaatatcaaaaagaagagccagaagcagttttgctgcttgaaaatatttatcttgtaacctgtcacagtactttaagatcatgtcataagcaaggttgaaaggaaacctgcaaacctgagtgccctccagtataatggactggactaattattaatgattttatatatatattattttgatgtaacagacccgtgattgaaaactagagcgtggcctctggtgttatgtaacatgtatatttgtttttgtccacggttcctggctcatagctcctaaaatccttgtcatctccgaaagcaaaaagatcatgtcataaagattaacaaaatctggttcttgcaattgttgatgatttagagggaataatgtcattgatcttgagaattacatgtattattatttaaatcaattttatctatttataatttatgaaattatggaatccatactatgggataatatctatgaatttttgtaagatttcc

SEQ ID NO: 57646 - DNA, 1059 bp, Homo sapiens
aaatggggactaccagaggtgagggtaggattacaatttaaaataatatagtcaatgtagatttcctggaatatgtgtcacttcagcggtatcctgtggggtggccaaaagtggaaacagagagaaagaagatttagaaaactattgctgtcatctaggtgagaaattgatggcagtgtggaactgttgattgaagatatgatgagatttggtcagaatatgggtttattttataaataaagccaatagatattctgaaggatttgatataaagatgagagaaagcagagtcatggatgattccatgttatctcatctgagaaactggaaggaagtatttgtctcaattaaaattgagattgggaagactgtgggcagaagatgatttcgtcaagaagaacaagagttgagtttcagacatattaagtcaagatatctattggagatgcaagcaggatattgattaggtaagtggatggataaaggaggaggggagaatactggactggaggtatatacattttggagtcatcagcatgtaggtagaatttaaagccatcagcatgtagattagatgagattaccaaaggaaaaagtataaatagaaatgataagaaagtagtataagagggcactagcaacggaggttatgaaagagtggatgaacaattaggtaggacagaaaccagaagagtactttatattagcagccaacaagaataccaaagagggagggatcaacactgtcaaatgctcatgacaggctcattaaaacaaggacctagcattgattactggatttagtaaccatggatatatgatgaccttagcaagagcaattttgctgacgtggtgagacagaaattgtgattgaagcatgagaggagaggacgtagacacaaagtactgacagctcttttgaattttgctgtgaagaatggaatagcacataactagagaagtaagtggggtcaagagaagaaataacatgtttgtatgctgctgggaagatctagttaagaaataaaactatattcagaagagagaaggaaaaattgt

SEQ ID NO: 57647 - DNA, 1994 bp, Homo sapiens
ctctaataaaaatacaaaaattagccaggcaaggtgtcacacgcctgtaatcccagctacactggaggctgaagcaggagaatagcttgaacctgggagacagaggttgcagtgagctgagattgtgccagtgcactccagcctgggcaacagagcaagactccatctcaaagaaacaacaacaacaacaacaacaaaaacaaaaaccctactcttttagcaattttgaaatgtacaatacattagtattaactgtggtcactgtaccatgcagtagatctcaaaaacctatttctcttgtctaactgaaactttgtatcctttgatcaaaatcttcccctcccctggacactccttctttcagtcaacaaagcagaagctaccaactatccttgctttattattattatttaaactgttaatatttaattaaagtattgtgttaaaacatatatatttttaatgtttatacgtcatccagtaataggctgtattttcattgacagttgacttcttaacctcttttggtctcagtttctgcattgtaacatgagttagagtaaaagatcactgagtttgagatacctctcatctctaacattccatgatactttgaaataaacatagcttagatggatgatagtgggttccatttgtatgaatttctcttcaggtaatggatttggaaggaatcccagaaacagttccttaaatccacaactctgacattaccgtctttctttagctagcagctttacaaagacttaagccattattttcaggtctcttacttttatctcatactgatacaatgaaggaaattattttcttctgtacattgcttgttattaaggcccctggaactgaagttttttctgctcatcttaccatacattcaccatggctaaggaccacggcaaaaccaaacctttcccccaaaacctctcctaccattcatatagtaatataaatgtgtatttctcaaacttttctatccaacagagtgccccccatggcagaagagaatgcattttttaaagagtatggggggtggctgtatgagctcactgataagcacattttaggaagcattctgcatttttccaaaacatttatacattgtatattctataccgcaatgtagctatggcaagtggctataatagtttgaatgtcaacccttaggtcaatcatctcatcttttctattcctttagagctctgttcatgtctgagttatagaatttatcccatgttattgtaatttatcttttttatattgacttcatctctctaaagtcttccctgagtgtccctccccctcactaagtctgtactcctttttttctgtgcctatattactttaaacacattttatttattcatgcagtctgattgaatttagtgtgtcaatccaagagcctcatctagaactataaacttacgggctctccatgaatataggcctttttaactgataatctagattactgttaggaaacttatttaatagtgaaggaactcacatatatttaaatagatattcaaaataattctgcttgcccaaattctaactcttatcagggaggaaaatgataaagattcaaattggaaaactcttttttaatgttcccccaaaaccttttctacctttcattgagtaataaaaatgtgtatttctcaaacttttctatccaaaaaagtgccccccatggcagaagagaatacatatttttaaagagtataagggggtggctgtagaagcccactgacaggcacagtttaggaagcattctgcatttttccaaaacatttatacatgttgtacattctatatcacaacatagcagtgtttattttaaagtgaaaacattttaaatactggttgtattaccctcttcttaccttcatattaaaataaaactaaaatttcagttaaatataccacatacatcctttggctttgtgttcttggtcacaccattgagtgtcact

SEQ ID NO: 57648 - DNA, 1052 bp, Homo sapiens
aattctgtccttttattcatagtcactttagtgctaagagggtaaaagtggggaattggtggtaatattattcatgctgcagtgaattcccagcgtgctaaaatccaggttataattcttcccatggatggctgcttggaggtctgaattctcactgaaaggaatttaaaacatttgataagagcaatgaaatgatgcttatttctgaattttcttttcattgtttaacttttcgtttgtgatctatcctaatactaaattagactaaaaaatgtatttacagagtgtaaaatctctaaagacaatacaataaaatgtcctttgtgaagtaattcttagccattggaggttgaggctagcttgctttcttaagaataaaaagagaaaacaattgatactttttcagtattaataggattatgtgataatagccatatgactaaggctccaaatgcttttctgaattcagagttatgtgtgagtataagccttaggatttcatgggaagagatatatttatttcataactaaagttagaagtttggaaattaaagcagaaaatgctctttcctagaccaggtattaaaaagtacaggacagaccccatcatttttatagataaaaactgctaaaagctaattagcactgcaaagggcattggtaactggtgataatttactccagtgatgtaaagaccagaaacacagccaggttgatgcaatgattttatattatattaatatccttatatctaaaactgatttttaaaaaacaattgttttcttacagactatttttgagcattcatttgcccatgtagaaacacttagctgcccttctggtctctgaaaaacaggaacaacttcagatgtactgacaattgaagcccactagagtaggtcaaggaaaaattatttttatgtaatttgtaaaagttgaaataatgtagaaagaggcaaaggagaaatataactatatttcttgccaggcaattttagtttaaaatctgtatgaaattagatagtatactcatgtagaataacattgtccaa

SEQ ID NO: 57649 - DNA, 1040 bp, Homo sapiens
ttttctttctagtgtctaatgtctgaaatagcctttgggttgagttctaagagcttgcatgccaaaaacctccctggttcaaagagtaagtcagtgatattcaaacaagaagttatctgaaacttcctgaaccttaaggtcacaatgataggctcagcttctatcataggaacggagtaatataatataattatttttttaaagaatagccatcagaaaacttggtaaactaaactgtttcctagggtaaacagttttcttccatttccatccttgaggttaaaaaatcatactgatctacatgtaaaagggaaaaaaattacagatcatcccttcaatctcatagttttgattaaatactttttatgaatattccagttcaaaaatagtgtcatgaagatttgataggaaaagatatatctttgctaactctttggcacgattggaactttctgaatcctgaggtaatcctacctccataaagtatttctgtttttgcaactggtagctctggtgtgggttggactgtggagagccgtaatgccatcttgtgaccatggatggatatcgcatcttggtccaccaataaagccttgctactttgttgattcattcatccattcacttgttcattaaacacttagtgaccatctattaatatttgccaagctgtgagtgtgtaatgtaatgaataagatttagtttatgccattgcaagattcacagatagcaagaaatacacacatacttacatgtgcacacatgcacacacacagcacagtgtaatactgcaatactataagtattacagaataggcatacaaaggaccatggatggcaacacataagaagaagtggcctacagtccctggtagcttagggaaggtgcctgggaggaaatgacaccatctgcattttcccctaatcagccaatgtaagagtactttaatgtggcaagtctatgatgttgcaagacagtcttaacctatctaagtccataaacacatggcaggtagtgtgactgtaggactagtaaaatt

SEQ ID NO: 57650 - DNA, 1059 bp, Homo sapiens
gctcttgcatgctactaggtgaatatggaggattatctttgggatgcttccgtcttctttggaaatctccatttaggtgtctcatggttaacagaataaatatttgccaaagcagattccttataattctacttaaacctgacacttttgctatattacctttaataattcattctggttgcttagttccagaactgtggttgggaaggagttgtcatatattttttcctctccttgtcacctataccccacatccagaaagttgccaagtcctgtagactcggttctcttctggtagatcttgattagcaggcataaccctctaccagatgctggccattgcagaaattttgtgactctgcatataattacagaaaccatcctctaagaaatcagtcaaattcatcagataatgttgaattttgttagcgaataactaataaaacttcatttaaggatgaccagtaaggaggcagggaaagtatttacatggcatttagtagagtgctttggactctgggtatgcccagtgaaataaattgcccagtgaaataaagtgaggtattaaatataatacctcacattaagaacgtgtttttcctcttgctacagtttttatttgctcagtaacaaaaaaagaacactctctcttttttgttgtttttaaggctttaaatgagctgtttaaaaagtcatctgtgtgcagattgagaaattgaataattagctgcctttcaacgcttcataagctcttttagcccatcaggttaaaaagggggtggaaagagttaatacagtcttaaagaggcctaatttacaactaaggagtacctgagagctcttggagaatttgacacaatgagttagatcaaccccattttcatttccctctagctgcagtttgtaacataaataaatccatggtctataattgttaaatggaagtatttgaatgcctcctagtggcatattgtaggctctaattaaggaatttaaaaagtaatacttattgaaggaatactatcataacctattaaagcttgtaagtacaaggtagta

SEQ ID NO: 57651 - DNA, 1006 bp, Homo sapiens
aagactatatgatatttcatttttctttaagcttaaagattcaatatatcataaataatgttaaattaataagattcttcttacttggcttattaaattgttctcatttctttgtagtactttatattgcaaaccaaacttctaaaatatgtagtttattttcctttaatttgtgtattctcaaaatgttccaggtaaatagtttattatgatagcactctcttcagaggtatgtaaaaatgtcatccagaataatatttagagtctttgccatgtcctagaaggctctattttcctttaatttgtatatttttctttaatttgtatattctcaaatgttccaggtaaatagtttattatgatagcactctcttcagaggtatgtaaaaatgtcatcgagaataatatttagagtctttgccgtgtcctagaaggctctccatcattgattctgcttctctatctgacctcatctcctgccattctcccacttcctccagtctgatctcactgacttccccattgctctgtgaagatgccaagcatgttctcacctgggacttctgaatgcctcgtttaatttacctggaatgctcttcttcccaaatccacgagtttactctctcccttcagttaggtttcagttcatatgtcaccacgttagagttcttctgtaatcctcctatctaaaatagctccccacccccatcactccctactttaggtttctttatagatctaatctctgacaatatttattttacttgtttattgtttgctttctccactaacacataagctccatagaaacggggactttgttctgtttagtactgtgtccctgttgcctcatagggatttcgattgcatatagcaggcactcaaaatttttgttgaattaagcaaaaaaattattataatattttcagttgcataattaccttatggactttagagcacctactttattaaagcactttaaagcacttaaacttttagatatatt

SEQ ID NO: 57652 - DNA, 1267 bp, Homo sapiens
tctggtaaaatgtcccattctcaaagaatctcaatcctcaaagatttagctgtgttttggttgtagtttttcattaacttttactttaggcatgcaagtcctgaggcaccatagagaatcccctggttcaagacacgtttctctttgccaaactattatgtagaagcaccccagtttccctttggttattgagaacaatcactcaagccagtagattaacttcctctttttcagcctgttgattcagtggcatatggtaccccagttagccaagtggcatcttaaaattaaagtagaagcattcttctgttaaataggaaggagttaaaaatagttaaccacctgagaaggaaagaaatgcctttattttgaaataaatatttggcatgagtagagtttccaaagataaggtatataagtatttattcatttgtgcattgataaatgctattatttgccaggtactaagtactgggaatttcagagttactaatttgtgattctataacagtgtcagtgagtcaaggacagtcagtgtgataaaaattctaacatgggagatattaggagatagagtggcagactacagagtttacttcaatatgacacctcattctcgaaaggaatttgtatcatgtctaggaaatatatctttaatatattactgtttgtgtgtgtgtatgtatgtttgtatatggagagagtgggagagagagaaatcagactacaaaatctatctggggatataaacagtggccagattgtgaagaatcacatttgctaatttaagaggtttggcttttatccaacagattgtggggaggcaaatgaggtacatgacatggtaagttttgttttggagaagataacactggtggccttataaaagaagaaatgcagtagggggaatccagctgacaggagatcagttaaaagattgttacagtaataaaagcaagagatgattagctcctgaactagaacagtgaccttaagagggaggtgaggttgggttttagaaacatttccaggcaagagtcttttgcctgtggtattagcttaagagtaggtaagaaaagggagaatgtagagtggcatacacaggacaagtctttaccaaatgtttacttagtatctgctttataaggggacagttcttgatatcatttactaacagcaaatttcactttataattatgtgtatgcatatacacacatatacatacagatattcacatatatatgatatgcatgctaaatatacaca

SEQ ID NO: 57653 - DNA, 1032 bp, Homo sapiens
ttagccggatgtggtggcgtgcacctgtaatcctagctactctggtggctgaagcacgaaaatcacctgaacccgggaggcggaggttgcaatgagccaagatctcaccactgcactccagcctgggtgacaaaaaagaaaaaaaaaaagcagattcttggggacatacactaaagatgacaattcaacagagcagctctaggttgggtcccaggaaattagcttcttttcaaatacttagcgggtaagaaagttgggaaatctgtgatctgatcatcctctgcaaatacttaccttgagtagggttatgtttcaactaataatagaatattatgtactttatgtggcagccgactagtattacacttaattattttaataaataccattttaaataataataccctttgaacttcaagactttctggtaagtgtgtaaaatgtttttcttcacattcactatgagctgtaacttacacaattatcttttacttgtacagagaaatcttacagaatattttgttgccgtggatgtgaacaacatgctgcagctgtatgccagtatgctgcatgaaaggcgcatcgtgattatctcgagcaaattaagcactgtaagtacttcacacttcttttaagtagcaggtattgagtgtttcacaaaaagacctaaaaacctttgcagatttagaaatgtgctatgtgtacttataagacaatatctacatacgtttttgatgtatggttttaatctggctcttgaagtacaaaagtctgatttataggaagccttctcagatgcattaagtcaggttaattattttttcttatcaggagatgagagtttttttttctttttaactctccagagttcattttagtgccttctaccatataaagaattcttaagagctattatgagatttttattattcacttgtggctttttccattggagccacttgaaagaaatcaaggggccatgataatagctgctatcctaacctggtaataggtagattcatctttgttgcc

SEQ ID NO: 57654 - DNA, 1758 bp, Homo sapiens
atttgactcttaagaaaattaatcatttggaatatataatattttctgtttatactatcttttaaagcatagttttatgaaatatagtactattaaaaactattccaaataaaagtaggttatagagaccgaaatctttgcatattctccattttcagtagtagtaattttaaagtatattcacagcacaagatttgtcacattttttggtcccaagatcacaaaagatcttgtgatttatctcctattgttcttctaccctggaaaattatagattatgactgtgttaactatccttgttctgactagttcaactgtgctcaaatattggctaaaatgtttcttttctaatcattaataataagatattattaaatatgtccttatgtgattcagatattaaataattttggagattaatatgaacagaaaataaaacttttgatgattaaattgcactttgattctgggtggtaaaatttgggaacattgtgggaaacatgaaggcatatatacacaatgtattctttatgtaagtattctgatgaactgttttacttctttgaacattatagaagctaattaatatttggcagatgtgtaacaatcatattttgggattactacgtgtttaagaaattttaaacattgaaaaattatgctttattgctatttgctaaataatagggtggttgatgtttacaaaagagatttcttgtgacttaccatagaaacccagcccaggaatcttagtagattttgatatatttggttagcaagctttaatttttccagtccacctcaactaaatgtgttttaataatatatatgtttatatgtatgtataggtgtgtatgtctctatatactgtatatatacacatacgtgtatatgtatatatgtacaaaataaacctttcagcaatatactctttttttgccttaacattttttccctattttaattttaattttagggtcaaatatttttaaccaagtcttaactttttgtatggcaatgtaattgttaaatctcatataaacccgctaactcatttaagaatctctcaaattcaacaaatcctgaatgtcagtccatggcattttttaatttactcaatatatttttttctgattttcattacaaattatatgttaccagttttaattatctttttcatatgtgatttatttgtattgattagcattcctacttcattgcccctgatgtaactggactcccaacaatacccgagagtgtaagtttcctattttctactttaattattcttatattattaattttgtttattttggtctcactgtttatgcgtttttatatagagaaataggatacattgtaattatctgtgtttgtgagaaataatgaagaaataagaaataaagatattattttcttttcttctttatatatctgcccctttaccttcttcttaatatctggttgtggataaggaaaattaaggacaataatataaggaaaactatttctatcatttgtagtaattaggtaggatcatatatatattcaattaggtcttcagcttcactgtatatgatagaagagatacctcaggagatggcttctacttgtggagaagaattctagcaatgggaaatgtcttcacacaaatcattattttagtgaaattgacatagtattttatattccttgtatataatgcttcaaatcgtagatgaactgttcttaatttcctgattttaatttaaagcaata

SEQ ID NO: 57655 - DNA, 1019 bp, Homo sapiens
tgtaaaatttagtgaaaaacattttaacattttaccttattgataatcagtttaaaattagttgctttgagcatgtatcgtttgaaaattccctaagaaaccacaaaataaagacttgaaaataacatttcttactctagcaacataagcttatataatttacagtattttttatctctctctctgtgtgtgtgtgtgtgtgtatgtgtgtgtttcaaaagttttctttttaaaaatgatgttgtttttgccatatatttagacttaaagtgtacttagagtatagttaaaattggaattactggactactttgtataccctggatcattttcttgtcagataagaaagtgagtagtcggtaggatttcctgttgagcagttgcttcttatcaggagttgtgaattcaattacctatgtagaccaggtaaggggctcaaatgagagaaacctgttaggtgcctaacaataggaagttggggtaagtacggtgatctgaatagtacatgccacactcaaagacagaagccacaactcagccctaggaatttgttgcacagtgaaaaatgtgtggccagtattaccagttcttttgacttttaagagaaacaagaagtctggatttttacagtgaattatatcagatttggaagttggcaacttatttaattaaacaacagtacagtgttgaccaaacaaaatatgcccttaggatagaagcagcctgcaaatagccagttagcactgtttgctgtagatgcttgtttatttacaacagaaaatgtccttgctttcttgacgtttctaggagcaatggctacgttatagagtagttccacttttatatgtgatgtttttatttaaaaaatgaatgatatgtactctttaaaaggagaaagttatcactgagagccagtacatgtttacaaagagagcattgtttataactaggcttggtttattatggtgatagtacatactgatgtaacagggagtgctgtagttgaaatttgagtctgt

SEQ ID NO: 57656 - DNA, 1004 bp, Homo sapiens
tttgtctttttttttttttttgagatggagtctcgctctgcggccaggctggaatgcagtgacgcaatctttgctcactgtagcctccgcctctcgggttcaaccgattctcctgtctcagcctccagagtagctgggaatacagacctgcgccaccacgcccagctaatttttgtatttttggtagagacggggtttcaccatgttggccaggatggtctcaatcgcctgaactcccaaagtgttgggattacaggcgtgagccactgcccccagcctagtttgccttatttcactatgtaaccaagacttagaataactagtaattttagggggaaaaggaaggtaggattatctaatgagctattcatacaatggtttagggtagtcaggtctcttaatttacaggccagcttcctttataacagactgtgctgcttccagaagtatatgagagaagatcaactatgctcattttctgagttatttatgagtagctggcaaaagcctttttgtttgcaatcagttttgtaggagtgacctcacttttagaattcatgtgcttaatagggccaaaatttattgagaagtttgataaaatccttgcataagcaagacatagacatatgcctttaaccatatttctgataacaaaaataatttatttgctatagaaaacttggaggatccagagaagtttaaaagataaaataaaaatcacttatatttgtgaacacataattgtcacttatgttttggtatttagttctagttttatttcaaaagacttgctaagatacatttacagatttttctgtgtcaaaataaatgattaactgtagtctttattcacagtttgcaaaatgaatgaatgcatctaaagcagttcataaattgaaaaagctacagtggctttcatattgtccataagtgcctagaatgtttacacatgcttaatctgacaattgttcattgctgttgtttcttttcttgtaagttgagat

SEQ ID NO: 57657 - DNA, 1090 bp, Homo sapiens
acataattcttaatagacttgatagataattattgaataaataaatgaataatgcagcaacagtttttgctattaagaaaaacatacacatatatacaccctgacttagagaaattgtttatgatctgttgtaacatgatgaaaaatttcaaaataatatttatagtatgttgttatatttgtagagaacaagttatatgtgtatgtaaatgtatatgtattttaagaaatagctaacacataaatatttgtatcttaatatgggattgtatgtacttataaaaaagtctaaaaggatataccctgaattttttttactttattcacttcagcatttatctactttttacaataagcaaaaatcatttcaattttttcctgctctaaaactctgagatgttatgatatagataataaactataaatatggaaccacaggtatcatattaaaaattagtaggaatttagctatattaccaggtaaaatatgtgcgtgtttgcaggatgggaaattatcttactagtatgttttagtataggcactccatacaagtcaggtgatcatggtgacatagcagaattaagaatggaattgggggcttggtgcaggggcccacgcctgtaatccgagtgctttgggaggccgaggcgggcggattacgaggtcaagaaaccccgtctctactaaaaatacaaaaattagctgggcgtggtggcgcacgcctataatcctagctacttgggaggctgaggcaggagaatcgcttgaacccaggaggcggaggttgcagttagctgagattgtgccactgtactctggcctggcaacagagagactctgtctcggaaaaaaaagataataataaataaaaataaaaagaatgggaatgggacagtttcattccgtgtccttgaaaattgggatttaaagagaaaaaaatattgctgatggggtggctttacaatctttgagccagatattgatgtttctctgtaatttcaacacaaaatgttcaaccagatggcaatgatttgtaagatgcttggagaaattctatgacacctaaaattaatttcttttttctccttc

SEQ ID NO: 57658 - DNA, 1044 bp, Homo sapiens
aataaagattcaatctaacgttttatattgccccttataccaaagtgtgacacatattatggtagtatgatacttcaaagttgactagaattctttacagcttagctgataagccttttattttggtagaaattatattcttattttatacttggaaatgtattcctcagtatattgatagctgtacaagagaattctagaaaaaatataacaagggtatttttgtagggtactttattggatgagaatgtcaacaggagaagcaattaaacagagttggtggtggctgccattagattctaaagcgacatgatttgctatctaagcaattttagaataattaagaaaagaggctaaagttgaagaaaaggacttagtcatgatttctagctgcttctacagtttcagtaataatattttgataatttatgaaatatgagcacttttagtcttatgatcatttatggtagactaccttatgatttcctagtgagagattaatatatgctgaactgttcagtctatgaggtattacaacttattttggtgtttactttacaagtttcacacttcctctagttttagaacatagttctagcttcaagaaccaactgattagaaagatgaaaccaatgtcacatataaatatactcttatttttgtttttcttgaagaaaattgtcaaacaaggcacaatgtttcctaatgttactatattttagggtgtctcagaatcaagttggacagcactttacctttgtactgacagacattgaaagtaaacagagatttggattctgcagactgacgtcaggaggcacaatttgtttatgcatccttaggtgagtatttgtagtaaaaaaaattagatgcaaaataggtaactatctctctattgtactttgttatgcttgggatgaagaaaaacttgttttctttaaaaacaagttgaaaaataattttcctgattttctgtatacagaatcagttaagtttaaagatttaccattaacatagtggaactttccttgaaataatcgattt

SEQ ID NO: 57659 - DNA, 1108 bp, Homo sapiens
agaggatccataaaagctatttgcatgcattttatgcctccttccaagtctctctcttttctttttacacttcagtttcaatagcacctgtaattaaggaagaaaaccaagccctgggagctaggtaggacttccagctattgatctgtgtaaacccagtttatactgtcaggggagaaacagtcaactgctgagctgctttgtcactgacataagctgagagaggatttttttttttttttgtctatactgtttatacactagtctatagacctgctggctggttgaattttaaagagtgcggaggtttaaagacttgtcccctgagggatgcttctgccagttgggaagcgagctgaggctgtttcacagaagtgtatgcacgtgtgttgcttgtggaagaagggagggggagggtgtgaaagattgagcaactaactgggaagcgttcgtcttgagtcttaaaattgatgtgaaatatattactaatttgtgtatttagagggagatattgaattttgaatatatgttctttattgttacagaaattatgtggacaattttataggaggaggtctgaatagtgttcacatgtatagtaaaaatggtgaatggtttcactttatgaagtacaagataaggattaagcaatggtcaaatgaaaatgaactggtctcatttgcaatgaactgtttttcagtttacagaatttaacttactgcaagtttagtgactcttttaactacatttaacaaaatattgtcagtggtgaaacagttagctttcgcttaatatagagtctgtgctcatatttttaaaggtacatgattatgattataagcaatccagggtaccctgccctaagagtagatgatttttttttttacaagatccttttctttctgcttatgtgcattaaggcactgaagctttcttaggtattggtattggaattttataatgttttatttttagttgacactttattgtagtctacctttttaaaagaatgcaagaaattctactttaaaacactcaatgctatatttatgtatacggtttaaatattcagatattgatgacttctgtagaccttagttttagtggc

SEQ ID NO: 57660 - DNA, 1122 bp, Homo sapiens
tgaacaagtcaaccatgtcatttcttgctatgagagtataacttttccttatatacattaagcacccttaactgatgtagttactcctagtccttaattattggtggtattcaaactgaagttaaagactcaggacccttgtgggtttcgtgtaggcaatcaaatttgtgttttgaaaaacactcccaagtgattctaaaacctcttcatcttctttctaatcctttccaccctccattgagaacatctggagcaagatagttatgaaattgaatgaaaggacttggtgagtgattaattatatgtgggggtcagggaaaaggaggggtcatggtaactaccgtgtttctgatttgggtaactaggtagatggtgctgccagtttaggtgataaggaccgtaagtaaaagaacaactttggttttgtacattcttcattagaggtgtctgggaacatttagaaagtcataccagaaagtagttagagccataatcctggagaaatatctaaactacaagactaagagatttagtagttgtagttgaaactgtgggtatagatgagattgcttacaggtatatcttactgagtagggaagagaagaaactatgcaatttcagagaacgctctgaaatttcagtgtacagtggaggacaaaagtggttgagaaggaggaaaaacaattagtggtatcgacaatgacacatctcattttatcttagattattctcagataaattcaaagacctttgttctaagaataaattctaagaactttgatcaagatgtaaacgttagtgtttttttttgaagtaaattctttcttaaatgcttgttttccttttcagttgatcaatttatggtgctaaatggtaacctgatgggataaataattaatataccactctaacactagcaattggccctagttctctcttacaagatcaatttcattgtaatgcttattactagagatacactggtatggaacccaaaaccccccaaaatataaattttcatcagtccttgtttccagtcattaacatgatagtagaagtgctgttttaggacatacacagaaatatgtattattacctctttcattttgctgttcataattt

SEQ ID NO: 57661 - DNA, 1067 bp, Homo sapiens
aatagacctttacatatttagacattttaaatcttaaagacataatgttaggtatgatatttcataaaaatattttaagtagtatacaatatttgcttaatatttgggcacctttaaatgaacctaatttcaaaaattaacttcatggttgttaaatttaagcattttaactaactgtgatggtgaatgttttatttaaagtatgaattattttgttaccttttaacaattatttaaacacacagtcacatgtttacttatgtttatttttctagataagtgacaatattgcagcttatcttggtgaattagtactaagtggtaacatacagctatatccttagcctatttgaccagacaacaatgcaatctagtggtcatttttgtaaaatgcagacacagagttcatgtggttttaactagttattgatgtgttaataaaggaaaggttgttccctgattctaaagtttgcaaaaggttagattagggaaaagttagcatgaaaatgtaaaaataaggcatatggtaagaggatcatattttgagggaagatgatgtttttaattttggatgtgccaggtattctaataggaatatcttctaagtagaaggaaacctctgactggagttcaggaagaggatgatggtatggaatttacttctgtggatgaacttaccaggcaaagtttagggaaagaaaagaatctccaagaacaactgcttttataggccccaacctatgtctttaaatccatactgaaaaatataatttgataatcataccctatgacccttgtaaatattttggtttttaagaggtaaacaatatatttcacttcctccttttgatataaccagctaggattatttaatatgttttgcattgcaaattgtaatagtctgaagttttacatgattgtctgtggagttattatttataggatatggggcattaaggaggaagattaacatcagataactccaatttgagccatagggaatggaagaagtaacaaaatattaaattaagcacaagaacttgttcaaataactgctaatttcatgt

SEQ ID NO: 57662 - DNA, 1581 bp, Homo sapiens
gcaacctgtctgtacttccgtagcttcttatatgtacctctaattttaactatattttcattttttttttttttgcatgtctctgtctctcctaggctgtatgtatgtttcttgaaggaaaaggggcagaactttctcatttttcaatctccacatctagtagagtggctggaacataagatatgaataagtgtttttgaacggctagttgaatgagtgacaagtcagaggaagttgaataaactcatgataacttatcttaattttcttggaaaaataataggcaaggtaatttaagaaggatggatttaagagtggtgtttcaccttaaatttggaaagatttcaaactggtgttatgacacatatcgtaggaattcaacaaagtttgaatgaaatgatgtaacttagcagaggggttaggtagcatgaagatttaataggtccttgactgttcatgatagtacctgacttgtttgttctctcctctgtccctcatttctgtaggaggtgaaattaaatttcagtatatactgacaacctagtatgtgcttccatgataaataatgaaaatgcattaagaaatgcttttagaaaagtgcatatgttacatgattattttaaattataacaataataaaaattccattaattaatcaaatcttggtagaaattatctggaaacagtttaaagtataactgtaagaatgaatagtagtaaaaattatgtattatacaaaaacagcagagaattttaaattttacccttcagctgcatcttcataggaatgaatggcaggcagccagctacttagctgacattaaatccagtctactcagtactatatacagttttgtttttatatttaataatgactaatgggtcattattgaatataaaaaggatgggtcattattgaataaaaaaaggatgcaggtaggagttaaggtctgcatagtttaggaagaatgcctgttttattagtaaacaatttttttatacattcataatttaaaaaattttgtattatttaaaaggtatttggtaggaatgattagtttttcattatttgaaattgagacacattgagtattctataattttgcttcttgcatcatcataaagaagatataaattattcagaaataatttattaaattctaatactctgaaaataaatatttaaatgatcgtggatttctaaaaattggatattttttggttgtttgggcttgattctgtcatttttaactaccagtcaattacatgagacagaaataatttcattgcattctatatcaactattgttttttcaaatgtaaagaatgaaatgtcttgaaccaatttttgatatgtaatagtaaattccctataaatgttatatataaactcctttttctaaccctgtgaatattatatataaactcgtatttctaaaacaaattgatttcttaatgtttaattaaataaaaatttataaattttgtagagatgatgggtaaatgtaagataattataattatattatggctgtttacttggtttcatattccaaaaattttattagttatatatttcag

SEQ ID NO: 57663 - DNA, 1030 bp, Homo sapiens
cacctgagagctttttagaaatgcagtttctcggccaggcacggtggctcaagcctgtaatcccagcactttgggaggccgaggcaggcggatcacgaggtcaggagatcgagaccatttgggctaacatggtgaaacctgtctctactaaaaataaaaaaaaattagctgggtgtggtggtgggtgcctgtagtcccagctactcaggagactgaggcaggagaatggcatgaacccgggaggtggggcttgcagtgagcagagattgtgccactgcactccagcctgggcaacggagtgagactccgtctcaaaaaaaaaaaaaaaaaaaaaatgccgtttctcaggcccacctcagaagttttgtgtgtgggacccagcagtctgtttgtgtagatatttttgttgaagtttgagaactactgaattagacctttaagaagatgataaaattaaatattgtcatctataggttaacttcaaaataatttgtacaaacatctgcttatatatgttttatcaagattagatgtagtctgaatttaagactttccagcaatgaatttgtttttattttcactgttgcttatagtcttaaggtttatagtacagtctatcatactattcttttttgagtggatcagtgaagctttttattactactttgtcaaaatgagtgatatctttctatcatgcagtaaatctgtgttttgccggagtctgtgccaaggaaaaatggcaaaagtgtcgatcttctgaatctctggcttcaccaaagtcatttgtggccctaaatgattgagtgaattgtttccttaaaccgttttttttaatcaggctgaatataaaattatggtaagtctgagtatgttggctcgcacctgtaatcctagcactttgggaggcggaggcagtacgatcacctgagcccacgagttcaagaccagcctgggtaacatagcgagacctcatctttacaaaaaagaaaaaaaaaattagttgggcatggtggtgcatgcctatagtccc

SEQ ID NO: 57664 - DNA, 1038 bp, Homo sapiens
ttgataattatatgttttctttttctttttctttttttttttttgagaaggagtctcactctgtctcccaggctggagtgcagtggcgcgatcttggctcactgcaagctccgcctcccgggttcacgccattttcctgcctcagcctcccaagtagctgggactacaggtgcctgccaccacgcctggctcattgtttgtatttttagtagagatggggtttcactgtgttagccaggatggtctcaatctcctgacctcatggtccaccttccttgccctcccaaagtgctgggattacaggtgtgagccactgcgcccggcgctaattatgttttaagaaaaatgggtgaaaattactgtaggacttaattattagtaagcatgttcagactaatagttttctgccccttcaaggaaatgattctttttgccagtatcacagtgttgtatttaccagtcataatcttgacctcaaaggttaatgatatttatccattattagtttaaggaaattctggatatgatcagggaagattttagcaataaaacaacatatttaattagaaacagaataaaatattcacatctctactttcatttgcttttcattctacatcaacagagacctgtgaactgaaatgtaatagctatgttgtgttcattttattattatagttttatgttaacaagtttcttagtttttactatgaacatttgaaaggtgttccccacaagtccttagatttctctaacatgaaggtatagatgacatcacatcacattgatatttagaatcagtttttttccagcttgataacctcttgagtaccttctgggtctcgatcccattttgaggtattcattctcttttagtatttctgtggccctccaggggtatctcataagtactgaggaattgcttgtctacctcaactactatgcttcatgcctttgctcttaatgtctcactgcgattatttccatatcactgatgcaatcatttgtctagaccttgttttagtgcttcacctagga

SEQ ID NO: 57665 - DNA, 1006 bp, Homo sapiens
acaacttgtgtctaacttatttttttaaaagttcttaaggtcaaggaaacaggtttaataatgtccatgttcattttcttttaaaatgttaaccttagaatctgcaaaattaggattaattttcctgcatttagtgtggcacatttgaaaaaaattagataaaaactattttcagtctaaaagccaccgtaacagattaaaaaattcaagtagccctttactttaaacatgtgattaaccgtaaagaattttttcttttccaatttaagttcccatgtcataatacagagataaaaaataatggccccctgacacaccttatttggctcacatggtattcatgaaatgtttaattatttttcccaacttaaaaattaggtgattttgttttcataaatattctggattttcttgaaaaatcaaaagtatctgtcaacactgggcccacattccacatggatggagctgaataatggttgcttttttgggaaggggaatgggatctattttttactacatgtccttttatagtctgtcttttgtaggctcactctactcatttttattacctatatatcctaaaggcatttaaccttgaaatctcccctttgtcttttctacctgtaaaaagggactatatttgtgtaatatataaggtataaataattataccttgactttttctcaggttttaaagaaaatcttaattagaaaacaagttttataccatacataaaaacattattttaatctgtttttaaaattctttgtgatatacctctggctctcaaagtgtagtctaggggtctgtggcggttccctggagtacttcaggagttctgtgaggtcagaacttttttcgtagtagtgaggcattattagcctttttcgttcccatttctcacaagtatatggtagatttttgcataggcttcaggacatgatgaagttataactctgatgactaatgaagtgtgtacttgaagatttttgtgctttactaatt

SEQ ID NO: 57666 - DNA, 1284 bp, Homo sapiens
agataccaatgttttaagttttgtgcctgttaaatatttgaaactacttttagaagttttattaaatagtaaatctttggtaatggcataaaaggtatgtttttgtgttactttataattactttaaattgtcaatttgataattaggttcaaacgattgtgcagaaatgtgttaaagattgtgtattgacattctcacattaggcttgttctactttgaagattaatattctaacattagaattttaaaagtatatttgtagtttaaaactgctttaatgattatttgctctataaatatgcataaataaggatggcatcattgtaatcgctttaaacccttttttgggtaatacatccttagttgggttgagttggaagtgatgatctttggaatatgcacatgaattaattggttactctatcttgggatatgtcagaagtactactgcttcagtgagaggactctggcaggagatgttattttttaccagccagcggtgtttatcttgatttgaaggaagcaagctttatcaacatagaggataatgatttacttgtcttatcctttctctttgtagcctagagaaattccagaaaatagtctttttttcttttttaggaagaaaatatagtcttcatatgaaaagctttgtgtgcttttctgatcaaaatacagaaggatttttatcttttgatctactaaatttacttatcaacataggtgttagctttgcttttcactccttccttcaaaattgtaggacagaaatttggaagtcaggaaagcaagtgaatgtgacaaatgcttatttatcttgcaaaagtgcttcataagtatagtcttttcttcagcttgtccttcataccattgataaactggactttaaagaacttattaatgaaggtggcaatttagttctgcctgaaccaacaactagttatatgatcttgcataaatcatttttcctttcttgactcaagttccttcaggtaaacaaaagctatagactatccaaaagccccttgtaatttaaacattctgtcattttaattgtattattgtttagttcttcaactacattatcaactcactgaagcaaggatttcatcttccttttgatagttttcaaaatatattgtgtagcatattcgatacagtaatagaaatttgtctacaacctcaattctcaaaccttgactttctgagactcagtcttccccatatagggatctcttgctcataattccttttttattcatccctctgccttttcaaatcat

SEQ ID NO: 57667 - DNA, 1101 bp, Homo sapiens
ttcagtacgacaaagcccttagagaaagattgaaaagagctgataatcaaactcccaaattttatgcttatttttgttctagtgctatcaattttctgacatatttaacacaggctggaaaacgttctcagtaaattgagcatttgagtccacaaatgtcttgaagcactctggcaagttatgcatatcccatgtcactttgggtttcccatctcttctttgcttcaaacccccatgcaagtttcttctttttgggggcagcctgtgaattttcaacctcctttttggcttttacaaagttgtggcaggcaactgctttggcaatctttacaccaagctctcgagtagctagctggtttttctgagttcctcagtcttctcaatattccacccctccacagcctggtctatcctctcttcaaggcctgatttctcaacatttttccttttaacatggcgttcaaatcaatcattgactccaaaatactgagtaagctccttccactgggtttcatttgagaactgttcactgtgagattctttttcattcctcaatttatcttttctggagcgttttctttttttccctctgaatcttgaggttgcgtttttctgttcagaatgttttttatgcaattcttgaaatatattctacatatctaggggaattccagaaggacactcttcataggcatttacattcgactctgtttcagttttgggttcatctatcgagaatctatgatttctgtttttctgatgctcccatcctctttatcttcttgtgagttaagtccagagttctgcaatgtagcttcatcttcagagtttcactcaacatcactttcatttaggccaggaggtagcagcccactccacatcttttcgtctgtcaggaagcggtcacctggcagccatcttaagaccccgtcagaaaatgttttaaatattgggagagttaccaaaatgtgacacagaaacacaaagtgagcacatgctgttaaaaaaaaatggcaccagtagacttgctcaaagcagggctgctacaaaccttcagtttttaaaaaatgcaatacctaaaaagcacaacaaagcaaagtg

SEQ ID NO: 57668 - DNA, 1028 bp, Homo sapiens
aggaggatagaagacacgtattttggtattttgcgctgtgattagtgaatttcactttgaaaaggatatttagcagagaataagtttgtagtaccgaatctgacagcatccatataaatatttggtgaggtccagagaggtcaaacaggagttgaaaattacaatgtgacttttctttagcgctcctttcttccaaatttttcacatgtacaacttcagcaacaaagttagaattccatatatgtgtaagttttcaaacttctaagagctaatattgataagctagaaagttgttagaatagaaataacactgggcttatatccttgaaggaatgatgatgagctaaaattaaggataatattacaaaagtgtagggttctcaaaggaaatattagttgagaggtatagtgcaattggttgtgaggtctgtgtaaacaaatactaagtattgcaacttctgaatgattaaaaaatacagaaaattcaaggctatcttggtaatgacattattcccatttatttgaattcctgtataactttcttgagtgaatgctgaatttaagtccagaaattatccttgaagcaagattctgttatatcattgatataaatctcctttttataggtaatttaataatgttgatgaagtttatattttgtcagacaaatttatgtaagacccttctgtagattcctgagttctcaataacagtgtttcttaattttatttataacacatagaaaatgacaatatttgtatggtacttctgggcaaatggacttcatgcaatgataggaggtaaatggcctggggtctgctagggttgaggggatcaatatgttcttatttcttcttacccattagagaggcacaggctgggatgttctctttatggtttctttggtgagactggctttttattcactgcttttgttcactgttgttttatgctactaggtaggatggcagaactctagagttagattggagttagaaattgggttggagttccagttgaaccactct

SEQ ID NO: 57669 - DNA, 1040 bp, Homo sapiens
ctgatagccttctgcagatatatatgattccagaaattactcattaaaataataattttatcttggtttggtagcagaaatgcaccagcatgagggtgtgtttagtatacaaatttactattaattagaattaagcagtcctttaaaattttatcacgtgggtagttataaaaacttagatgacttttattttcttaagattatcatcaaattaattataagttatttgaaattaacttacatgtttatacaggaaacatggttcaaatgaaagccaaataagttcaaatgtgttttaatacacgggaacatcatatgtcctcaaggtctatgcattaaaattataggtgctcttaaacttgcatggaagtggttcagaaaggattctttttttttcttcttcaagattacagtgtattttagatatgatatttggaagaggaagtaatataatatttagaaaatatttttgaaggtcttcatcatttttactcatattaaaagagcaatttctgtttaataattataagcagttaatgaagttaatttttttggtttttagaaaataatgtctttaaaatttttttgttcttattacttcaagacttgagaactaagttttggagtcttagttttactatgaaatgtgtgattttgttgatgaatacctgcagagtaatcactgacaataaggagcagcacaatttcatcaagattatgtgttggttctttcactgtgtacaggtttagacatgttagagaagaaataataagctaagaactgttacgtacaaaaatactagcttccaacttttaatgattactgtagtgtttgttagggatgttgactgtataccctaaacgtggaaatattgaaatggaatgctagttgaaagacaaaattttaatttgtaaatatttgtctcattttagcttaatagttgaagacataaatgagcccgcagtataatgtttaagatgtcattgttctaaattttgcctttgatagagctgatatagctgtttaaaattcattataa

SEQ ID NO: 57670 - DNA, 1337 bp, Homo sapiens
tgcactaggataaattagagtaatgcaaactgtataagctaaattgttgaagaaaatgaaactgtgaccaggcatggtggctgatacctgtaatcccaacattttgggaggaagaggtgggagaatcccttgaggtcagaagatcaagaccaggctgggcaacatagcgaggctcccatctctattaaaaaataaaataaaatgaaactgttttttcttttgcactgctagccaggaacaaaatgtaatgtgattcttcagaaccatgtccttgggttatgcccttcttgatttatatagaaaatagttgagaatatatgtacttttatatgtggcttggtgcattacatcctccttcacatagctgcctgcaagtgtaaaaagcaaatcaaatttcactgttcagtatttgttgattattactttcataggtgtgttgcaaattttacattttaatagtttggttatcactttctcattaggtgctttcatttgtttacatgttctttatttttgccgctttaatctaaggtgacctcttggtttttgatgttcatgatttccactgtaaaatgtcagaggctgcttggcctctgctgcagatttcacagtggtatgctttaagactgttgttttgtcactgctgtgttgccacagtgcaagtttgttcaggttttttcttataactttgttttcttgactttcaaggtgatatgttcctgatgtgcttttgataatattctctcattttcagatttttcttaggctcagataatatattctttttctctaaattttcatgttttatttgcaagttaggggataataatttactgtgtacagtatacattttaaagtgttcatataatactagcaatagacatgtttagagtgctttacgcagatggccatggtacttcagataacaatgagaatatcacatttgagctcttggatttttaatcatttccaaaataatacttcttccttggaaataagcttaatgtttaacattgaaaaacttttcccactttcaaactcttgatttatctcaagtagtaatttaattttatctatagaaagtaatgtcttggttcacgtttctgtgataggtcagtcactggccttgtgggggaacttgctaaaaggtgatcctgacttgaccttttaaaagtatttatttaggagactgtggtactaattcttatgacactgaataagagaagagtagaataacagaacttgagtttccttaaagagcacttagtataatcccatggagtatggagggaattgctttgatgccttttacaattcctggatcccctctgctgtca

SEQ ID NO: 57671 - DNA, 1034 bp, Homo sapiens
cccaatctatgcatgtgtcagagagattgtggtcttcttataaaggcttttgagtggtttactcccttcttcctctttttgctcttttccacttttcatgagctagttattccagtttgtatcttctacttctgccctgctttaatattacaccttgtctttttgctgttgttatttaaatcactactttttagaaacatcttcatttgtattttaacagtttatatctagcctggtaaagttgtaaatatgataaatggttaaagtaaataatgttggcttctttgtaggttgcaaataatccattctatatggctaaatggcagaaaattctaaagatattttaaaaaactaaactcagccatgtaagcagcagtaacctttcttcttttattatgacttaaatagtatgaatatggctaatattttaggatctaacaagtaataactataatcagtaactataataaataacaaatgataaattagtagctataaataataaaatcaataactataagagggctataaaagtaaatttttttgccaaattgagagatttatgtttctgtaatattttatcaatgttctactttacagctaaatcttaaatagaaaaatatatgaaaaatattttaaaagttattggaatcctcatatttaactgttagtacctatttgttttaatgaggctctgatatgtgcattatcagcttgtttaaggtacgataattttttttttgctaacattaaatgatcatgggtgaaattcttaaatagtaatagattggaaaacaaaatgtataaattaggatgctttggagtacaaacataagattggtttaaataatagagaaactagagaaacttgatatagttcatacaagaagtcgtcaaacatcgatatagttcatacaagaagtcgtcaaacatccaggtgctttctgcttctcatttctgccactcacagtaatggtgtcattggagggcttagatttcttgcggttataagactgtcagtggaagttggaact

SEQ ID NO: 57672 - DNA, 1751 bp, Homo sapiens
cacttaaatatgtggtctgagatatcattagagacttttacagtgtttccagaactaaacactattttcctaggaactatctgatgttttaagaatgtacctctgtagtattacaaatgtcgccaccattcagggtacctgagaactgggcctgagagcagggcccagttaagtgttagtgattacgcacttttggggaaaaaaaaagtaggtaattccaaaatttctttcaggttttgtttcccttgatttttttttttttttaaataggctttggtattttaaaaatgcacagtgtagtatttaaaaaatacacagtgtagctgcagctgcagctgcacaaaacagcactctgtcctcattcccggtttcattcacatttaagtgtttaccccttcgaatttttgttggaaaactacgagggtaggtatttcagtgcatcgtctataaaacatattaaacttaatgtacgacttaagggtgtcttggaaatgccatgtatgattactgtttgctccgaattgttttatcagcacttcatcaggatttatgtaaatatatagcaagatgttttaagacgcatttctttacccttttgagactttttcaatttaattctcccccctccacccatttttgtagggaatatggatgaataacatttggttacataattgtaatcaaatatatgcatttgtataatataatggcagttcagaatttttaaattgatacaattcaatctcagagttataaaacttctaaactgctgaattctcctttggtaattaatagtttgattattcctaggtgttgtgtattttcacaaaattttttttattctgaagaaaacacttacagagtatatttcatgcttttcagtgggcagtgggaatgagaaggacagatgatcatgaagcattccttaatatttttgagcaggataacttcttttttaacctttgtcaaaataactgccctgccatactatttaggtaatgaggttatacaatgagtggttttgttgtaatagctatcaaagtgttaagcggaacaatatataaatgaataaaactgattttagtggtctataaaaattgagaaatacgtgttttctgttacataatggaaataggcctttttgtaaatcttattagtagtcttctgttggtagtgggtaagggctactttttcaatccagtctgcttttttatagaatagtgattcacaatttttttctctgaaggatcacatggtaaatatttctggctttgtgagccctgtgattgcatctgctgccattgtagccaaatacagtatctgaccaagtgggcataggtgtgttcaaataaagctttatttatacaaataggttggtagctttcccccactctagaaaataataccagaggtctaaatgtggtgctatgccattgatgtttgggttgattcggaattttccacaacagcgttttataattatttttgtgcttagactcttgtgacaatttgttgatcttccacagttccctcagaataatacccagctgtccattcccaaattttgtgtttcatttcagagtttgtcagcataagaacctcttttaggtttatccatgttttcaggtttcttcaccattctttgcttctggaggatcccactcctatcctgtgacattgaatgaatgcctgtctgtggctccctgcttctgactaaagcgacatagaatctaatgtcagtcatttgtctt

SEQ ID NO: 57673 - DNA, 1038 bp, Homo sapiens
tgtgtgtgctggacttttgaccccttagccctcggggaagcccaggtaggacctgggacaatcagaattcctggctagttgccaccagctacaagcagtctcttctctttatctgaccctgctgcacatatattatcattatctgtgtttaccatgatgtggaaaagactaggcagaaaactccagggttgtcattgcctactttatgaccttggttgagttgctcattttattcagactgtagttgtcgcaactcataaagttgccttgaggagtaaatgaaaatacctttgtaaatgtatggtagcaggcccagtgttagtttcatttcacttacttctctattcttaggaccttcaggggtgggaaacacatctcctgttgtcagtttgttctgatgacaggccctgtcacccactctgccttggcccagttttgtcttaatgggctgcttcccacttctgccatttccacttcctctgcttgaattctccttttcctttgccctgtgatttccatattcaaaatttaatggttcctacatttgagttagtttttatgactttctttggagtgtggggagagccagcaagccatagtttctcaggcagaaaaaggcacaagaggcttggggggttatattatggactacaaataatgtgagttgcaaaaagatctttaaatacagattcaaaaaattggcaaaattaaaaatgttcttcctagcatgcttaaaattgtttttttaaattgttgaaatatttcccctatatccttatatttacctaggtgaattactatacattttattatggttataatcataacaaagacatatgtccttatattatggttggaaaagttgaatagatgtgtttatgaaaaattgttatacttctaaaatgtaatgaattcctaatcttgtattgcctttatatctaactgctggaccatatagtaaagtgatatgataccggcacagtggctcatacttgtagtctcagcactttgggaggccaaggtgggaagattgcttga

SEQ ID NO: 57674 - DNA, 1024 bp, Homo sapiens
aggcttaagggagaatgtggctcatgcctttctcttagcttctggtattggcagcaatccttgtctttccttggcttgtggatatatcactccattctctgcctctgacatgcaggttcttcctatgtgttttcgcttgtgtctcttctcataaggacatcctcatgacctcacctttgctgcctatcactcttacacttaaaattcaacaagcaaaatctatgcttttctattcagattctttacttagaaaagattttcaaatttctgatgtttttggtcttaacagcagattttaagattgtgcggaggttgtgtctgagagataaaggcacccaaggcatcttatatgatatgcactcattaacatgatgatgataataacaggagagaaaatgccacttcaagcaaggtgaaagaaaatagtacatctaagtgttagttttagttccttctcaaccaaacggtcccttgttactggactgcttaggctgtgtactgttctcaccatttttggcatttttacaaaatttctctcaactgggtgtgaaagcttaccacttcccttgctcctgaggtgtttttttgcacaggggcaaaagctctttgccttgccacttagagattttgcctctagttaccattacctacctgtagttctctatcttgtttcacagctcgactgcaccagacttttctgtcttgcatgtctggccacgctggaaagtgttcaagaacattatgatgagtaacctgttcctttttccatgactgtcttatttccatctgggactttgataacaagtgacaggcacttgagtcccatctaacttccctccttgtcagtagatacaagcctttgcattcaagtgttgctctttattcaaaagcctgtttggcaattttaaaactgttttctatcagcgatttgttttcaccttttaaaaaaatttggagtttataaacagcacaagcccttgttgtttatgaccatttccccttctctttatttattataagaaga

SEQ ID NO: 57675 - DNA, 1005 bp, Homo sapiens
tctcaccactttaaatgtccattttccatatgtcactgttcaatctcagtgcattaaaataatctttatcctttaaggccctgctcaagtactatacaaaaaaatacaaataaacctctttcttctgcttctttaagccgttagtacttattgagtcttgttgtagttatcttagcttcctctctggagcataagcttctggaaggtgtgaatcatgtcctgtacagatctgtgttttctgtagggcctaggaccattcttgtcagaacttgccatttaaagaatggcagatgactgcttcccagagactacacttgacaggaggtctaggcaggtcctagcagtaagggaatgcccagaacaattgagctgttggtttcaggaaaggtctaggatgaatgccaggcacacgtctctgcaaggcccacagaacatggtatgaaggaggtcttattgtttgaaataggtaaaggtctaatctgtgaatggtcactgtcaggatattcagggatctagtctgagatgcttggttttgtatctgaattctgaattccaaggtctgaaagatctcagagtggggtgagataggaatcaggactaggaaaaacgagtgtgtcagacatgaacttggtgtgagtggggaggagtgtgtggagaccagacagagactagtttggcaattaagtctaagttagaggctcgagcaacagggaataaagtgagagataagtcctggagttaagatatgatattaaaacatgacaggcagttagattaaattgacttgaagctgatttgctaagctgttgactgagtatacttaaatttcctttccttagagcccagttcattcctagttctaggtaagtcgtttggctttctgtaaaggggtaggaacctttttattccttaaaggtatgactatctatttgccaattaattccatgttccaaggatcccctcatggagaaaatgttgcactgagttaaataaggaaataactgg

SEQ ID NO: 57676 - DNA, 1098 bp, Homo sapiens
ggtatggttataaaacttataatctgagaactgggaatgaagtgttgggggaaagggaagagtgatggcatgatcagttcctcagctaacctcgggttgtgtgccagaagaaggatttcagttttactttgataatgaacaaaaagtctggttaaaggaggcctttaaataacttggaatcaccattagtggaattaagataagaaaagatatgtttgttttctaaatggctagacaaaatcaagcaagcaaacatcgtccatgtggcaagagatgaaaaaaaatagcacagaaacataagaattaagaatataaaagacaagtgtcaacaaaacaatttgtatacagtatattaaatttccctttaaaaggactcagattaaagagagatcctcaactatgtgctgctttcaaaagatattcttagaacgaatcaacctagaaaggttaaaaataaaaaggtagccaagatttataaggaaaatacatcagaaaacacagaggagtagcaatataaattttaaagtagagtttaatgaagaaaatcactaaataagagaaagaacaactttataaatcgactcaagccctaataactaatagactaatgactatggaagaattaaagtaatatgagctgccttcccacttagacttatagtcctgtttttaacgttttttacttttaaatcgaaatgaataggaatctttcagttcatgctcttgagttactatattaatatcaaagcctgcaaaaatttggcccaaaggatgatatgttggtcgaatattgaccagactgtgttcaacagattaccagacttttccaagataatagaaattctgtaggagaattttgtggctagacaagtttggaaaaatctgcatcgggtactcttttggggtttacagtgcactttagtgtaattggatccctgagaagtcttatagctaagaaaccaacttgactttattttgcccagtattttgcagattcatttgttcatggaccctctccctgccattttttgttgttgttgttgttgttgttgttgtcatggaatacagattaacaactcctggaattctagtgtttta

SEQ ID NO: 57677 - DNA, 1182 bp, Homo sapiens
taagatgaatttaaatttggtctaacagttaagtgacagagaattcatacagattcttgaacagtaaggtggtataatactctaaaaaaaggattatttttggtgtacagcaagatgcatgaggatggctccaacagaatagaagtgttcatgtaggaaaatcaagggactttaggacctgaggctgggacagactctccaggatgtggttggattttgggctaaacagtctttctgtggtcttgaggactgcctttatagtctgtgaaaccctatccttcaattgtggctttacagagtttaagaaaattttgttcgtatgcagatttctgcagtcttcctgttgccaggaagaacctacagttacacaggagtgtgtgtgtgtgtgtatgtatgtgtgtgtgtgtgtatgtgtgcagacacgtgtgtgtaaacacacaaagtagactgaacttaaacctgatttataggagtcaggaaacctgagtttctttgctttctccttgtgtaattttggttaagttgtgtaacttctttctttggagtttcttgtctgtaatctggaaattatttcccactcactccactgtgatgttttgagaagatatctgtggaaactttttgaaaagtacaaaatgataagtgtaaaatgtcaataaagcatattgatgcttattttgctagaagagtacatataaacataaaatttagaaaccttaaaaatcacggccagagagaatcatgatttctacacctccctttttttttttggtgggggggtgcttccagttaaaagtaagcattcagtttgtactaatatttaaaagcctttgcatcatagagaaaattaatcaataacgaagtatcataatttagaatcattattgttactaacattttattccttattctaaagtaatttattcaggatgtgtgctgagacctgttgttttaactgtatagctagatgaaaatatgagagaagaggtttggatgaggtttctttcctttgtaacagtttgcttgaggaatgggcaggcttttcctcacttgacagatggtataggaagggcattgagaagcttgcatttgcttggtggtgatagagacagggctagaattcataatttttgttgttgttatttaacacattttccccctttgggtacaacattttcttgc

SEQ ID NO: 57678 - DNA, 1072 bp, Homo sapiens
taatttgtctctttcatttagatcatatattaaatattaagtaggtcgacctattttggcttctgtgtctaaatggacaagggtgttttaatctcttaggccttgaactggagagagggagaatggatgtgaataaaagtgtgtgtatgtgtgtgcgcatgtgagagagagagatagagctttcctgttacagcccaaaaccatgattatggttcacaacctggggttggttttctggtttgtattcttgctgccaggcctgtggccattgatttctacatgtatgaaaagtaattaatctggaaaaaaatgcagggattttggaattattttttggaaacattacttatgtattctggattttagaaactgttactttcaaactctttgttctttgttttattacgtgctaaccatctacttataatttttacatactttaatggctcagtaaaatatagtacaactgattacagttatttgttgtactctgagaaggcttattatgggaaaaaaaactgtgttggatataatgggagattcagaggaatctactacagactttgttgttatggacttcataatcccgattgatagtagtcattaacaatataagaaaggcccttagtgccactagagtataccatagtataggccttctacaggaaggggatgtctcctttggtttgaatgagaactcatggaagcatagggatttgtgcttggctttgagaggaggccattgtggtaggtgaaattataataggatttctgaaactcaaaaatgggccagtttggcagaaataagtggggcatgaggttctgattcattctctttatagctgccaaaatggtggtatttgtgaaatgaaaaatcaaccctataactcccatctggaaaacccgtctttagaggttacattggtagcctgaaacttcagatttttcttgatttttcatgtggcgatgtctctggaagatgtttcggaatactactacttccactaggccatgagctctttaatggaaccattctgagtacctgcctggttcaaaggaggagtttagtaaa

SEQ ID NO: 57679 - DNA, 1028 bp, Homo sapiens
aactgtgtggcaatcacaaagagcactgtagtttggatttagcaccaagctaaagtttcatatcttaggacagtttattacaatcaattcatctcagggcatctagtctgctgactctttttggctttacctaaaaagtcagaggtacttcagccacgtctatttccaaaccagaaataactcagacgtagcctcagcagcactagagatccacattagttacactggcttaggatttaaatgttcacaggcatcaatcatcatattaatgtttcagtgccgttgtaggtgtcgtcaggaatattaaaaaaaaaaaatgtgacccagcctttcttcacaaggaggattggagagggctggtttggcgctttcctcactttagcaatcccctgtcaatcattgagtaacttgcccaaaatcctgtgtggaaactcattactgttaaaggtgttatttttggatggaagcaaatgattgtagcacctctaatgctgtatgcacagcctctcaggcaggtggtgttccacgtccgtgttctcccttccagttcactggtgagtgttaccagaaatcacagtggctacgctggtgctgcttttctcagaatctctctgtattagtctgttctgaaaaagaagtctaatggaatcatagtttcacgtggctagggaggcctcacaattcatggtggaaagtgaaagacatgttttacatggcagcagatgagagaatgagagccaagcgaaaagggaaaccctttataagaccatcagattttgtgagacttattcactaccatgagagcaacatgggggaatctgcccccatgattcagttatttcccactgggtccctcgcacaccacatgggaattatgggagctataattcaggatgagatttgggtggggacacagccaaaccaaataactctcccttatcccaaatgactctagggtcagggatgggaaggctggagaaaaaaatggaaacaataatacattgggaaaacacctttctaccacttct

SEQ ID NO: 57680 - DNA, 1089 bp, Homo sapiens
gaaatacagaaatgtaggtcctacttcagacttacctaatcataatcaggggtggaggtgttgagtggcccaagcagttatatttaaaacaaaaaaagctccatgggtgattctgatagccaagcaggggtgtgaactacttgttcatagtatgcactcaggattacttggcccaaaataattaggtttatataactgtatttgctctgggagaaacagatttaatgtgtaattaataaatgaaaagtatttactcatgacatacactgcactcacattttttttttttgctttctcatacacatcctaaggtacagtctcagatttgagttaatccttttgcctatttaataatggtacgtggagtctatttcttattaggttcacaaaactacagagtaagagcgaataaaaagataagtaaaaaggcagcttactgtagctttttttccctttaaagtcagtttaaaaaaatttttttaatgttaggaatatgaaacaagtttttagaaagaggaaagtaccacttctcttccattgtgttacagtgggtttgggggaaagaggagggaaagaagaaagcaaaattttaaggatttagtaaggatgatatattatttattgtcttaatttcatcagtatgggatttggggtttgcttaaacaaacaaaagtagtaccttgtgtaatatttttgaagacatcatgtttttgtgtttttgagttctattaatatggcctactggtttttgcagtttaagttaaaaaaaaactgtaactttagtttcagaattaaatgtcagaattaagtcataaggcagaatcaaaatattaggtaacagactttgaattaagtacattcattagggagtgagttacagtaataaccacaacactgatttcaataaaaatcagtgaatatgggaagtgattggctgatatgtgctcatttcgtttttgggtcagtggtcccttgattaaagattctgttttatgtgctagaagcctttgtatttagaactgttaacgtatcaatatgtagtaaggaagaagataaaattgaaccagcaggtgtcagcaagaaccaaaa

SEQ ID NO: 57681 - DNA, 1693 bp, Homo sapiens
ttcttctttatcacttgatgaattgacgaaaatacaaattcagtaggcaaatatgatatccagtatttttgataatcttattagagtagtaagcaataaaataatgagtgacaggaacatcgccgagaccacaaagaaggtatgtgataactcaggccagtctgaaatactttcattctctatgttttatttcttgttatgccaaataaagacctgctattttacatttatccttaacttattaaatgtaatactacccagaaatttgattcctaggtatttaccagagcgtagagtgtattgaaaacttatgtatggactggtacgcaaatatttataatggctttattcataattgtcctgaactggaaacaatgcagacccccctcagttggagaatgaatattgagatacgtccattcaatggagtagtactcagccataaaaatgaacaaactgtgtaaccttgatgaatctgaaatgcaccatgctaagtgaaagaagtcatattcaaaaggcttcatttatatgatatcctagaaaagataaaactatagggacagaatacagattagtatttgtcaaggattggaggagggtttgacactgaaaggacacaggggacttgtatgggctgatggaactgttctatattttgattctagtggttgatttcattactgagtttgtcaaacttctagaaattgtacattaaaatggcaatttaattgtatataagttataccttaatttaaaaagttctaaaaataaatgttaaaaagggacatagactgaaaaataaaaatgaaataaagataatgttaatatagtttttcttttcccagacatcctaatagaacccttagaacacttcaacttcatttatctctctatttatgtgttggttgtcatgtatttcaattttagatacatttctaacatggcaatcacttttatctgtggtttcatgtagatgtttaattaaatttgccctgttgccatgctcttcatttaacatttcttcctatatctttagccttctatctgaggtcattttgattctgcctattctctttgctattttgtgttcatgtagtcttacttgcttgagtgcctggctgtttttcatgatgtattggatatagtatgtgcaaaattgtttgtacaaataatctggagcgtaagatgttatcttccttcagataatttttactttttgtctaggtagctgggggcagtagctatcagaaatcactttaattttagggtttgaataaatgtatgaagtataatgtgttttgtttgtttattttgggacagggtcttgccctgtcacccaatctgaaatgcagtggtacgactggtgctgcaaccttgacctcccaagctcatgcagtactcccacctcagcctcctgaggagctgggaccacaggcacctgccaccacgcccagtttattatttttattttttgtagagaccgtgtctccctatgtcgcccaggttggtaatgcatttattaattagcttgattgagctattgtacaatgtgtgcatatttcagaatatgtttgtatgataaatatattcagcttttgtcaattaagataattttagtatttgagataatttgatgccgtgagaaggcttgtttatgatgtttaaggcttttgaagtccttagccaaatcatg

SEQ ID NO: 57682 - DNA, 1015 bp, Homo sapiens
ctctcagtagcattattttagaagactgggaaaggacagcctctgctcagctttgacaaccttttttttgttttgttccacaccactggcctgaataatggggatgatatggcaacatctggttagcccagtgacttctttcacttttgtaatagaagtctgggcataaacagaaaactaaggatgtcaagtttctgagtgtcaaataccaattccctgttataatgataagtgatgtatattgttggcatatccattctttttcttgtttcaaaatgaatactctcaccccataatgtataatatgtggtctcatttttggtacagtgtaagttccttttgttttgttttagaatgtgagatttatgtttctttattaatgtattttgaaattttttctatcagctccactccttcccaccctcccttcttttccccctttcttcctttcttgattctttccactaacatctagaaggtactgaaaggatattttgactagattcttgttctgtatattttcattgcctttggactcttgtttttggaacagtggatttagctttttaaaaataaaaataaaaattcaaactgtataaagatggtggttgggaaatagtaaaatttttactctttactgtaagactaattttaaacaatggaagtttacaattaacattttgtgagtattttgatttatggttattgggtgaagatggctatggtagagtcacatttttttccaaaaagttaattataaaccaattataatcagagtacaattttaagaatttttgcgagttattagaaggaggattaattttcattgtgatatgatcagaggcctaggttatttttttttaatttgaagatagtgtaatattttggctacttatgaaagagaaaagacatgtcactcagatctgtgggtagaaaaaacagatattccttattcttacagtgtggaaagtatgaaaatcttatcttggagtcttgcaacttaaccagtaaggta

SEQ ID NO: 57683 - DNA, 1031 bp, Homo sapiens
agaagagaacctccacagactcctaccgtagttatcctcctcccagaatctgtattcacttcatctgccttttctgttgttaccagatgaactatccacactgctctcaaaggccaaccctcccatgtgcaccccctctactgggtccgtgctactatgctattacttctcccatctaaacaacaaaatgaaacaaaagaaaaccccttaaacagtctaagttactcttccttcgagttgttaacctatttctccgctcccttttatagcaaagttcccagaaaggtttttctgtaattcagtctcccatttctcctttctctctaaaatctactctaattaagctctctaccacactgtgccacctaagctgctcctgtcaagttacagttacctctcctgctccatccagtccagttttcaggcctcattttacttagcagctgcatttgatagagttgattatgctgtcttctttgaaacctattcttcacttggcttccaggaatcttattgttctcttgtcttaatggtccctctattgatttcttctcaccttctgagaaggtgacacttaacagtggagtgccccaaggctcagttccttagacctcttttctatctatatcccttacttagtgttctcttccagtctcatgattctatgctggtgactctttgtatctcaacctggacctctgccccgaattccaaactcatgtatccatttgcctacttggcatcaaattttcatgtttcaaccctaatgctgcccaaactgaattctaaatatttccctccagactgacagcccaccatcttctccttctcagtggcaagtctatccttccagttgctgaggttaaaactcttagagccattcctaacttcctcctatttctctggtctcatacttaatgttagcagataccagaggccgaatctttaaaatatatttagaatttgagcacttcttttcttctccactgctgctactctgaagttacttaatctttcacctattttattgc

SEQ ID NO: 57684 - DNA, 1050 bp, Homo sapiens
atttcctgctgctttatgctctcgtttcatagagagttgctgtgatattcagtgtatttttttacgggagtggggttgggtagttaagaaattctaaaattgttttctgaacatgcttattagttctgtaagcagttctttataaaatagattatatcaggaaaaaaaatcataggaacttcttttgtgaaggaatagaacaatgccttaaagctttacaaaggacagcagtgaatgcttgaattgtaatgaacatgattcatttctttttagtgagtaatattgtaaatcattgtgcatcataacaatatatttcattctctcaagtcttcagcttaattggggtacaagaggaaatatagcttctggtctgtattccagaaatgaacctctggatagcattgcatcaaagatttttacaagtaaataattaattggttcagagcaggctgacaaatataattaagcaatttatagttgaaatattcagtatttctctaattagtgacaaaggaatacctgaggctgtggtcagatgaaatacttcccagatgagttttaggataaaaggaaatctagaatttttcatcataatttcttcattatcagcaatcagaattttaaaggaaaatcgactcttacaaaacagatttcagttaaattgtgctgtgtatgccatatattttctttattgtagttaaattggacacatacatgctccattttgtagtatgtcttattatactgtttatttcactattctaatgtcaagaaacatatttggtgatgaagacccagtgtagaggaaattaatctcaaaaaatatataaataagaggattttaaaatttcaacttgtcaatagaaatgttactaaaatatattttaaattttcatagttcatttcacaaaatatacttcattcattgaattaatttgtaagtgcctgtatttataactacctatttgaattaatataggtcaatttgagacaaatagaagaaactgtaaatgcatgtatttaatattatatatttttaaaaattgtttt

SEQ ID NO: 57685 - DNA, 1045 bp, Homo sapiens
taagtaattgatccgctgatactgaagtgtgaaaaattttaatacaattcatttatgcaattaagatttttaaagccatctaagtaaataaatatgtgccttatagtgttgtcgtggttttatattttatgcaaatctaccagtaagttaatttttattaagatattttatttaaaattgatatcaaaaggacacgtgtattttgtgctttgaatttcacaggttttttgaaaatggaaaacaaaatgcatttgaaatagaaattaataatcatgttcatcatgctacattgatgattagctgtctagcagagaatcgagaactcctaggtattaggatatatcagaattattcaaaataaactaattggttcataaatcaaactttcatgattaaaataaattttaaattctgtcacgaaaagtagttgttaattcctttaaaatttctaaaatgtctatcatcttttacctgatcccttcatttattcacagatataaaaccagctaatgtgttcattacagccactggggtggtaaaacttggagatcttgggcttggccggtttttcagctcaaaaaccacagctgcacattctttaggtaagagacacaatataatttcattcagttactttgtgtatgtgtgattaaaagataagaggtataccaattacatgccagctcttacattcttaataaaactattttaaaaatcaccaggtcctgaacagatgcctgcaactctctattaggtataaggtttcctctaatatgacagttggatacttctgttaacttgacctcaggcagacactgagttaaaaaaaaaaatgctgataagtctggtttaactattgccatagaaaagtccttttattgtacatttaataatagataatatggtgattaagctgtctcttggaagaagacttcacctgaccatttaaaaatacaatagtagtttgtaaatttttatttattaaaataaagtatatggctgtgagtgttattgtttagaattaatagaaattactaaaggagat

SEQ ID NO: 57686 - DNA, 1138 bp, Homo sapiens
tagtgatatgacagaaaatggccagttggggaactaatttggagagagtgaggtggggcaagtcccttctgagaaggtgatatttaaactgagatgtaaaggatataaaagaggcagctatgaaataatgtcccaggtagactgaagagcatttcatacaaaaggtggatacaggataagctctgtctgctggaactgagtgaagaaaagacagggctggatgtaggagcaattcacattttattctaagtgcagtggcaagctttcccaaggttaaatataatgagagcgatgtgatatgggttgaagacagcagccacgagcctccttcgttcttctttgggctaagcatgcccagggtagtctcctatcttcagggtcttctgtgtcctgcgagtctgcatcttttcctctcagagtacccttagtatgtgctacccagaactgagcagagtacaccacattggaactcattagcccatagagcagaatgtttacactgcctgtggtctgtgatctaaacggttgtttggttttttttggtctccttatcctcctcccaccttcacttttgtttttacacgaagttatgttagggaagattttcaattgttgtttttgtattaatttgtatggaggtgtggctagggagactaattgtaggatattttgacataagtgtaggacacttatgaattttgccttattatttgtcaatcttataaaaatatatgttaagaaacttatctatatctacatctttaaaatttatgatgagggcacaactttcttaagctttctaatagtataggtcagtggctttcaaatttcttgacaatgatggaactgcattacattctgatattgtctgttctatgttatttcactagaaatcacactggttacagcccactaaattgatttcacaactcgttaatgggttgtatgacccacaatttggaaaacagtggtctaggtctgcagcgccttcatgctgtttcatttacttaaaggctaattcccattttctacctacttttggacattctccagacttgttatctggcctgttgaattggtcaatcataaattactcatttacacagcttcttgtgcttctggaggggtataataacat

SEQ ID NO: 57687 - DNA, 1051 bp, Homo sapiens
caaaaaaaagctagagaggttctgtggaagaggttccaaaattagaggaagtttacatttactgaaaataaatatttcttttttgaagagatattttgactttagattttcacatttttattataggtctttataggtactttattgcattgtaatttacatttacttttcaagggagaaaatgccacacttggcttaataaaaatttataaacaaatcattttctttcattgttagcttactgcatgtttgtgtgtgagtttacttgtatgtgcttgttgtacatcctaaaaatgagacagatttttgctttaaaaaaaaaaaagctaactaaaactctctgatattgatccttgtgctaaacaaatatttgaaacctcttgggaggaaattatgttcttgtttttgtttttgttataggattgcttgaactgctgtttacctttctcagtgagacaaatggttctttgattttgtaatattgccagcagagtaaatgcatggccatcattcaagctcgatatcagaattttcacactagagtctcttgagtgtacaattcgtgttgcccacactatttccaagtgtgatatatcctctgatttcaacttagaaaattagtgttcttgaaccaggcattaaaacagtttcatttttggtgccaggtgccacctgtggtcacatacttgtttttcccacacctttcctagcacctctagatagatctttggcttattccccttcgttgttcagggtggttgagagctgtaaaggcagcatatgttcagtcagtactataggctgctttcactgatttatttttaactttcaatcccttcttaagtaattgctctggtaaggagctattatctaattttaaacggtgtacctttaacctcccagccgccataacaggtatttatttaaatcagcgtagctgcagagtagcataattttcacatgtggcccattgaacctggacccttattcctggtttttcttatgtacatgctgtgacttttagaagatttctctgcttcttaatttggaa

SEQ ID NO: 57688 - DNA, 1033 bp, Homo sapiens
gtaaatttaacattctcatcacagtatcagttggccaccttgctgaaagttgccatgtaagattagatctttaagctttgaatgttctatttttgtttaaaaaatatagttaagcagtccctttgttcacctatgcttctgaagcaacactggggacttgctccttgatgacatgaatccaaaacggtgtcctatatttcacatgtcctgtgggatcctacaaaatcatgtaactttctgtaagactttcacagttttcaaaagacactgaatgatcttcagctgtgaaatatagacattacattaccttatatctgtgtaagattactttcttttccctttccctttacccccaattcaatcactagtgacactttggtgtacaagttggatacgcctaatcattttgtatgaatatctaaagctccaaaatataatgtactttaatgtattagacccactttggggtgctaaaatgtgtccttgggtagatggaaattgggtatatcctggaggctgacataacataattggtctcagagggattaagatgggggtgaaaaagaaacagtaccaatagcactagtctttattattctgttgagaattgtgttagtgacctaaagctgtaatgcacaaagagccctattgttattacctgtacgtgactgaacttgatctgtaattgggttatcaccctgacaacaatgactgttaacattgtcttctttttaatatttctggtatcaacctatttgctttgatatctctttagaaatatacagatcgaaatgtattagtattttctctactttattgagaacattcattaatttccttatggttaatgacctcgtaatcccttaggaatgttgtagagaatccattttatttttactttatatactttgtttcatttaagtgtttctgtgttgctttttaaatttttgtgaagcatctgaattaaacagttttctctgattttgcaaaggcttttgtatattcagacctttacttttgccttatttttaac

SEQ ID NO: 57689 - DNA, 1729 bp, Homo sapiens
aatatttcagagctagtgtgctttgaatccttaaccagttttcatataagcttcattttgtaccagtcacctaaatcacctccttgcaacccccaaatgactttggaataactgaattgcatgttaggagagaaaatgaaacatgatggttttgaatggctaaaggtttatagaatttcttacagttttctgctgataaattgtgtttagatagactgtcagtgccaaatattgaaggtgcagcttggcacacatcagaatagactcatacctgagaaaaagtatctgaacatgtgacttgtttcttttttagtaatttatggacattgagatgaacacaattgtgaacttttgtgaagattttatttttaaacgtttgaagtactagttttagttcttagcagagtagttttcaaatatgattcttatgataaatgtagacacaaactatttgagaaacatttagaactcttagcttatacattcaaaatgtaactattaaatgtgaagatttggggacaaaatgtgagtcagacactgaagagttttttgttttgttttaatatttttgatattctctttgcattgaaatggtataaatgaatccatttaaaaagtggttaaggatttgtttagctggtgtgataataatttttaaagttgcacattgcccaaggctttttttgtgtgtttttattgttgtttgtacatttgaaaaatattctttgaataaccttgcagtactatatttcaatttctttataaatttaagtgcattttaactcataattgtacactataatataagcctaagtttttattcataagttttattgaagttctgatcggtccccttcagaaatttttttatattattcttcaagttactttcttatttatattgtatgtgcattttatccattaatgtttcatactttctgagagtataatacccttttaaaagatatttggtataccaatacttttcctggattgaaaactttttttaaactttttaaaatttgggccactctgtatgcatatgtttggtcttgttaaagaggaagaaaggatgtgtgttatactgtacctgtgaatgttgatacagttacaatttatttgacaaggttgtaattctagaatatgcttaataaaatgaaaactggccatgactacagccagaactgttatgagattaacatttctattgagaagcttttgagtaaagtactgtatttgttcatgaagatgactgagatggtaacacttcgtgtagcttaaggaaatgggcagaatttcgtaaatgctgttgtgcagatgtgttttccctgaatgctttcgtattagtggcgaccagtttctcacagaattgtgaagcctgaaggccaagaggaagtcactgttaaaggactctgtgccatcttacaaccttggatgaattatcctgccaacgtgaaaacctcatgttcaaagaacacttccctttagccgatgtaactgctggttttgtttttcatatgtgtttttcttacactcatttgaatgctttcaagcatttgtaaacttaaaaaatgtataaagggcaaaaagtctgaacccttgttttctgaaatctaatcagttatgtatggtttctgaagggtaattttattttggaataggtaaaggaaacctgttttgtttgtttttcctgagggctagatgcattttttttctcacactcttaatg

SEQ ID NO: 57690 - DNA, 1040 bp, Homo sapiens
tgggaagaatttaatgatcagggaaattcattatttctatatgtggaaactttttgcttcgaatattgtatctttttaaatctaaatgttcatatttttcctgaagaaaccactgtgtaaaaatcaaattttaattttgaatggaataatttcaaagaactatgaagatgatttgaagctctaatttatatagtcacctataaaatgttctttatatgtgttcataagtaaattttatattgattaagttaaacttttgaattgatttgaggagcagtaaaatgaaagctatatctattctaaaccttatttagacattggtaccagttacccaggtgaaaatatggagtaactttgttttgtatggtaaggtttaggaatggtggatgaagggtatctctatataaataaagtgctcaacaatgtgcaatgattgtaaatttagtaagatattacagccatttcatgaatgctttaccattcaacatagtatctattacaaaacacctttcttgtatccatatacttcaggtgttgctgttaacatttactatgatatttattttaaccaaaatgttactcacattaaatgtttattctttaaaatgaatgtattatgtttttaacccacaaatgcatacttaccctgtgcctcatatttcaatagtactgtaatatggacatcttttgtgaaatacttttattttgttatgctttaaatatacatacaaaaagatttctgttattagctttgaaaattgtataatatcctaatataaacaaaaatataaaaataaaaatgaatacagtaaaatgtctgggtatctatgattttttcccctaaagtcttccattttttattttacttaatacttaatgtacagaaacagttcttacgcattttcataactttgccattttggagaagcttaagaattggaatagacaagggtgataacagagattacacaaatcctaaaaagtagttttatcaacatgcattaaactaaggacatcttcaggacatcattttctgtttt

SEQ ID NO: 57691 - DNA, 1609 bp, Homo sapiens
agtggcaaattcaaaatggcatccttctgtcaaaagttcgagcttggccgggcaaggtggctcactcctgtaatcccagcactttgggaggctggggcgggtggatcacgggggcgggtggatcacgaggtcaggaaatcaagaccatgctggccaacatggtaaaaccccgtctctactaaaaatacaaaaatacaaaaaaaaaaaaaaaaaaaatagctgggcgtggtggcacggctttagtcccagctactcgggaggctgaagcaggagaattgcttgaacccgggaggcagaggttgcagtgaggcgagatcaggccactgcactccagcctggcgacaaggcgagactccgtctcaaaaaaaaaaaaaaaaaagtacgagctcgtgctcgtggccccagtggccagaaagcgttaccaggctgagtgggacgactatgtgcccaaactgcaggagcagctgtctgggaagtagggggcagctcagggacctgaactgtcccagaggccccaagccgtgttctccagttcagtgttgcatgtataatagatttctcctcttccggctcccctttgcacatgcaagacctgagcagtcagatggtttagggtaacttttcctgctgcctggcctttataattctagtcactcactcactcactctggtttatgttttgatcaaattggaactctattttcaggaatattctggtactgtgatggggtcatcaaattaatatgaaaatagcaatccagagtttaaagaagaaaaaactgggggggaaaaaaagaccaggcccacagtaatagagcaaagcatcaaagaatctttaagggaggttacaaaaaaaaaaagaaaaagaaaaaggatttgtcacctctctgcctttgtgatcctaataccagaattgtacgcagcgtgtttttatggtgctgtcgctcacctagacaaccagaggctggctggcatggaggctaaaccccaacacggtgcatctcagatgccttaataggcgtcagtatctcgctctggtgcctttaaaaagcaatcctggaaaaagcattagggagagtggctttgcttttgttggggcatggccatctagaccggcagcagtgctcattgacagcttattaagaatccttacaactgtggttgttaaattgatagctcttcatgggggtaagaaaagctgatctggagttgctgaatgttgggttaattctgctgtttgcttataattgaataaaaatagaaacgttgagtgaacaacatcaaaaagttctataaatggtagtcattattgttaccaccatctggattatcaccttcagtcattttgactttttaatttgatttgtccttcttaaaggcactggtgaaatcagcatcccttgtatcctacacagtagttagtttatagaagaacaataaacatttttggatttactcttgctatagtttgtgcctatggttccacagtaaaaatactttgagcaatataattttgaaactcactgtaagatatgtgtaatttctcatttcataagatggtattgcatttcctcttggcactttcatgtgctttcgaattttcatatgt

SEQ ID NO: 57692 - DNA, 1100 bp, Homo sapiens
agagatgaaatcctcctgtattgttcaggctggtcttggtatcctgaactcaagtgatcctcccagtttggcctccaaaagtgttggcattacaggcatgagccacctcacctcaccaggtcacttactttaaaattttctactaggtgatgtgaaggcccccaaatttaaatataccaatatttctcttttattatatttttaaaatttgaggttttaataagctatctagatccatgaatattaaaatagatttttcttttgtagacccagcattgttcactgaggatagatgtgggatcagttcctttcaggtattaattgtaatgttgctaaacatattaccatgaatctgtagtatcaaaattcagatattaaacttgggaggatttatagtccaacttgtagtaactaaataataaaatggtggcatgattatagttcaatttttttctttatgaagagcttagggtaacaatgctttgttcctgtatgttgcacttttaaattacagtaaagtgtttccctgaaaacaaataatatggcatgcaataaaggggaaaagtggatatgagaacttatccttgccagtatatttgaaatgtgactaaacatttttacagtgaatatgttcatattgaaaagaaattacaatttcctttaaccaagtactgggtcactatttcttccaacttagttattgaagaaacactcagctaccatagatttgctaggccgaagtttctcaaactttagctgtgtcagcattacttggggggttaattggaatgcatattgctgggcttgatgatcagagtttctgagaacttgtgttcctaacaagttctccggcgatgcagtagtatagagaggcattgttctggagacatgcttaattttaggtacaacttattttgacttgagaactttctctttattaaaatagcaaaggcggtgtagatgaaaataaataaattgtattcatttgggttttctcatttgcaacagaccacatcagcattaccactggaaagaatgacttaggagagtggttgttttaatgagagattctttacatgccattgaaagacaggaaacct

SEQ ID NO: 57693 - DNA, 1035 bp, Homo sapiens
gaacttgtcccctgtcaaagagaaaaccttcagctcaatataaccaaggcaatttttgaatcaccctcattcaactaaatacttgattagaaattaactttatgcttttacattgtagagaacttaggtgaactttctccccattttctgcctttttttggcaggtgtgatctccaaatccttccctttattgattgcagtatcaatgagtatttatcaagaaggctcctaagagagatggaaatggaaatatgaaaactctaattccttttctttttaattgtgtatttattgatttttttcatatactttctaaagccaagaattagctgtatgaatgacctttgcatgttaactaaagcctaattggtaagctgatgtatcactgagaggaaatttctattggagaaaaagacattttcctagcacataagtcaccccaggttgcatggctgttaataatggctaacacatataactcttcctatgggctagatactgtgctgtgtgcttttacccatatcaactctggtaattctcttaataaccctgtgaggtgagcattattattttagctttacagaagcagaaaagtgacttggcaaaaattgcatggctagaaagcgatggagtcagattcaaactcagagtccagcttctaacttctatgctggactgctgctagatggaaccttatctagcagtgatgaagtgtgctagatgggactgcattgtcaatgcaggaaaaatgctcctatagtcaataaaacattttgtgagatctgcttgtagctgagctgagtttttcaaaagaaaaaactacaaaataaatgttaatatttgcaataacatttactggttcctcttcagattagcattatataaatatataacttgtttccttagcaactttgagataaaatgtaggctatccatgtacaatataattgcttgattcagatgatgttgacatggagagtaaataaaggcaaactggcaaggttcatgtagtaattttaatttattaaatggttc

SEQ ID NO: 57694 - DNA, 1067 bp, Homo sapiens
ccctcaccagacactgaatccaccaatgccttcatcttggacttttcacactccagaactgtgagcaataaattctgttgtttgtacattaccagtctaagatatttttgttatagcaggctgaaaggacaaagacagatctttgcctgtcccattcttatcattaatctttaaatgaaaataattcttcctgatccaactctttttagatttgtggggaacgttctggggcagtgtcctaagctagtagtactctccgtggttcttaagaaagtttcttatggcacaagtgtatgtggttgagtgagttcttaaactgatttccccaccattgaaggagatctacacttacatggaggctctctataaagagtacctcacctcataccctatctagtggcaggtgcccttcagcaaagaaaagcatctatgtgttccttgttcagctccacactctcagcttcttcgcattgccaaattgatcctaagaggttctctataccagtccccccaaattctcattcaaagacagggcttattggattaacccttcagcttagatcacctactttgagcactaggttctataggctttctttgacatctgcagccacagatatcttctcttggtgtcttcccacatacatgatagatccttgctgactttcctcatgtattgtggtttggggatatggcagctcatagttttaccaatgatggaatttacatttcagtttctcatttttggtattgttttaagatgattgctgagagaagggagcataaatgtctttttcctgctatcttaaagatacaagttgatagtttattggaagagaagtcttcctcttgcctctctgcttctcacaaatattttgtctctgctgtaggccagcactgtccagtatagcatgtatgatgatgaaggtgttctatatctgtgctgatcgatacaagtagccaatagccacaagtgactattgaacacttggaatgtggctggtgtggctgaggaccacattttaaaatttatccaagttaatttacttaaaattaaatttaactag

SEQ ID NO: 57695 - DNA, 1066 bp, Homo sapiens
ccccggtctcaccacagactcccaggcctcccgggttctagtctctggtctccgccaccagttacaattcccgcagcggtaagtacggggtgggttcctaagtgtgcttacactaagaggtacagtggcagttgctaagatgtccccggcggaggatgagatgcgtctgtccacccgcggtaggtgtatttatgggtcagtgcagaccaccgctggcgccggcgtttagaccacacagacccggttccacctacttacatctcaactgctttcccttcccgcagccacttggctgtcttcatattgtggcctcgggaacccagaaccattctcaaataacccatcttagacaccgcaaactcgggttcctcctcccacagcttcctttcggagagggctttctgggggacgcccagacccgtccaaggtcactgagctagcgggtccccggcttcaacaggggtcccttgcccagcagaattgaagggtcaaaggaccagagtgagtgctcagagggaggagggagttctgagggagaagaaagggtgcacttggagggcagtaatgagcttgacgctggaagcctggtgccgccgcccctgcctctgcctcttggatggagacccagctgcttccttaaatcccttgcagagctacctgaggaaggtttgtgtgccctcgggtctctggcaagaatcaattccagtggaagattccttgccttgtccactgctggcggggatcttgacatccttccaggggatctgaaatagggctgcccccagggagcgtttcccatcgtcgagttaaaggcctggagcgccgagggcttaggcttctgagctaggagttcccttggttcttaggaaaggtcgttttctctcgctcgagactttctgctctttcagtccccctccatttcgctgctacgcttaggttttggcctggactagactttcaaagcaaaggaaagggcttccctccgtgatacaagctcctgcgttaattttttaaagcatggatttttaaaacccagtccccagccaccgttccctcccgcacccct

SEQ ID NO: 57696 - DNA, 1030 bp, Homo sapiens
tggtcccatcagacaacagaatgaaaaagtacagcctggactgatccttgtattccgtgtggaaacacaggtcactaaaactggaaagtctgtcgcttagatgatcttgggctccagtcgagggtcttttaaaagtgaacgaagggactagggagcagactggggaaagaggagtcgctgccccttcctctaattctatgagtgagctcttggcttgtggcccgcctctcattgagctgaccctcggccccttcagggcgccggggcccacgtgtcgcctcttcagggtctcagtgccctggggagttgaagctggaggacccttgaccgcagaccaactctgcatgtaagaacggtcagctaaattttctcctttcaatggtttaagtgggtgtttaactcccttcatctcctcatccgacacactagcaagggcacacgcccacccgcgcccccatcccttcttcttgcttcccctcagatcgaggaaattgccgctctggctgcttctccttcgccgccacgctcagacagaggtcgcttctgactagctgtaagacccggctgcatttacatccccccgccccgggccagggtggggtgggagggggtgaggcggggtgaagaggttggggcaggccgggggactggagcctgagcctcatccttattggctggcggctagtgtccgacctgagtccggaacccgcgtccgcattcactgtcttcacccctcaatccagccttcccccaacccctggccctacttacctccttctccccctcgtcttcccccctgtccttcccagcaccgtcaccctcggggctgggaagggccgttctcggtcccgcgcggggagtggaccaggcaggagagggaggttggaacttcacaactccacacttgcgatagtgagcaagagagaggcagagagagatagggggaaggggcggagaggaggggagagagaagggaggcgagagaaagaggagagagacccctgccgatcctgagccagagggcggtgga

SEQ ID NO: 57697 - DNA, 1018 bp, Homo sapiens
aggggtcttctggacacactacctagtgcccccaaaccagagaagtagtttttctttggtgcctgggctcagaagtcgccactcactcagcccatggttcgaaatcagcatgggaagcgccggggcaaggcttcgtcggagactagaggcctgcctgtcgggaggagcccctgggggatggggaccccattctcctgcttgctctggttcccacctgggacgcctccgtaggagcccagaaagacgatccactacatggtcccgggacagagcagcgcgcccaactttgagggaactttgtgcgcctctctgaggccctagctttccaaggcaccgccgtccgttcttctttccctagaccgaaactggggaagagtgtgggcgcttctttgccccgatgagttcgcctccccaaacgcctacttcggctgcaccagagcatctgggaaactctgaaaggtgcccaggcctcacacagcagcgtctccctactcagcctctgtctttgggttttttcaagagagtctctacctcatgcctcggtctttcttcgatgtcgggtccccgaggtaggcacggagtccctctgaaagcagttgcctatctgtgcccctttggtgtaaagttagagtttactttgttgggggaaggggaggtagaaaagatcacagttgggaaagtgcgcttttcgccttgttcctaaaacatgcctcaagactgtcatcgcgattgttaggagagctatcaacgtctaggggctataaaggaatttctgaaccctcggcccttcccaaacccccaggttcctaaaaccctagtgggggtctcttggggctgggattcaggctggcaccgctgggaggacctcgcctagcatccctttattaatatttcacgaaggcaggctcctgccttctctggagcctcttttctcggaatgttcccaaactctggctaactcactcccctgtgagccatcctagggctctgtggcccgggaagagacgcgtcaactccg

SEQ ID NO: 57698 - DNA, 1041 bp, Homo sapiens
aagactaaagcaatccaactgaaaacaagaataatttgtaaaactattaaaagtaaaatattctttgagtttttaaatcaagatacccttggaaaagtttgatttcaattctttttaaaagaggtgtgcttgtcacaagtgttaactactaatttcatgattcttaagagttaaagcctttaatggtgaaaaggagtttctcatgtaggatattatctttgatagtgtagaaatgtatttttttaaaagataatgactgaggctgcaaaataaaaaattgagaatcaggaaacatgaaaaataacgaactattaaatcattagcaaaggtctgaaaagaacaagaaagtggctcctgaaaagccacacttgaactttgttgaaagagcagaccctatactacaatgtacagattggcaggcagtaaagttaatatgtgactgctgtaaataatttgtagttcatggactactatggtatgttgctgctttctagcctctgacctgcttgctttccatggattaaatatactgcaaataaagcaataacagggatacatatcaccgatggtgctagatacaagagtgcattttatttgatcaatgaggcacaggctatttttatttggaacttttctgttatatggaactcatacttgatagaaatactaaaaaaaaaaatcatataaatctgctgaatagctaacacgcttcttccgaacagaggtagccactttggttattatgaggactgttaatgtcagtatcatttttaagagatcatgaaaggaaataattgatgcttattaattttcttattaccaatcactattatttcccaaatagcaaaatattgtggtagatgcttactacatacagtaagagactcagaagataagtaaatgttgtgattttgcatgatgtcatttaattccttttcaacaaaaataataaggctgcatttctttaccttaaataattaaactttcttttttttaagttaagctttcacaattgtaaatcacttgtggtacatgctcatg

SEQ ID NO: 57699 - DNA, 1173 bp, Homo sapiens
ttcttggtgctgaaaatatgtgttccttaattttctactttgtatgatttacagagtagacgtaattttattaccttgacttcaggactgtggcagcttaaatttatggggctttgattttgtgtagctcttagtttgggggggctggcatttaacataaagtataggaaactcgggcttttttttctaaatagtagaatatctgtattccttttaattcagatggtttgtggcttaaaacatttcaagtcaatgtgaaatagcgcctagtaaactatttttcttgaaaattaccatgtaaagagctatattataatggtgtcatcttgaaggtttcttttgaaggaaaaaatgccaacatttagtagtgtttagactctaaggaatgaaaatgataccactggttagtagtatcaagtaggtatttactactgtttgccttgacattaggttggtaaagcctttgttttcgtagcagattccaataggatgtttactgtcattggatggggaatgggcaaatggtgagtgctagtttacttggtttgggttgtagttctcataatctatgtcttgttgattttagtggactggtacattgtaaacatagtacttgtttgtatagggatctatgtttaaattaataattattttatttcctgaaacttaagtctgaatgaatgtgagaaagttatttagaagtttggaatctaagaggggctaccaaaacacatttggtagtcagtggtttcattcctattttaaaagtgagtcttgaatttgatttccaagtatattttgtcacaaaatcaatttcttccttttgctgtaacggggagagatgtggctgctaaatatctgtgacttgtgattacctaggacaggagattgattgtaaaatttctgagagaaggaaaatgcaaagccgacttttaattttaagagttactgttaaaaatcgtctgtgtaagtagatggtctggggaatgtggaagccacatgcaaatggaaaataatgctttcatagcagtctacattaagcactgttctttgtacatggaagcaaaaaagttacctgaacagacctaaataagttgataaaattccatcagcacgctgttaagactgtggacacatccagctctttatttccacgtcctttattgctacgct

SEQ ID NO: 57700 - DNA, 1323 bp, Homo sapiens
agtccagatgaccccgtgggagtgaatgagtcactttaaaaagctacaataattctttcaggccactggggtatcattcagtacagtggattcagcacttctgggccttgagtttctgaagcattctctagtgccctaccctctgcggatagtttactctccaggtgaatctggttcagtgacggcatatgggctgtgctctgccgttaaagcggccaaacacgattatatcctgtgctctactagaagctgggcatgttcagtatgggtttcttgttacgtatgcttgtcgagatagcagaaaaagaatgcagggagctcactttggcagcatatacaataaaattggaaagatacagagattagcatgaccccctgcacaaagatgacacaggcattcatgaaactgtccataaaaaagagaacacaggatggtaaccgggtgataggtgagccactaataaaattttctgatctttaaaccaaatctgttgagtgacctatgctcttgactgtttccttgtgtttttagaaattaagagctaattcgagacttttgtattctgctgaaagagctgtccttgtgagtcaagaagattggctttttttttcagttattttttttttcacctgtgtcttgaatatctcacaaacacaagagcagtgagaaaataattcccactttgttaaacaactaatgaatctggaggatctatttgatcttctaatgagaccagatgtcttaagagaattctgggaatggatatataagaacttcccctcggtgaatgattctgatacatgtacgtattaaaaaaaatctaaattaatcctgactgaaactcccaactagcatttctgtggaaaataggtctcagagactcagggagtttgtgccaaaggaatttagccatgctgaagttggtttttaagtatagctttatctaaagcgagggcacaaggggaggagcaaaccttcttttttctctagccaattatggaagctatctgagcagcattatttatctatttttaacattctagatcctttttcctaaatcacagttacctttcccaatgcaggcctataatctcagactttattgaatctgccccaattttaagctatattctttagtaaatttacttagtcctacttttttttttttaagacagggtctctctctgttgcccaggctggagtgcagtggcatgatcatagctcactgcagccttgaccttgtggcctcaagccatcttcccactttagcttcccaaatagctgggaccacaggcgcatgcaaccacgctagctaatttttt

SEQ ID NO: 57701 - DNA, 1598 bp, Homo sapiens
ctgacctcaggtgatccaccacctcggcctcccaaaatgttgggattacaggcgtgagccaccatgcccagccaagtttttctttttaaccttgaactgatttattgctgattatttcatagttattattttaatgacaccaaatcatccttccagtatatgcacacatcgagggggcagtctagcccagtgtgcctaaagtgattccacactagctttttaaaattacatattcccaaattctaccccagacctgatgaattgctcatccattcatatatttattaattcaacatacattaattaagtatccagtatgtgtcaagccctgttctagaagtgggaagaaacaagtgaggaggaagggagcagttagaggggttcagagaagaccaatgtgaagagctgacatttcagctgaaatccaaataacaagaaagaaaacagccttgataaatctggacacacagcactacaggcacaggaatagcatatgcaaaaatcctgaggtagaagctagcttaatattttcaagaaaataaaggaaggtcactacctaaaaatcaatgattgtgggggaaatagggctcttgaaaatgtcaaaaagtttgacaaggtccagctcctggagggcttggattttattgtttggaataggaagccataggaggattttaagcaatggagtgatttcatcgaattctcagtagaaaaactattgcactggctgcagatgggaaaaaagttgaagggaagcaagagagtatacaggaggtccatcaccccaggggagagatggagagatggtggcttagatcagggcaggagaatggagatgggggagaagttgatggacccaggatacatgttgaggtaaagctgatagaatttgccaaaaagactttgagagaagatgaggcaggcaggactcaggtttttggcttaagcctttgggagccatttgtggagaaggggaaccagaccatctaggggaaaatcctgcacatgttctaaaacttccctaaacagatagagccaggtgccagagccagttctcagatgtcacctttgggaactattcatttattctaatccttatttttattcaagaaggcacagctcgaccactccacgcagatataaattcaagctcttcccaaagatttctcaggggtggggatcctctatacattccctgccatctatttaattaattatctttttttttttttttttgagagggagtctcactctgtcacccaggctggggtgcaatggcacgatctcggctcacagcaacctctgcctcctggggtcaagtgatcctcctgccccagtctcctgagtagcaggaattacaggtgcccaccaccatgcccagctaatttttgtatttttagtagagacagggtttcaccatgttggtcagggtgatctcgaacttctgacctccagtgatctgcccacctcggcctcgggattacaggcgtgagcccccatgcctggcccctgccatctattttaaagtttggcagtagtcaagacattcttttatgtacaacttaaatccttccttctgcatcacgtgtcattccctg

SEQ ID NO: 57702 - DNA, 1607 bp, Homo sapiens
caggatgatcgcttgagctgaggaggtccaggctacggtaagctgagattgcaccactgcactccagcctaggtgacagagtgagactctgtctcaaaaaaaaaaaaaaatcactcactgttcctgcataataacttttaatcaaaaatctgttccaaccccccagccccatcccccccaccaaatatatacacaaacctgatttagagctggtttaagtggctggcttttgctctgtgtcaatgtgccacgcctgtgtatgtacctgagcagttaggatgcatagcagagtttcagtttatatgtgcaggctctcaggtaaaagggagaattctggaagaatctgcagggaatactagaaacgtgttggcaatactttataagagagagtaaaaatgaatttatcttttgaaatgggagcaaagctacctatttttccagatatatacgtccttttacaagtcgtcctttttagagcaattgacttctttggtttgaaattatttacccagatggctgcctaacgagaatttgagattaggtcaaatcatttgtaggactattttgattaatgttctttgatttctaaatcaaatgtaccagaccaaacactttcaaagagaggaattaatatccacaaaatattatttcatatgcttttgctctaggtttttccacagctttcagccctgtctcatttcaccttaggaggtagagaaaaataactaacacatcaataattagtttagacctgaaaacactctgctgcacagctgtaatgtttcacaatggtttctgagctaagaggtgtttatgtagcatcaactttatcgaaacaaaaccctaggtaaaaacacattgaaatggcacttaaaacaacaacagtgcccaaaatctgttgtttcattacacttgagtataaggcaaatctggaagttaaattgtcccatattgagaataactgaataaatgtttacataattgctcccacttttgctgaatcttttggtttgatcaggtttagagcagagaggtaaaaaatacatttattaaaagagagcttttgagattgaatgctctaattaactgctaattacttctctaactaggctattttagattaaaaacctaactgtctcaattctagtggattttgaggttgtgatgaagagcagagccgatattcagtgggaccacaggatcaagcactgcctgtgttactcagtatttctctgctcagagacagaaccaattataatatttagcagattttttttattggaaagtcttaaaaattgatcagttttaaaatagatgcacacaaactaccttgagctttactttctgatgaaaacaatctatactatatgataaagaacagatagatatggaatgctggttcaagctgacaaaatatgcacttttgttgtcttagatctagtgaggaaattgattcatgtttggtatgactatcttcacaaggaattgcttataaagaggtagggcctaactcatttatataaatcgaggtaaaggaataccaggagtaaatctaggaaaattaatttttctgtttttaggtgcttctaatactgggaaaccctatt

SEQ ID NO: 57703 - DNA, 1032 bp, Homo sapiens
attagactttcattaaaactaagtgccacacagagaagaggtgtaaaacagagtagtaatctgttgcgtgcacttgaagggttcttgaaagacgtgcataaaccgttaccgttgtagcacaagttgagcagcaaaagccaaagtcgcacatctgtgtcttgtcgccacctctccacttatccactcatgctggcttttctcccagcagctctttgccctcctccttttaacactgtgggctgaggtgaggatgttctagtcaagagtctttacgagccttatatcgccaggctttcagaaaatgtgaagcatggtagtgtgaatttagaaaaaataaaagtgtgtataaaagctcttctgttttcttttcttttttttttgttaagaaacaatagtgtttatttatcatgttttgcttagaattcctttggtattctgttctcttgattttaacaagaagctaaactcaataacatcttttaaaaacaaaacaattttcggttgagggtgggtgaggaagttatatgaagattgagtgggaacctcaacccaaggacataatagacaagaaacagtttttttcctcccctttcttcagaagtagtcttccgcatggtttaatgtgctaacataaccccggttccaatatttcaaaagatacagaacttcccagcatgatgataaagttttcctgtgttccaataataaaacctcaacgtaccagtgatttccagttcctttgtggctcagcaacttgtgaagaccaactaagtcctaagtacccagcctgcagtatcagtgtgggagtcggaaacagatgttcacgggacaatgccatttgttgtcactgtcgatactatgtggcaactttcccaaatgaaattgtttgtggatggaaaagaatgtaagcagtgattcatgcccaggaatttttttttttttttgtctgcaggctaaccgtatcttatttgttttaaatcgcagagcattagtggattaaaaattttaggttaacttactattatagtatct

SEQ ID NO: 57704 - DNA, 1074 bp, Homo sapiens
tgatagtcccaggtaaagaagctagttaaagaaagttagtatcctcacgtttctgtgaagattcaagcaagcatttcaaattgctccaaacgtgggcatcagaactttctgattattaaacaaagttgattgtttttattttctaacatatctacgttagaaatttggcattgataccagcacacttggagaaggcaaaaacacatgagttggtccactaaagacttcaatagcacttggaaagagatactcgtgtgtgttatgtatggcatgtcaagggaagttacctacatcccagctaccttgctttagaacaggaaaggaatgaactaaggtgcacttgcctgtctcaaccagtgaatcaagactgattgtttgtagttattttaatttatgaaaaattcaaaatttaatgctacagaaaagacaatgggcctagggaggactatgttaaagtcttgttcattttctagacccaacagagaatacttgaatgcacagaacaactgaggaaaatcatactttaagtaacaaatacaaactagaaattaattctttcataattaagactatttcaactattaattttcttccaatatacccctctactttttttagccatttatgggtcattctacattttcttaagttctaatatgatctggagaatgtcttggacttctttaaagtaacttcatgcatgtgctctcattagatcctttatttactaccttactttaatgttatacataatacataataaacatgtgaaattcattttaatgaatagtgtaagcctcaaaaaatttacttaaccacttctttgacctagcaaatttataagcgatagtaaaactttccttttacctttacaataatagcttttaagtactcaggctgacaaattcttcatggactcacttttatgtttttcaatttctattaatttctctgtattaaagttgaattagatggatttatgttgcctattcctggcattcatagcaactataaggcatgatcaagaaaacagaaattctaatcctcatgttacagaaatggccccaattctac

SEQ ID NO: 57705 - DNA, 1051 bp, Homo sapiens
ttacttagagtgctccgaatcccatctttgatctctggcgatatttttctctgttatgtcactgaggtcacctggctcatgtgtgacaaactgcctgcataagtcacagtgccagtggcagagatttgtaaccatgcccctggtccattgcctttgaattatttcacaggcccgctgctttacatttacactctgtcggaagatgaacaggggaagggagtaaaatcaagggcagggtctcatcctgaaggacaaggggaaacaggtggaaggttaatggccctggagcgattccacaagcctctcaggcttgatatatgggcctggggcctaaaacgggcattggctttcaaagatatattatttcatttgaggagagacattctggagttcctgcatttgtctgctgatagatgatcctctgtccacaattggttatggcgtgtgagttttccttgggcctgctcccatacataaaaattttgctgagctctccaaccttttgcatgcctttaggaatgggaccggtgcaagcccactggcaggctgttggatttttttgctgctattttagtagttccttttgaaccgtgaggcaagtggggaatgaaagacacttctgttcattcatacatgacttgataagggtggccttgttataaaaaaaaaaaatggtgaaagggatgttaggaatcaaacatatgtgtcattttgggaagacaggctcagtccaaaatttagtcatttgggtttcaaaaagttgcttacataaaagctagatactatcaaatagcttttgactttattactgttttgcactccccaggcttttagcaaatggcttactctatttttctttattatttccaaaaagtttgaggtgatttggagaaagaaggagaacagacagttggaaaaaggtgctttacacagagatccatgattaatttgcctaacaagaaccatcaggcaatgctaccaagaaatatgtctaatggctcaaatgttacaatcaaatagaactggtcactagattaatggaaccagtcac

SEQ ID NO: 57706 - DNA, 1026 bp, Homo sapiens
aattgtattcctttctgaagcttggaatcaagggaaaaaaagaacaataatgatttagggaaaaataatagttttttaaaggtagatttatagttagtaactttatataggtgaactgatcacagagaagggtgtaaatcatctgaataaacaatggattttcacacttactagaatctctaagaataatattttccatattacagctaaatgagacccattatgtatgctttcagataaactcacaaagctcttacccatgtaaatctcatagatctgccattattcgtaatgaataacaagttttatcatgcattttcattaaaaatgcattaatccctttgtagtaacctctccctaattcattgattcgataatacaagaacagtaaacatttctggcataacaaaaatgtggtatcaaagcatactgtatccataaatacaaaatgtaacaggaaaacaaatacatttatcaaaggaggatcaggttttccagccactaaataatgctatggtcgaatactgctacagtctaatacattaagaactcaatcatagtgccgcattgtgagccgtttgtaccggatctgattcttccagattaaatgacttgttgaaacttgaagatgaaagacaggcagaagtatccggggctctaccctcaggaggctccagggtgggttactgccagtgggggactaatgcttccgtctagtggagataggaggaggaggatcagaagtgacatgtatgtacccttttttacttgtagattatttacttagctcgttttaggctctgtgtcctcatctgtaaaacatggcattacctctttcaggtattttactggggattaaatgacttaacacaaattaagtccttggtagatagtatatattcaagaaaagtcaatttcctccttcctttattgatgcttaaaagcccctggtgctgtatttgattgattcaacaaatacttgggcttggcacaaggcactggctatacagttacttccctcttatc

SEQ ID NO: 57707 - DNA, 1402 bp, Homo sapiens
aatgagttggctgaattaccttattgtttgacatgagtcaaccagcccactccagcaaaacagccaaccaactcagtcactctgtagaagcagcgtgtcattgaacaaccaaacacacagtacatcgtgcacagcataacgatgcttcataaatgatggactgcatatatgatggtggtcccaacatattataataatgtatttttactgcccattttctagtaacacaaatacttaccattataagtattgcagtgtagaatagtaacatgctgtacaggtttgtagcccaggagcgatagactattccatatagcctaggttcatggtaggtgctaccatctaggtttgtgtaggttcactctctgctgttcacacaaggatgaaatcacctaatgatgcatttctcagaacatgtccccatcattaagcgaagcatgacctgcatgcatgagtaattatgtgtgtgagaagccatgagaatacctctagaaacacaattcttctttctctgaaaaatgctttccctcaaagaacagtgcatgctcatggaaaatgtaaacgatttctttctataaatatcaaacccattttctctgtgattcatatttcaaataaaacacacacaagatcaacacttaaattgggtattatttctttttttaaaataaacctttgtcagaatattatttcttctttttttctttttattgccactcctcctctccagaatattattcctactgtgtgaaatccaaaggcaatgggaagggatacagttctgtctctctcccttcttacaagggagacaaaagaactcccttcgtcactcacctctgttagaaatgcattcctttaatacaaagagtatttctcccattttatgatgagaataattgggaaaaagaaattcaatactttatctttcacttctcagccacctttggggaacttatattttgtatatcaggatggctgtgctatgcataacttcttacagatcttgatatgctatctttcatcattatattcagatataaacccaatagttgtagagattactaacagtgagtaaaggaaaggctatctagaaatatggaagacataaagggattgtcttgggactgacctacagagtccttgcctcatggggacagattcaacagggcaatgctgacgtcttaggaagggagtgtgtaggcggtgtgtatgttgggtgggaatgggaaaggcagtatagtatcatagcctgcatattcttctcctttaatctagaataggaagaatatgaaagtagaggtaataagaaatatgccataagacacaccctcttcagacagtgcaaaagagctaggtgtggttttgctaaaaatctagctaatgtgattctgatttcaaaatc

SEQ ID NO: 57708 - DNA, 1013 bp, Homo sapiens
aaataacttacagaaaaaaataggaagattgttctttactcttatatgaaagaggcatagtgaaagagcactgggcttggattcagaacacctggattcccatcctgtttctggcacctgagtagccttatataaaccacagcccacctagcctgagtttcctcttctataaaatgatgtagttgaacgaaatgtagctatcagatactttcagcattgattcagcaaatattaattaagcacctgcggtgagcctagtaccagggtgtgattcagcatgtaacaggatgggggtgtccccagtccaggtaatgaaagggtagaccattcacagtgtcaaagacagaaaactagataggacctattactcttagcatgctatgtttagggcactggcataaatatttcccactaaatattctacactatctagaaatttttaacaaagcaaaaattgttgtttacctagacttaatctttctgtagtttagggccaaacttcgactgttggagctccatcttcaattgctactactttctatgaatccatttctgggaatctctgaaggcatagactgactgtacacttagcactgtgacattaaggggacatttaaattgtgtgaagggacaagtcctctacttgtccctggggaactgagcagaggaattctcccaggagcctttgtacccagagaattcccatcactgaacagtccttagggacctctcctttacctctgccctaatttcggttgtacttttggtgagtaatatttaggccactcgaattcttttctcctttctttggccaactgcctgatggaagcagccagccaaaaaggacccaaggacattttagcctctataagcctttttttttttttcctggctttgtaaagcaacctatgaaggaagaagttgcattaaatgacctcaagggagccacggagcatgccctctggaatatccctcaccttctccctttcttcttaatcctactatgccaagga

SEQ ID NO: 57709 - DNA, 1052 bp, Homo sapiens
gttgtgaatgctcactgttggaccctaggttacagagtggtttctttagcggttcctgaagtctaggcctctgacttcctgtactgagtgactctggattgagctgttcaagaagcagaggaccagcctgttttgctttctgtctaccccttctgctgacagctatcatgttcatttcccaactgctgtgctattcgttcactttacacctaaacatgtgaacgttgggcaggaccgaggaggccctgcttccatggagattaaggatgtcagcagaatgacagccactaaactccacccctacctctgctttacttccaattttacttccctttactcccattcccaatttatgaagttcccaaaatctggccccaagacaatgaaagcttattttgtacaatttaattttcagtctatatgcactcaagttttgaaccgcttactctaagaattttgcacaatccaaatccattaatgcaggttaacatattacaaaaggttacatgaatataggaatgatagtatgggatggagttgatcagggaagacttcctgaaggaggcgccttttagaatggtttctcaatgcattgatggatattttaggtaaggtataatgctatatgccttgttgctaggaccatgaactcttcagatattggctctgctgcttatttgctgtgtgacatttggaaagttacttaacttttctacctcagtttcctcattggtaaaatgaggattataataagttctgcttcattgagttgttgtgaagattaaatgagttcatgcatgtaaaactctttttttttttttttttttgagttggagtctcactctgtcacccaggctggagtgcaatggagtggtctcggctcactgcaacctctgcttcccaggttcaagcaattctcctgcctcagcctcccaagtagctgggattacaggcacatgccaccacgctgggctaattttttgtatttttggtagagaggggatttcaccatgttggccaggccggtctcaaactcctgacctgatccaccc

SEQ ID NO: 57710 - DNA, 1051 bp, Homo sapiens
atatctgtgtactatttcagcttcactttaatgtactgtattcacttttagatacataagcataggcaatctggggtcattctaatggagcctactcaggacaacctgaggcacctggacctaactctaatagctctattaatgttaggtagaccagtttaatggagtgcattctcctagcagttcattgattataaatacttagcttaagtacctacgtgtgtcctaaaaaaactatttgtccgaatgaaaatcctgattttcaggagcagtgatatgaattctgggcacctgtgcttcagtgaccatgggtggagactttcttgtttatatgtagtcctcttatgttgaaaattacacaaaaacaaaaaagtagtgaataacagtgtcattttttgttttttttgtttgtttgtttctatttcttttgcaggttgatgaccaaatgaagctgcttcagaactgctggagtgagctcttaatcctcgaccacatttaccgacaagtggtacatggaaaggaaggatccatcttcctggttactgggcaacaagtgagtgtagagaccaaaaaaaaaaaaaaagcatctttttattaagcatgttcagaatggccggaatttaactaggtcagaagcactcttgtgctttgaaagggagagattggctgccaataatttagaaaagatgacttggtgcactctgttcctgctctgattattatagttaaacttgtaaaagcaaacataatcatgaacattctgctgcttccagtctgctgggactgaaagtcctgcttacaagggtccgaagaactggtaaatgaaacgtaatgattagtacccaggttttctttttcctcgagcttctgctttaacccaagacacttgtttgtcagctgttttaaaaccttataacttgtggagtccttactattttggaaaaatattggtgaacgagatggatttggatgtcatgaataattgaaatagttggtataaaggcaaatgagaagggaggggaatttcagttttcaagatccagtcattcaa

SEQ ID NO: 57711 - DNA, 1042 bp, Homo sapiens
gaaatgaagggctgtctccacatcatttgctgtattattaataaatcaaaatttcccaatcaaattaaaagcaagcactatttcagagtttttgcaaattgggtcaattcaagcatctccatcactatctggtccttgctatctgcacctctcaggagaaaagcgttgcagaggagaaaataaagtctcaatgggtttgacttcctgtgctttcaaattttttttggcattttcattctgggacccaagtctttggagaaaatgtacccattttcagagtctaatcattgggtgtgcctcccaccttcaccgaactaggagctgcattggaagtacaagactgggcccactaattaatttgatttcatttccttctgagtttcagaaatgaaatgggtttgtgccgttctttttctcaaagcacttccattcctgctctttagaaatatttcttatttcacatttcattttgccttaagtgctgcccgtgggtgagggtaattactatttaaaaaatagagaaaagtgcatttcttgctgtctgattttcaaaaccaagaacaatcaaggaatggatggtattatagttttttggatcaattactggtgctttgtgttttgtcatcagaactgaatgaggaactccatggtggagaaatagttatttccttatatgtttcctgcagcctggattcttccagctcccctccccactctttaaatatgtttcctgcagcctggattcttccagctcccctccccaccctttaaagtgtgccacaggtctgtcagaacccctcccttcacttttttcatccagtccagtggctaccctagtaatgattaattgtaatcagacattctcatttatggcaattatggtagacatgtttattttcttttgcggaatatctagacaaaacgttttgaatttatctctgtgcttcttgcgtttcataggatggaagcaaaagtgctgcaaaggaagacttcaaaagcctgtaacctctctatcagaatgagacagatatcttaaagcagg

SEQ ID NO: 57712 - DNA, 1030 bp, Homo sapiens
tgcctgagagctctccagtaaaaaaaggatgggagcgtcaggtaccaactgggctttcccattatgctgtaatcgcagcagcaaagccagtgctatcactgacagccatcccaacatcttaacttgttataaattgaacttcttatgtccccatgaataatctaagattggtgcctagcaacacttttttttttgagacggagtctggcttcttcccccaggctggagtgcaatggcacgatcttggctcactgcaacctccgcctcccaggttcaagcaattctcctgcctcagcctccccagtagctgggattacaggcacatgccaccacgcccagccaatttttgtatttttagtagagatggggtttggccttgaactcctggcctcaagcgatccgcccacctcggcctcccaaagtgctgggattacaggcatgagccaccgtgcccggccagcacttttttttttttaatgaaaagggaaataagccttttctttttttgcttccagacaacggaattattctcctaaataaagttattgctgtctttagagagaaacacattaatctgatgtaatctaatgtaatcatctgagaatagcagttttatgtcatgctttttaggaaacagaaaactaaagaataatttatttgtatttattttaaatttttaaattaacacttctgctgttctataaagaataatttaaatgtgattctttcatcatccacaaacatccaatcttgaactatgattactttaaaatgtagtctcataatacaagtagaaatatatctgcctttattttcctcatgcactagttaatattgtatatacatagaacactctcctggattcacttttcatggacagtatgtttttctttcaccttattcatgagagttaaaattttttatcttatgtgatgatgtaatttcataatataaaaaaggcatatatacttgaaaaatttaggtagccaaaacctctttcctacaaagcttatcaaaagtgattatattt

SEQ ID NO: 57713 - DNA, 1094 bp, Homo sapiens
tcactccagcctgggcaacggattaagatcctgtcttagaaaattaaaaaataaaaataaacaaatagtttgaaacttaaagcgaagcctttaccgaagcaactcgtgataggtaataggaggtggtttagctaaaagccgtattcaaatacaggttatttttcagagaccactttttccaaagaactctctaataaataactcctcaaaattaaattatttctgttatcagtttgcattctcccagtttatgagaggagatgtttattcataagctctttgggaaagctaacgtgaagaaaaattagaaagaatattactgactaaaaccaggtggcaaatgcatttctgttccaagcaaatgcaagatgataggctttcagcccatgttaagtaatagtagttaagacaatgttgtacaattctttcttggcattgatacaatcctgtttccagcaaaatgaatggagaaaatgttatatttgttcatcatgatagctctttgcttcatactaaacttccaaattttgaatgtgacatttgattatacacatcccaggtaagttttgtcctcatggagacaaacaccccagggaagatgggttatggttgcctcagggaatgactcaactggcccagacagaaaagctactgcatgctaaatgtcctcaccagcctgtcacctgatcctcatctgcagagaagcaacgggcataattcaagaacaaaactgattgaagagttgcttgtttcatccacaggttcagttcaggcattctgtagtgtctagtcatgatttctttatcttaaaataattaagaacattatcttaaattataaaaggtcatctaagcaagtactataatgtctcagaataaacagtattgtttattaataaaaaatgtgacttgaacacaagttgaaagggattttcaaaatggatgggtaagaccttcagggcttgaaagaactttattttattatttattcttcttaattttagagacagggtcctgctctgttgcccaggctggagtgtagtggcatgatcataactttctgcagcttctaactcctaggctcaaatgatcctc

SEQ ID NO: 57714 - DNA, 1800 bp, Homo sapiens
aatactcagtatgttcgattataatagctacatcttattgtcctgtatgagcagagtacattatacctgttgtttctaatcttcataagcaagccttcgatgaaagtatcatttgccattcctgttttactgtctttccctaagatcagagaagtcaaacaactatacaaaattgctgagctagtaagtaatagaactgggatttgcacactttagtcatcaaagtctaggttttctccactattcactgctacttttctggttcattgattaagtatgtagatcagaaggcactataccagtgcttgtcatttatgatgaagctaacccattctaaatctgatccttctagatcctacttgaaagtacaagggctgagtaacaatcctgccttcttaaatgcttaataattccccctcatcaacatgccatggtttcagtcagagctgctttctattgatcggtttcaagaagtatcacagcttttatcaccacggtcagaagcactgctgaaattatagggtatttaatcccttatgctggcctacttactctaagcagattttcttttctttatcttttttttgagacagagcctcactctgttacccaggctggaatgcagtggtgtgatcctggctcactgcagcctcaacctccctggttcaagcagtccgccagcctcagccacccaaagtgctgggattacaggcatgagccactgtgcctggccagattttattttatttatttatttatttatttttgagacagagtcttgctctgttacctaggctggagtgtagtagcacaatctcggctctctgcaacctctgtctcccaggttcaagcagttctcctgcctcagcctcccgaatagctgatattacaggtgcacaccaccacacctggctaattttttttttttttttttttatgtttttggtagagacgaggtttcaccatgttggccaagctggtttcgaactcctgacctgaagtgatctgcccaccttggcctcccaaagtgctgggattacaggcgtgagccaccacacctggcccagattttacttttaatatgaagaaacatctgctgtctaaattcctatcctcttacaaatatttactgtgaacagaatttgataattgattgaaaatcattaccagattattagcctagattattagcagattctccctttcctaatattgccagcatcaaactcaatggagtgaaagaagaaggaatgaagattaaaacatgaatttgtgtacgtttttaagtattttaagaataccaaaataaaagtgtcatatgaatttcttagtatgtttctgatatagacaggatagagtttagtaattagcaatttcttctaattttttttaaaaaaagtttattgttgttacttgctacaagaaattatgggacaaattggataaccacatgtgctggcatttgtccaggacagcccatatcaaaagggattggggtccatgatactgtaacagtatcatttctaattataacttcaaggaaattcctctctcaaagaggtagctaagaaacttattcttgtcttacaaaagaatagggtttttaggatttaaaaacaggttgatgtgccatttttcctccaacttatgtattttagattctattttgattttcactgatccatggtatttcgttatataatgtaccccacagtttattgattcattctccgattggtggatatttattacaaacaatgttaaaagaacatttttctccatgtcttcctgtaatatatt

SEQ ID NO: 57715 - DNA, 1047 bp, Homo sapiens
aaccttctgtgtagacattcatagtctgaaaataaatacagatttatcttttgcttttctggattccatttctgatcttattttgttggttagacaatattgacttggtgtgataacaggtactcttgtcttatttcagtcttttataggaatcattctaaagtcaaatgacttgatatgaaaagtgttgtctattttagtagtcttctttttagtagaaaaaagagaagaagctattgatcttggagagagatccaacagctattttttctttgccttttatttcaacaaattattctcttatcttttgttattttattgttctggttctagcttcttcagttgacgattttattcatctaattttcagccatacattttcattgttcttttgttttgttttgttttgtttctcatttgatgaaagcatttagtattagaaagttgcctcttggcacagccatagttgtatttgtggaagttttgatattggagacagacattcaaggctgctgtgggtttatgcaagtcactgtacagaactctagggggcaccactcacactatagtatatatcaatgcatccctaagagttgtgtggtacacaacaccagtagccctgtctggtagccctacgtccagtgctaaatattttgtcatctcgattgtaatcgagatttatttcacaatgggttttaaaatttccaaacaaatggaggttttgattatctttttatttttggattataagatgatttcactatgaggttatgcatattactgaaactttcttttgatgtgatatttagttaattttaataaatatggcatatatgacacagtctcaattttagatgtcagtatttatttctttatatcattattgataaatttgttatatcttctgtgtagattatttcttttattattatcgtgtgcttcttattttctttctttcttttctttttatagagacaaggtctcactatgttgcccaggctggtctcaaactcctgagctcaagtgatcctctcgcctcagcctccc

SEQ ID NO: 57716 - DNA, 1032 bp, Homo sapiens
gagccgctctctgtatatgctgactgatacattaggcttgggataaatcatatctgacctttccttataatagcactgggtggacttcaaaggtggaagagatatttcttgttcaattaagtcatcattgcagaaagatgaaacagatgatactttataagccaggcactgtcctaccttgtggtaattcctattaaaacacatttaaaagattaggaaactgaaacttagagcaatttactaatttcaatgtcttatggccagtgcagtgttcacggatttaaaatcacttcaatgcaagtatcaataattctgctaaataatcaggagttgactataattaatctgcaaaaaccaaacaattttccccacttgaattaatgatttctgggtgtgaaagggaatggtcaccacatagtcttagtttccttccatgcaaaccttagaattgagcatagcacttacgaaaccaatatgatcagataataagatatcttactattatcactgtcttagcaaaatctgtcattacactgaaaaaaaaataggatagcttcttttgcaaatgtttcaagctccaaaagttcttagaataatctttcttgttattttctctgccacatggttacacaaatacaaaacaaattggaaatatggattttctgtctttcatatacaaatacatatccctgagcaattgaatgaattattaatttgttttgtccaaaaatggataagtatttggctttaatgatcttgttaggcaactagtttcccttcccttatagttctcaactccagagaccctctcttttcatttttcaagcaaataattcagaatcagtgttgatccactgcatgatttttcccccttcatttcaacctctgatcttactgagcagaattttaatagctaagggaaatgatgtaataataagtaacaagtatatctagctcttaaagagtagctttaatttaactctacaaactcataaaatattggatatttagaatgaatgtagatagtaacag

SEQ ID NO: 57717 - DNA, 1034 bp, Homo sapiens
tgcatactttttcatgaaaattaaaacatgaatcccatataaatagaaatttaaattctcagaacttggggatggaaagggaaagcatgtttaatgcaaagctatggcccaaatgtaaacactgaaatcgtcctgatttccattttctctggaatgtccctccaataaaaatcaagtcctattccatattaagtaatggatagtagctggcaacttgggagtctgaactcatctatagcaggagtctctaacaacagaaatatacaagtgaattgatattaaattatattaaaaaaaccaaaatctagacaaatgattacatgttctggagttcccagaaatacatgtttttgaaatttgctgtttggttctcatattaaatagcattgtcccacatctggattttagcaaaagacccccagctggaggaaaagagatggatatgagataaaaatttccaccagttcttctgtggcattttaggctggattgcaaaggctcctgcatttggcactctgtgcgttcctttgaaatttatataagcttcattttcatacaatttaaaaacaccagttaataaaccctatcattacaaattctgagttggaaatagtatgtaaacagacagaggcatccccaaccctttctctatagcctttaaattttgatgactggcgagagcattttgtgcttctcttagtatcaatctgttatcatctattctactttattcactcagggactaattaccaactttttatatgaagcagcattacgataagctcacagtggggtgctcagattttttccatccttattggaaagtaaacccttaggtcttcttgaatatattatagtactgacttttcagtcacacacaacattcaggctctctctgaagaggaagatactcttctctgcctccctggtagctgccataatggtgcagcctataaaccttgtcattcaacacactttttcagaaatgggtcctctgctgagccagggggctgggggctgtgaggctcacatgg

SEQ ID NO: 57718 - DNA, 1027 bp, Homo sapiens
tttaaatatacaagaaccgttctgtccgtttttcttctgaccgtgttggtatccatctgtgagttcaatccactccattacaatgtcttttatatggaatcctctggggctgtgaagcctttgattcacagtttgcaatacaaataccctgatacatcatttatttgctattaagtatttgattattatgcctttttaaattcaatatctttaaagcaagtttttaattagcgttacttggagcagttcagagtactttttttcttcctgttcttcttccccctccccactcccccaatctctttttgttttgaaagcagagctcctaggggttgtaacttatgctcttttggcatgcaacatttcaatgagaaggttattatagggcacatccccgttcaggtgcttgtagtagaggtattcttcagcctgcatactgatggcccggatttcgggtagtcgaagaagtagctgtccaaatttctctgtctgctgcgggtagttacacattgtgtagtccagcagggcggcattgacttgttcctggacaccttctaccagctggaagttttcaaggtttttgacatctgcattaaaaaaaaaaaaaaaaaaagcaacatttcaatagcatttcaattcctgtttactaaagcaatgtgttcaattaatggatgtattttccttttgacataaacatactttacatgctgctgaatattcagtaaaccccactcaccaaacttcctgggaaaaggatcacaaaagagctttagaagaatgtcttgttgaaattctgcatatacctcaaatcaattagacaccagtggattttgagcaaggtcaactcttttcatatcttacaaaaggaaaggattgaggattcctaaagtagagggatcttaatatattgccagcaaatgagtccctggagaaagacctatcttaacccagtatattacacaattcatataattctgtattaatttttctgacccaaggtgaaatctgtgtccagggtatgatgtag

SEQ ID NO: 57719 - DNA, 1028 bp, Homo sapiens
ctactacaagcacctgaacggggatgtgccctataataaccttctcattgaaatgttgcatgccaaaagagcataagttacaacccctaggagctctgctttcaaaacaaaaagagattgggggagtggggagggggaagaagaacaggaagaaaaaaagtactctgaactgctccaagtaacgctaattaaaaacttgctttaaagatattgaatttaaaaaggcataataatcaaatacttaatagcaaataaatgatgtatcagggtatttgtattgcaaactgtgaatcaaaggcttcacagccccagaggattccatataaaagacattgtaatggagtggattgaactcacagatggataccaacacggtcagaagaaaaacggacagaacggttcttgtatatttaaactgatctccactatgaagaaatttaggaactaatcttattaattaggcttatacagcgggggatttgagcttacaggattcctccatggtaaagctgaactgaaacaattctcaagaatgcatcagctgtacctacaatagcccctccctcttcctttgaaggccccagcacctctgccctgtggtcaccgaatctgtactaaggacctgtgttcagccacacccagtggtagctccaccaaatcatgaacagcctaattttgagtgtctgtgtcttagacctgcaaacagctaataggaaattctattaatatgttagcttgccattttaaatatgttctgagggttgttttgtctcgtgttcatgatgttaagaaaatgcaggcagtatccctcatcttatgtaagtgttaattaatattaagggaaatgactacaaactttcaaagcaaatgctccatagctaaagcaacttagaccttatttctgctactgttgctgaaatgtggctttggcattgttggatttcataaaaaatttctggcaggaagtcttgttagtatacatcagtctttttcatcatccaagtttgtagttcatttaaaaatacaac

SEQ ID NO: 57720 - DNA, 1049 bp, Homo sapiens
ttcctcctgcctcagcctcccccatagctgggactaggggtgcatgccagcatacctggctacgttgactcttaaaatctatgttctcttattttaaagatacagtgctccccactgaaaattaaacctaaaaaatgtcacatattggtatgttgttaacctggtagattaaatcatgagaatgattagaaagacgggcaacacagcgggttacatccacactgctgatcacaccaacgacaggagctgataagcaagaaagcgtcacagccagcgtctgttcacccaaggttgacaagtgaagtttctctaatgttgattgttagccgatttgtaacctggcatttacttagcaactgccttatcaattacaggatttgccggtaaaagcagactcaaatataaaggtttttggcttaacttggtttattatagttgctctatgtttgtaaacagacaatctctaatgtctgattatttgtatcacagatctgcagctgccttggacttgaatccatgcaatgtttagagtgtgaagtcagttacttgttgatgttttcttactgtatcaatgaaatacatattgtcatgtcagttcttgccaggaacttctcaacaaaatggaattttttttttcagtatttcaataaatattgatatgcccagcctgataatttttaaaagtttttatgttgtcctcattctatcggatactaaagcttctaaataagagacttgactaggagtgaaatcaaaagaatcccacaggaatagatacttttccctttagataacttctagagtggttggctgtccttccatggatacctgaagcattaaattcaatctgagcatcatctctacatgtgaaacaaagtattttatatcatttactgttataatcaataagcagaaaaatcttaatagcatctcacttttttgtagagcttatgttgtcctgataactttcccaagtgctttcttaattcacttggtcctcagaacagatccaggaggtattattattctcatattaaagccccttgcac

SEQ ID NO: 57721 - DNA, 1035 bp, Homo sapiens
ccaatgcttcggtagcgcatttagactgaaaggccaggggaggcctcactgacctttaagctgagatatgaatggcaagaaacatccagccatatgaagacctggaggatgaaattttaggcaagaaagagccatgtctctcttttcctttttctttctttctctttttctttttttttttttgagatggagtctttctctgtctcccaggctggagtgcagtggtgcaatcttggctcactgcaacctctgccttccatgttcaagagattcttctgcctcagcctcccgagtagctgggactacaggtgcgtgccaccatgcccggctaatttttttatttttagtaaaggcagggtttcatcatattgtccaggctggtctcgaactcctgaccttaggtgatccacccacctcggcctcccaaagtgctgggatgacaggcgtgagcctccgcgccaggccagccatgtctctttaaggaatggagagaggacagggaactggaacatgctggatgacggggagcagaatttaatcgaggttcagctatttgtgtaggaataattccccactcctctcattgtatgtactaaaaattgagtacatcatgttcacttattccagaaaaatgtagtgagtgtgtctgctatgtgcccagcactgttaagtgctgagtgtatagtagtaagaaagatggagtacctgtccccaagaaacctcagcctggggagggggcttgagaaggaagcagacatttacgatgaagggtgatagatggtatgataaggaaaagcgcagtgggctgtaggaaaatcatctaccctcgtcaagcgctggactattgagagaggcttcctggggtaagcaaagcctaatttgagacttgaggtacaagtaataattggccagacaaaggatgaaaagacagcattttggtgaggaatcacctaagccagggtcaggatttgaatgagaacagagcttattatggggattgcatagtgccgtgtgaatggagtaaaggggtgggtt

SEQ ID NO: 57722 - DNA, 1798 bp, Homo sapiens
caacatgatcctcaaaggaaatgctcattggaataatgaaaacattctgggctgggtgcggtggctcactcctgtaatcccagcactttgggaggccaaggcaggcgggtcacctgaggtcaggagttcgagaccagcctggctaacatggcaaaaccctgtctcttctaaaagtacaaaaattagccaggtgtggtagcaggtgcctgttatcccagctactcgggaggataaggcaggagaattgcttgaacccagcaggcagagtttatagtgagctgagatggtgccactgcactccagcctggatgacagagcaagactctggtcccaaaataaataaataaataaataggatcctgaaatcagaattctgaagcatttcagatcttctgaaatcagaagatcccaggcatttcaggtgagggatattcagcctgtacctggaagagttggggaggaaatgaaacctgactgagtcagtaaaaattagtcatgtgagtgtgcacaatatggaataaaaatttctggcggaagaagcagcctgtacaaaagcgtgaaggtaagagtgcaatgtaaagaactaactatggtgcacgcgggagaagaggaagaaagggcttcagtcggcaaggcagggcttgaattgtgaaggctctttcagcaaaataaggagtccctgaaggattttaggtgatcagatgatgtgattagagaggggaaggttcgtagttaagaattaaaccatgtgggttcgaatcctatccctgcctgtcacattaaatgcttttgttttcctacttgtatacagggtataacactgactcgaagggctggtgtggggattagatgagttaatacatgtaaaatactttaatagtgcctggcacacatgttcaagaattctgttgttataactctggattggatggtgagaagctggggtggggaaatggattacccttttgtattaatccaggggagaaatgatgaggatattactaaggcaacggcaatgaggatgggaagagatggtaacaatggattagtgatgtagaaggtacaagcagcaggatctggtgatccactggacgtggtggggggtggcagggagaagatctactgcaagagaggaagggtcacagctggctcctaggattctggctagggtttctgggtgggtggtggtggtaatcaactgagatagagaatgtaggagcgggagcaggtttttgaagaaagacactgagctcagtttctctttgaagtgttggtgctttgtcacttagtatctggcatatgggattgaagcttaggaaaacggttcttgctggagatataaatttgaactcatcagctatgggtggcaattgaagccatatgcatcagagtactttggaccgcaagtaattgcagaaatacaacccaaaaaacagaagagatttatcagctcagaaaaattaaagggcaccagaggtaaggtggtggtcagtcttatttcacttggggctccagccttgcttttctgatgtcctctggcctctgcatgccttctctgtgttgccttctcctctgactgggggctgatggttccattagctccacgcctcatcaatgggtgcattcaacaatgccccccagaaaagagaccatattttgaaatgtctctcttaaaagaacaatgcacagaagccttttccaggacactgaccatgggtcccatgcccatttctgaatcaatttactgggtcaacagatcactgcggttcctgaacctgtcactggcaaagaagacaaa

SEQ ID NO: 57723 - DNA, 2077 bp, Homo sapiens
caaaactttgttttatgcacaaaagtattaaaaatattgtataaaattaccttcaggctatctgtataaagtgtatgtgaaatataaatgaattttgtgtttagacttgggtcccatccccaagatatctcattatgtatatgaaatattccaaaatccaaaagaatccgaaatcctacaacacctcttgtcccaaatatttcacataagggatactcaacttggacatcatctagtttctatgttttctgtagtgaggtaaaattgcatttattaaatcatttttaaatgatgtagtaaaaaaaaaaaaaaaagaagtcagaaatataattgtatctcaagcgatcccagctccatcatgcctcatctgtgtttcaccaagcagcagcaacagcagtgggttcgaagagctccagaagtgcaaatttagcatttcgcagatgttccaataaagccaaactggctggtaagtgagtcagggcagatttttaagccctttctttgctctgcagggcgccaactgtgcttgtgtaatctttatacaaagtaatgttgatctgtttcgttctctttttgcagtggcatttttcacttgaatgattctgcttcgtgcaacatcaggataagcacgcggaggcttctttgcattagaaagtaaacatacgtatgcacaattgcacaccacacagtggttcgtgcgggtggaggagattgtgcttttaaggaataatctctcctcttcagaaaactaaccgctttatatgtttatcgggcagattttctttggtggtgttttaatggcttgtttgtcagacatgttgcatattaaacaagcaaagcctggcttctcttaggatccaaggtcctctttattctctcctccatattggaaatcattcctgtcagctcgtgctctccaagctgcctggaagaactttggcatagttttcctaacctttcaaacagtaaaagcaaaactctcctttgataaaaaagccggaggactttggcatgtagccataaaggatgcaggcgactcggctgcgatctgacagaataatccacaaaacactgaaaagttctcgttaaggtccccagagtgggctgaggcactttgcttgtacttaacatatatcaactgtcacccggcggcagtcagtgttgaactgaacacaatggaacatccagatggtctaaacaaagcgaacaaatgttcactgctattaaaagctgtttacatcaacttccaggatttcatgtagtgaagtttatattgtgtcactactgaggtgcttagctctgtctgcattgaagagcggccttttaaaaactcctgttgcttatatgctcatgctctcagcacctagtggaaagtgaagttgaatagtaagttaggaaattgcataatgtcaactagtcatgcaatttcagacattttaagtgatttgcccccattctgttatattggtcatctattgcagcctcagctccagacccaataaacacaaagcagaccctcttctctgatgggggtgtgtcatggatggatggatgggtgggtgaccgctatctgcttctgcagacagggcctctgagtctcgttggctcctcactggggatgtttacgcagtaatggttttgttttcttcctctaagatgctgcgatatcagatcctgtcttattggggattaatatacatgagcgataaacccacactttttctgtcttcttcctttgacctctttatggcatctcttttacaaattccagacacactgcctacattgttaaagatttgttgttgccattaataacaatactcatataaaaggtgtccagcttatttatggttaaagaagaatctacaaaaactgtccctctttattaatcactaccaattcctcttggcataacatagctaaacgaataagtaaatactaaaagaatactatttattaatttgctctacaaatcatagtataacaaaatagaccctcatacatgcaagctcattaattaaaataattattttctatataaacatcattttaactcaattttatgttacatttgtgt

SEQ ID NO: 57724 - DNA, 1786 bp, Homo sapiens
tttcggaatggaaatgactacgaatatcccaccacatgttgctgtttaatgcaatatgtggttagatattgatctcccgaatcaagtcattaaaatgtgcagtttttgtttattggaatgaagcaattaaatggttcagttatgccagaccttaccttttctgatgaaaactattgatttcttgccacagctttataagcgacaatgtttttgattactcttgacaaacctccttggagtgttaattaaaatcgtaccagatgagcaggtgtgggagatcattagatcgcccggatcacacatctccacttcatattctgcagccttgcataatgaatagggcacaagaggggaaaaacaatatcttcatcagcagaattagcatcttcactttttaaaaaactaggtgacattacattttatagtacagatgctgttgaatcattggctcattcctaccactacatttgatcaaaatttgctttttatgttttgctttaattttttgagtatctaatgagttgctgttgttggttctgaggtagaaaatatttaaacacttatttacacagaaaattgaggaatcaaataaagctctttcactgcttatgcagatgaagtcatgaatattaatgtggttcatttaacacttaaaaaaatcccctcagtaagatagcctcgatgtgatttttaaaaatcttttactacttatttttgggacctgtataaaatatgattatttagaaatatgctctcttgaagactgcagtctgttgatttacaatagaactttttttgtggctattaaaagattgttacatttgaaaaatcaaaaatacttaaatgataatttataaaatcagaagcaaatgatattcagtttttgagaaatgaataatctttacattgatgccatttattatggaagatgatttaattattacttcattaatatgggcattgaaatggactttttttcgtttttgtataatgcaaggaatttagctaattggaattagatttaaaatcctctgtgaactggtgtctatagatagaaagacagcttgtatttctcagaatcataggacctgaagagaactttaagaggtcatctaatccaatcccctgctgccaaagtagctgtttaaaaatgcactatttttcattagtctggaattttaaaaaggattaatgaatttataaatgtattatttacaatgttctgatcatgtacgtctaactggagctgttagattttgaaataataagttgtatgtgtgtgttttaaaatattgacttcttctagtagaatgatttatggtttacaaagtgtttttccatttatattctttcatttgattaataaccaagttttacatctcaggaaatgtcttataattttttaaatgaaactctggctcagtttacccaactgacttagaaatatttatataatcaaattatttgatgttacattgttgtttcatagctgctattatggatagcttctagaaagcataaataaaccctaaattgttatttctatcttataggtgaatgttatttatgttttgtaggtgaaatataaagttcagatagagcttcaatccaattttctagtactaaaatctcatttcctatttctaacaagtcccacaaatactaattgtgctctaccaaccacttaagcaaaatattacaaataatatacatataactttgtagaatctcagaattctaatcttagaaactatatgtgctttgtatttctgcataacaagccacc

SEQ ID NO: 57725 - DNA, 1028 bp, Homo sapiens
attggtaggaataattagaatagtcatgcatttctttgtagaactcttaatgtgttttcattatgtgacgctgccctggatccccactggggtgttacataatgtatgttatttgcaccctattatcttgctaaaattggaaaaatctgaagcatatttcgttctaagcattttgggtaattattgtggacatgtagttgaatataacttatagatgaaaaaataggcatatgttgtgggtgcaagctcaagggttttttgtttgttttgttttgtttttttttttttttttactaacacggcgtgtgaatcttggagcccactgcaccagaccatggtgactctgacgttaacctcatcaggacccaggcctcctaactcatccagcaggccaggccaggcagtgactcttactgagcgccctttgcttacccaccttgcttaaagacaggtgggagaaggacagatgcgctgtgcaaaccaaagacaaaaagaataaaaggttctatatatcttcgttggaagagtctcatagcctagagcctgacaagacatttcttaggatggagaactcatggctgaattctagaaattaaggtctattttctacccatgcaaaatattgtgatatttttggacaattaatggaagcaattgtttatattttgaatgagagacagaaagagacagagagagagagagaacaagaatataggtttgtaaattatgaattaagtagaaatttccagtttcttaactctcatgatgtaatgatgaaatcatagtaacaagaggaattgaatgatttaaaggaatgtgaacaattggtacagtatctcgaaaatttttttttttttttttttttttgagatggagtcttgctctgttgcccaggctggagtgcagtggtgcaatctcggctcagggttcacaacattctcctgcctcagcctcctgagtagccaggactacaagcgcccgccaccacgcccagctaatttttttgtattttttttttagtagagaca

SEQ ID NO: 57726 - DNA, 1061 bp, Homo sapiens
aattgatattgttttcagaaaaaattcaacggtaaaaaattcaatagtatttctttgcagtgaaaattatcttatattagaattagcagctgtttagaagtagacagcagaagaatccagcaaaaatagcagacaccatgacttgtaaaatattcctaattttggccaggtgcagtggctcacacctgtaatcccagcactttgggaggctgaggcgggcggatcatgaggtcaggggttcgagaccagcctggccaatatggtgaaaccctgtctctaataaaaatacaaaaattagccgggcgtggtggcgggcacctgtaattcccactactcaggaggctgaggcagaagaattgcttgaacttgggaggtggaggttgcagtgagccgagattgtgccactgaactccagcctgggcaacagagcaagactctatctcaaaaaaaaaaaaaaaaaaaaaaagaaagaaagaaaatcctaattttaaaattgatttgttaaaaatgagtcaaaatcttatttttataggacaaacaggagaaagcaatcccttatttagttggtaattttagatatcatccaactatgaatttcatgtattcattccatggatatttttggctacctactgtgtaccaggggactgaggatagagtggggactgcatcagacttgtggtctttgccttcatgagtgtatgggaactagaggaagacagattaaaaaaaaaaaagtatgatgactattaagccaggagaagcagaggacatagtaggagaaggtcctggaagccttcaaaacataataaaaattactcataattctgttgttctaaccacacttaatttcttctctatctcttcttttttgcatttttttcctctttgcatgctcactgtttacactcttccagtcatggtgtaaggcttcctcggcattcattactgtggcttcattaccatggctaaataaatcccagctgttattcaccctggagcatgttacagagttgccaaagcgagaagcatctcccgtgtacatcaattttcagtggtgg

SEQ ID NO: 57727 - DNA, 1740 bp, Homo sapiens
aagcagttctcctgcctcagcctcccaagtagctgggactacaggcatgtgccaccatgcccagctaattttttgtatttttttagtagagatggggtttcaccatgttagccaggatggtctcaatctcctgacttcgtgatctgcctgcctcggcctcccaaagttgtgggattacaggcgtgagccaccgcacccggcctggtttgtaatttttaaagacagggtagggcactaagtgggagacagttagatacaaattggaagtggtgagggcatgtgccatatggatgtctggggaagaagctctgcagaggccctgagatgggtgtgtgcctggtgagttcacagaccagccaggaagtcagtgtggctggagtggagtgaatgatgggcagagtaatgggtgtgaggtcaaagcagttgtggggaggggaatatcaggttcagggaccttataggtcatggggcactctgagtgaagtgcagagaagagttatgacctgacttcacatttgtggaggcccattctgacgctatgctaagaatgcagctaaggggtcagagattgaagcagagtaccctgttaggaggttattggaagaatccaggtgagaaagggcagtggtttggatcagagggttggccagggaggcgtgagaaaggaaatggtaccgtggtactgcaattattacctaaaatcctatttcttttcaaagtggtgctacttgttgatggcatagggtggctccgatgttactgaaaatcatacccaaagaagatgatccatttcgctagtactgattgatcaataaaggattctttataccttagggttaaattacttgtttgttgaaacctctgcagctaaaggctccctctttggaaaatgttagttatttgagggcctgaaattgcacaatcagtttttgacttgccctgtcccttcgaacgagagagaaatacaaatgtagttacttgtgtatgcagttgtggtacctggtgttggaagctgtatgggggaggctgagaatgttgatcataactcactggctttgtaattaaactctctttttattaaagctgaaattcttaaaggcccctgcctgtgtgggactggaaattatttatcatagaaattgtctgctttgctataaaaatgttgatatattattctgttcataagatgtagacactgttttttaaaaaatatctctagctgtagatgtgcagacatcatatgaactttcttactaatgtcacatttattgagctctgtatgtgtgtgtgagactaatgtctcaacctttcttttaaaatttttgcttatttgttacaatgttggctgtggccttgtaaaaaaataaataaaataaaatgtttaagtatctgaagcaccgagtggatgtttcaaactcacaagagcggttagggatcaaaaagaagtatacaatataacatatccctttgccaagtccagtccatttcattccgtgtccctagcactccagtgaaggtagcagccatcagttaaataaacaagcatttctactgatggcagcagcctcagtatgcttacatccaccatgttactctctactgagggacttttgctgatagagccttagttgagattatctagagagttttttcttctatgtggagccaattaccatgtaacacatatgaaactacaacaaacagacattgaaatatattaaaaaagatttattttaaata

SEQ ID NO: 57728 - DNA, 1486 bp, Homo sapiens
gtaaagtatttctcttgagtttttttagaatatgaagaatatatatatatattcttcatatatatatgaagaatatatatatatatatgaagaatatatatatatatatatatatatatatatatatatatatataaaagagttttttttttctcatggttctgtgagctgagaagttcaagggcatggtgccagcttctggtgaggtctcacatgctgcgtcatgatgtggtggtggaggtcatgggagaagcagacatgtatgaagatggaaaaacctgacagacacccttgtttccctgagttctgtgagctgtcctagtaaattaatccaatgtgaggaaggggtcttgggaatcctcaagttctgctgattggtcagaagtacaggtaatacaacacagggcttgcaactggcatctggagagggagacagccttgtggaactgagctcctaaccagtaggagctcttaaccaggtaaagagtgtcagagttgagttaaattgtaggacactcagttagtgtcttctggagaattgcttgatgtgtggggaaaaccccacatacgttttggttatcagaggtgaaatatcttgtgttgagtgtatgagagtgggaaaaacagtttggtttttcttatctcttacacaagaggcacattaggagagccttgtgccttatgaatatgaagagtccctaaactgagtggaagaagtggttaaagaaggcaatcagggaggtgaggagttcatcctggataacagattgacaggacaaaggacgtgaggaagggtgttctatctatggaggaggtgaatggctcagagtcccacatggcacagaacaacatcaatggtgctgtcaggaatggacagccctgaagaggagaggctggttgggagaagcactgatttcatgttctaaggtgtgcaaacataagttaccctgtgtatgggcttcaaagagggtgtgacaagaggaaagaggtggtgccaggacctggcaggcccagtcctcacactttctgctgactattggggtaatgcctgctggagtcagaaagaaacctggagtgtctagggttccaaatcctggacaggttttagaaggattggtaggtcagattgccctttcacctctacatccatgttttcctgtggaagagctggtccggccctgggcagactggctcccatcccagtgaggtgagctccccgtgacctggaagacatgcttaacaggagagtctctgacctaattaagaggattttaatttaaatctgagtcttgaactgtttagtatgtaagaagaggcgttccaagatagaaaaaaacagtaaatggaagaggcacgcatttttcaagagaaaagtctgctgtaggggccattgccaagacaatacttatgttctcagatgtctgtgtgttaattgcatttttaaataggcttcaccttccagttttaaaataatacacattcacta

SEQ ID NO: 57729 - DNA, 1835 bp, Homo sapiens
ctttgaatcccagtcccaccatgagtacgaggaatgcatttaatctacctggcccttcgtttccttatctggtcagtgagtaaactattgcctccaaagtttacattgagaatcaaataagatttttgtaaggtgcttgacacagattttcaacaaatgcaagtcccctcattcctgtgatctcctttttcttgtgccctgtttgctcataacagttttccaaaatcgagtctattgagagtttgaaaaagcaggaattacgtgttttctatttgatgctttatatttatttatttatttatttatttatagagataggggtcttctgtgttgttcgggctggcctcaaactcctgggctgaagtgaccctcctgcctcaacccctgtagtaggtgggactacaggtgtgagccaccccacctggcttggtgctttatttttaagcacgttaacctttcagtagtatttaaaaagcaccttacccactgtgctgctattatatacaggcatctggagactgataggttaagtgaactgggggctcactatggaatattgtgcagtggttagaaccaacatattaggtctgcaaattataacatggatagatattaaaagcatagtacatagtgaagaaataaaaaatacaaagtggcatttaacttaataccatttatataggtaaaaaatttatgcaccctcctggaaatctaccctatagatgtaaaagccccagtatttatggattcacgtgcataaatatgcagctttatttgtagtgataaaaaaccgtgtgcaacctaaatgcccgtcagtagagggatggttgggtgaactgctgaacatccatctatcccatgaattactagacagctattaaaaaagaatgccagagatccggatctactgccctggaaggatgatcatgacatattcttagatgagaatagcaagccacagagctatggattacgaatccagttcattaaaccaaatctctctcctctctctctctctctctctcactttctctctctctgtctctctctctctctctctctctctctctctctctcacacacacacacatttctgtaactaccagtttaaaggattgagtgatcctgaagacgtgtggagagatagaccctgcccatgctgttagcagtggtcacctgctgggggtgcagggagataagaaaaaaagtctatcaaagactaaagaaaagaaaagctcattatagaaatgttaaaaatcaggacacaaatattctatcatggatattacttacaatgcgtaaacaatgaaaacgcagatggacaaggacctgattgtaacaggaataaaagtaatacttgggtaagaggattatgagcaaaaggaaaaatacatgaacacaagacagagatatccagacaaacaaaataaacattaaacaccttaggatagcagcctatgtgtgggaggagagaggatgggagtgagtaggaagatcaaaaggaaatttaaaaaatattaaagagaaggcacgtgtacagcccagtgacattgaatggaggtgggagtatgatgaactcaacactctgcacctaaggttaaaaaaagtcaaataagaactttcccctagagtagcttatgtaaagaacaacaatactagaacttacatagagcaagatgtaccctcgactttagggtccacttttccacagagcgtaattcaaggatgactgcggtgagccacgtccccagaggtagagtaactaaaatttagcaagagtctgagtaaggactagtaagtgtcattattattccatgcatgggaattcccagatc

SEQ ID NO: 57730 - DNA, 1068 bp, Homo sapiens
ttgtggctttacttacaggtagtttcaagttgatgaattttttcacagtcgtgtcttcctgttcacagtaagagttaggcagagaatatagatgagcatgcaagtttctcatttttcctgatgaacacacacatgatgaggactctactgaggctgctacaataggacgtaatacatgaggaagagaaagcccagaacaattgacatgcttttctaggcaattgagtggtaatccaggattatgatttctaaatgtctgctcagtgcttgcaatcacattcttgacagtagtggcatgtaacattgttaaagcaaacgtctaggaaggcttaatgcatgtgctttgtcatcagaattaaacccaaatttcttaaactgacattcaagtccctttgtgctttggtctcaatttaccttcctagactttttctctgatgctccatcataggatgtatgctacagtctcatcaaaatgcaccattcaaggttctctaaaccctaagctttatgtttaaatagtgcaaagtgcatctactccttatccatctgttgaagtctcttccattctaaatgactcagctggagtattgattactttctttacaaagcatctgatgctttccacctactgtgatttctgtcttctgaatctggatagtgttttaattgttatggtgtgtttagtttactgtcttaaagttacttatttctttttttaatgctcattgaggataataatgattatttatctttctgttttctacagcaccttgtttcttaattaagggaggggaacaatgtatgctgtgttttttttttaaattatttatttatttatttcaataagggcttaaattcaggggtaagaatatgctgtttgaatgaatgaattcattgatttatttatttaggaattaaatttggaacacattgagttttctcttagtaaaatagcatgattccagtgtccttaattacattaaaatatgcacatttatctttactttgatatttctatttctattttttaaaaatatatgctataaacagaagcattgtgataccacg

SEQ ID NO: 57731 - DNA, 2256 bp, Homo sapiens
gaagtgggaggattgtttgagcccaagagtttgaggctgcggtgagccctgatcatgttatcgcactgcagcctaggcgacagagcaagacctcgtttcaaaaaaaaaacaaaaaaaaaacacccaaaccccacaaaacccaaaaacaacacacacacacacacacacacacacacacatattatggagcaccctacatgtacatgtaccagatactgtgctagacacaagtgaatctgctctgattaaaatcaatcccagtgtcatagaactttaagttggaaaaacacacagttaagtaaataattaagcaaatcattccaggtgtgccaagtgctgtgcaggcaaagtacagagtgctatgggagcaagtagtagggaccacacctgttcttatgagagagtggccagggccagctttgacagacaagatggacaaggtggacagataggagttagccaggtaaagagagaggatgagttagcagaggaagtcgagtgtatggcagttgagatgtatgaagaactcaggagggggtcagatatggttgcaggtgagatattgcctgagaagctgctgagagatgagacgacagaagtcagatcaatcatggtcttacaggctctcttgaggagttagatcttcatgccaagagcaattggaagccactgaagactttgaaaccaacaatgaccagattcatattgtatgataagatttgtattataaaaattgtgattttggcagtggaatggagaatgggttggaaggggtcacgagtaaaggagactagttagcagcccatggttgctgaggtccaggtgagatatgaagggggcctggaccagggtggtgacactggatgaggaagacttaagagtcaagatataccatattaccttgatcctgaaatgtaagtatgtttcatgtttttatctctaaaatggggataaggcttagaattggtgatactgattctttcttagagatacgagtgacaatggtgcatctaacaatccgtggcctgttgttagatgaaatttggtgtttgggagacaaaagctgcaggacttgctggtgtcattgagctcaatgggtcgggggcttgagcagctgaatgaatggtagaactgcaggttctgacagagaaaaggctttatgggaacagttttagtctttagccctaaaaaaaaaaaacaaaaaaaaaaaacaaaaaaacatggcaggccgggtgcagtggctcatgcctgtaatcccagcacttcaggaggccgaggcaggcggatcacgaggtcaggagatcgagaccatcctggctaacacggtgaaaccccgtctctactaaaaatacaaaaaaattagccaggcgtggtggcacacatctgtagtcccagctacttgggaggctgaggcaggagaatcacttgaacccaggaggtggaggttgcggtgagccgagactgcaccactgcactccagcctgggtgacagagcgagactccatctcaaaaaacagaaacaaaaacaaaaacaaaaaaaccatggcaaaggccaaactagaaaagttattagttaatatgtgccagaagttgagttaccatttttttttttaagaggtggggtctcactatgcttcccaggctggtctcaaactcctgggctcaagcaaccctcttgcctcagctgaggctacaggctcatgcccctgctctcagcttgagttgccaattttaaaggttgtgaaataggatatctaggttttaattgttgatattaattgttgatactaaactgttgtgttcgttttatgaaatactgttttgttaattgctgaaattaaactggctttagggacaaatgaaccatctcccagtttgatctcttggtccttggtcggcagagctcacccttttaaggtggcatatttacattccctgccatcttttagcatccctttagcttcaattttcctgtctcttgaggacagaatagctttaaattgtaaatgactgacttcatggtgatactaaatatttgttgtgctggtgtcttcatggctcaaatgttctggaatgttctttttttctttttttaagataccgggtctcactatgttgtccagctggtctctgaacttctgggctcaaagcatcctccatcctcagcctctcgagtagctgagtttataggtaggggagccacctcacctggagtcctattttttactgcctcttgacaaagcaaccaagtttgac

SEQ ID NO: 57732 - DNA, 1049 bp, Homo sapiens
acaggaccactgaccccctcttgcattctctcaccatttagtgtctgctgtgagctgggcgctctgtagtgtgtctgtgcatatgtgcgtggatgggacagggatctagacattgtaaaaaagctgcattgtaaagaactcttgggctcaggcaatctgcccttcttggcctttcaatgtgctgggattactggcgtgaaccactgcgcccagcctggaaaacctcttttaactacacattttattttctggtcactaaaaagtaacctaagaccaaaaaggcaacagacaaacctagaacacattataagaaaatgcattttataacttttttaaaatgcatttaggacaacaaattggtgaaaatataaggaagcactgaaaacaatgcatattttcaggcgcaatttaaaataaggatctcattaagattcatgtcccaagaacatttttatttctaaaataggcttggttcagctgaggctttttatgtataatttaacaacggaaaccataacaacaataatgtatggataggaagagtttcttctcttgaatgaacaaattaggtcatcatcaagcagttttatttaatgggaatcccccgtgaggtattcacatagtgagaaatagttcttctccctttagagatgaacgctgaaaagaacattccactccatttcacacaagagtggaagggtgcagtgaaaattgggaacgtgttaattcctgacagtgatgctggagtgcgtccgccaatccagctgtcagcgctgttaggagcacggccgagcctgcagccactacgttctgtacttgtgctaggtccgagcgtttgaagaaaagatagcagtttctcccttgctccctgctccgtggttccagagcaggtctctgatttggagcttattaatagctttccataataagatcatcgataaaattctgagcacccagtgcatctacagtgtaagaattcttaccagtagggtgacagcacaaaggaaactgaggttctaattttgactccccacgggcgataggcatct

SEQ ID NO: 57733 - DNA, 1026 bp, Homo sapiens
aagtcaaacatccaactttaaaataattatagctgggcattgtggctatatcccagcactttgggaggccaaggcaggtgtatcacaaggtcaggggattgagaccatcctggctaacacggtgaaatcccgtctctactgaaaatacaaaaaattagtagagtgtggtggcacacgcctttagtcccagctactcgggaggctgaggcagaattgcttgaacccaggagccggaggctgcagtgaattgagatcatggcactgcactttagcgtgggcgacagcgagactctgtctcaaaaacaaacaaaacaatcactagatgggcttagatgagacagattttgcctattatttgtattcctttagaaagtttccataaaattcataattattaggtaacagaaagcatgtatgcacacacaacttcacagtttcaggctattctatgtgggagaagatgatagatatgaagggcctggtggcatttgacaaacagaagcaatgcaaattttgtgggtggaatacaatttgagaactatttgccagcttgttttggttcatttttcatagtccagttcaatctgtgaagttcccttgaaatgtaagataatctcctggggtgaaacaggaacaaagtgtttgcattatgagtccagcttctctcagataattagtaactttagaagggccatcagttgatcaattaattaatcaatcaattattacttatttggacatctatttattatctagttctctgctaagtgttgtgaggaatatgggagaaatttaatgcataatctcatacttgcatccatgttaccttctgtgccttcatatgtggggtagggagaaggaagtgtgctataggaagccatggataggcaggggtgtcaaacggcaattttttaggtgttttaacataaacacttctgccgggtgcagtggctcgcgcctgtaatcccagcactttgggaggctgaggcgggctgatatcttaaggccaggagttcgagaccagca

SEQ ID NO: 57734 - DNA, 1840 bp, Homo sapiens
ttgaaccgggaccccagaggcagaggttgcagtgagccaagatcacgccactgcactccagcctgggctacagagtgagactctgtctcaaaaaaaaaaaaaacacaaaaaacacacacacacacacaaaacagattctgggtcttaatatggctgatgacaataaaatgtctcaagatagatgtatttgtttaatggtatatattatgtgccattagtaattcttagtgatgaaattaagcctgtgcttaaatcttaaacaagtcaagcatccgtccttaaaacacttggaggcagctgacagctctgtgtaacctgtgctgcaaaaatattcataggaacacagaagacatttctataagctaaacaaataaacagaccacgtgcagcagacccaccgagttacttgatccaaaactcaactgccagaggatttaacatatcaacaatagaggtgtcaaaagcataatgtttctgttggaaataccacccagaattcccagagagcctttccaattgattaactttgaaacaaaatccaaacattcttggctgcagggaaaagtttatcggtttttttttcccccaacacactactaattttgaactaaaaatcatttgatgtcaaaatttttcttctgaataagatgctattggtatcttatattctaaccatcctcccagaatgtccagtttcttccattttacagaatttttgtcacaacacgaaaaatgaggttgctctgctgaatttgtagtatagaaagtgggacatggatgggcttcaagacgtccaaatttatctacaaaaaactattgtgtatgtgttttttttttctggagagaggattcaggctttcataatattctgcaggctgtgagctcctctttccccatttaagaagcattcatgggccctaacataaatacaataggaatataatttgcagcaagaattctcctttcctctccctgagatgtatttccttataaggccgagaggtggcagcataaacaccagcctgtagcagccccattttcctgacggtggaaaacttttaaaggtgaaatttatctatgtgagatcctgtcaataaccttgatttggcttggatagattgtggacataatgtcccatcaaactgccctaaaatattcgtagaggagtagcgtgagattgaatcagcagtcctggactttgaggtcacaaaaattgaaagacaacgttttgttagaagttgagcaccatggagagaaaagcacagagcttgattattggttgactcagaggcatttacatattccatatcaaatcaaatataatttcttgagtggcgattagtattttattttactacatagtatcattgtttaaatagtatataagttaccctaagagattacttattctgaataggaaaatacttttgtttcttggaaccaacagccaaaagatctctttcagttcttgtccttaggtgactgagaataacagaaaaaggaagttgttttgcacatgtagattctgtggatttttattttgataattaagtatcactttcatttcctgtgaaagtatgagaagcatggatgcagaggcatgctacaatttttatgcacactggatagtttttttcttctttaaacatgtctagccaattcaaatatgagaattttacgtagctggtcaggcacggtggctcacacctgtaatcccagtactttggggagttgaggtgggcagatcacttgaagtcaggagttagagaccagcctggccaacaagttgaaaccccatctctaataaaattacaaaaattagccaggcgtggtggtatat

SEQ ID NO: 57735 - DNA, 1163 bp, Homo sapiens
tgacctcaggtgatctgcccaccttggcctcccaaagtgctgggattacaggcgtgagacaccgtgcctggccccatctcagtctcttgagtaaccaggactataggtgtgtgttaccatgcctagtgaatttttgtagagaacagggtctcgccatgttgctgaggctggcctcaagtgatcctaccgcctcggcctcccaaagtgctgggatcacgggtgtgagctaccacgcccggcccattttattacttgtatagtaccactttgtgtttatgaacaaatgcatttaaaatcatcttttggaacaaactgtgtcactaaagaaacggctactctactgtgagtataactgcttctaaaataccgatttatagacagacttgaataagccatcattcattctttgtatgattaatttataaaatgcagagtttctattaatggaaaagcaaactcaagcatcacgtggataatatcaataatatgcatttgtaattacgtactgtagataactctagaagctacattttattatgttaataaaacgtaaaaactcctgaagcaacccagactgggcagcagcaacactattagggctcgctgcttcatcagttaggagtctgttcaattgttcttagctggtagtaacactcacagggcactgagaaaccttttttctcccataaaataatgatgatctactttccaagataaaatattgcatgttgatggaataatatgagagttatgagagtagcagcaaagataaaaatgaaacttaatgaggacaaaaaggaggatgggagaactgcttgttcctctaggcagaccaagtgaccaggttctgtcactgtacatgtaaaaaaattgtttattctgttaacatgcagcagatatttgggagaactcataaagagagtgctaattttatgaaagggaagtgtaaggggtttcaagtgttactgggctaataccttggtcacactgacaggcaaaaggaacagtgtgttggatgaactggaccaatcgatatctctttaggtatctgccaatcatgccattagagtggaagactgcatggattagttcaagcagtttctcagatgctccaacgactcagccagacacttttccctaggtaggaaatgggaagaatgact

SEQ ID NO: 57736 - DNA, 1585 bp, Homo sapiens
ctcctatgatattttaaaatgtacaaagggaaaaaaattaaaaattagaggaatattaaatatagctatgtttcttagctgaagtgtataccaaaagtgtgatggaggtcctgtaatatcaccccttaatttgttccgttacatggttttaaccttgactttgctaaataatctctttaaacaggacaatgaattactgtggtcattaggttggtgtcatttgtcatgatcggtgtaggcttgactcctgaatatagaaggttgttaaataactatataattatcaatgatccaggccaaatttacatgtgtgttttattcatgttttttttttttttttggtcaagtgtcaagctccaggaagggccctgaacatctcgagagggtgaaagagtgtgctacagacttttagaggactgggggtggccatgtcctaagaaacacgttcttggccagtggagatttctgagaagagatcaaggctaggcaaggaagggagtgtgcataagggtagggaaaggtagcagaattggaggtgagataaaattttggcatttgagaagagaagagagaagggaagtattggtagaaaattaacagtaattataacacagggaagggacttggaaggcattccattttgaagtaggtgaggggatagagttttcacagtggcattctgtatgtcagcctggggttcaagaaccaggtctgccagatcatagctgtgatacttttggcaaaccttcttagtgtcagagttttaatttgtaaaatggagataaaactgaggtggcttccctggaagtgaattcaataaactacttgaaagtgcctagcatggttgccaacacacagcaactatccaatcagtactggtggccttttctcccctcttcattctgaaatgaggatgtcaacctcttccttctttcagattttatgaacctgaagatgtccattctattcttgtgaaagggagtattctagaagtttttttcaccttcactaaaccaaaaattcttattctagtttcaattactccagttatttggtttaagaaatccagactagaacctagtgtcaatgaattttagagataatttgcattgtggttttgtaattaacattgattaatattacaagagaatatgggagatgagatgaataagtttctcacttgggctcttgtttatttattcatttatctatttgtttatgcatttggtcattctcgaaagattcaatttgatagaaaaagaaggtttcctgaagcaatatgttgcaataagatctttgctctcaagtaatttaaaatctagtaaagaagaaaaagatgcctacaaaaagtttaagcctggtggcaaaggaaaaagaatatggtcaggagggttatgcagaaacattgaagtgaccattgagaagttgccatctttgagacgcaggatggaggtgagcgttctgtgataggaatgaggaccaggagagctgtgaaggatgttccaattattgtggggagcactgtcctgagaggcaccctccagggcaagagtgccaatacatcatgccagcaacagatggagtt

SEQ ID NO: 57737 - DNA, 4845 bp, Homo sapiens
atgcttgtagttccagctactcagaaggctgaagtgggaggattgctcgagcctaggaggtcaacagtgtagtaagctgtgtccgtgccactgctctcctgcctgggtgacagagagagaccctgtctcaagaaaaatgtactcttttgcacaagttttagtgtacatttaacatttttcataaatttaaatatcagattttgaaaatcgataataaatctttaatatcttttgtttaaggattctcaaccaggagtgattttgctccccaggagacattaggcaaagtcttgtggtcacagctgtgtgtgtgtgtgtgtgtgtgtgtgtgcgcatctgcgtgcagagatcaaggatactggtcaagatcctataatgcactagacagcaaactataacacaaattatccagccccaaatgtcaacagtgctgaggctaagaaactgatttaaatgtgtccagaggaatatgaatatcatgggattttgcacttatcagggccaatttaaaaaatacataacctggggccgggcatggtggctcaagtctgtcttcccagaactttgggaggctgaggcgggtggatcacctgaggttgggagtttgagaccagcctgaccaacatggagaaaccccatctctattaaaaatacaaaattaaccgggtgtggtggtgcatgcctgtaatcccagctattcgggaggctgaggcagaagaattgcttgaacttgggaggccaaggttgcggtgacctgagatcgtgccattgcaccttagctggggcgatgagggcaaaactgtctcaaaaataaataaataaataaataaataagaataaaaataaaaaaataaaaaaattacacgactcttccatagcattgttcctttttttccttggaactgtatttccattctctttccctcatagaattttaccttgatgaaattcatccttatgcttgaaagcccttattaactaccacgtaattctctgctacaaaactaggtatataaattgaaatttcttttcaaatatcctataaggttctaaatgttaacatttttcctctgtattgaggtagcactggaaattgatcaaaacaccatatatatattacaacctatttgatacatttgatagatgagttttaaacacaaaaatcttttggttgaaatgcatctcttaacgggatgaattggggagggaatttcagggacctggtacataggctttgggtgaagtggaggtttatattttctcaggtggatcaattttagaaaaagattttgaaatgcatttccttaaaactatttgtgcccacgtaccctctggaaagtcttcgtgtacccacagagatactcacatatcagcctgatttggctctctttggtttctgagtaacttagcaacgcttttcttttaatgattcagacagttttgcatgcagctaatgcatgttaaagaaagctaagccagtgtatattataaatactttataagtcaagcaagtagaatttctcacaggagtcataattacagtggaggcggcataccattgtagtgagagttctggagtcaggcacagtatttgttcctgttcttcatcactactggctctttgacttggggcaaatgattacctgctctggtctgtagctttctcacctatgataaacaggggtcaataatagattcctcaactggttattgtaagattcaaatgagtcatgcatacaaagcacttagtacagtgagtgcccaacatatcctaagcactcaataaatactagctgttgttatctttagacattatagggtttatctcaagggatgggcactagaaaagcaatggaataggcatttcagtcctttttcttatatcatggctcttttttgcacaatttactgtacccaacttccctgatgttatggacagcagtgggtctttgatattcccattgatcatgagctctggaagcccaaggctgtaaggctgctgcaaggcacctgctcccaacagcaatgtgctctcattttctggtcagcctcacaaggacaaacgtaaactcttgaacacctgggagagtgagcctctgaatgcctgaagttatttttaatattctcagaatgctgtctgggagttgcatgatgtagatgaacggcactcatttgaggtctcctatagggtcacttggacaaaacatgtaaaggcatgacttcaagtaactggaccaaagtaccttaatccttgtatcgacaaccatcctattgggttacacagttttaatcccagaggagttgtctcttgacattaaactgtccaaacagtatttatatctgcggctgccctgcaagatcacttaaccctgcacagccgtttaaaagtagttaatgacagaaccggcatgacttgccccttatgaatgatcacataagttcgacctgtgctgtcatggtttatggaggaggcagtttgtccatagcctgcttcaaccacagcaggtaatttgaaatgaaatgagacagtttctacaagcagattgatttgggaatcttgcctgttcttccctttgacccttgacaagttgacactacaaagattgtgactttaaaaaatgattgggtgcaaatacatttaggtagatgatttactgtgtgctgaagcaaggacagtgcgtttagagcgatgctgtgagggaaggtaattgtaaactttaacaactcatgttttatgtttctgtatcttattaattatcctactaggtgaatccactgataatccttgatcaagtagtttatattcctggtaagagaccagagacccaatttcaggattaagagatatagcatttatgataaacttattaaaagttacagattcagttagttattttggccgtaaatcacagcttgtatataaggataagaagtcgcgatctctttcatggattctgttctttttctttttctttttcttttggttttcctaaatatagttgaacatatacaggagaaaaacattgtgattaaaaagataatcagcttgatttttgataaccaaagagttaccagggatatctgaaaaaaaaagaaattcccaactatgaattcacacatgttattttctaatttagattttcacaccaaataatatgtaataagtaaacacgtattttccatattatttctattctattcttctggtgcagtttttcttagaagtgaggttttgtcatgaattggtgctaccataagtagaattttaaaattgactgtcttccaaaacaaaaataaaaaagacagtaaggtaatttttaaaaaactgtttccttagttcacagtgatataatatttatgctgagattgttttaaatgaactctgtgatagaattgttgatttattaatatttggatttgggttgatgttccttttacatttgctgtaggaaatacccacgacatgaggtttgtaagcttttgtgtttttctctattctaaccactctgcttgaaatataatttgaagatgctagtaaaaaatataacaaattccctattggtctccgtttaaattatttactacccttttgagccatatcttcattgaactatgttaaaagtattttgctgtaatgtttctttatgttgtccatcgggtttaatagacgtgccatttaataagctctctacctgtaaggctagactatttgacctctatgccctgccactggtagacatagtataagattgctttgtgaaataaagctgtcggtaacatcaccaaaataaaaaatgatcgtattccaatactctctgctgagtactatgacagcactgaaatatggaataaaattgaaagtagattagttttgggttttaagtcatgttttgacaagaaataagagaggagaacatatctttgaacttttagttttaaagttttttaatgaaaatatttatcattttgtaaggttccttctttctttatcacatctaggctgtataaccttaaaacaattcgttctcttattgtgagggatataaatactcttctatctttatattaaatatcataaaggagacacgcacagtgagagacggcttgacacttacaagttaaaaattgtcacactaataaaaaagcttattgaagaggttggaaaatcagtcattaataagctatatatttttagggtatgtaaagcatgtaaatactgtagacaagcaggctgcttttgctgtattttttgctcactttttggaatggtttgaatctgaagaggaagaataaatatgtcagagtggagaaagccttgctggtgattgctttcaacctaaaggaatttgaaaattgctgcgacgtgcagattgtgaaattatttcttttgcctctgtggttacatattaatcagctgaaatcatgacaaataaatggcattgatggcccacagggagtgtgggttgagtacagtaacccttccctccaggagtttgcaaacatcctatgtcaccaaatgggagattgtggagctcttaaaaatgcagtgccttcttcccttcattgcatatgcggagtgattacacagggggcaggttaaaccacactccttgttcatctcagaatgaacttttctttcttcatattctttccctttaaaacacaggatacaaattctctgcacaggtcactgggctgcccttgctttctccagtgtgttcaggggccctcagcccataggggcaaagctcactgacgggagccttctaaccctggtgtcattttaaaaaattgaaattgaccccccaccccgctctccaccaataaatgtgaattacatgatag

SEQ ID NO: 57738 - DNA, 2029 bp, Homo sapiens
tcaagtgattctactgcctcagcctcccaagtagctgggactacaggcccagctaatttttgtatttttagtagagacggggtttcatcgtgttagccaggatggtctcaatctcctgacctcatgatccacccacctcagcctcccaaagtgctgggattacaggcatgagccaccgcacctggcgtttgaatctttacaatcataagctctagagataactactaggatttgaatattgactcttaccttgataattttatgtccttggacagagttactatgattaatttcatcatccataaattattatgctaaattgtgaggattaaatgagataatatatgtgatatgactagcacagtcctcagaacatagtaaaaatctcagtcaaaattagcttccatgaagaacagttgttgagctccatacagagtagtgtatcattactactcatgttaccatgaataacatttgttgagctccctacatagtaatgtatcgtgtactttaaacacattacctaggtcggttgcagtggctcacacctgtaattccagcactttgggaggttgaagcaggaggattgcttgagcccaggagttggagaccagcctgggcaacataggaagacccctcatctctacaaaaaatacaaaagttagcaggtattgtggcacatgcctgtagtcccagctacttgggaggctgaggtgggaagattcattgagcttgggaggtcaaggctgcagtgagccataatcgtgccactgcactccagcctgggcgacagagtgggaccctgtttcaaataaataaaattaatgtattagctaatttcatacaatggactagatatttccatcataaatggaggaaactgaggctcagggattccataatttgccttgttggctggtgagaggtacactagaatttatgttcccataagcctggctgcatttgatggctcttccaccaccccaggctgctttgtctgaaccgctcctgtatccccagagcctagaacgctgcctaccactcaggcgcccaccaagtatgtgttggctgactgcatgaatgcttcctgtctcttctcaccatgacggttcttttgttcagtgtgttgggcatttgagtatctggcccgcagtgtcggacactgcactcattagtatgctgcttcttctctttaagcctttgtttgtgtgttgccaatcccctggctagacggggaattctcgggccaggattgccttgtattcactaatgcaggggactaagctccagcatgttggagcccagaaagcactttccagaaaaagattctttagaacatccaaggatggagtatcctgactttttttttcttttaaacattcagatatcaaatgcacacttggctagctaatctgtcttaactaggatcaaatgtatgaaactgtcttcacactggcagctgagccaaaaacgaatatttggcatgcttaaaacaaccgttgcctgcttttgtttttgaaggctgtatatttcagcagaaagagagctggacttggggcatgagtcacttaacttcttgggctctccttccttccttccttccttccttctttatttatttatttatttatttatttatttatttatttatttatttatttattgagacagagttttgctcttgttgcccaggctggtgtacaatggcgtgatctcggcttgctgcgacctctgcctcctgggttcaagcgattctcctacctcagccttccaagtagctggaattacaggcatgcaccaccatgcttgtctaattttgtatttttagtagagacgggatttctctatgtttgtcaggctggtctcgaactcctgacctcaggtgatctgcctgcctcggcctcccaaagtgctgggattacaggcgtgagccaccatgcctggacttccttcctcatttataaagccagggtgataatgtatgctccagtaacccaaagcttggtgaggtcagaagatacagactatt

SEQ ID NO: 57739 - DNA, 1125 bp, Homo sapiens
cacagagtttccttccatgtgctaccaggtgcaccaccctccagacacctccacacatccaggaccccagaagctctcctagccctgtcctttgagtttttacagaggcttcactacaaagacacaattgattacatcattggccattagtgaataactcagccatcagccctctctctccccctccctggaggtgaaggtggggtggagatagaagttccaaccatccaatcacatggttggttcccttggcaaccagccccctttgggaggctaccagagcccccaaccatcagtcatctcattagcatacaaaaatacttatccctttggagattccaagagttttaggagctgtgtgccaggaaactgggacaagaaccaaatacatatttcatacataaatcacacatcacaagggtctgtggcccattcatgaatatgtagctcctcatccatcaactactctttggtggcccagccttcctaacactttacaggttttgggaaatagtttaggaatttttctccacaagaggtctgctctcacctaggacttagatcccaaatattgaacaatcaatatggtgcaggcatcaaccagtctgcgcacaggacatgggccatggtataatgcagcaggttctgaattccatcccccaccccaccaccccaccaccacaactccccaccatcaggctcaatgctgtcgttgctggaacatgaagtctcctggtcctgggattgaggttaaggaggcaatgaccatgggagggcatgttagggtatcgactatttaccaaccgatatagaagtattttattttctatttatttatttaatttatttttaagatgaagttttgtgcttgttgcccaggctagggtgcaatggcacaatctcggctcactgcaacctccgcctcctgggttcaagcgattctcatgcctcagcctcccaagtagctgggattacagttgcccaccaccatgcctggctaactttttgtattttcagtagagatgaggtatcaccatgttggccaggctggtcttgaactcttggcctcaggtgaaccgcctgccttggcctcccaaagtgctgggattacaggcgtgagccacc

SEQ ID NO: 57740 - DNA, 1045 bp, Homo sapiens
aacacgtttgtgatttcagagcagtctgtgtcttgtgtcaattcattgctgcttctaggctaggaagggaaaagggttgccatatttccagtgatgaaagaactttgttaggaaagatgttcagattaataacacaaaattagattggagttttttgagagcctttcaattattcagcagtgatgtctcagtaaaagtggaagtaaactgggaccatgtaaacctttctcaagtgttaatgtttcacatattttagtttgtttagtcttttacatattgttcaaaccattaagttagacctcagaatataaagcatgtttattttctaatgataaacgaaacacatatttatgtgactaagatgtgggaattgtagccctgggctgtggttatgtaaacatgggaatgtgtggaatttactcatagtttacaggaagtaaggtgtcattgttcggatagtttcctgtcataaaaagttatctaatttgattttaaaatagtaaccttagatgttgtttttctactcagaaattcataggaaacccaaaattgtatgttttttctttttcttttctctgtttttgtgaaagaattttctgtattttccaccaaaaagaaattagatgtttctgttcctggtagtgctcaatataatgatgtatatatttaccacatgcacatgtgtaggtgacctgacattaaacatagggaaactctgtgttgatttcagtgatgagctacatgtacacaaaaccatcctccttacttggtcatttctacaacttccagtcctgagaactggtcactccagcaggtttaaagtaataatctgtggctgtcaaatgattttaaatgaagcatttttggctcgtacttcgttataagcttgcatttaaaagcaaaggcaggccggaagcggtggctcatgcctgtaatcccagcacttggggaggccgaggcaagtggatcacctgaggtcagaagttcgagaccagccggatcaacatggtgaaacctcatctctcctaaaaatacaaaaaagtta

SEQ ID NO: 57741 - DNA, 1062 bp, Homo sapiens
tgagggtgctcaaaacctgttagtcaatttgaccaagaaacttctgaaactgtaacatgattgactctacagagacagtatctgaagggtcttttaggatggtcccaattgcttctattaatatctcggccagccgggcacggtgggtcacgcctgtaatcccaacactttgggaggcccaggtgggcggatcacgaggtcaggagttcgagaccagcctgaccaacatggtgaaaccctgtctctacttaaaaaatacaaaaattagccggacgtagtggtgcatacctgtattctcagctatttgggagcctgaggcaggagaatcgcttgaacccgggaggcggaggttgcagtgagtcgagcgagccactgcattccaggctgggcgacagagtgagactctgtctcaaaaaaaaaaaaaaaaaaaaaaaaaaaaatcttggccatattttaatgtaggatccatacataaattttaacgcccaattttaaattatagtcagtagcaaacatgttatttttgggaagtctcttttctgacttgttaaagcaagtatgcatgggcctataattctacaacacaaattgcgtttttgttttgatgagctctgttcctttattcatacattcattcattcaacaaatatttattcagaacttactaggtcctggggatactacagtgaacaataaacagcaatctatgctctcatgtgatagcctctggttataccgcttgattccttttctttttctttctgactcatatactgctactttctgacttatatactactttcttactttctgacttatatactgctaatatcactgcttaacaccaatttgcgaagataacatttatgtgacgtaaatagatctattttatgttctgctgttcttaacacttaaacattattattgcgagtgatttttgtattcttttggatgtgggtaatttaacttttattaaggtaattttagtatgttagatgctcaactcatttggccattagagtgctcttctttatttaggagcgtgtaactacttgtctctga

SEQ ID NO: 57742 - DNA, 1080 bp, Homo sapiens
caggacttcccatgacatttaatgatggaaactatttttctgatttccaaaccaaaactaacatgcatcttataatttaataagaaatgatcacccgattatattcagtcatatactcacctgaaccaatactccatctggaactagaatacaaaaatactttgaatggtctgaaagtactatttgttaaaaatgttcagtactgaaatatcagttggaattttgccaggtgaatgtgagagcagaaattcaatatatgtatagaattgcctttcataaggcagttattttgtttataagccatgtatagttatttagatgatcaagtttatctgtactaaacttgatcatctaaataactgcatggctgatcaagtttaatacagataaactttatcatctaaataactgcatggcttataaagtatacatgtatttgtgttttaataaaatgttcagaacacaaattactggtggctgaatatataaaatacactttgagaggaatactagcaagagcagatggtggggacattgctttgcaataaataagattaatgtgtttagagctattaagattgtgaagagaaaggcaagaagtttagcctatcaataggaagcacaccagtgcctgaacctgacttgagttttgaaaaagctcatttcttaaaaacattcttagaaaattgggcttcacggaatagatatgtttggaaatcttggttcacatatgtataaggaatatccagtttctccctgttttcaagaatagccacttcacatcttttaggtggctctcaaatgtcggacaggagcagttgttagggtttttcaaatgtaagtcagaactgttgtttggagaaaactgaattttttcatttcgtaagattataatttctagaaatatctattaaaaggtggaaattacattaaagatagtaagtatattgtgagtatgtgaaatgaattttagaaatgatcacctctgtattattttaatagagtggaacaaaaatgttttaaatggttcttactttggaaatggatatcttaaaaattctgatattgccaccatttgtt

SEQ ID NO: 57743 - DNA, 1466 bp, Homo sapiens
gcaagccagtctacatgctcacaagacctcctccaactttcaaataaattcttagttatggaccctaggttaagaatttagaagacatcctaaatattgaaattttattgtatagataagtaggaagttaaaacctaagaaaatcatcaaatattaggggtgcttctgaattgatttatctgcagtttaactacttagcatttatggaaggcagtttacaaaaagccatagaggtttatgataagctggtcaagtaattagttgaatagattttataattctttgcacttctcatctgataataactaccgtataggtagtagacttgacagtagttcagtattttctgttaacagagttgtgtttataacaattacagtcaactactgtggttcttcagttgcacagagtagcttttggcaaaagtgaaaaaacctacaaccaacctacatctttttacctaggaggaataatattgagttcttaataacagactatacttcattatagcctgtgtgtgtgactagctaggttgaaatgtactgtgcatgataagccttgtaaagcaagttatatgttgaaattagtatctttggaagtgtagatagatagctggagaaaaatgtaatgatttggagcttgtactccagaggggaaaatgtatttcccgtgtttatagagaatagaagaataatgggcaggggttgaatgtaaagggaattaagggatatcttagaatggagaagaaaaggaatagattttgaaggaaaatagcatacacattccgtactcagtcacatttggaaaatagggaatataaaatttactccaatattaactgttaaaagggtaaagaggatctttagttggaaaactgttctgattttgttgttctttcagttcagacttatttcagtactttggtttgttatgaactttagaactattgtggagcaattaataaataactcttaacagacaactgtggtgaatttctgtttacatgtccagtctaggaaaaagatggctaatctttgtgtttatgtattaaatcttttctttggtaactcataaaatcacacagtttccatcggttgttaagaattttaaataacttttttcttactaaaacaattggcagtcaaaattgttatatgtgatcaaatggatatgaacagaatttaggaattaagaccaaagctctgaatccacattctttacccaccaaaaaataaatgtacaaatacagtgtacaaaggcatgttgtgttacgacaaaggaaaagtgtgagtggttataaaaagttggaaacccttaattatttttttgttttgctttgaaaaatgtttgcaattttaacttgtgactagttcatttctttattctacgttagataagaatcttataagcattatctattggaaagttaaagttttaaatgggagctaaagttttaaatactgagt

SEQ ID NO: 57744 - DNA, 5523 bp, Homo sapiens
gttggagatggagaaggtgccatcctctccccaagtcagaaacctcatatctgtgatcactgtagtgctgctttccgaagctcctatcacctgcggagacatgtcctcattcatacaggagaaagacctttccagtgcagccagtgtagtatgggtttcattcagaaatacctactacagagacatgagaaaattcatagtagagagaagccatttggatgtgatcagtgcagcatgaagtttattcagaagtaccatatggagagacacaagaggacacatagtggagaaaagccatataagtgtgacacttgccaacagtatttttcaaggactgatagattgttgaagcacaggcgcacatgtggtgaagtcatagttaaaggagccactagtgcagaacctgggtcatcaaaccataccaatatgggtaatctggctgtgttgtctcagggaaatacaagttcttcaaggagaaaaacaaagtcaaaaagcatagctattgaaaataaggaacagaagaccggtaaaacaaatgaatcgcaaatttcaaataatataaacatgcagagttactcagtagaaatgcctaccgtgtcttccagtggaggcataattggcactggaatagatgaactgcagaagagggtgccaaaattgatctttaagaaaggaagcagaaagaatacagataaaaactaccttaactttgtgtcaccattaccagacatagtaggacagaaatccttgtctggaaaaccaagtggctcacttggcatagtatcaaataatagtgtggagaccattggtcttctccaaagtacaagtggcaaacaaggtcagataagtagtaattatgatgatgccatgcagttttcaaagaaaagaagatatttaccaactgccagcagcaacagtgccttttctataaacgtaggacacatggtctcccaacagtctgtcattcagtctgcaggtgtcagtgttttggacaatgaggcaccattgtcacttattgactcctcagctctaaatgctgaaattaaatcttgtcatgacaagtctggaattcctgatgaggttttacaaagtattttggatcaatactccaacaaatcagaaagccagaaagaggatcctttcaatattgcagaaccacgagtggatttacacacctcaggagaacactcagaattggttcaagaagaaaatttgagcccaggcacccaaacaccttcaaatgataaagcaagtatgttgcaagaatactccaaatacctccaacaggcttttgaaaaatccactaatgcaagttttactcttggacacggtttccaatttgtcagtttgtcttcacctctccacaaccacactttgtttccagaaaaacaaatatacactacgtctcctttggagtgtggtttcggccaatctgttacctcagtgttgccatcttcattgccaaagcctccttttgggatgttgtttggatctcagccaggtctttatttgtctgctttggatgctacacatcagcagttgacaccttcccaggagctggatgatctgatagattctcagaagaacttagagacttcatcagccttccagtcctcatctcagaaattgactagccagaaggaacagaaaaacttagagtcttcaacaggctttcagattccatctcaggagttagctagccagatagatcctcagaaagacatagagcctagaacaacgtatcagattgagaactttgcacaagcgtttggttctcagtttaagtcgggcagcagggtgccaatgacctttatcactaactctaatggagaagtggaccatagagtaaggacttcagtgtcagatttctcagggtatacaaatatgatgtctgatgtaagtgagccatgtagtacaagagtaaagacacccaccagccagagttacaggtaaggtcccaaaagtggccaggctggaggtcttctaatgtaattttgttttattttgagaacactgccattggaatgtttctacacgatcctattaagaataatgtgatgccctttcaatgcaacttttcatatttagtttattttgttagcgtgattttagctctgtttgtattatgatttttaatcaaaatcaatagattaaaaatagtttgacattcaaagtgacaatgtttagcaatcaaatttacatgtatagatcgtcagggaatagcccaaatgttttaaacgcaaaaaaaaagacaaaaaaaaaccaaaaaaaaaaaacctacaaaaaaaactttgttgctaggattaaggttattctaattgctttactctcaggaaagtgtaataacgcatgggaattctgtacgttatcactgtaatggaatatccaatttacagatagtatgatatacatttcatcatttaagtaagggatcgaaaacatttcaaattgctctatctgggctgatagacatttcgtcatttaagtaagggatcgaagacatttcaaattgctatctccatctgggctgatccaaaattctgagattgttggctacctatattttgttgcagcttttaaatgtactctgaacttccaaaccacattcattccagcctggtagaacaaatattcttggatctttgatcaaagcctggaatgatagctttaataaaagaaggaaaaaaaaaaagcaccctctcttgatctcaactgtaacaaggctgtaattccatcaagcgattctactgacatctagtacagtgttgaagcccaagtggttggctggttccagtattagaactcaagttgaaattatatgattaactgaaatttggggcatgcattatttattatacatggcctacaacggttctgtctgcgctgttacgtattacctacacttctgggtttttttgttcttgttctcagcctctctttaagagttcttgggccttccttttccctctttctattttaacagttttaattttagaaccatttacattccagtaggtaattcactatgcgctttatatgccttagggcatccaaataaaaaacaatagggtaaacatccccaaaacccacctttaaaaaaaaaaaaacccatacagatttccatatgtaataaaaccccgtgttcttggatagatattaataaggttgtaattccaactggtgacataactcctgtgagggataagaatgtgtctgcttatagtaataacatcagaacctctttgtgaaattgcggcctttaatgtacattttaatgaaagggtgcattagtattgtacaggggtcttgtaaagtcatcaaaacttgctatgaactctaattgccatttgaagctactgattggcagtggctctactctaaaactgctttttagcaattgtatttttttcctgattatattttttaatgtactttgatgtttatgctgatgagttttttatgtacttttggtgatgtttcagtcttatgtactcttctgacgtcagaaaagtaccactggttgtttgcagtcttattgtgtaatcagcctaccgcaggcttccatgtataataaagtaattaatattgtgcaagtgtaaaacacttctgttataaaagcagtgtttggaaaataagaaatattaaaaatggttacaaagtattagttaatttccttttcccactttcctccctttagctttagcagctaaagggtcaccaacttgtcattgcaagattcttagaaaatgtacttaatcttaaatacgctgagtactaaaaagtgtttatttcttatttcagtaagtgcggtaagttctattgagtacagagtacaagctgtaatcaaaggatggagaggacctttaccactgtatctcttaagctgtatgatttttctccagtttgttttatacaggttttgaatttctttaacttttattgtgtgtactgaatactgcatatgtattattctgattgtttgctctagtttactaccaataaaagtcctgttaatcacaagattgaagaaaggagatattacttaatatccagtaacgtttttcagaattttctattaacattttctaaaatattcacatccgtggtataacctgcagtttagaggcttgtattttaattgtatttttttaacttaggtattttgtgtttctaggtttattttagttgaaaatggactcaaggccgggagtggtggctcacgcctgtaatcctagcacttcgggaggccaaggcgggtggattgcctgagctcaggagctcgagaccagtctgggtaacacagtgaaaccccgtctctactaaaatacaaaaaatcagctgggtggggcggcgtgtgcctgtagtcccagctactcaggaggctgaggcaggataattgcttgaacccagaaggtggggaggttgcagtgagccaagattgtgccactgcactccagcctgggcgacagagcaagactccgtttcaaaaaaaaaaaaaaggattcaaatttatataatactaaatttttgttcttccatattgctatgcacctaaaacatattcaatgttcataaaatattcagttttatgacattatgaaaacattcaacattttatgaacattgaatactttatgaacgttgaatatgttttaggtgcataatatggaagaatagaaatttaatattatataaatcaatgttttcttgaaattgggttagccatcctaatattactccagagaaattatttattgaggctttattttaaatcagattccaatatcttctggttttaggtgcatccttttttgcctcaaaaatgttgtaatatcctgtggcaccagttttgggaaaaaaaactttttacttaaaaagttgtaataaagtgacagtatgatttagattacaacagtcttgagcattttagttaggatgaaggtattattaaatcagcaatgttttaaaatgttgagagtataagtattagaaggaaagagctaaacctataaataatggagatgcagaaactgaaaattagtaaatatgtaatatattagtaaacttataagtatgaagggaaaaagtagatcataagacatttgtgttttgaaatttagtggctacagtgttgaggaattgggaataaatatattaaagggtagaataggtctttgaggctttgttttctttttagtatatgatagtattacaggaaatcataaagatattaagtataagcatggatttctctgtagagattatctgtactggcgagtctgtgattaggaaatgtcagtttttgtttgttttgcccaagtgtatttcctagatttggtctttttcttgaacaagagtgctaagcagaatctctgattctatattgaaatccaatttttgatttctttgcacaggtgacttattctctattctagattagccctaacagattgatttttttttttaacccatccacctgcctttatttcttctgtggaatgtctgtctctgaatatgatcatt

SEQ ID NO: 57745 - DNA, 1228 bp, Homo sapiens
gaatatttgttacatatatagattacaataaaaatgtatgcagttcacaacagatggtaatgtgaaattttatctcgagctggtatttcaagtattatttcaaaacctattcatacttattaccttaagtttattcttttagctgctttataattttttttttttaattttaaccctgttgaagattgtaacaaatatattctagttgctacagtctaaaacagtgcttggaaatactgatgcttagtgttatttctatgattactttaataacatttcctgagtttaattttttcattacccagctatctttcagaactggtatattgatttttctaattaatattctttgtacttgggatggtatttttattttgtacttctaaagaattgaatagcacaaccattataagtgatgtgcttgctatgttatcatataaatgctcaaggtacaccttctaatgttgaaaaataggaaaataaattgaccttgatgaagtgtgtcttcttttgtctgttcccaggaaagtttatttcaggtatttctactgctgaaatgattagcgttaacagcttttcccctccattttattttacagggtctcttcatcttcctgatatatggggtgtacaacacagaggtaagtctgcttggagtatctcaaggctgacagagtgaatgagagaaatgacaggtttcttatcttgataactgaggaacaaagttggcttttcatatgagtgtcctactgcccttcatgcttggactagcttatatgcatcccagcttaccattaaacactgacaccctgaataaagggacagcctcatttctcacaggcgttgactaatattttacgactgccttaagtttttgaactttcagtctttaacacttagctattgtagaaaaaaacaaaaacaaaaacaaaaaaacaactcagcctctcctatactctcactcaacaatcaacacagaagatttctgcgaccaaatgtgtaggggtttctccccacacaccgagcaagcaatcaattctgcagcagacaccactggggtgtcctccaattcaattctgacactacctacctggagacagcatcagatcccccagattaagagcccaggcctacaagactggccggccgcatttcagatgccaatcacaagccccaggtagttttacctgtgcttctgactgaccagctgtaaatcggggttcccatg

SEQ ID NO: 57746 - DNA, 1166 bp, Homo sapiens
ctcaaaaaaaaaaaagagttatgaaggtgtctatttaagacaatgtgtgtgaaagagcatttattaggagtcaaacagtaatccttggctctgccaacttgtcagcattgtggcactttgagcaagcctcaaaatccccatatataagaataaagctaataatactcacactgcctcctttgcaatgttgtagtgaagaacaaatgggtttatgtaaatgaaagtgcttgagagagctatccagatattagcactgttaatactattcttattcctgaggaggcaatgtgctatgtatggggcacctgtcctgttctttctgttgccaagaaagaaaatattaccacttaaaaaagattgattctgtaacaatcatgaagtgtactgtaaaagtacagatcaatataacaacagacttgatgtcaaccactgaatctatttgcagataatgctcaagacttctagaacagtgtaaatatttacaaagtcgcctcagttttcaatgtttcatagataaatgagaatgaaatcatcaagaatgtttttttctctttcccttagtttctatttttaacttctgtacagtatcagatgtaatatcctggtgttctttcccaactcctggcccctgcccataaagtacacgcatgctacaggaatccagctacactttggatgcttcctgcccaattaatgttatttttactgtgactaaagcattgagaaataggtacctctatagaaaatacttcatatattaatacattacagatgaactgttctataaatggaatagtagaaaccacctaacagacatgagagatcattcaattcagaaatgtgacatactttcagtattgactctttagtaggacagaatgttgctataaggagttccagaaatcacagtgccagttgaagtttggcagttggttccttccagctgtttttaaaggtatcctctctgcaggaatttaaaagtggctcatagtatggcttaagatgtttatgtttagctgtttctgttgtgattcttccctttgagaaaataggatgtttttctagtagtaaagggtttatgaagttctgtggcattagatctaaatgatcatgactgtgaatacctggtaaaattaatggagaaaaaagacatcatgtgtggggca

SEQ ID NO: 57747 - DNA, 1594 bp, Homo sapiens
caactgtgtcccctaaacacctctgcattctcacaaccatttccccatttctgtttctctttccctgactaccttcctaactggttgccctacttctgatctgtgccactttaatccacctccttcattgctactagagttatttaaagaaaaaaaaaaaggtgggaattgaacaatgagaacacatggacacaggaaggggaacatcacactctggggactgttgtggggtaggaggaggggggagggatagctttaggagatatacctaatgctaaatgatgagttaatgggtgcagcacaccagcatggcacatatgtacatatgtaactaacctgcacattgtgcacatgtaccctaaaacttaaagtataataataataaaataaaaaaaagaaaaaaaaagaaaaaactcattacatcacttttcccattaaaattctttaataatcccctcttcctagagaatagctgaactccttgacatgatatgcaaaacctttcatgatctggtcctttcttcctttccagtttcgtcaccttgcctgtctcacttgaaaactagttgctccagcaattctgaactccttggaggtaactctggcctggttggtgctctcaaaactctctttttcaaattatctcagaaatgtcctttcccagccgtctccctgatcattccttctactccttcaaggatcagatctttatggccagacacggtggctcatgcctgtaatcctagcactttgggaggccgaggtgggtggatcacctgaggtcaagagttcaagaccaggttggccaacatggtgaaaacccatctctattaaaaatacaaaaattagcagggcgtggtggcagatgcctgtaatctcagctactcaggaggctgaggcagaagaattgcttgaacccgggtgacggaggttgcagtgagccgagcgaagcaagactccatctcaaacacaacaaaacaaaatcagatctttagaaaaatatcaaatcaaaatgcttcacacaaaaaagaggcagtcacttcatgaattttggcttccctttgaaaactcactgtcttcccttggtgaaactgagttttctacttataagcttcttttggtctatttttaaaaataacttctctactagacttcttgatggttaagatccacatcttaaccctacttggagtcacacagtgcctgatacctagtgagtactcaataaatgtaaatggataatgtaagaattattactaattactcagtttccattgtatgtagatagaagaaatagacttttgtctagcacacattgaattctagcacacattgaattttcattatgtgctaggcatcatgttaaatgttacctactttatcgtgacaaccctgtacaattactattattactgaataaggaaagttagcctcagagaagttaagaaaactgcccaaagtcacagggttagtgtgtggtagagctcggagtaccggagtacatccaagtttgtttgactccaaaccttttttttttttttttttgagatggagtctcactgtcaccaggctggagtgcaatggcctgatctcg

SEQ ID NO: 57748 - DNA, 1069 bp, Homo sapiens
ataaaataaaaaataaaaaataataataataatgaaagaaaccccatgtacatgtgtaactgtgataaggataaaaattaaattaaaaagttaatgtaggccgggcgaggtggttcatgcctgtaatctcagtcctgtgggaggctcaggcgggtggatcacctgaggtcaggagttcgagaccagcctggccaacatgatgaaacctggtctctactaaacatacaaaagactgtggcgtggtgacacgtgcctgtagtcccagttattcgggaggctgaggcaagagaattgcttgaacccgggaggcagaggttgcagtgaaccaagatcgccccactgtactccagcctggcgacagagcaagactgtgtctcaaaaaaaaaaaaaaaaaagttaatgtagagaatgtcactcactgaaggcatttctacaacgaacccatgctaatgtgatccaaatatactgctttctgatgatctaactttatacagaaatagcactcagagaatctaggaatagttgacatataccctagataccatctctcattaatatcaggtgtttcaaataagcctttgggcaagtcagtgttgcttgaacccctggggagagctggtgttctgtgtcattgatggaagggcttccaataaaccttagaagacagagataagacagcaccatccttgtcttgtgccatactaggttccactggcactcttctagactgtgggttagcgcacttgtacgtggatggtagatgtgtgaggtaggatacatgcaagtatgtttttgaacatttttacaactctctagaatcccagaatctcacagcagtaacacagtagacatcattttggcctgagggactctaacctcagtaatgcattctaacccagcctcagtatattagccacaaaggcataccgaagtacctgaatgtcatctgattgggcagttgttctatgtctatttaactgattgagaagttctactgaatacaacattcttgctgtcaatatgtttgaagcttctgactctaatagccaataggattagctgcttttga

SEQ ID NO: 57749 - DNA, 1049 bp, Homo sapiens
agccactgtgtctggcctattttaagaaatttttaatgacctagcaaaatgctcatgatataatattttaagccaataaaatacctcacttcagataaccatctggtgaagctcacagttgacaggcctttgaccccaaacacagagcttccaggcaaattgttttttcatgtcccagtcttaagtatatgtaaaagaaaacttttaaaagagacacagatcctattattagtactaatattcatatcaatagtatccataaagtgcaaatactgttaaaaagaaaaaaaggaaaactcaggaaacagtttttgaaagttaaaatagtatggcatgacaaataaaaaactaaatagacgataagaagaaaaaatcgaggaagtcctccagaaagcacaataaaaagataaagagataggaagtaagaaaatagtagagacactatccaggatatccaccattcaagtaatagagtgttccaaaaagaggggggacaaatcagggaaattaggggaaggaaaagaaataatcaaagtaacattttaagaaagtttattttagacagaaaaaataggcatttgcagcagaaagggacatcaaatttccagcatgatgaatgaaaactaacccacaccaatgacatcatcaaacactgtaaatactgagaaacaggcttccagacaagaaaagtaggtttcacaaaaaggattaagtatgagaatgacatccaactcctcaacagcagttctagatggtagacgataactgataaatgcctttataattctgagggaaaataatttctaaagtagaattcagtactatcaactgtgtatgaagaaagaataaaggctcttttttaacttttttaagacagggtctcactctgtcacctaggctggagcacagtggtgtgatcacagctcattgcaaccaccacctcctgggttcaggtgatcctcccacttcagcctcccgagtagctgggactgcttgtatgcaccaccacgtctggcttattttttgtatcttttgtagaaacagagttt

SEQ ID NO: 57750 - DNA, 1055 bp, Homo sapiens
cccagttacttacttgggaggctgaggcaggagaattgcttgaaccaggaggtgaaggttgcagtgagccaagattgtgccactgcactcgtctgggcaacagagtgagactccatctcagaaaaaaaagaaaagaaaagaaaaaaaatgatccatacaatggaatattatttggctataagaaggaatagctgggtgtggtggcacatgcctatagccccagctacttgggaggctgagatgggaggatcgctggagcccaggaatttgaggctgcggtgtgctatgatcccacctgttgaatggccactgcactccagcttgggcaacgtagaaagaacctgtcttttaaattaaaaaaaaaaaaaagatggaatgaagtactgatacatgccacaacacagatgaactttgaaaatattatgttaaacaatgaaaaagtgaaagaagccagtcacaaaagatggcatataatatgatcccatttatatagtttccagaataggcaaacctatagagactgaaagtagatgagtggttgtttaggattgggggcagggggaggagtagaaagactagggaaaaggtaataattaaagggcacagattttttttttttagaaatgataaaatttttctaaaattgtggtgacatttgcacaactctgtgaatattcttaataccattcaattgcacacttcaaatgagtgatatgtttatgtctcaataaaggcattataaaaaaacaatcctaagacagttaaaaacattgcaatctagtatatgatcctctaatggtctggcttggttccagacaaaattgagaaaaagtaggaaggggcaggctgtatatctttctggaaatcatcccataggtatcatttttcataactgggcttcgataagaacagggtacagtaagttcaaggttacattttctggcaagatcctaaaatgtaattatatgatgattaaagatgaatttgcatactttggcaattcaaaacagaactcttccacaggaaccgaaggtttaattatattctattcaaag

SEQ ID NO: 57751 - DNA, 1047 bp, Homo sapiens
tactaaaaatacaaaaattagctgggggtggtggtggacacctgtaatcacagctacttgggaggcagaggcaggagaatcacttgaacccaggaggcagaggttgcagtgagcctagatcgtgctgctgtactctagcctgggtgacaaagcaagactcctgtctcaaagaaataaataaaattcaactttactaagttaatcaatctttttcttatgcgttttagaaagttcaagcaagtttcaccacagaggttctgaaagatgttatttcaggtactttttttttagtattttgcgttctgagatggttgtctatccagctggggcccaaggcaatggatttctctggatacacaagaggaactggggtaatgagtttggcttagaagaatattatcaaaaagaatgaatgaaacagttatcttaataaaattgaaaccaggggattttgctgaagctgctttcaaaacatgaatgacccatgctgacataaggaaagaataaaattacaaggtttggtttctatatgagagttttgggggttttccagttaaaaagtgttatttacgagtactgtaaaagtaggccaaaaatacatcttcaaatgcagaagagatctttaggtttcactgtcccagtcaaaagaaaaaagaattactttccatccaatctctaaaattttggccacctgcctggtatttctcttcaatttcacacttcaaaatggcctccaggaagacacggttcaggatcagtacgaaagtacaaagttgccaaaataacccttccattctcttttcaaagccaaccagccatctgaaatctatgtatacagggatcgctaaaagtaaccttgcttatgaaagttattgttttagtgtcatatttcttacagtataggtgtcccttatcataagccaacaaaattcatgaaatttataatttaagccatctcacctgaatcttcatgtttatggaattttaactagattgtgttcatttccccacaaaactaaccataggtacattttttaaagacagtgt

SEQ ID NO: 57752 - DNA, 1034 bp, Homo sapiens
ttaggtgaggaaatttagggttagcaagactacataacttacttacagcctttcaaccagtggctcaatgattaaaaaggaatccttaaacacaattttcaaagaggaacctttttcataaatggagtgagactgatggaaagggtttataggttggataaagaggatagacaggaaaattgatcccctgacacatgacttcctcacatggctgccatgatccatattcccatcaggaatttctaataccactaccagatggatataagaggctggtataaagttattccctactccaggagaatttgattggcacaataagaagagagaaaacgaaaatgaggggatgaggttaggagattttagagtagtgcctgttaagtgggccacttaccacctgcatcagatcaccagatatgcctgttaaaaatgcaggttcctgggcctgtgctcagactttctttagcaaatctggaacccggggtggaggcagggcataccaggtgagcttctgtacactaaggtgggaaaatttctaaattagggtgacagccaagagattgggaatcagtgctataacaggaaatcacaatggaaagatactataatttaatgttcctagctcggactttaaaatttacttacaatgcttgttttgccagcacaaatctaaaaataataaacaaaaaaaaaccaaagaaataaaatgacataatttaatgcaattattttgtttaaaaaattaggaaatttagataatgagaatcacagaaaattatacaactagagaaaatccccgttactattttggctatttcctttccatctttttcattatgcaaatctcaatacatttatataactgacatcacacactctgtactcttctttcctaaaattgtatctaccataagcaatgtttctagttgctaaaaattctttgaaaaattaatggctgcataatcgtttatcatttggataaaatttaatttatttaaccacgttttcattattgaacttttaagttgtttttg

SEQ ID NO: 57753 - DNA, 1140 bp, Homo sapiens
gagagatataataaggagaaaataaaatagtacaggggaaatatttaacattgcgcctggtgtgtagaaaatactcaaatcactgttgcatttgaatctcaaggaagatgcttatgatagctcttgaaaccatttgagtttctagacatggaaaagaccttaaatatgacactttctacttcagcctgagggaaaaaacatgaaaaagataagtagctatcaaatgagtaaggatttatgtgaaaagtaactgtaccctcatttttgcatttctctaaatgttgctctaaattatatagttttaatttcagtgtaattactagtgttagtataactgatatttatgatagtatttaatgtacagcaatgatagcctttaatgagagtatttagctgtccagagaaaagcataaccaagtgggaaagtctgccaaatctttactttggttaattatatttattcattcaatgttatttattgagcttctactttgtgccaggcagtgtggacacagccaacaaccagctgtggggattaattctgggagaaacagatattaaacaactatgtaattgcaaagtgagtaattataatttggggagtacttccaaggagctgtacaggaggctaagagggcacatgctagaccccctggatggaaagctggttgacgaggtattttggacacaaggtcacaactgagacaccatcatcttccagacccaacttctaaaaggtatttaacaatacctagaaggagactgtctactgtgacagtcctacaggcccatagtcatccctggctactgttcatgggtaatctaatagccagtgccaaagggttggagggaaaaacacaaggaagaaagtaaaaactttgattttttatttttccacaggctcaagaatactcagggaacaacttatatcaactttatattgttaaatgttatcggctgggcatggtggctcacacctgtaatcccagcactttgggaggccgaggcgggtggattacctgaggtcaggagtttgagaccagcctggccaacatggcaaaaccccgtctctactaaaaatacaaaaattagctgggcatagtggcgggtacctgtaatcccagctacctgggaggctaa

SEQ ID NO: 57754 - DNA, 1158 bp, Homo sapiens
tccgttaccaaggacaacatcataaataaaagtgtttgtgaaattttacctgcagcttcctaactttgtgcattaagcatgagactagcagagaggtggtcaaatgtgaaaatttataatcatttattacgtacggctgaagcaagaagggaataaaagcgtgaaggcatacatctataaacggaagccgaaaaccttaaatgaaaagtaaagtgaatttctgtgtcttgtcataaagtaatgagaagctagagcttttattcatagcaacccaagatgcatttactctcaatctagcttcagcagtaaacgcttccctgatgtattgctttggacttacaaagaaatatttgtgctctacataatagtatagttaggagaattactgcatggttgagaagattctataaagctttatagctggtggtgttactgtaatttaatcacaatgtagctaatgtagtactttaatatcacaggttacttttttatttaccatttattagtaactgacagagtcaatcatctctacatcataaacaaatcatggagggattctataggaaccctaaaattccgggatagatgtactatggctgttttacactaccacattccctgtaatgagctaaccatcaaattattatttagatctgtgaaatgtaaggcaggctccttgttcttagtccattggccaaagaaaacttgaggacattttatgtcaggaatacaattagcaccgcatgtcatttatgctcagaaataactcattgatccaattctagcaaaatctagaagcattttctgaaaaatgttaaggtatttagctaaaattttttctaactgttctgtaatctattcatgaacattaccataatgttaagcttaaaccaatgctttgtcattaggatttttaaatgaaaagtatgtttttatacttgaaaataaaatacaaatgcttttgtcatttctgtttacatatattgctctcttgatagattatagatagaaagatagatagacatataattagttgttacataaaccatgtcacattaatatggttgatgccagaaatattaagcaagactaataaggaatgctgctaatgtctggaaactgtgacactgtgaaaagtaggactgacgacatgtctaa

SEQ ID NO: 57755 - DNA, 2156 bp, Homo sapiens
aaatttaaggctgttagtattcaatgtatttagaagtgctcttgagattaaggcagtcacagagtgctcagaaaggtagatttcagatattatcacagcacatggtaaagagaaagatttaaataaacccctccagcttgccttgtgttaaattgtctggctcctaaagtaaaggtaactctgaaaaggattaaaatggacatctaaatgataattactgggtaattttgttttggttataatttgtggtgttatttttataactgacatgagacataatatatttttcagggttctgcaatagccaagcaacaaatggaagctgtcagaaagtatttgtaggaacagttatggaagaaagctgcgaggttgttgaaacgctacacagactacatttttttagcctatgcatgagtagaatactttcctaaaaatgtaattgactgtggacgtgtggcatacagcaagccctctgcctaggcttttgaaatcctcttattttcactgatgcaaaaccggcatggtgtctttcaaggatcttttcaactcaccctgtgtcatcacacgcacattactgagcatttgatgctgtcttacctcctgttctctagacccgtccctcttcctctttcttcctgtcttttctgttctatctgtgctctggatcactctgtggcaccaaggacactgcaggggctttagctcctggtccttaactggcggcgctcaaatctactgactttactgacctctgcccaagccatgaactgagaccgacgaatagatcacccaaactcccagcaaccagcacatggcagttgtgcagggccttttccatgcggcataatttcgtggaatttctctctctcctcatctggctctgattatttgctgatttgtaattttagttattcgtgtgcaagtcttatctcctttgccagactgtatgctcctgagcaacatgcactatgcttgatgcattttgtgcgtcttctctccttcctgggcttggcatggtgctcagcacaacgtggaaattcagtagatacattgtgagtgaattcatgacattgaagctaggaacacagaatatcctaaagataatccaggtatcaatgccagagattggtcacatcctggctaaatctgtagctatttaaactaagtttccagtttcttatttccatagctatgaaatcaagaggatatatattttaaagtttccacaatatcttgttttcagagatttgaaatcaagatgttatatcttcttccattgagtaggaaatagctctcacgccctgctgtggcagtacaaggctgaaggaattataatgatccttgaactcaagtctcctgataacacattttattaactggtaggagactagaataagacttgtgggtgaaactagtatgtctcaagcaattctaatttccaggcacagaaactgtactttgtagcagcagaattttatttgagaagtgactttactaggggaagtcctaccaattgtttaatttctttttcaccctaaatgataggaaaaggggaaatcatatagcctcaaatactcaaagatatttaactttataaacaggaagcacacgagggttgcattttgtttgcttaatggcaatttttgggaaatacacaagaaactaaacaactatgtttatgaacgtttttaacttttccaatctttcttgattctttctttctcactacatagagatttaaaataataaaatcagttattgcaatgattaaaatggtttgaaaaaactagtacttttccacttcttttgctttccagaaaaagaactcatgtgttccaaattatatttttcctcaatttctgttcagtccttcatattacattttaattgggataaaaaattttttttcaattcacaagctcatcaatccagaggagatacttctaatataagttataagagcaaacattcaagaaaactgaagttggaaacatgtttgtgtcttttttccatgactaacccatgtctattctctatgaaattgatgtcaaaaaggtattatatattttcagtaggaaatagaaggctgccctctactatccttgtcaggacgtcgtatccctttaatcatacttttcatttcagtacattgaaat

SEQ ID NO: 57756 - DNA, 1385 bp, Homo sapiens
ttatagtcccagaattgctaagtttaaatggtgtgcttagctggaaaaatctaacattctttaattttcaataagaaataagaaagaaagctttctcgcctggttttaagttagcagaggagttaaaaacttctactagaatgaagttgcttatctgacccatgttttattaatatatggagtgattcctagcttagaaacactaaggtgataactatgaagaaaacttaaagtgaaaaaagcaccattttatatcctctgttcaatgcaaacacactttccagaataaaaaaaaaattctgacatatctttatgtatctataaatttggcttgtgaatgtgtatatcctagggaagatgtattaataggtctgtaatgatataaaatttatgctgggggtgaggcaaaacttaatggttcataaatagcaaattcattatatttttaatactcaagttatattaacaccatataacatctttatggtgccattagaaccatttaaatctttgactcaacctgaaaaacaaacatttccaaatcttggccatgaaatgattagtcaaataaaatgttttaataaatattattggattagaacatggttggttgggtcataaactgtcttatgaatgttttatgtcatcggttacactgcatttttaaatgttaacaaattaatttattttaaaggccgcatcaaggtgaaaacaccttgtttccactggagcattaggcagcaggacaatacatcatggagccatttttcattcagtcataccactggcagaacagatgttaagacataaaatgtggtatggtttgttaaatattcatttataatttgcattcattattaaattatgtgttgggctaatctttaatcttaaaaatacaatgtcatgaagctctcagaatacatgatattttataatttagtgttactttaagtgttgactagaacgtacacaaatgtttgtcagtaatgatccttaattattccaaggagatttgatctgcattggtattgagttcaataattcattcaagccttcaggtcactaagagaaatatcagtttggggataccatctcttctgtgactaatgatgattcagctacttgcttctcatagccacactgtcattcattgcctaaaaccattttaacacagagtggtgactttgaggatcttattttttagtggtctcaaatgattatcacaataaacttcacttttggtttagaagctcgagagtaaaaattctctaagattcagttctttgaatagactatcctagaatacagtaaattctgggcttgagaatttcctatgctcgaatagtcaaatatttgattaagctccatagctgtgatattcaatt

SEQ ID NO: 57757 - DNA, 2050 bp, Homo sapiens
ctcaagatcaccctcttcataaataccttcaataaatttcagcacaggatgatggctcaagcccttttatcctttgcagaatgatataatcgggcattctaaagcaaataagaattcagtgaccccaaaaatgtatcggattaaaacctaccaataaaaaatgaagtgttaccagagaaaatactctgcagctgttctttgctttaggtacacataataacaacatgagtgtggggtatgatctggtttcagtgtggcatgcattaattcacattttaaaatcttttacatatgcttatcttcttatgagcatagtgcagtactacattagatctacttaaaatccattgagagtattgatttttttcttgagaaaaatcaacacagtgagatggtctctctcctcgtataaagcccattagagaaaaccagaattgtgttgacgtaaaggagaatgtttcctaatgtacatgacatatcactgtggttcacaagactcaactctcttccaaatctaattaactgattctgttaagcttatattctagcccctgttcgcatggttatcacacctctgtcaacccaaactcccctatttaggaactagaagtgactaagaaagtgactcatgaaaatataactatcttaaagatattttactaacatggtaatattaaatcaaataattacatgaactgttggaatttcatttgggcaattttttaaaagataatttttaattgctatgagactggagtttaagagtggatgatttaactgaaatgttttagtaagactgggtagataaaccaaacaccctgaattcccttaatagcagttatcattctgacatcttcttattttaaagaaattgctgaaaatttgacaaaactaatgtggatggctataattaaacttgacaatatctatatgggggaagaagtgaaatcactatatttagaaacgaatgctaccatcccaccccaactacatgttcaggttaaatgcgtgcacatcctggtagctggaacatctgtttctagcttgttgttcctcttggctgcttttcaattggatttcctcgagcaggtcccaggcttgtcactgcagccagggtctgttaaccatcaccactggttctacattaagtaggaggttcagggctaagctaataactcgcctgcctttctgactgatcacagtgatgttcgccgtggccacttatcatgcgggctcctttgggagggtgctcttctttgtctgtacctctgggtggaattggttttgtttcccctggttcctggagttacgtgtgaaagacaaggctcattgtcacttccatggagcggctgtgtaatgctttgcccatgcatccgctgcactcaaacatgaaactcgctctgccctttctgcaggacctctaaatacgatatgtggtgattctcttcttcctccactctgaaaaacaaaaaagaaactatcactgtatgtagtttacaggaaactaggttagaatgaaacagagcactttagtgttctgaatcatggttatgatttggcataaaatcacaagtgggaaatgtttgatgcttatggcatagcatcgtatgtgtggtccacatccaaggggtcaggtgggggtagggttggaagaaaagaggcaattgcaaagatgcttagacaattttctaaaggcctttagacagttcagtggcttccactttataaatgttccaggctgactgtagaaaaggggatgtccaaattcaagggcacacaaaaagcatttagaaagtttgctaactgacaagggggaattagtgaatttgcttcccatttctactttctaggtggcttctgaaacagcaaagaaagttgggtttcatctgggacctgatatcctggggttgacaccatcctgttgtgactcccacagctgataagctttgatagaaattggcggccccatctgtcaaactctgccatgacttttttttttttcttttttttggagacagtctcactctgttgcccaggctggagtgcagtg

SEQ ID NO: 57758 - DNA, 1036 bp, Homo sapiens
gcactttggaaggcagaggtgggtggatcacatgaggtcaggagttcgagatcagtatggcaaaaccccgtctctactaaaaatacaaaattagccaggtgtggtggtgggtgcctgtaatcccagctacttggaggctgaggcaggagaatctcttgaagccaggaggcagaggttgcagtgagctgggatcatgccactgcactccagcctgggcaaaaagagtgaaactccatctcaagaaaaaaaaaaaaaagatattttttatgaacgctttttgctcatagtagttgtaagatgaacttgttggctattcttggtaaagttgttattccacacctcctctgtgtatttatttagtagctaaaagtatcatcctcaatcgagtggagtatgtttcagatgaaggcagctctggtggttaatccaataatcaaaaggatggttggcttttccttctacacattccttaaaaatcagtgtatattttgagatgagagtgagccatgatgtgtagaaactctccattattactctacacacttttgaagaacagatgttccaaatcaagaaagaaatgtgttgtaggctaataatttcattaatgcataaaagaaaaaaaagcctatttcattagaacagtgtttaacattatacagaaataagctttgtcctttgtttgctgagaacaatagcacaatcctctgtgtaaagatgatttatctcttgctaaaccaccctaactgtttatgacagcaaaaagacaggtatcattaaccttaggtgttgacaatttagaattcatgggaatgagttagaaaaacgatagatgggtcccacccctgagtttgtggagagcagatgaatccctgtgaaccatcaccactcatgcctcacgttaccagaaaagagttccccttgaattttcagagaggggatttggttttatgtcccctacatctgaagttgaagtgaaaattgttttgaggaaaaatggatctatattccaatcgaagtattttccaaggccctagaa

SEQ ID NO: 57759 - DNA, 1156 bp, Homo sapiens
cagctactcgggaggctgaggcaggagaatcgcttgaacctgggaggcgaaggttgtggtgagctgagatcgtgcccctgcattccaatctgggcgacaagagtgaaactccatctcaaaaaaaaaaaaaaaaaagaaagaaagaaagaaaatatctacaatcagtggagcattcctattcggttgcttaatttttttttttaattttcaatagtttttggggaacaggtgatttttttgttccatggatcagttctttagtggtgatttctgagattttgctgcacctgtcacctgagcagtatatgctgtacccagtgtgttgttttttattcctcacctccctcacccctttccccctgaatccccaaagcccattatctcattcttacgcctttttatactcataacttagctcctacttataagtgagggggtcggtactcttcattcagccatacattcaggaagacatgtttattgggttccttctgagtgcctgttcatcatctggagcagtatcatggagttagaagacaagtcctctgactctgtgccttccagtctccacacacctcagtgaccttcacaccaccaccctcgtccaagtcactgtcttctccagcctaaatgtctgcagttgcgtcctactaactggcctactcgcttctgcttttagtcccctatagcctattctcatagctagagggataaaaaaaaaaatcagatgcccttattctcttgctcaaagctttcaaatggcttcttatcacatttagaatataattcagctcctcaaatgttacaagaccgcacccctacccacctctttattctcatctcctctaccttcatcttcccagccctgttggccttgctcatttcttcctgagggcctttgcacttcctgttccctctgcttgttttccccctcgatatcagttggtgcttacaagtctctctaaaccaagcaccctgtattagaatccatgtgtctctcacagcagccactaagatcatttgcaattaggaggtactcaataagacacttgatgatgtgaatggatacaaatataaagaaaataacatataaagaaaatgacatcttggaaaaatccttgcccaaaattctctggaacaggtaactcaaaagagc

SEQ ID NO: 57760 - DNA, 1117 bp, Homo sapiens
taaaaattaataacatgtccttatgcaatttcctttattaattttattatgaaatatatatccaaaaagtaaaagtaacatctatgtgtctttgttttcatctaagcctctggagagatttacagtaattgcaaacaataatttctatggcaaaagtggttaagacctcactctttaacggtgtgtgcagctgcttactttcctgcaaatagaaggccttgggaggccagtgggaacatggcctggtgggatctaagttgtttctctttgcctctacaagctaaaccaaacccactttgaacttgttctctcccagttggtgcccttgtcagggccatacatcaccagcatgcttcccccagatgaccacttcaactatacatcatccaagtgagctggggctctcttaacgtattgctcttatacatcaacaaagtgagctgcggctccaggaatctattagtgtaatacaccactagggtaaggcatactgatagagcaaagctggtcgatctgtgaattgtagatatctaggagttcgggtcaagagagtaatgcagatttcaggttggattgatgtggctatgaatggtattttatgatataaagtttacctctgatttagaaagtaatttaacgtgggtgacagctcaggttcgggctaagagaggtcgacatggtagatatctgtaactcttggaagatgtgtttcaggaataaattactgttcttgatacttttatttcattttgcgatatgtcacggggggcaccagaaaattggcctgggaggaaagttttgcacataaagcaaaacgggctcattctgctgcctgccaggtaaataaatatgaggggagtgtggcctttggaaggctcagttaccatctgtttcagttggtcaaagctgcattctcagggtcttgctcttgacctaatgtttatgtaacaaagcagcacagcagttacaatgcataaattgttatcagtttctgcaagactccagagatcagaagaattgtagcgtttaggcagaggaacaagggaatacagaaagtacaatgaccagaccccaatgggtggttcaaataaattaggccccacatcaggggcacata

SEQ ID NO: 57761 - DNA, 1025 bp, Homo sapiens
tacatttggcataactagttgaaattggccattcgtaccatgaataaatctgatagtttccttgttaggaagagattgtaagtaaatacagtcattgcagtcagaacagtattagtgaaccttgtgtggtgttttcaagctctttaaaatggtacaatgtagcacatttgctttcatttctttttttatttttggcatttgaccttgtattctttctgaagctctatatgtgtttttattagtcaataatctggcaagtagcactttgcctgtgcagtttgctggagtgtagatgtacatatgaggatttcccgggaggtgcacttctttgaagaacttcctaaagtacctgtatagtagttttcatcttaatattcagtatttaatcttcagtttgtgctttgtaaactcatgacttaattggtcagaaactttttagtgtctttataaaattttgtatacatatttatactaaacacattgtgatactgtatttgaatgaatggtgaaaaaatatttgctattggaattatgtgcactgacaagaaatgttataaagagaatgcctttaataaatcttttcagcattagaattgcttcgtggtctatgcttttttattttactgattttctttgtttattttactcttcattcagaatagctctgccttgataatagctaggctagtgttgcaaatcaagttaataattaggaaacactaaacaaatattaatattgccataacaactatttttttttaacattgttctgcctctctttagttgattatgcctggaatagatttatcaccatgtggtatgtgtaaagagcatgagctttggagtttgacatatttttcacacgtttggagtgtgaatcccagctggactgcttagtaactacatgaccttagacatgttactgtcttcactcccattccttcatctgcagaaagaaaagtaatacccacctcatggactatctatctatgagcacttagtgagaaaaatgtgggaataactgc

SEQ ID NO: 57762 - DNA, 1140 bp, Homo sapiens
tttaagagaaatcagcacagatatttcaaaaaagtccatgtctttttatctttaaaatatctatttatcaaaggccagacacagtggctcacgcctgtaatcccagcactttgggaggcgggcagatcacaaggtcaggagtttgagaccggcctggccaacatggcgaaaccccgtctctactaaaaatacaaaaatttgctgggcatggtggcgcgtgcctgtaatcccagctactaggggggctgaggcaggaggatcgcttgaacctgagaggcagaggttgcagtgagccaagatcatgccactttactccagtctgagcaacagaacgagacttagtcaaaataaataaataaataaataaataaataaataaataaataaataaaatatatttttatctttaaagtgtttaacattggtatactgtctgtagttggttcattagtcgtttataaagggttattttctcatgagtggaaacctgaacaatcagttacctttgtgcctatgccttctctctcctcagacagctgggatgtttatggtgaaatggcctgtacaagtttaactaagacaacttaacttgcattgttaatcaaaaattcttttctcaaagggttaactggttgccattttgaatagtatgttcaagggtgtagcttcctgtttctttccaaattataagtagctacctaaatatagtataattatatattaataatatggcttgctggcacagtagtttaccctgttatctgtgtttcataatgggggctgtatgaatattatttaaaactaataaaatgttgccagaattatactaaactgttggatgagattaggagatcagaggctggaccttctcttgataatgcttgttttgttaaaggtataatgaaataatttgtatatgatttgatgaagattaaagacccttattttccacagctttaaaaaaaaacctttatttatgatcaagtaataaagataatattctacttgtgggatcttacattacggaaatagtttgacgtttttgacctcaagagtatgtataatttgaagagatactttgtaactatgcttgggtgatattgagcagttcctaaagaataattcatttaaaaaaaaaga

SEQ ID NO: 57763 - DNA, 1023 bp, Homo sapiens
acaattgaccctatctgcataccctcctttctctcattttctttctatagtatgacaaacctgtactttgttgttcatggtagggttttagtttatctattcttgtaagttaaaactcctttaagaacctatagaagaataaaatatccaaagaaatagaaaatgagctgaaacataaaaggcatggagctacaattttaaagctggagtcaggaaggaaaaataatttggatattcttttggaattttgtttttttttaaaccacatagagcaaatctgaattagggctagggaagctctctgtgagtaaagccaattaaacactgaaaaagaatcccctggcagaaattgagcaggaaagcaccttagggggcagcattggatagaataaaagcaaaggcttagaatttagatgtgggctcccactctagttctcagtcttaggagttaggaaccaaggtctgtttccttacctataaaatgaggtatacaatgggcagcataggactataatggagaatcaaataacaaaacatttgtaaagtttttagagtatagtatttgcttgatatgttacttacccccttccaagggaaatttagaaattttgtatctataaatatttaagtataacacaaaatttgttataacaaatattagagggtgtccatatttaatatagaaatcaatgtgcaatttattttgaaagaaattattaatgaatacaggtgaattagactgattattttcccatgtcacaggtaaatagaaaatacagactaagtatatgatcaatgtgtttaaaaggagagtaattgctatagcttgaaattttttatgtaaataaaataaatgagagagattataaagttgaactcttaaaagtgaaataaacttatttggaaagaagtcaatgtgcaatttatttttgaagaaatttcacatgtatgatttaagtactctcaagctatttaattgcaatcccagaaatagagctccaatctttgggcttctagactaga

SEQ ID NO: 57764 - DNA, 1317 bp, Homo sapiens
aagctacagtgagccatgattgcaccactgcattccagcctggatgacagagtgagaccatgtctcaataataataacaaaaagtaaactatttaaaaaaagaaaatactaagagggttagatttcacttttaaaaaaggataattagaccatgtaataaaatgttatagaacaattgaacaaattttatgttatagtgcccaccgaaagactttccacattctattattgcagtagaatttttgttgtgtcaaatacttcctgaatgggctatttactagctgggatttggaaatctttaactgatctaactagtaaacttgaaatcagatgattgtttttaatgtccgttgttctccctcaggaggattttctaggtctccccaagacttggttaggcacctgtcttatttgcttctctgataaccctaaacttcacccgttatgacttttaatataacatactatttataagcctgtacatctcaatggacagttagctctaagaaggtagaggacagtgggtgtcttttttcacaaggcaccattatgtgatagatgtttggttggatacttgttattgaattaattataaattcatatgggatgaaggatgactttggatataggtaatgaggaaataggatgactaaaacaaggggtggcggggtgggtggactgcaaacaggtgtggatgaaatagtagatgaaggagaatttctgacagcatagaatcatgaaaatgaaaggtaggattggccagagagcaaagctagagagccagaagcgaagggtctgacttaagtttgagcctagaaaaggaagcttgttgaaggatggtcagtgcttagttggctctcagattttagaggcagtactagaatagtgggagaacacacacaaaacaaaaactcactactggcacttgaaaaactgatgtttgaacccatgctaaattagttgtgcgtccttgggcaaactgcttaaatttttgagtctcctgtttctcacaggaaaataaagctggaaatgcctactgggcaggattgctgtgaggatcagatgaattaatgttataagaatgtctctcttagagtaactggtgtgtagtttctttccttcttttcattttctgagaagaacactttgaactgaacttgtgggtttcaactcatagccctgtgggaaatcttatacaaggaatcaaggatggagagaccaggcgacttggaggggaagttagattaagctcaggacagacttgtgttaagctagcaaacctgaatttagtgactacactttctactaagtatggtt

SEQ ID NO: 57765 - DNA, 1048 bp, Homo sapiens
ggataatatttcattcagtaatttttcttcttctttcaaagtgttttcttctgatcgagcaatccagtcacttactattcagactgcatgtgcttttgagcagctagtagtgctaatgaaacactggctgagtgatttactgccttgtaccaacatagcaagacttgaggatgagttgagacaagaagttaaaaaactgggaggctacttacagttatttttgcaggtaaattgatttgcttattatcatttgaaggattcatttaataattatttattggctttctactgtctatatcttccccaaaattagctctgtatgattttcaaaagtacattctgttttgaagttctgagactgtggttgtctgtaattgatttgttaaacaaagacttacatggctctctatgtatgagtagttctaagtgatttacaaatattaactcatttaatccttataacaaccccagcagtgggcactgttgttatcaccatcttgtagatgaggaaatggaggcacagggaaaataaatataccatccaatgttacctaactagtaaatgactgagttggatttggacccaggcagtcttgggcccagttcatgctctgccattataccatgctggccctcaataagggatactgggaagagagacagagtctttctctgggtatgggattggatttcaactcagactgaattggccacaattctgctgacatagagacaaggaaataattttgttttcctgcttatcttgtatcagataagattaggtttggctgtaagaagaagtaagatgaaagcttattctctctcacataaaatctagatgtagacacagtggctctgatccacagagtcctcaggatccaggctcctcccattggtcccatccgccatgcccaaagtgtagcccctgatttcatgacccactatggaggagccccatctgagctcagcacagcagggtggaaggagtggtgagaaggatagggcaaagtttgcctttttttttttttttttttgagctggagtctca

SEQ ID NO: 57766 - DNA, 1041 bp, Homo sapiens
ccaaaaatacaaaaaattagcccggtgtgggagcaggcacttgtactcccagctactcgggaggcttaggcaggagaatggcatgaacctgggaggcgaaacttgcagtgagctgagatcgctccactgcactccagccgctgcactccagcctgggcgacagagcgagattccgtctcaaaaaaaaaaaaaaaaaaaaaaattaccctttctcaagaacttgacatattctatgatattttcttgtaagttacagaattttaaatgcagtaaagctagtatgaactccacaaaataataaatcatagtgatagacaacttctatatatgacaaatgttgcttgttaactcaaaacataaaagacctccatagtgaataatagatgcttttcaagggaaacctagttctgcttagacctcagatgcttagattatagagaggcaaaatggtattatggaaaggctttggagccaatttagcctcatagtttggtttggtttttaagcaagtatttctttgatgactactgtctgctatgccctgaggaagcaaagatgaatacaaagtatgctctgtcctgaaagaccaggaattgaggaaagtagaggcaggagcagttgataaaaacctgaactgaggctagacagaaggattttaaatgcagtgaagaggaaagtcgagttttatacatactcaggatgcagaatcaataggatgcagagactggttgtgggactgaaggtgtgaagggtgcaaggatgactcctggttttaaattgggtgactgactaggggaaagtcgtgttgcctgagatggagcatttaagaggagtttaattttgaacatgaagaatttgagattctcaggggacatccaggtgtatatttgggtttagaactttggtggatggagctggggattttcaggatgtaagggtcaatagtatttatctgtcagcagaagcatcattgttattaagagcatttattaaatgcttactaagccttatcttacctagtacacaccacaaacctatgaa

SEQ ID NO: 57767 - DNA, 1090 bp, Homo sapiens
ttaataatttccaaattttctacaattaatatgaattgcttgtatttttagaacaacaaaagtagtatggaggtcatttgattattcttgccttgatatatactttaaaacctagtggttgaattaccctaggtttaacttacctcctactttttttttttttttttttgagacggagtctcgctctgtcgcccaggctggagtgcagtggcgcgatctcggctcactgcaagctccgcctcccgggttcacgccattctcttgcctcagcctcccgagtagctgggactacaggcgcccgctaccacgcccggctaattttttgtatttttagtagagacggggtttcaccgtgttagccaggatggtctcgatctcctgacctcgtgatccgcccgcctcggcctcccaaagtgctgggattacaggcgtgagccaccgcgcccggccttacctcctacttttaaccattcattgcagtttttaacttatttttctgtataattgtactatctctgaatcaagttctatgtagcattttgctagaactgtaattgttattacgttaaatatgtaaaatatagactgtaatcctgatcaatatattcgaccaggaagtgactacatcttaactttgtcagattattcttttatgtctctcctgaggattttattgtttatgtttttactattattataaatctcatttattattcctgaattatttaatgatttctattgtttttattaaaagtagatgtcttttaatatcatccctgtcatcgtgtgattgacttttaatttgatcaggaatgattttttagacttatcagataatatataatctgctaattttatggtttaaatgtaacaaaggatttaatcttttttttcttagttgctaaacattttttcaccccaaatttactgaaactatatattatatttttcttagagtaatggtagtaacaggggtgaagatgccttttgtgatcctgaagatgaatgggaacccgacattacagatgcaccagtttcttcactttctagaaggaggtaaagacaattttgttactagttttcttgcact

SEQ ID NO: 57768 - DNA, 1063 bp, Homo sapiens
tgcagtgagctgagattgtatcactacactccagcctgggcgacagagcaagactccgtctcaaaaaaaaaaaaaaaaaaaaactagttggaggaaaataaaataattttaaattattgttacatattggtatgaatcttaacaccaaaggaatagcccaagcagaattatcccatattgcctttttcttactttttagtgtgttctataattgttaactatgtgcttcttattttaacagtactatcaaaaattttggtgggacagtgagtattatcccagttggggaagcaaagacatatgtaaatggaaaacatattttggaaatcacagtattacgtcatgtaagtggatgggtgctataatataagaaactgttcgactttggataagtcatttaatttctttgagttctggttttctctataagataagggtgttgaagcagattaaggactttttcatttcaaaaattctttttcctattaattgctttcttgtgcaaagacaaaagttacatttatatgaatcagtacctgaagagctgaccactaatagcatcattatgtgtcctataaagagctaggctttagaatcagacagacagggttgaaatcctggctttgccatttgctctgtgacgtctggcaagttatttaactagatgattaaacaatgtcacccaagtcaggacacttttgagatcattattaataattacatcaagagaacaaacatcagcagtgtgttacaggcaaacccagacctattgtgactctatatatcctgcctttcagagatagtgaaggattaactgaaataataatttgtgtatatagttcttagaatagtatctgcaaatagtaagctctcaatgaatgtctcttgttattattaagctttgtgctgtttagtttcctcattcctaaaattgggatgattatatgtatctcactgagttgttgtgaatcgtaaatgagataacataaagtcttgcacttcataatgatgttttgggcaatgagggaccacatatgtaacagtggtcccataagattataat

SEQ ID NO: 57769 - DNA, 1114 bp, Homo sapiens
cggaggttgcaatgagccgagatcgtaccactgcactctagacagtgagactctgtctaaataaataaataaataaatattctgaattccagcttgaaaaatctttgatcttggctgttctgcctagtgaatagccattcttttatttctttactttttaaataaactttcactttaacaattacccttttgcctctcaaaagtgttccactttggtcagtacattatacagctttcctacttatgaacagggaaagttcattaatatgggagcatatttcaggttaagactaagtaaagatttataggttatataaagtagagctgatttctccaatattctattttatttagtaatactgtatttaaaacttcaaatgaaatagaagattggaggattatgcttactgtggaaattgttatatattaaatgttattattaatgcatctttgtataaatcttcagaattgaaggcagaaattgcaaagctaaaagctgctcagagaaacagtcggaatattgaccctgaacgatacaggctctgtcggcaagaaataacatccttaagaatgaaactgcatcaacaggagagagacatggcagaaatgcaaaggtagagtacagtcagtactctaaatgttaagtgtgttgctctggaatcataggaatggcagggacctcaagaggatactgagtatttttccgaccttccttatgaatagagcagcccactcccagattatcatattttaaatattactaggtagttgcctaattttcattgattgtctcttgactctcaatcttatacatctggatgtttttaactctgttattttctttgtctttggaaagagtgtggaaagaaaagtttgaacaagctgaaaaaagaaaacttcaagaaacaaaagagttacaggtattatttcaactttctaaactgattagaaaataaaagaaatatgccaagaaataaatattgccaatatgccaatgcatgtaaatttaatgtttcaaatacttactatatactgactctgtacaaagcaataccgtaaggaaaattaatataaagaaatgttaagatcaagactggttgcttagagccagccc

SEQ ID NO: 57770 - DNA, 1029 bp, Homo sapiens
ggaaaagttattaagtattaactcagctgcatttaatacatctgggattgtattgggacccatatacacccacatataaatatacctatgcatatacatatgtgttaaagtatatcttttggtattgtgacttagacttgaatattaagatgctaaggtgcttcattgtattaagaaaaatcatactttttgttaaaattaaagcattattttatttcctgtccttcaagaatggggaaaataaaagattctgggagaatcaataaaataatattcatgaattagtccattgtgatcttcagcgtaaatatgtaattgaaatgttattgttttatgagaacaagagtataatcatcagtaaaattgattttgtcttttcacttcttaaaaataggaacattgtcagttcttacgctgatatccaggtaagattgattttgttttcttttcactagatagaaagagcataatcctaaatatttataagaatattttttcttaattgctgttttacaaataaaaggttagtttccttaatttatcacaaaccgattttgttaagttttaatcaaaataattgctcttctttattaaaaatgttgaccttcatgtaagcttagagttatggaaacagccttttaaagttattatttcctgcctcagatttctatgacagaaaaaaaggcaatgggaatacaaattattaaaagataaatatttactcatttcattttataaattaattacaaatgtgtatatgttatctctcttaatttttatatcattgagttacagtctgctgatctgaattacaaatgtgtatatgttgtctctcttaatttttatatcattgagttacagtctgctgatctgatcttccttccttttttcttataagagttggctagaattgggaaataaacaaagagctactgctgctactggtatgaatgataaaagttcccgatctcattcagttttcaccctggtgatgacccagaccaaggtattttttttaaaagttcccga

SEQ ID NO: 57771 - DNA, 1014 bp, Homo sapiens
gtaatcccagctactcgggaggctgaggcaggagaatcacttgaacccgggaggcagaggctgcattgagctgacatcaggccactgcactccagcctgggcgacagaacgagactgtctcaaaaaaaagaagagccataacaaattactggttccctaaagaggtcctttcaaaaccctttccagagtggtgattatcatcatcattgtctccgattactatatagtagttataaatgcagtgatacattagatttgattttgatggcaaaaaatctctctctaaaagtggttgtgggtggggaagacacagattaaagataaggttggaaaagatggacatgacaaaatgtgaatgtgacaaaatgtaattgttttaaaatattttaatgtagttgtttaaaatattttaagggacagtgaaaaacttcacagagttagtagtgtttaacttgaagctgtgtatctaagcaagttagaagaggatttggtgaccactgcatcagggcaggaacctccagtttgaacctaaggggtcagtagttaaaggcaagttatacagtactgtagaatctttttcgtgcaaatgggttagtattaagagggagaactgagggtgagttggtttgagagaattggaatgtctaatagagcctcaagaaccatgataggaagagaaacaatagaaagagctggtagggacaaaatgcaagatggatgactatactgaacttagtaagggaccaagtgcctgattccaaactcatcagacaagccttgaaagcagggccagggtagagtacttgtcaaattgatgaggcaggtgttttttccagaataaattctgatttaaagcagtctcagagtcagggatggagcggggagggagtgtatatctggagccagacaaagagtgatgatgtttttctgtagatctaaagtaaatgaaagatttccacctaagtctcaaagggaaaaaggatatacagaaagattcatgattttaagggagag

SEQ ID NO: 57772 - DNA, 1339 bp, Homo sapiens
cactgctagtattgacatgtaccaccgaaaagaaatgagattatgaactattttggggttagtacagacagctgagtgatttgtacatactcaacattcttattgagatcacctaatacctctctgtaaatttgttgaaaagtaagtgacttgaagcttttcattatccattttaggaaaatacctacaagtctacttggaggaatccccagcattttcaacaggatgtcagaatgaccttgggctatgttggcaaagcacaatgggaagaagacaaccaattgaaggtcaaactaggccttaaaaaaaattgttcttcctaaatgaaactttatgtaagacccaagcttcctttatgtaaaaataggatactcactaggctttggggctgacaatggtttttaaatcttgctaatcttccctggaatgaaaccagcatgactcaaagagaaaaagagagtctataatattttctaatccctgagttcttttctttatatattaaaaaggattactaggctgggtgtggtggctcacgcctgtaatcccagcactttgggaggccgaggggagtggatcacctgagttcgagaccagcctaaccaacatggagaaaccctgtctctactaaaaatacaaaattagccaggcgtggtggcgcatgcctgtaatcccagctactcaggaggctgcggcaggagaattgcttgaactcgggaggcagagccaagatcgcaccactgcactccagcctgggcaacaagagtgaaactctgtctcaaaataatattaatgataataataataataataatagggattacttgcataattgttcttttaaaattattggcagtattgctgaatgtatttagattttttcaccaagtgacaacaactgaattcataaagattcatcaacaagacctgataaaaaaaaatgtaagcatattatagtggatacttccaagactcttggtctaacatgtattagaaagcagaaggagcccaggcacaggggctcccgccggtaatcccaaagctttgggaagccaaggcaggtggatcgcttgagctcaggagttagagaccagcctgggcaacatggtgaaatcccgtcaccacaaaaaaatgcaaaaattaactgggcgtggtggcatgcacctgtagtcccagctactctggaggctgaggtgaggggaatcacctgagccgggggaatcacctgagcccagggaagttgaggctgctgtgagccatggtcatgacactgccctccagcctggacaacagattgagaccctgtctcaaaaaaaaaaaaaaaaaaagaaaaaagaaa

SEQ ID NO: 57773 - DNA, 1085 bp, Homo sapiens
tttatattcatagtgcatcctggcctgctgaacatagcacagaacactggtgagtccctgtagttggtggtgagtgtgggtgtgcatggaagggcagacatttggcaataagtaagggaaaaagtgatgatatttatcacgatttcatgagcatcaagacttcatttttgtgctcattaggtctttatttcacaaaaggaagcaaaatctcataaataaatataaaaatttttatttggttgaaagagcaacaaagtagccagttaccataaagttttatgctttgttggaggagcactattttattatttcatttaaaataagtatgctaaatagtaaaatggtaattatgaaaatgaaactgtgaatttcataaaactgttaataatagcaaataatcatcagttaagtatttaggggaccagttcctatgcttttaacaatatgaaatgaaaataacaatataattatttttaaaataatgtagtcaatgaaagtagaaggtgagtaaagaaacaatcaaagatcaaagaaggtaagaccataaagcaatgaaccaaactaaatgaggatgactgatactctttttgattagtttttttactaacactaatagttagggaaaaacaaaaatatatggttagatggagctgcaatggactgatgaaggttgaagtaattgcactctcttaaatagtctctggttattatccacaatttaaagctactggagaagctaatgattaaattacttctaagacaatagacttagaattcctttcttactagttaatagacacagtttctctgacaaatgaaaaggagctattgtagatcagaaatcatttagtgattctttaaggagcaagataatagctcaaacttttaaactgtttaacaaaggtaatgaataacactgctgtaacatttcctgggtatcagacagtgttctaactccttttttttaaattttttaatttttgagatggaggctttctctgtcacccaggctggagtgcagtggcacaatctccattcactgcaacctctgcctcccagattcaggcgattctcctgcctcagcc

SEQ ID NO: 57774 - DNA, 1013 bp, Homo sapiens
gaattgcctcccttaaagccctccaggcttctccctggtattagcaatttagcagtttcttgagtgtatatacatataatatttttgtagcataaataggtatcttgttacacataatattctgtaatttgcttttttttaacctagcaatcattcattatttaataaagggctttctgatcatttttcttgacagcatagtgtcatatggatctaccataatttagcaaatcccctactgatgaatatttagaatgtatatagctttttgctactattaataatgccaataataacaatctttgtatatcattgtaaacatttagttgcacagtttataatttagtataaacatatttttccagttctcttgacattgtggtatagttttctatttaggaatttttaatttttatattgttaattatatcagtcttttttgggggtggttctgggttttaatgtcaaacaagactaactttaatacaattttattttaggctgataccatgttaaagatgggttttcaacaacaagtgcttgacattttggaaaacattcctaatgattgtcagaccattttggtttcagccacaattccaactagcatagaacagctagcaagccagcttctgcataatcctgtgagaattatcactggagaaaagaacctaccttgtgccaatgtacgtcagattattttgtgggtagaagacccagccaaaaagaaaaaattatttgaaattttaaatgtgagtagtaaagcagttaactatgttttatggattgtgtttgcatttttcacagctcttaagagaatgattttgagattgaactttcagggaatttgatataggtatttactaataaattgctttacctaccctagaattctatgagaatcaaataaatagctatttgggaaaacatgttggatagatacagggttgggttttcttttccttatagaattatatttaaatatcaagattattcctaaggaatatgttctc

SEQ ID NO: 57775 - DNA, 1037 bp, Homo sapiens
accatagcaatcaaactgcctacaaggtccttcctggtgccttggtgcctgcctcagcctgccccattctccccattccttaccatttagaaacttcactggcctcccagcctcaggaatgtcacagatacttttctccttaatcactcctcaccttgctcatgcccactcatcctttaggtttgacctgtgtgttgggtaggactggataggtccctccagttatggcttagtgtatttatctcatgagtactttctggttttatctgtttcttcctttgtattacaagtttcatgagagcagagactatgtctggcttattcatcactgaattctgggtgcttaacacagtgtctggtacatattagttgctcaatcaatatggaatgaatgaatgaaaatagctattactgatttttttaatttgctttttctcttttatttaggttatcatagcaacccctgggcgacttctggatataataaagcagagctctgtagaactctgtggtgtaaagattgtggtagtagatgaagtaagtagtggtatttaaaaaacagttacatgattttacacaatttatggaaagtatagttatataatttcattgtatgttcagtaccttttctctctctcaaaaaaaacctcagggacttttaaagcattgcagcaggttcctgtgtagcactgaagctaacataatgtgtactacactaaaattaaaccagagctgtcttttcctaattgacagaaaacacaaattcaatatgtactctattctcaatggtaagttgtttttttttaagcatttgatgcttactattatttgtttacaaaaatagtcagtgtcaagtaatgagacagggtcttgctctgttgcttaggtcacccaggctggagtgcagtgacggaaacacagctcactgcagcctcaacctcccacactcaagtgatccacccacctcagcctcctgagtagctgggactacaggcacacacatcaccatgcctggctaatttggtttttgtagagat

SEQ ID NO: 57776 - DNA, 1335 bp, Homo sapiens
gctaagataattaaaccagacccagaagaccttcagttggacaaaagcagagatgttcccgttgatgctgtagctacagaagcagccacaatagacaggcacatcagcgaatcatgccctttccccagcccaggtggccagttggcagaggttcattcagtaagtcccgagcagggtgcgaaggacagccatccttctgaagagcccgttaagtcattttccaaaacacagcgctgggcagaaccaggggaacccatctgtgttgtctgtggtcgttatggagagtatatctgtgataagacagatgaagatgtgtgtagtttggagtgtaaagcgaaacatcttctacaagttaaggaaaaggaagagaaatcaaaactcagcaatccacagaaggctgattctgagccagagtctccactgaatgcttcctatgtctacaaagagcacccctttattttgaaccttcaggaagaccagattgaaaatcttaaacagcagctgggaattttagttcaagggcaagaagtcaccaggcccattattgactttgaacattgtagtctccctgaggtcttaaatcacaacttgaagaaatcaggctatgaggtgccaactcccattcaaatgcagatgattcctgtgggacttctgggaagagacattctggccagtgcagatactggctcaggaaaaacagctgcttttcttcttcctgttatcatgcgagctttattcgaggtaagtgttaataatagagttcacatgtattattcttggaaacaagtgaggtatttaccaagtttcatttttaactatattaaaattgcagactaaaactaaatatttggaattttagtcactagtgcctgtagtgattttgcttctgatagtagtttgtatgaaaacataatttcagggaatttttcttgtattatattgaaccagagatctctttattgacgatctaaaaacttgcttccttacaaaacattttctttttaacagtttttctattaacagaatgagctttggatttgagggggaaaagatccagctgaccagacgagctacagtttgtgtgtcagttttgtctccttggattttgtgttttgaagaaactgatttatactgaagttggaacacatagagtttcaaaatatactttttttttctttttctttttctttttttgggaccgagtttcactcttgtcgcccaggctggagtgcaatggcacaatctcggctcactgcaacctctgcctcccaggttcaagtgatccgtctcccaggttcaggttcaagtgattctcctgcctcagcctcctgagaa

SEQ ID NO: 57777 - DNA, 1396 bp, Homo sapiens
ggatatcaagccccttccttaggcattgtcttagctcttgccaaacttttgcctgtgtgtctggtacaagcagccagttctctgcaggagctgactgggtgcctccttctttgtgttcctctttactctggagtgctgggccctggtttagcagatgtccccctccacccttggttcaaatgactgggacaatgatgagatccttacatgggtgctggtattgataggaatacctagacagtaggaaaaaaacaaattacacagagtcctgccctcaaacaagagctgatggagacccaggaactggagaccatctcctaaacccctactacttctgccctctggtgcaccctatcttttggctttcttccctctttcgtacttcccttcttccctctcttccattcactcttccctgctcccctctggcagacccactctgtactcctcttgcttgtcactgccactaccacgaccaccagttgtctctctgtcagcagatgtgccgtgttgcctctctgcacagtaccatccctgcattccacagaagacttgggcaagggtgcctgagaggtacccagagacaaatcacgtggcagccaggcagccccagagcaaagatattcagacagatgaaagtctccttacccccatttcttccaagatcagaacagcttgacatactccttcatacacagtgatgccaggaaggcaggggaggcgtgggaagtcttccttcccagtacctgcaaaatgtctgagcattatgttgatttttttcctttattaaaatgtactgtttaatcttataagaacaatatgcctgttattttatagaatgtctctaaatttggatttgtttaaggtttctttattcaagtttgataaggttcaagttatagaagcctggtagactactgcagaagagatgttgtagtctcagtaaatcatatcaggggacacataatgtttgttccagtataggtgatgttaactttgatcacctggtcaaagtggtatctgtagttttctccattataaaattatttttccactttaaattaattagtaatttatagggaggtaattcaaaatatcctgttcattaaactgttacccaccattttagaatccagtaatgatcttgcctgaaccgattattgctgttgattactatcctttttttccatttgtttgttggtattattctaccacaagaaagagctccttttttttttttttttttttttttttgagacgaagtctggctctgtcgcccaggctggagtgcagtggcccgacctcggctcagtgcaagctctgcctcccgggttcatgccattctcctgcctcagcctcctgagtagctgggactacaggcacccgccaccaggcc

SEQ ID NO: 57778 - DNA, 1034 bp, Homo sapiens
aggttagtggatatgctttaatgaaatggaagcaacccctggactcttgtcttccaccttccacccttttgatcttggcaaatcattattatgtttgagcctgtttagcaagatggtgtagagctataattctgtgcttatcagctatgtgcccctgggcaagatgtcctttcttgagttctttatctgtaaaataaggtaagagggttgtcagaattaaatgacagaatgcatgtttaggactgtgtctgacaagatgttataaaggtcatatatgaaaatggatgtaaaagcagtaagtaaatgctaggtggatatataggtatgatagataaatttgtaatcctgataatgagcatttacttttcacagctaatatttagatgccaaataacttatattagccattttttactgatacaggaaataaaaatccattgtttatacatttgataagttatcttaaaatcaaataattttccttttacagctgttctactaatagtttctgtttatttcctacaatactaaagtgtaaatgaataccagcactatattctgcaatttaaaactgaacttcaccatcacgctgaggcagctatattaaatttaaagctggctcactactgggtagtgcatctacgaagaaaggaaagtgttttcaattattaaatgaggatgatatttttagatgtcaccaaaatcccaaattgatacatccactcttgacctctttccagagtcctatatctccagctgcttattggatatttccacttggatatttttgctattgtttcaaactcaatatgtctaaaactgagtttttgatcttgcttttagaattggtgctgcctctgattttcatttttctattaatgatatcactgtttccctcataacgtaggcttattattgatttccatcttgaccctctttctttgctttattcctgggtactttttgtttgtctttagcagttagtctcttatgtcctatactttctgttttcactactgcctttgaacttcatt

SEQ ID NO: 57779 - DNA, 1058 bp, Homo sapiens
aataactagaatattgattatccagtatgagattgtcatctttcattgatggctccaaaatcaccttatagttaccctctgactttggcatacctgctttgcatacatatcatatgtgaacagtttgcccataccagggacaagcagaatctacttaggtccttatcagtgtctcatattcatctcccccagaatcattcccctagctggacactccagcttgtgattacttctgcttccgttgtttgaaggctaagtggatagttagaaagcacatccatgactttgtgaagcagtgtttgtttagttgctgttctttcagatacagatatatatgtcatagataacctacttatccttagagtgtctatttcagatcctctaataagaatgaaacaaatttaacatgttttctacatttttttccagtgtagtttgtatgtgtgaaatacttggacaattaattttaaaatgaggggtttggtagactgctgattgtgttactcatgtttctttcacactttattgatcctgctgatagctttgaatgtattttaataatatttaaggaatggagtttaaatgacttagaatctttttttttttcttagttggagtctcactctgttgcccaggctggagtgcagtggtgcgatcttggctcacagcaacctcagccttctggtttcaagcaattcttgtgcctcagcctcccaagtagctgagattataggcgtgcatcaccatgcccagctaatttttgtacttttagtagaggctgggtttcaccatgttggccaggctggtcttgaactctagacttcaagtgatcctcccacctcagcctctcaatatgctgagattacaggtgcacggcatgggcaacatagaatctttatctctggttctaacttctatttgtggattgttagaacttgagaacttcaggctgggtgtggtagctcacgcctgtaatcccagcactttgggagacaaaggctggcggatcacctgaggtcaggagtttgagactagcctggctaacatggcgaaacccc

SEQ ID NO: 57780 - DNA, 1042 bp, Homo sapiens
agacagggtctccctctgttgctcagcttgaagtgcagtggcatcatctcggctcactgtatcctcaacctcccgggctcaggtgatcctcctacctcagcctcccaagtagctgggattacagggatgctcactatacccggctaattttttttgtattttttgtagagacagggttttgccatgttgccctggctggtttcgaactcttgggctcaagcgatcctcctgcctcggcctcccaaattaagaggattacaggtgtaaaccactgcctgtaatctcatgattacatcatgtgtactcttgatagttactgtttttttcctgcttacatgtctttgatggctcattggcaactccattattagtgaaccaggcacatgaagaaatttcctaatttatttcctttaagtgttaattgatataacattttggggggaaaacataaaaataaatgattacagtgaagtttgaagattatcttcagattttattcattattgtaataaaatgattctgtaggctaatctgatggccatacagtgactgtataatgccttaagtaataaaaacactaaaaatctttagagcattgggaaatttttagagcagtttgatatacatctcatttgatgccgtgtgtggtaagaaatgaagtattatcccacatttaacagatgaagaagatgaggctgagtgaagtccattgatgtcctaaggtcagaacttactttttaaaaaatcaactttactaaggcataatttacataaaatgtacccatttaaagtaatttgaacagttttgacaaaggtatgcactcttgtagataccactacagttgagatatagaacataataaccccccaaaattcccttgtgcctttttgcagtcagcccgcagccccaccccacttcaggcatccattaatctcagttctgtcgttgtagattaatttttgcctgttctagaatttcatatagatgaaagcaaactgcacgaactctttttttactagattcttttgctcatatttttga

SEQ ID NO: 57781 - DNA, 1038 bp, Homo sapiens
agtccaaaaactaagttcattttaggatttttttttaagttctatgtctaaatctgatacaagaatagtaaaagccatgcagtagtagatcttttatcttaatttatgaggctaaaaatttcttataacactgaaaccctttcctttctttaataggtttaaccttcatttctaatacataaatgtaatttatttttgcttagactccactggttggagatgataaaaatataacccttgtaacacagatatagaacctaatggtggcctttggatgatacttcagctctcacccagtaaagtccctgggattccacattccccaaatccttttcttttcattgaaatgccaagtagccctcctgctttttcttccataaccagccttcctgctgctgctcttagatgtcatgctatgctctgccacctggtggttgcaatgtacactgctgtttctgttgctgccgcagttgcctcctacaaggtgcagaggttgggatttaagtctgcaggtgtgatgttcagtgttgtgggctctggaggcagatttctaagtttgaatccctacatcactgcctccttgctgtgtaaccttggacaggttatacagttttcttatctgtaaaataggtagagtaatagtgcttaccctcacagggttgtttcattaaattaatacaaatgctgagaacattacatactgaaaacagtacatgacagaaaacagtaaaatgccaaaaacagtatgtgacacttaacagtgttagttattgttattattctgatctgaatgctttaggtaagcaattaaacgtgtatattttatttggagctatcatagctccaaactgattgattttagccttgagtttattttttaatgttgatcttttctaaatccattgtgtatatactttctgttatacataatttttaattatcactatcatattgtaaagttaagaagtaaaaaaaaaaaatcacactaaaatgtaagagttcttaaagtgagtgaatatcatatggaaataaccacag

SEQ ID NO: 57782 - DNA, 1050 bp, Homo sapiens
tttaactgtggcattatgactgccctaaactcccccatgatcatggatatgtctgaaatcataccttaagaacttgattcacagtgttatttattgataacaacaacattaattttagggaaaataactttcatttactagttctaaaatagattgtaaaatttttacttgatattagtttgcttcctaagcattaaaactgacattaccaagtaccttttttcccttagcgctccaaccagttcctgacatacagtgtctgctcaacaactatttgataaattaatgaattctagaatatcaaataagtacccataaactatttttttctgattgtgaagctgaaattttctttatttgagtgagactgatatttgacatcagggctctgactataggcatcttaatgtgtgttattttattgttatatttgaatgtaaattcaaaaaaagaataaaaattcaaactgatatttttatattttaaggtaaatgaacatttgaaagacataatggaacaagaacaaaaactgaaagaacatcacacagttgaagctccaggaggtcaaaaggtatttatttcaaaaacaaaaaggtgcctttatgagactgtatatatgttcacatatttgtattattttgggaaatgttaattgtgtttattaaattattttttagtggtgttaactgtaccctagaaagccatactgtaaacactaagtaaatagaagtacaaaatgaaggttaattggatgatggtgtttgtaaaaaaatatattaatgactagaactcaagttctgaggttcttttgtcaaaaataacagtttgcctttctttggtaaaatgtgtaaaacaacaaggaaacaattttaaatgttcaggctttataatgacatgcaatgcagcaagaccaacatttaaaacaaaattcccagaatttcactgggtgcgatggctcacgcctgtaataccagcactttgggaggccaaggcaggcagatcatgaggttaggagttcaagaccagcctgacaaacatgatgaagcccca

SEQ ID NO: 57783 - DNA, 1050 bp, Homo sapiens
tttattaacagatttctttcagagaagtttgtagtatagatagacagctggatcaatgctattttttggtgctttgtagaaatcaatttattttcccaaagtattgcctaattttatatttttatcttaagtttaaggcatctcatgggaaagttctctagaaacattaatttaaataattatatgtttaaaaaacattaaaataactttcctgggagatacacacacacacacacacacacacacacacgacctaaattatctcaaatacctttatttttatttatttatttgactcttccttccctcctttatttacttatttatgcttaatcccatgtctcagcagaatcgtcaagtaccttttaaatgaaccatttattcaccaaggtgatgaaatagaattctcctttctcatatcaaatacataactctctcctgtatggtttgtctttggtatgcagaataagaactgtaaccatttgatttcttaggcgtaaaactgaggaagaacgtcagaagaaagaagatgagagagcacgcagagaatttattaggcaagaatatatgaggcggaaacaactgaaactaatggaagatatggatacagtaattaaaccccgtcctcaagtagtaaaacaaaaaaaacagcgaccaaaatctattcacagagatcatattgaatcccccaaaacaccaataaagggtcctccaggtaacatagcttattatgaagagtctgttcataaaaaacaccagcttgattggtttgtcatactaacttggttgtactttgatgtgcaaaattggatacacagtttgagattgtgcatgctcccttttggaaaaccaaaatgagcaaatgaagtttttaataaattaaatgtattatgtgtgcatgcatatattcagtagaacaaatgtgaatgctaaaaatcaaatctaaatattaatctattagggaactgtgccctcagatataatctccttgaactattaactgccctttacatacttataaatttaaataaatgttatatgcatgaaatg

SEQ ID NO: 57784 - DNA, 1049 bp, Homo sapiens
atgcaggtggtcactttcaggtagttcagtaagtttctaaacaaaattagtgatgctacttatatctcatccctctaaccaatgctggccatttctgtgtgtagtttgggtccgaagaagttttagagaagttctacatagttcctcagtactgagtaaaggctagaatccaccaagtcctctccctaatactgggattccaggtatccagaattgtgcacctttagcaagtattaagaggctctaaaagataagaatgcattgaatctaggaaggtatctagcctcacatatcgccaccaagtcctcttctagcttctaggtaggcatgattggaataaaagcaatgaagaatagaatgtgggttaaggacacttctaaataaatgaagcaggagagaaatcagaagaaatgtcagcagcacgttgagaggtaagataggaaggcatgggagaacatgtatggggaagagcagagggaaaaggagatgcctccatctatccatgatagagtggaagtggaaaccctagaaaggcctaaggaggttagaacttgctagagacccactctgtggcttttaatactacctcctaccgccagtctgacagcctttaaggcctgggatttgacagtatttccatgttactcactctgcttctctatgttagttcagttgaacaatctgaaaaagaaagcttttttttgccttttgaaaagacttaaattactcatggacccattctactctaagctaaccagtaaccgtatagatttaagaaagaaggttaaataggcagtatgacagttatagcaatattttatttttagtactgctctcacagggtactccaaaaggccataggaacatcctccatatctctgggtggataaaacaatgttttggttggattgcagccagtaagaggcctttaagcacagaatttggtcttctattacaatatttcagcagtgtaggaacaattacatcattttaaaatagtagtatttctgacttaggaatgttatttttattattgttgttaaatccct

SEQ ID NO: 57785 - DNA, 1359 bp, Homo sapiens
ataagcacataatacaaaatgctttagctcattgctgtttggctggaaaagtaaatgaaggtcagaagaaaaaaatactggaggtaagcatgtttgcatgaaaattaaatttggcaaactgtagaagtcttttatccattcaagagaatgtactctcatgggcctagactttcaacagcatgtaaaaagatctgtagctagatgttttaattatcagatttagtttattttcacattaggttctggaagcctgcagattttattaaagactagcaataggctttaagatttgtcattgaaataatgttataaaatgtgactaagaaacgtaacataattatataaactttattcagcaaaataaagggtttttattcgtgttgttatgttgtttttgttttttattttaaaggaaatggagaaatcagatgccaacaacttcttaatcttgttccgggattcaggatgccagttcagatctttatacacttattgcccagaaactgaagaaatcaataaactgactgggataggccctaaatctatcactaaaaaaatgattgaaggactttacaaatataattctgacaggaaacagtttagccacatacccgctaaaactttatctgccagtgttgatgcaattaccattcatagccatttatggcagaccaaaagaccagtaacacccaaaaaacttttacccactaaggcatagaagttgggaaatacttgcttcagaacattcatggtaaatttgcacttcatctttcctgcctatagaaaatctttctaattgccaacaagacttttattaattaaaactggacattaagctctgttgtcatgaacaactggaatgtaaaccacagtattttggagtgcagaacattctcaattaagtgataagtccaaatgatgaaggaaatgttttaattcacaaatggagatttgtatgtgttatcaggttcacctgcttgatattagatacattaaagcactgaattttcatggatattagttggatttatcattgaaatatggttaagattacaaattatgtgttttatttgttgcttttttttaaccttttaatgtatattcttgtcttcagatggtttgctatttttctctcctgggggtttattctaagatacctttgtattttatttcatgtggagatcatgaaagtaggaaatatacctttagaagtaactcgcacctttcttatgatgttaagagaaacactagtgtttagttttacagtaaccctcatattttaatggtgttacagcatttgcaaaaattattctgctaagtatttacaactctatttattattcactcaagtattaacat

SEQ ID NO: 57786 - DNA, 1785 bp, Homo sapiens
ttttttccaatacctgtgcaagatacatgtgtagctcaaaactatttgtgatctactgtttgcatgtaagagaccaggatatgtaactcttatattttaagtgtatacatattgtgtatataacatatggatattaaaaatggggaattgcacattttaccttttggacagtaatttctatcacagttagaaggaaatgatagtcaaatacacgtttagattaaaactagtttaaaaaattataaatgaatctaatcaaaatgtgaatagtagtcaaaaggataatttaataagcattttacgttactaaatttgttcatttcaatattaactaaatttccctcatcaaagcaatctttgtgatattacttcgctattaaataaagaaaattggatgcaagacaatggagaaactttaaaactaaacaggaccaccctttattcttaaatttgtgtgtgtccaacagttgaattgaatgtctataaggtctaaaggtagaatgtgaatattgccacagagttcattgctctcagtataagattttactttattaatgcagaaggaatatggatatatttctttaagtctgcagatttttttattatggtgcagcttttttttaattatgtttttaaaattatacagttgaaaaatatgccatttcataaagtctgaggattttcgtcaaccttactgaaacacactggtgctttcatcatcagaggtcaaattattatgataactattccattaagtttgccaaacatttgtcgtggttaccagtgcagcctgtcaaattctgctatttgacacagctttggaaagatttagttcttggtttttccgttttgtattagaatgactgttacagttttatttggctgtttaaagccaaattcagctatttaattatggtttcatggacactgttgagcaatgtacagtgtatggtgtgcttacctgtccactctagagcattgcttacaggttttttgttttttaagatgctgtgctgtaaaatactgtcatacttgctatttcctggtacagtgtagtttttcccctttcatttgaataaaagcatggcaccaaatgactccttttctgtttcttgaataaaatgtagtttttggtaaaattatttgaacttgagataactcatacagtttttctatcccctaacctatgtttaaatttaataacttgaatattcataacaggcaacttgaaataattagccttttaaaaatactaacttagggcaatgttaaaaagtcggtaactttctatgcttagcacagacggtctacatagtatgatttataaatgtgcttatcttatgttaatcttgctcatactaattcactatcttttggtgaattgatagttatattgtaccagaactagtgctctatgtctttgaaactgaatggccagtgaactcactgatctggagtagccatgagaagctagttcttgaccattattttgtaagtttcactttgattttgctgattctacttactcagaacagagtaaagaaaaaggtgttttttaagaaaaaagagatctgataacaaaactataaaataatcgtcatgcctaattatatacctgaagaaatatctggttagtagacataaatgtggttttctagcttgggacctttttgataggttctgtaacttcagagcacagctatatttccacaatatttccagtactttaattttcagaaataaaaatatttaacccggccgggcgcggtggctcacgcctgtaat

SEQ ID NO: 57787 - DNA, 1325 bp, Homo sapiens
atgaggacctcaaggccctatcaacagaactgatgtctctgcaattcaaaattcactatttatttatttttttagagatggagtctcgctctgttgcccaggctggagtgcagcagagcgatctcagctagctgcaagctccgcctcctgggttgacgccattcttctgcctcagcctcctgagtagctaggactacaggagcccgccaccacacccggctaaagttttgtatttttagtagagacggggtttcaccgtgttaaccaggatggtctcgatctcctgacctcgtgatctgcccgcctcagcctcccaaagtgctgggattacaggcgtgagccaccgcgcccggcaaaattcagtatttaaagaattaatgtggtatcctgttggctgacaacgtaagatagtctttttttttttccatacagcaagtcttttcatttttattactcaaaaaagcttcattttttatttagctttctgactctgcttgtgccttcaacactttcacaacaattttctgctccttgataaggaaagcacgcttgatcctgtcacaaacacatttagcacacatggaaccaacataggccctgctgacatgtttctttgttttggacaacctcataagaactttaggtcttacagcacaaacccttcaaagtctgcctgggcacacgccacacgcagattttgatgctttcccaaccttcttggtataaaggtaaacaattctattaccaggggttcgcgtagttttgttagaggctgtattgtaggaaagcctatgacagtatgtcaaatgctggaccattctgagtgcctgtagacaagttccccaggaagagcagtcttaagttctttatagagttagttttagtagagttagtaccctataaagtacatgaattctcttgatggacaagaggctcttactgttgacaagacaagggcgcatctgtcctttactttcggttccatacctctaatacagcacacggtatatccgttgtttgtaaaggtctaatggcatccacttcaagagttccttgatggaagagaacttacctttgtgacctacctagcccctttcatctaataactgtttcctagataattctgattaacctattatcagaatttgttttcaccacttttgcagtttttccattctctcatctttatgaatctagatattaaacagcaggtgagcgtaacaggctgattttagctgttgtgttgatgatggttaacagtcttgggcaagagaacaaaatccactttaaccacaagttctgagttttctaccaatggtgaatac

SEQ ID NO: 57788 - DNA, 1084 bp, Homo sapiens
atgaaatacctccggggagggcaggccgcagggaggctcggggggagggaagatggcctggacaaacaggtcctgaagctgcgaggctggagtggagggcgcaggggcaggcgggcggcgccagagctccatgggacaggtaagcgggaaaacttcggggcacccagtgcgggtgaactggggcgggggatcgggcccctgaacccacggtcttcagccttagcggagggtgccctacagggaatggggtaattttttcaaaggggcaggaattctgagttcctaccaaaaatgcacatttccagtccctcaacctttctccttcgaccttcttcgtgcctgtggatcttcctggccaggttccgggaagccagaaagcagccaaacaaaaggagcaaagtctcgggccagcctggatgtggagggcgcagtgggggaggggagcagggtggacaggacaaaggggctttttagagaaagcctagaggtctcatttcagggcgcattccaagctggcttggagttcccctgtcccagcccacttcacctttgcttagtggaggcgaacacctttcctagtgagcagggagcagacgcgagtaagaaaacagtgaaggaaccatctcctacccctcttgcctggagggtcccgggctatttcacttcttccttttttcactgttgtctctagcgctggccattgattccttaattcttgaagtaagattttagcagtgcctgagactactttgctgggggctgttggggatgtgaagatggtaggacgaggcccttgctttaaagaacttccaatctggtgttatcagaagaccctaaaagaaggaacttttttttaaaaaaaatggagagtggatggctacagcgctggggaagagttttctgactcgggacttttcctcaggaaacgaaaacactgaagaggtccagtttctcttccctggggaagggctcttgtctgcaaagatcagattccaagtactataatgttttgcaaggaaataccacttcctcaccaactggtggtctggacggcactctggggtttggggctggggcatcagtc

SEQ ID NO: 57789 - DNA, 1052 bp, Homo sapiens
caggaggatctcttgggcccaggagtatgagacctgcctggaccacacagggagaccctgtctctacaaataactaaaataaaaaaattggataggcatggttgtggacacctatagtcccagctactcaggagtctgaggtgggagattgattgagctcaggaggtcaaggctgcagtgagctgtgatcgggccactgcactccagcctaggcaacattgtaacaacccatctttaaaaagatgggttaaacctttgtggagcaaaggttaacaaacttttccataaagagccagacagtacatattttagtctttgtaggctctttggtctttatcacaactgttcaactctgctacttcagtgctaaaacagccagacattacataaacaaattcatagccgtgttccaataaacatttatttacaaaagcagctattgaactggatttgacccctgggccatagtttgctaacctctgttgtaagggatttcaagatggttggaactttttactttttttgaaacttcctgggcaatgcccatgcatttgagatgcaagctcacaggggagagcccataaagggttgtggttaagagcagactccagtcagactgtctgggtgtgaattctgactcaaccacctttgttgaatgtataacctaaaccacgttactcaactcctctgagacgtggtttcctcaactgtcacttgcaggtgataatatctaccttacgtggttgttatgagaattacctgaattaatatatataaagtgctgtatttagaaatgtattggcacagtagaaacattagcaattattactttttcctcatcttcattctcaaacacagttgaaaatgtttcgtgagttccatccaggtcactttaggcttattctcaagatctgaaggcctggccgggtgtggtggctcacgcctgtgatcccagcactttgggaagccgaggtgggtggatcacctgaggtcaggagttcaagaccagcctggccaacctggcaaaaccccgtctctactaaaaatacaaa

SEQ ID NO: 57790 - DNA, 1020 bp, Homo sapiens
tgggtccttccatcaggtcctctaccttaggccaagacggcatcatttctcttgttagaatttccgggcgggctgggtgtggtggctcatgcctgtaatcccagcactttgggagtctgaggcaagaggattttgtgagcccaggagttcaagaccagcctggacaacatggcgagaccctatctctacagaaaaaaaatttttaattatccggctatggtggcacgtgcctgtagtctcagctgctcgaggaggctgaggtgaggggatcgcatgagcctaggaagttgaggctgcagtgagccatgtttgcaccactgtctcaaaaaaaaaaaaatagaatttcccctggctcccctttatgtgccatgcaatttgggcaagttgatccaccctgttcttcttttcccagagcgagcccaaactgtctgcccaaatgaaagctgtgtcggctgagtgcctgggccccccactggatatctccaccaagaacatcaccaagtccctggcctccctcgttgagatcaaagaggacggagtgggcttctctgtccgagacccctattaccgggacagggtctcgcgcaccgtcagtctgcctacccggggcagcactttgtaaggatgggagcaggaatgtgggttggagtggaggtggagttgggtctgggcctcactggactcttctgttgtagccctaggcaatctcgagccacagagacgtccccgctgacgagaaggaagtcctacgaccgagggcagcccattaggtgagatcatgttctagaatctgctccagagtcaccaccagtctagttcttggttacatgagtggctatgatgttctgctctgttgatcatcttgtacacagtgtaacctgggccagcttgactgagccattcaggttcacccagtggtcccttccccaccctgtcaggtgtggactgaagaaatgggccaggcgtgatggctcacacctgtaatcccagcactttgggaggctgagatggccagatcac

SEQ ID NO: 57791 - DNA, 1055 bp, Homo sapiens
ccctcacttccccagaaccacccctaacccccaccaggagccctggtctgattccagtgggtgagatataggagggagaccatcatccctcccccgacacttggacagggcttctcaacccctttccctccctcccgccctcccacagagaatggctacgccagcacagatgaggagatctcagagttctctgagggcaggtgagtttgcaagctgggagtgagaggctggctcacagcatgtacctggggctggtgggaggagttgccataggtcccagggctgagcctgaatttgggggctcctcaggatcctgaactctctctgcttcttcctcagcttctcccagtcattcaccatgaaaggctccaccagccatgacgatttcaagttcaaggtgagccccgccggaagtcaggcagtgggtgcagcagggccagcctccacacagcctgttcaccgcttactgtggctctgctccaccctcagccacaacacaatgttgtccccagctgggagggaggtgccaagaaaatttagtctggaattgggggttgtccagatatgtaacctgttgcagcccattccttctgaggtgggtggaaggtgggagaagtggctggagccaccgctagcctctgttgccaccctgctagcaacagcaccataaccaggggccctgctttcaaaaatatcccctttcccccacccatgattctgcctcacactctaagtcaaaacctacctctaaatgtctggttatcttacgtgcacacagtcaattcaaccatatgggagtcaaaaataaggaagtttacctaataatgagggatcagtttcattagactgaagcaagatgcagggtttattaaggagacaaggagggaaaaagcttcagactgggaatagcaaattatgcatagttttgaggtaaactgattagctggtgaccagcaaagaagtcaggctgggcattctgtgtttacatagtccaactaagggccgtgaaaccatttcagttgctctggattctccagaaaccataagagtttagc

SEQ ID NO: 57792 - DNA, 1008 bp, Homo sapiens
agactactttttctatgtatgagattatatatattgctctaagacttccctttttcatttagcattatgttttataaatctttccatattaaacctacttctggttcacgcctgtaatcccagcactttgggaggccacggcaggagaatcacttgaacccaggagtttgagaccagcctgggcaacatagggacgcctagtctctacaaaaaatacaaaaattagccagatgtggtggcacatgcctgtagttcatgttacttgggaggctgagatggaaggattgcctgagcccgggaggctgaggctgcagtcagctgtgactctagcctgggcgacagagcaagaccttggctctaaccaaaaaataaaaatttaaaaaaacctacttctcttcatcttctgccatggtgtcccatatgtgacaatgatgaataaatttattatagtagccttctagtgatgggcatttaggttgtttccagtttcttgctattgccaacagtgcttgtatacctctgtgcaaagtattttttctatagatttctttttggaaaaggcccatatgagctgccctattagaggcacagatataagagcagtagtatcagtggtgttgaagacccttgctgctatttatcttttttttttttttttttctgagacggagtttcgctcttgttgcccaggctggagtgcaatggtgtgatcttggctcaccgcaacctccacctcccaggttcaagcgattctcctgcctcagcgtcccgagtagctgggattagaggcatgcgccaccacgcccggctaattttgtatttttagtagagacggggtttctccatgttggtcaggctagtctcgaactcccagcctcaggtgatccgcccgccttggcctcccaaagtgctggaattataggtctgagccaccgcgctggcctatttatcttctttatcgcacccttcttcccgccgtcccactccaggcgatggcaatgaggccat

SEQ ID NO: 57793 - DNA, 1153 bp, Homo sapiens
ggttacaacaggggagacctgctcagagcagggaataacatgttggacacagaggtggaactggatcatgaaaggtttagataaactcatgtatgccacatatggctttttgggagaacagagtcctttagagcacatcccattcttaatccaacacatggtctttatatcacacacccttgatgcttctgccagaaacccagccctgtagctcagaagggagctatgcttgactcttgcaggactcctgtcagagctggaagggccttttaaagattatccggtgcaaccgctttatctcaaagagaagagaacgggcccagggtatagacacttggtggcagagccaggacagagcccaggtgcattgcagcatgacacctgcttcacctctgcacacctccaaggggtttggatttttccattggtagtaatgaaggtgcattctgtagagttttttgctttgtcagtgtggtccctgaaccaaacaggttggaaccatgctgatctgaggaaggctgggaatgagaggcctgagacaagccaggtaccagcccaggccccactgaggctgagtcagaagtaaagacctgtggctgagggtctagatttgggttctggcctcactaccactatggagatgccactttgcctcctaagcctctttccctgtttttagatgtggaacctatgatctttatcccaccttacgcaagagtgctgttagatgaaagtgggtctactcttcctttgggaatcatgtagttactaagcctgctctggccagcacccagctaggtactgggaatatggagatgtataagacataaccctgtgttcaaggaacgtacatctcctggggagacagcacgaataaagattggattacaatgcagtgcattggcggggggttggggggagctggctattgggcacaggtggctaagctgagagttaaaagatgaggtggcaaagccatgccctcctggtgagagtgtgggtgtggctccttcagagagcagcctggcagatccgtgtggctggaggttgggaaagtgggtgagggaggcgtagcaagagatggaactggagtgaggtgggttgggacccctggcagagcaattgagttagcattggccctaggggctctgtg

SEQ ID NO: 57794 - DNA, 1101 bp, Homo sapiens
aatgatccactttttcttattcaccctcgccctttatgtttccccaatcctacctaagaagttggagaaggaatgtggggaagagggtggctgccaagtccactggacagaggtgcacacacaagtgtggggtctggggtagaggacacacacacacacacacacacacacccatttcccctcatccctctccccgcattcctctaagtacctgctttgggactggcaggcctagacaactttctgtgagtctcatttgccatctggacatttttctatctttaggacccggtgctgcagcttgcttcctacagtggcagtccttgctggatttgaacttggggatggagaaagctcaagagcatagatatggttcacctaacaggatggggaacagaaagttgacaaccttgctagagcctgaaccccctgaaccccaggcagggtctctgcatacttgacatgtgctttcttttccagagttctgaagatatccggtgcaaatgcatctgtccaccttatagaaacatcagtgggcacatttacaaccagaatgtatcccagaaggactggtaaggcattacacgcaggcccctggctgctatacccagttgaagttatgggtgtttactagagttcttggaccctggaggataagcatgctctcccattcctatggagagcctttcaaaggagtaattattcatgtcacagaaccaatttcatagttgtcaactgtctgtggaaacaggatccaggtgtctgaattccagctgagtggtccctggctagaggagtggattttgttgttttgctttgaatattggtctttagtgatgcatacagaatagtagtagagaagttggcaaaggtaggtattctgaccacatgctgtaggatacctaatgcttttgcaaagctgtgttacatgtgttattctgtgccagtcttatagcatccttgtaaagtaggtgggatggattttgctcccattttataatagcagagacagaggcccaaagaaataatttagagtgttgaattcatttctgggtacctcacttttaaaaagagaagaataacccagaattcattcagaga

SEQ ID NO: 57795 - DNA, 1087 bp, Homo sapiens
agcgggcttgtaggttcgtggacgcggcattgggggaggggacgggggtcgcggggctattgggggtcccagtccggcttaagacctctgggcgtggtgggcaccggccttcgccgtcggagcaggggtcccagactcgcacccaaaagttcccgtcgggcccgagcggggaggagctgcggggcgggcagaggcggagatggcggagggcggtgggacgtgatgcgcgggtcagagccgggccttgagaaggaactggaggcccctggcagcggtgtcccctcgaggacccctctgccgggctcaccaggtggctggcggagagccggagagttgggcgggagggaagcagggtttggcgaccaggtttagcaggccttggaatcctggagcccagcccccaaccccattcccacttggccggatggttaagggcctagcgtgctggctgcggtgtggccaccttccccttctccgactccgtatctctttttccaggtgtccggctttgctggcccagcaagcctgataagcatgaagctcttatctttggtggctgtggtcgggtgtttgctggtgcccccagctgaagccaacaaggtgagggaggtgagcctgcagcacctggtcacgaccacagtgcacggccaccctgtctacagggctgactcagaggtagccagctgctccttaagcctgcctctcactcacctatgggccatacttcttttagtggtcttccttcaggttcaaggctgctggcctccctaaggatagtgcgggtgaggagtgaggaagggtggggcacagagcactggctcactctgatcagacagatcagtggtggacttccagcaaggaagtttggagaagttatctaagttctccataccttcctttgctttggaccaaagtatgttttgtttcagatatttttggatttgggagtatttgcacataaaaaatgagctatcttggggaggggacctaagtctaaacctgaagttcgtttatgtttcatatatgctgtatatacatagcccgaaggtaattttatacaatattttcaataattgtgtgcatgaaa

SEQ ID NO: 57796 - DNA, 1039 bp, Homo sapiens
gaggtgggtagatcacttgaggccaggaattcgagagcagcctgtccaacaaggtgaaaccccgtctgtaccaaagatacaaaaattagccaggcatggtggtgagtgcctgtaatcccaactactcaggaggctgaggcaggagaatcgcttgaactccagaggcagaggttgcagtgagccaagatagtgccactgcactccagcctgggtgacagagcgagattccatctcaataaaataaaataaaataaaaataataataaaataaatccttatcctgagtgacttggaatggtagctgggcagtactagcattttgttgaaaggtaattgtgggtcagtactctgttaggtgcattgcatgatttagtaaataattcatataataaagacagggaaggaacaaggatgggatggggattatcaagatagaagatggaaactgagctttttcaggcaggcaatggcaggaagcagggtgcggaggcaccttgattaacaatgggacccagcagcctggaaggatccagaacaaatcctggcacatgtctggccattgtggagtgggaggaaggtatcaaaacctgccactccaggagatgggctggagtgtgagcctcgtccctctggcctggccctgatgaaccatgatctgcccctcccccaagccacaacacaaagacaatagtcccagcgagcctccttgggacaggacagatcgtgccaggctgcccagcaggacaaggggcccttgtgcaggcctcagcttcagatcctgctccaccctctctgcgttggggggtggtcggaagttcagatcttgtgatgggagggaggctgagagtctttctacagggccagtgctggggccagggtcacccagaggtctccagggagccaggggtgaggctgggtagcaagttttgggtttctggagtctgggggaggcaggagattggctgctctgggtggcttcttgtggagcttgagaagtggccttctttgaatagaaaggaacagaagtttcctgaccttt

SEQ ID NO: 57797 - DNA, 1002 bp, Homo sapiens
gcaggagaattgcttgaacctgggaggcagaggttacagtgagctgagatggcaccactgcactccagcctaggtgacaaagcagcaagacgcagtctcaaaacaacaacaacaaaaaaaacgggaaaacaggtacagacaatagctgcctggagttgtacagaaacttgattgggtaaccctggacctttccaggctgtggccagcagttgaccctgcctgcctttcctccattgttttcccatgtctgaccttccctgttgcaaagcagtggcctactacagggtctctctggagggagcaaggaggctcagtggccccattcagcaattcgaagtccctttaattgttttgtgcttccaacctgttttgttcccgttcagatttctctcgccttccaataaaaacttccctgtcctgtgccccagtccctcagagtccacaagaggttcaacttgctcatctgatgtgtgaattacatcacacagttgaatgagaatttgttaattacaacagaacttttataaatatgtcacttactgtatccaattgtacaattgtccatgggtggcttaatcccaccatggcaaataagcgtctgtttatgcaaccctaatcagtgctgagaaagatcagagctcaactagaatgctgtgatcaattggtgatgcctgccatgggctttggaagaaaggtggggagaatggcggcattatctgggggggtgggcgtggctggagagaagagggttgccatcctatataacagcagcttctaaatagcctctaaaatagaatctttgggcggggcgcggtggctcacgcctgtaaccccagcactgtgggaggccgaggcaggcggatcacgaggtcaggagaccaacctggctaacacggtgaaaccccatctctactaaaaatacaaaaaaagttagccgggcgtagtggcaggcacctatagtcctagctactcgggaggctgagacaggagaatggcgtgaac

SEQ ID NO: 57798 - DNA, 1090 bp, Homo sapiens
gtataaggcagaccccctgtgctgaggattgatccacattgatccctcaggtcttgggggcctgggaggaagcagattcctttaccacagtacgtatgcaaaaaatgttttccatgtttatggaaaaggctgggaagtgctggtgtaaaatgcccaagctcataatagatactcctttctccattgttgcccctgctctaactgctgttctttcttgccagcttcgttgttccctctggcttgtgggggcacggctgtgctccatgtggcaaggtggaaggcatggacgtgtggaggaggcgctggagctgaaggaatggacgagccctgggaggagggcagaaggctacgcagggctgaggatgaagatgcagcccctggatggtcccagactctcaggacatgcccagctcaggggcttcgagccacaggcctggcctcatatggcatgagggggagctggcataggagccccctccctgctgtggtcctgccctctgtcctgcagactgctcttagccccctggctttgtgccaggcctggaggagggcagtcccccatggggtgccgagccaacgcctcaggaatcaggaggccagcctggtaccaaaaggagtacccagggcctggtacccaggcccactccagaatggcctctggactcaccttgagaagggggagctgctgggcctaaagcccactcctgggggtctcctgctgcttaggtccttttgggacccccacccatccaggccctttctttgcacacttcttcccccacctctacgcatcttccccccactgcggtgttcggcctgaaggtggtgggggtgagggggggtttggccattagcatttcatgtctttccccaaatgaagatgccctgcaaagggcagtaaccacacagtttgctgagtgaaattctttgcccacaaagacccagggcttggagcatctctctctttatccttaatctcccaatttgcaacccattctgaagtctccagcctggataggcagagacactaaaaccccagtagacagggccttggtggtcctaggaaggagggcccatagattctggaccg

SEQ ID NO: 57799 - DNA, 1979 bp, Homo sapiens
atccagacagtgcgggcccggcagagcctcgggaccgggaccctcgtgtcctaaaccaccgggcgcaccatctttccttcatgctacccaccacctcagtgctgaggtcaaggcaggtaagcccccgggggactgggccctcttctctccttccctcccttctctttcccctacagagagaatgaggactagcattctacttcagagccggacatcttaggggggaggttcctggggccaactgagggcatgggaggcttgggccagtggccaacccagcagatccggactttcccctgaggcaccaggttggccggtccagaatgtgatccaggtgtgtgagaggaagatggaagccctgggagggggatacctgggtgagatgagccttctttcaagttggttcagccctgactcaggtggaaggaagtagagggaggttggcctgcacattgccccaggctgtgggcctctgctttccacgcagagcagggctcctggacttcggctttctggcagctgaggacaaccgagggtggggacgcggatcgtggaggccgaccctctttccctctaggttgaatgcttgtcataaagtttgagcattgaattgatgtagaaagacagtatctcccagatggcgaaggcaccatcaagggttgcaaatagagccaaggagtccggctcccaaggtggggcctcagtggaaggtggggcctcagtgggccgccttggctggactgggcctgagggatccagctcctcctctacatatgtgtgtgtgtgtgtgtgtgtgtgtgtgtgtgtgtgtgtgtgtatggtttgttgttgttgttgttgttgtttgagacagagtctcgctgtgtcacccaggctggagtacagtcgtgtgatcttggctcattgcaacctctacctcctgggctcaagcaaatctcctgcttcagcttccagaacagctgggattacaggtgcctgccaccacaccctgctaatttttgtatttttagtagagatggggtttcgccatgttggccaggctggtcttgaactcctgacctcaggtgatctgcctgcctcggcctccccaagtgctgggattacaggtgtgagccactgcacccagcctatatatatatttttgagacaggatctctacctgtcgcccagactggtgcagtagcatagtcatggctcactgcagcctcaacagcttcaacctcttgggctcaagcgatcctcccacctcagcctccaggtagctgggactacaggcacacgccaccatgcctggctaatttttttttttgtagatttggggtttccccacgttgcccatgctggtttcgaactcctgagctcaagcaatctgcccaccttggcctcccaaagtgctaagattacaggtgtaagccaccacacctggtccccattcttgacagtgggttttgagccctagggctcactgttaggagagcaagggagctgaaggataggcaactgcgccagaggctgggccactgatgccaaggggtgggggcctagctgtctacctgcccctgagtgccagtcaggcctggctgggccagggaaggagaagctggaggagggcatggggcactggggcagggtgggtgggtgcagcaggatggggtcatgagttgttatttgtgatgtcttaatcctctatgagcagtagggcagggagtggggggcggatttgtggtcaggaaggcccaggggaggggccaggaatagaatctggaagccctggctctcagccctgtgccctcttccccagatgccactcccttcttgtgagaagtaggagtagggctgagaaaggatttagccttccttctagccttaatttttccagtggaaacctagatccttctctccccactaccacctcctaggcgaccttacccgcctgcagatgtcttcaacagtagagagtcctagtgagcctggggccc

SEQ ID NO: 57800 - DNA, 1072 bp, Homo sapiens
ctgacgcctaacatgcaactggtgccactgcgcgttcgccaagcaagcccacccccttgctagcagcgcgctctccaatcgaggagatgcgccttccccctcccttccccgccatctcccccttcattcaaggcctgggggagctgcggttccgagaagcggcagacggcagccagaaggcttgggctgttgagtaagcagccccctctcagtcccggccctccccgccccgcgccctgcgcctccagtgagtgactgagcccccgctgcggccccgcccccggggccctgccggagctggtgcgcggcgcggaggggagggccggccagggtaggaatgcgctgcgggcgggcggcgcaggaggcgagcggcggaacatgtaagggcacatcccgcgagctgccgcccagcgcgcagacagagcccaggggagcaagagaacgggcgggcggtggggctcacggcctagggaggcgcggaggcatctggcagaggcgggtcgggctgggccagctggggtagagcggaggagcgggtgccggctgaagcggggcggtgggcgcggagcgcgctgggggcaccgacaccacctcaccggcagccgggtgctgagggccgcggtgtgggtgcgcggagcagtcagggcgcaggtgggcagcgcgcacggcctgccagcccggggcgccagaatcctgcgctgcggggccgagaggggcgccgcgcccgccgcagcctggagctttccgcgaacctcggggcgcccatgacggcggcggcgacggctaccgtgctcaaggagggcgtgctggagaagcgcagcggcgggctgctgcagctgtggaagcggaagcgctgcgtcctcaccgaacgcgggctgcagctcttcgaggccaagggcacgggcggccggcccaaggagctcagcttcgcccgcatcaaggccgtggagtgcgtggagagcaccgggcgccacatctacttcacgctggtgaccgaagggggcggcgagatcgacttccgctgccccctggaagatcccggctggaacgcccagatcaccctaggcctggt

SEQ ID NO: 57801 - DNA, 1120 bp, Homo sapiens
gagtctttgtggaatggatagcctcccactaggactgggaggagaataacccaggtcttaaggaccccaaagtcaggatgttgtttgatcttctcaaacatctagttccctgcttgatgggaggatcctaatgaaatacctgaaacatatattggcatttatcaatggctcaaatcttcatttatctctggccttaaccctggctcctgaggctgcggccagcagagcccaggccagggctctgttcttgccacacctgcttgatcctcagatgtggagggaggtaggcactgcctcagtcttcatccaaacacctttccctttgccctgagacctcagaatcttccctttaacccaagaccctgcctcttccactccacccttctccagggacccttagatcacatcactccacccctgccaggccccaggttaggaatagtggtgggaggaaggggaaagggctgggcctcaccgctcccagcaactgaaaggacaacactatctggagccacccactgaaagggctgcaggcatgggctgtacccaagctgatttctcatctggtcaataaagctgtttagaccagaactctggtgtccaatcctgtgtctgtggagctgggagggaactcaatgggagcaatcaaattagcaggggctttgggaggccgaggcaggcggatcacctgaggtcaggagtttgagaccagcctggctaacatggtgaaattctgactcaactaaaaatacaaaaaatgagccaggcatggtggtgggtgcctgtaatcccagctacttgggaggctgaggcaggagaatcgcttgaacccgggaggcagaggttgcagtgagctgagatcacaccattgtactccagcctaggcaacaaatgtgaaactctgtctcaaaaaaaaagcaggcagcctggtggaaatgaatcaaagtggattcgttcctgctttttctaaggaccaattacttctcagtatcaatgccaactgaaccacactgtctgaagtgacccgaccagccaaacaccactggcttgtcctgtctggtctccacccccaaatctgggcctgggaattgcatggactttggacttggaggggctcagc

SEQ ID NO: 57802 - DNA, 2816 bp, Homo sapiens
tttctcctgtaaagaatctgataatagaccagctgcaggaatgaggggcagaggagggcaattcttagcaaatggggtgttaaatgattctggggttaactgggtgaccgagggaagtatgatgttacaatggaaataacattgtgctgaggcttggtttgtccatctgtaaaatgggagatgaccctagaggccctagcctttgtgactttggcagagagaattgcgcgctgctctggcatgagatgaaggtagggtcatgccctctcagtgccagccccacctgtacttacagtgtaagtcacctcaccccatgcccttctccatgcagagcccctggccacaggcccaccaccaaccccaatgcatccaaatttgcccagaagattggtggctccgagcgctgcccccgatgcagccaggcagtctatgctgcggagaaggtgattggtgctgggaaggtaaggtggctgctgggcatgagagggatggggggagatatcttcctgaaatgtggattccagaacttttaaattggtgacctagctctgctcagggcagcctgagcactggggtttaacctcttctctttgtccctgtgggttgcatgtacctgtgctttccagtctccaaggagctcatatcagccatgagcagtaacatccccagcattgatggacaatgggcaattcatagggagtggcaatgatcaatctgtatctctaatataggagaacagaaagtaagggtacgtggatgggctgcagagggtccacaaagccctgaagattatatacaaagtttcatgggaacctgtctgtttcttagaagaagatccatagcttttattaaattttcaaaggatttgtgatcccaaaaatatacattctgtttcatgggatgtggactcccaaaaacccatccaaatacccccagggcagagattttcaaggttcagacctaccagagcctcctaggaggcttttttcacactgtttagaattgccgcacatgcccttcccccatgatattctgacagtagcccccaatcaccaatgcacagtgagaatcactgtagcaaatcaacagttcccaattgagctgatcacttccttcagataggctgcagtagagaagaggcagaactcttgcccctggggtttgcagtgtcagattagcagtcagaaaatcacagaagagatgtctttcagctgtggggccagagaggaattctggagcatcacgtgaggcctgagatagaaaagtgacttggccaagatcacacaacaaggttatggaatgtctgggcctggagcccatcttcatctcttctggattcaggttttggctttcaaggctttttgaccttgaggaatgggataggggaattgatcaagaaatgttaaacaattaacacttaggccagtgttagaatctctactctcacagtcatggttggacagagatggggattagtatccctgttgtacagatgaagaaactgggagtcaggaggattacataatttgcccagatccgctagctaggaaggggctaagccagactcaagcccaggtttgtctgactccgaagcccttgctcttactgctgttactactgttaatgctactttgggccatttagcctcttcaaacccatttccaaggctgcaaaatgggaggggatcctagcacggtgattaagagcttggactctagacagcctgctttgaatcctagttttgccatttattggctgagcgaacttgggaaaatttagccttcctaagcctcagttcttcagctctaaagtgggcctggatggtggaggaaatgcaaagtggaccaagtaatggcccctgacaaataaggcagtttttttttgtttgtttgtttttgtttttgttttcttttggcagaatttcacacttgtcacctaggctggagtacagtggcgcgatcttagcactctgccttccgggttcaagtgattctcctgcctcagcctcccaagtggatgggactacaggcacgcgccaccacacccagctaatttttgtatttttagtgaagatggggtttgaccatgttggccaggctggtcttgaaccagcctggacctcacgatccacccacctcggcctccaaaagtgctgggattacaggtgtgagctaccacacccaacaacaaggcagttttaatgattaaatgagatagtacatgtataatgtgcaatgtagtgcctggtatgtcctcagtacagttttgctattgttattattattgttgtttattttcagggattattttgaggtcacaatgaagatccttgccattgactaaaggatatgaaaacaggagacattaatattattattaagttgggttttttgttctatctcattatgagaatagaaaattattaagaatagctaagaatcactatttccattacttaggcaggctataaggtaaagttagggctgtactaaggagtaggataagagaattttgcattcaagtggaaaaggtagggagaagccccacctttctattgcctcgctcaagaaatgttgagctgggagtacttttgggtgcttatgaatgagcaaagggattcagcttattttggcagggaggtggctaggaaatatgaggagaggtgttggtctaggtgtgattcagtttttctccagcctagagagcttggggtagcagcccctgctttacagaggaggcagcaaaggctgggtgactattgaggttgcaccagcactgacctagacccaggtccccccatttcagctctctggagg

SEQ ID NO: 57803 - DNA, 1042 bp, Homo sapiens
agctgtacccagctccctgctggggaaggtgggttaagcagccagccctgaggaaagaagaactctgtgatggtggccgatggaacagggccccacaggttggccctgggctgttccctagaatccaagagcacaggggaagctcacggaagccttgcacactttctgacaccagcgtctcctcacctgcaggctgagacttactgacacttttcaccctcttggccccacatgtgtggcccactggaggggagcaatggctggcagaaaaccaccaggtctggaggtcaggggctgggttctggcctggccctgcatctggccaacacgtgatctggaactgttttgtgggcctcggttttccttccagaagcagagaatcattctctatttctgagtggggcaagggggctctgacctctcccctggggctgccttttccctttatttccaagcagtatcacaagggcccaccaaagtggcatctggaagtatgtgtttccaacaaatccagtcttttttttttcttttccccttattggcttaccatgatatggtagaaatttattcaggcctgcctttaaaattccccttgattgagtctttggtggatcttacaaagactttggtgagttgcagagtctctcagtatatcacctggatggaggtagaggggcagagggccacgatgggcaggattgggcctctgggagaacagaagggccaaggcaaagcagaaaggagcagggaggtcctcggcaggggagccatctggaagatgtcaacttgcaggccctgaggtctgccctgggctgagttcctgggtctcctactggagagatcagccaaaatacacctctgttcccccaagcactctttgctttctgccttctctctggtcttggaattttcagttcaattgggatcttacaggaaaacaattccaggccaattcctgacttcccaccctagaagggaatgttggagcccttggcctgtggttccctctccctccttcttgggagctggtcccggggggaaa

SEQ ID NO: 57804 - DNA, 1061 bp, Homo sapiens
agcgcctgccgcccctgcgccgccgagccagctgccaggtgagtgcgccctgagtcgcgcggctctgcccgccgcggaggggcgcctgggcacgcactcagcgcctcccggtcttgccagccccgccgcagccccggggctgtcgcaggcggggaactgtgagaagtgaccgcagttagcccgggcagtgctgctcttttctggaggcactaggtccgtccccatcccgggccttcctgggcttcctggacacagttgacttccgcgtgtgcgtgacccagggcgacccggctccccgcaaccgcctgcaagtcgggcagaacaatcggcgattctgcgcgccactgacgctcattgtatggcagagagatgagggcatccgtgccaccccctccctcaccctcctgctggggagaaaatgcccgcgggcggggtggggcaaacatctgggcctgaccttggacatctgtgtccctgagcgcaggtgtgagttttccctcttgtgaaataactgcatggaaacctctccactccaaatcttggtgctaggtggtgatggttactgaaacctgaaagagcctgcagtcagtgttttgtggcctcagtccttgaaagctgggaagtgataaaggggctggtattgagcacatttaaagcaaatcacaatgtgttagctaacaatcagccctctgaggcaggtattgtatctactggtacagactagagaatattttgcatgcttctggttctggtgctgttgtgaactaaccaggacccaggaatcggctggagcaatagtgggctcaggctctgcctagagccctgggctccagccacccaccagctgctccctgagagtgaatgaatgggcaggctctccccacgctgggatactatcacagtggcaccgaggaaatccactgggccctggtagaaagtatatcagtatatcatgaagaggtggcttggagtcttggtgggattgtttggaaggcagagttttgactcttggatttgccacttaacgcgcaggtttccttggacaaactatttaacttctc

SEQ ID NO: 57805 - DNA, 1047 bp, Homo sapiens
gcaggtcctgcgaggccgagaccaagtctcggggtaggggaggttggtgcccgagggaggctgtgggctgggctcgggagaggcgctggaataaataacaaccaagatgctcgcggcttcccgggaaggtgtgtgccctttcgacccctatgggactgactgcgcgtttgattctagagttgactctccgggggggctgcctaacttcagtccctctgagcctcagtttccttgttgtgaaatacccacaatttaaagtgcgttgagatcttatcatgagacaccaggtgctgcgttcttatactcgcacccacacggcaagcacacaccctacccgcacctctgcctttcgttgaagcaagagttaactcctcccatcccagcaggagccagaggaacagctggggcaggtgacctcgcgggccgttccagaaaacgttccccgcacccccgggatgcgccgggaagcgccctcccgccaatctcccggaggccgtcctctctggcgcccgcccagtgcgtctgggagcggagaaagtggtcccggaggagaggggagagaggagaacgcagaaattgggtgatcacggggagctcacctgagcgctcccgaggcttgggctctggtccctgctaatccccagagccgataaaaactggtcataggataaagaagcagctaagtttgcagcgggcagaggggaggcaggaactggagaggacgcgagtggcgggtggcgggggcggtgtgtaggggtgacgtccacccggcagagagggttccttgtcccctggagccgaacacaggaaaatcagctggtgagtcaatgggactttgttaggatagtcacagggcgcagctggcgccggcttaagggaagagctggatccccccttgataacatgctgtttatctggcttcctgtttcaatgattgggataccattggctcgttcaaattcaatgctgagaagcctgtgggcacgttcgttcactgtgcaaaagcagagggcttgcctgggttttcatctgtgggctagctcttgt

SEQ ID NO: 57806 - DNA, 1049 bp, Homo sapiens
acagaaacatattagggtcaagacagctatctctgtgatggaagcatctatcaacttttcgagtctctggaacatggagagctaagaaatgtggcaatacttggcaaacacttcgtctttctggcccctagtcacacacaaaaaataataattaaaaacacttttagttccttcttcaacttaaaaatacccctccaactagtctagcgaaaaacaccctccacagtaaaccgtttcctgggcctcatctgttcccttaacctcctgggaaggctgactcaggcctgatttcctccgagaggcctgcgattttgcttcccagcatcctgtgactcttgagacgtgaagcgaggcaggatggctgagacccaggccactctgacctgcctgtggatgtggttcaggttcttacacatgtcctgtgcagttcacactaccaccccatcaaatctatttgctctacttaattttaatatgagatgcactaatatgcatataaaattaaaggctctgatgcatgtgcctctgccaaggaccgttactaacaagatgattccacttcaaaagactgcaagactgttctgatatccaatcctcagatgctctgaaagctttcataaatggaattgtttcttaatttcctttttggcttgtgtattactggtgtgtagaaacacagctgatttttgtgtgttgatcttgtcccttgcaattttgctgaatttattagctctagtagcttttttgtttctggattctttgggattttctatacataggatcatgtcaactgtgaatagaaatagttttacgtctttctttccaatttgaatgatttttatttatttttcttgcctaattgctctggctagaactttcagtataatgttgagtggcagtggtgaaagcagacatccttctcttgttcttgatcttagggggatttcttgattttagcctttcaccagtgagcgtgatgttagctgtgggcttttcataaatgtcctttgtgttgaggaaatcatcttctatttctagttttctaatca

SEQ ID NO: 57807 - DNA, 1063 bp, Homo sapiens
ccataagacagaatgttattctttaatctgaattgagctgacacgtgttgacagacaggggtgtctggccctgcatgtgggaaacacaggtccacgtgcaagactggagcctgtggtggggagacactggtgacccggagccaagaagtgacatgatgaagctgttttaccagcaggacggccctaatggcagggaccacgtctgttctgttcaccgatgggaagccagcacatagcacagaacctagcaagcagtgggcattccataaagaggtgtgggaccaactaatggcttggaagagggagagttgggccagcagatgtactgtcacgttcctgacatgcaaagtctgggctagggcggccctgctggggaaggaaaggaagagccgtgggagagactttttacaaaggaaaaccgaacaggactggatgactgtggaacatgggagggacacaacagagagcagaatccaaaagtcgtgcagtctttttggaagagcactggactgaaagttgagtccctcctgcaccttttggcatataacctgggtaactcatttaacctgtctcagtcttagagtccttatccatcaaatgatcagtttgctagggctgccataacaaagtaccactaagtgggtggcttaatgaaacagaaatctatagtgtcagttctggagggtagaagtctgaaatcgaggtgttggcagggtcatactccctctgaaattagtggagaatttttccttgcctcttctagtgtccggtgctttccgacaatccttgtcatcccttggtgtagagacacatcactccgatttctgccttcaccgctgcatggccatctcctccctgtggccttcacatcctcttccctctgtgtatgtctatgtccaaatttccctctccttataaatacagcagtcataccagattaggagctcactctactccagtatgacctcatcttcactaattacttcttcaatgaccctatttccaaataaggtcacattcggagacactgggaattagtacttcaattatcttttttggtgac

SEQ ID NO: 57808 - DNA, 1053 bp, Homo sapiens
agtggctcatgcctgtcactttagaaggccaaggtgggtagattgtttgagcccaggagtttgagaccaccctggacaacatacagagtccccatctctacaaaaaataaaaataaaaaaattagtcgggcatggtggtgggtgtctgtagtcccagctactcgggaggctgaggcaggagactttcttgaacctgggaggcagaggttgcaatgagctgagatcgcaccactgcactccagcctgggggacagaggaagaccctgtctcaaaaaagaaaaaaaaaaaaaggtctggtaagcaaaccagtgattacaccccagttgtaatagctcaggacagtggggggacagtggagggactgtaacccctggaggggcaggaagggcctcttgggaggtgaattcctcctcctgggcttgcaggaattaagtcaggcaaagactgggttggaggggagggaactggggggccttccaggcaaggggagaaaaatacttggactcttcccctctgctgtcctagccccaaccttagtccaacctgggccagcagcagaggtctaaggaccagccctgccccctccatagaggcttgccaccagtccttggggccctctctggagaaatgcccctctcctcaccagcaaagagcaccatcctccaaatgcctgtgtggaaaacgggtctcaagtgacctctcaatggagagccctagaaaatcattagtgttccccctgtaaaaacaggggcttaattctacgggcaaatatctcaggcaaaagctcagaccagtagactcgtctctggtgcaaaggaggaagatgagtcagccagggtcccgggaaccctgactccatgatcctgccagaccacagggcccccacttaaggcttggagggggctgagatgaaaatgatctactgtttctcttaggaagccctagggaagtccagtttggtgtcaagttgaagatttctatgcattcccacggcaccaactgtgatggtgaaatgccacatttcagccccaatcattcagccagattggattg

SEQ ID NO: 57809 - DNA, 1994 bp, Homo sapiens
gcagtcctgcactgtgcgggaagccaggcagggtagggcggccgaggaagttcagaggatgggaagagcagaaccgtatctgtctctctgtgttgtgtttgcctctgccttgctgggtggtatcaaaaaactctcctattcttgatttaggttccatcttctataaaccacacccctcctcaacaaaaaccaagattcttgctttctctcatgtaactttcatttttttcaggatgtaaaacccattaaggatcttgggtgatagagtatgggacaggctagaatgctatttgatggcaagagcaaaaggtcaataatttttcagcctggctgctgcttcttatggaatcttcttccctttgggttatggaccccttagccagcgccagcttcccctccaccatcagcatatccctcctgccaggccagaacaacttgccccattgaagatcccaaactactagtggtctagccttggccatcctggtgtggtgaccaacaggcaagagcccagtgaccctgcatccggggtgtttggggtgccagagagaagcagaggaggagctggaattggcaatggaccctaggttccttgccagagctcttgccccacagcaggccctgagaaacaggatatttaatgaaatcctgtctcccagtccttcaatgcccaagtcactgttcccgtggaaagacactgatgtttgtacagatgtgcatctctgttgctgcgtggcagcatttttatctcctgtctctgcagagccccttccctgggactgaggagccacagaaggctttgggatctgtggatccttgccatgagccgagacctcccagagctccagcacaatgacgggaaggccaggctgctattccaggccagccctgggtgccacaaagcagacagtgggctcagggaacatagtcagcatttccgttgcatttgccaccaccacaggctttccagtggcgtgcagcagtcgctactctttccacaggtaccagggagtgtgttcatccagtgactggcttgggaccaacctggggtggggctttgatttctgaaccttttctccatgagaccccaagaagcccctgccttgaccacagcttgcctctgtggtgggtgggaccccttgctagtggaggatgggagctcctttgtgagtccttctcttcattttaaagggacagagtcggcagtccctcttgctgctgggacagtgggatattgtcagtcaatgaagtagtcctaagtgtagtaatttttagtgttgtgagaatggtgatttgcaacaggaaacaagaactagctcccagcctaaagggtgatgtgggaaaagaaggtaaacgaatctgccccatcacacatggtgttacgcaaaaacaggatgtgggagctgcacagatctgagttcaaatcctgattctgttacttacttacttactagctgggtaactaaccagggtgctttagtttccttgactgtaaatgaggtaattgtgagaattaaagaagattaaatctgtatagtagctggcatatgctagacattcaataaaagttagtttccttcacttccattatccatgtttctagatttttcttctgagtcctttttttctggacattggaagctccccacagatacagaagtttttccctattaggcagtaggcttcctgggggcagggttctgtctcttccattagtgtaggatctggttaaggacaaggctgtgtttggctgtgttccctactcagcctggggcctccatgagattaggaactgtgccttgcccatcagcctgggaactccctgcaggctggggctctgttcctccatcagatcccccatgttcagggcccttaggcagtaagcttggtcacagcatgagactatcaatggttggaacaaaggcacccagttaggtttaggtttgagaatcaaccaaggagaccaaggaggttctgaaggtattttttattta

SEQ ID NO: 57810 - DNA, 1012 bp, Homo sapiens
ggctccattgcaagggtctctcggtcttcaggctgctcaccgactccctcttctttcccagggtgtctgtttagtctaaaagttcagatgtgcctcatgcatgcgcagaagtttgcgggggtcctctaggtcagtgggcttgaatggcaggtcctagggaggaaggtcagactgggaaggtcagactgtgtggtccaggagcctgaacctctgtgcaaggtggggccttctcagctccccactcctcccggctgcttcctgttagcaggacacccagggagaagcgtgtttccttcctgctctgggcaaacccaggccactcccccagcccctagaacttctgttcagaaccaccagcagccctgaggacagtacagagctgaccaaagtctcatccaggtgtgaaaagccacccccctccagaggtgctcaggcccatgaaggtctgggctgatcttgggctggatcctgtggcagcttcactccagtgcaagtcagcctggccacctcctggtaggcaaccagcagctgcagcagttcacggctatagcatgaactcccctgatgccagggcagcccagagctagcttcgatttatgaatgattttaatgtccgaaattaacatcatcttcagctcttgaaacaaatgactccagggatgtcaaagcacactggtttacccagcaccagggacactggaaaggtgtcatggaccctgaggctgatccttgcatccttcatctcttcactttagaggttctcaaagccatctttctgccatccttcccagctgacatcatataagatgctccaggttgtcaagggtatgtctgcctttaaaaaatgatctagggaaggtacagtgattctgggagtgcccatctctctgcatcactttgctggggctgcacacagagaggggccctgtgatcatgggactgcaggagctcaggaggaagcagttagtaaccccctcatgaggaagcccctcgcagtatccgctggtccagt

SEQ ID NO: 57811 - DNA, 1045 bp, Homo sapiens
actggaagcctggctaggcgttctgttttgcctagaattgcttattatgacctttttttcttttgcagcaaatttcccttcctaatttggttctgtttatcccattattaaagtgggattacataggaatttaactgaagtaaatgatcatcaatgtgtacaaagatctagctgcaagaatgttcttggcaaaattgtttatcacaggggaagggcacaaacaatttgagtgggtaaaagtaccacatatgttaatgatactctggtataaccatctattaatagcggaaaggggaatacctaatgtgcctaatgcacccataaggaattattaacacttcactcactcagtcattcactcatctgatcgctcattccactcacagtcactgagcaccttccagacaaaaggtcctatatgagagagtgttttactcaggttcctcagagatgaggatgtgatcacagattaagggagaagttatgggattcatcatgggatagcgaggaaactgggcagcggggtttttggtcctccaggctgaggcatgtgacaagcatggtgggcttctgcaggggccacagcatctccaggctacagaaccctggatcctaagctggcttccatagttccctgagagcagcattgtgtggtaggccaagttcaagatttggagtcaggagacttggattctaatttcttttctttctttctttcttttttttttttttttgagacagagtcttgctctgtcacccaggctggagtgcagtggtgcaatcttggctcactgcaacctccacctccccggttcaagcaattcttctgcctcagcctcccgagtagctgggactacaggcacgcaccaccatgcccggctaatttttgtatttttaggagagacgggggtttcaccatattggccaggctggtctcaaactcctgacctcatgatccacccgcctcagcctcccaaagtgctgggattacaggcgtgagccaccgcgcctggccagattctaatttcttttagcctttatcacc

SEQ ID NO: 57812 - DNA, 1057 bp, Homo sapiens
ccttctggcaacaaagtctcttagtttctcttcatctgagaatgttcttgatttcccctttattcctgaagaatatttttactgggtataggattatgagttgacagttctttttattttccccccagcacttgaaaaatattgtgccacttccttctgtcctccgtggtttccaatgagaaatctactgtcatttgaaccctttccacctgtagattaaggtttcctgtttctcttcctgctttcaagattgtttctttgtctttaactcgcagatgcttaatttgtgatttctttaggtctatcttgtttggcatttgctcagattcttgaatctgtgggtttatgtctcttgccaactttgcaaagttttcaactattttttcttggagtactttttcagcaccatcctctttcttttctcttaccagaacttcaataacacgaaagttagatcttttgttatagtcccacaggcccctaagaatctgctctgctttttgttttggtctattttctttctgttgttcatattggttaatttctattgttctatcttccagttctctgattgttctccttaattctactgttgatcccatccactgagatcaacacttcagttactgtatttttcagtttaaaattttccatttggttcttctttatagcttctgttctttgttcttcattacccctgggctaggggtaggagttccagctccctgcttggtttccaggggaactgagctgagggtggcttatctctgggtaatgatgaaagttctgtctctccactaggcctcctcttataccacactgtgggaagcaggaagggtgccttattactgctaggtgggggtggaagtccaggctccgcatatgggctccactgataatgaatggcctcattaccaggaggaggggatggaactttgggcttgctactcagccttctctgacaccaccctagtggggttgttgggcacttcatcatggcctggtgaaggtgaactctaggctccccacttgcccttcgctgccctggatgaaagtg

SEQ ID NO: 57813 - DNA, 1045 bp, Homo sapiens
gcaaacaaatagatcaataccatccaagtatttagaacatgaggttttcagccaggagtgatggctcatgcctgtaatcccaccactttgggaggctgaggcgggtggatcacttgacgtcaggagttcgagaccagcctggccaacatggtgaaaccccgtctctgctaaaaatacaaaaaatagctgggcgtggtggcgcacgcctgtaatcctagctattcaggatgctgaggcaggagattgcttgaacccaggaagcagagattgcagtgagccgagatcccaccactgcactccagcctaggtgacagagcaagactgtcttaaaaaagaaaaaaaaaagaatatgagatattctggaggcttaaaggaggtgggagtcatcgccctacttgggatggggttgggggaagaatggtttcttagaggaggtaggttatgcttgagctaaactttgaaagataaatggatttctggatggacacgatggtaaagggcatcccaccaggcaacacagcagctacaaaggcatagaggcatcagacaacaggaggggcagagtactcactgcaggttgttcgtgggggccggtgcatggcatagggaaaggaagacaaaacaggagaagttagcagaggtagggaatggggtagagactggatcatagaaggagttgtttgccatgcttacccttaaaggctttctgagcagtcatcctgggatggacagggcagggagtggagagaccagcgagcaggtttttgttacggttcgagtgagggttgaacacaggcagtggtggtggagatgggttgcagggataatcttgagagagatttaggagacaagattcacaggttggaatggatgtgggagaaaggaggagcttaacgccttggcttagtagccccatctgagaaaatgagcatcagattttgagagggaaagaaagaaacggagtttagctgtgttgactgtgcggagtctgtgagcatcccagtaaggatgtcaggtggacaagtgtctcagtggagaagttaag

SEQ ID NO: 57814 - DNA, 1060 bp, Homo sapiens
tgaacgataaaatgagagaagaggcaaggagcaccaggttggggtgacatggccattagaaagacatctcactgtctgcgatcctcagtcatcgacaagctggttaacaggaccagaggtacagtccgcccttctaacacctatcccaccccattccacacagccactccttcccatctgcttttctgggctggaaaatggggcaaaaagagttctcagacgggcaagaggcctggccgactcggctaagccagcccactggctcctggcctagatgctctgactcctggccccgcgcgcaagcctcacccacccaaacagcagcttcccctgcagcccttcctcagctgggcctgggcacctcgcagcatgcagtcattaacacctgtgtccgaaaaagaaagccaggggttgccagggaccaggaagcagaggattgatggaaactttctggagagaggaaatgttctaaatcataattgtgatggtagttaaacgactgtatacatgtgtcaaaactcattgaatttcatttcatgtaaattatacctagataaagctgccaaaaaaaggaaaaaagtaaggcaggaactacctagctggggagattttggaatggaactgagaggcgggtgggaccctggaaggggataggctgagatcagagggccctggttacatttcctaccccatcgcttactagtggcatggccttgggtgcttaccattcacctgattacctcactttctgcttctgtgaaatggagatactgtcttccctgggcgggcatggtggctcatgcctgtaatcccagtactttgggaggccgaggcagatggaccacttgaggtcaggagtttgagaacagcctggccaatagggtgaaatcccatctccactaaaaatacaaaaattggctgggtatgatggtgcgcacctgtaatcccagccactctggaggctgaggcaggagaattgcttgaacctgggagccgaaggttgcagtgagctgagatcgtgccactgcactccaaccagggtgacaaagcgagaatccat

SEQ ID NO: 57815 - DNA, 1013 bp, Homo sapiens
gccccaggtgctcccagccaggtattgtcctgcctgggctgcaggggctgagcaggcctggcatatagaaggagggtgtgaggagctaggttggcactgggacagaaaataagtgtgtgtaaatgtatgcagatgtatgcaaatctctgcagttctgcagcctgctggctggctctctgggtaggagacccatcgctccaccctgggccccaccccagctgcaacatctccttctggcctgtgaattgctgctgcttgcatctccctctcaagagcatcttctccctctcagcggcattgtccctcttctgtgccccccaagaggtctgggaaggtgagaaagctgaatcgtgagacagggaaaggaagggacatggactcaaactgaggaggacagcacccgaaatgacagaagagggccaccaaacccggagctcttgattgcagcccctactcagccttagatatcaaaattgccacctggatagagcaaccctgctcagggtctggaacaatctaaggaagggcttagcgatgtctttgatgaggcagcctgtgcaggctgcaggctagacaatgcgaggacagtctgcagaggtgtcttctctccctcccctctcaagcccccactctcctctcttcctgaagcagggcttctgtggtgtgggaagctgccccacctgcatgggaagcaccagccacacctgcatgggccattagcattttaaaaagctgcctgtctctcctctcactgcctcccgctagcacacacatccacccatttgccatcagcaagtctttgtggaatcagcaacagcagacacaatcctgaagcagagagggaaagacagtccctgccctgggaaagctcatagtctgctggcaaagggtggggtgggacaacagctgacagaacaagcagaactccatcacccacaggctcctagcaccacccctcattttgttgaagaaacagattcagagcatgcaggtgatttctctagagtcacaca

SEQ ID NO: 57816 - DNA, 1088 bp, Homo sapiens
tgaattcattctttgggaaaagtgtctaggcattaaattgtttaagattttacattatctaccttacaagtcccttggtatattcagaacctgacattttccaaagagctcagaattcttcattcaaatattttaatgcagcttaaacagaaccatgtttccttcattcagcaaacatttattgcatgtttgcattttaaacagaaatggaaatgtgtcacaccaccctacctcctagaccctgcccctttcagtctctggattagggttggagagagggtcatggcacaaagacctgactcatcaccatggtggttagaagttagttcaagacagatttgaggctcaagggtgcgattaggaccaaggacactccgagatgctgcacgccaatgggcaggcacccagcacactctgcagggcctagagctgctgccatggcagctctgccaagggccaggctgggccacccttcaaagcttcatagccaaggaggtgccatctgcttcctagaatccacagacattgtgtttttgtggaaatctctcctccctccctgccacccgccccagcacctcagccttctgcaaagccccagtggaatgcagaagcagaggtcacctgcttccctccccatctccagcctggtcatgcctgacctgcttctccagggaatgaatcttgcagccatcttctcccctgccccatcctccacagccctctcttttcaagggccttggtgtggccttcccagtgaagcttgtctcctctcatccatcacttccctttggacccagagaaggtgcaatcccctgtccgctctcaggagaccctggtctcacacatctaattccatcacatcctcaacctcatccctctctgctatcctggaagagagccacagcagcttcaccacagcccttgctgacttttcccaactgccagtgcaccctttaccacctccctaacccccaacagttctcttcttcctgcattgggtgggccttgggttggacttcaattggaactatggttaatggtatcaggagcgtagggttactggtgtcactactgcaattttcttctct

SEQ ID NO: 57817 - DNA, 1038 bp, Homo sapiens
tcctgggaaatgggtagactgtagaatgtcaaggggtgacaagcatcgggcatcccagtatcctctggggctccctgcctggcgcagctttgcacagaaggcctgctgcctgctggagggcaggcatgtgcacatacccatcagggaggggctggccctgagtggtgcagggcactatcagagaagaagaaccaagttctaagagggttttcttagccccatggaggggcttagagaccaggacatctctaccatgagtgactaccctttcttggtcccacaggttgcaaactgaccagaaacctggccccctctcccagggcagctggccccttgatggctatgctgagcccctccatgagactgaggagagcttctcctgcatgggtaagtgatctgggggagacttcctcctagggtcgggaggccactgtgctagagctgcctagatggaagaagaagtgacctaggctggatgggtccatctcttgacaaggagacatcaacctgtgaattgcactttgagttttcatcatgcttgactcaacccagggttggtccatcaaacccaggagccttttaggggcagcatagggaagtggccaggggatgcccaggctatgggagtcactgcatgtgtgtgtcatgtgagaagtcctgacacaaaggtaacaagctgggagtgagagccaggttctgagtggtgcccaggttgaaaaatgaaggtgctggaattagggaggcaggccagagccatctggcttgctgcctgacaacacttccccttccaggaccacttttaacaggccactcccacacatgtccccttccccgtgtcatcctgtagtcatgagatatcacctgaggctcaggcatgtgagattcaccaggaagatccctaaatttcaaatacagcaatattcaataagggcagagaccctgacagtctcagatgcatcttcaggtgctcagtgtctctgaataaatgaatgatgcatggatgagtgagtgtcttgggtaccataggtcaggccctaa

SEQ ID NO: 57818 - DNA, 1048 bp, Homo sapiens
tcacacggtgggcaggctcatccctgctctatccttgccctgttggtgtagaaatttgtgtccaggcagctgtgagctccaaggaatgtgagttgtagcttagaatttctcggcattcccacccttctggaagctcccccgagacggttgagctagagggcagaccgaggcccatgacctctggctccactcccagcctctagttttctctgcctcattttccccaatagacaggaagacaataaatctctctctggagcccacacacctgatctgtagcccagaggaaaaatccccaaccactgaactcagggagtcttctggggccagagagggtgagccggggacctgcagtgtccacagaaatatctcaactaccaatgccctggagaagcaaaggcagtggctgggctaatggaccaatctaggaagtcttcctggatgaggtcctggaggtgtgagccactcagagcatccatattggaccactgtgtctagtgtctccttttttttcagcaagtgggagtgggggatggggctgaagtcccagctgggattactgcctgggctgtgaggataccttgcccacttttccccctgtctcccagaagtgtggtgaaactatccccatgcctctggacagagcagagatttaggggcagaagagggtctcagccctgaatgccccaaggtcattcctctgaagaactggagcttccttcaaaggagcaaggcaagggtctactggcctcactctggcccagggcttcagggaagggagaaaagatgctgctgggccaccatcccagaagcttggcttccattccacacaccagctgcactgtgtcttgccacggggtattaagaggtcactgctgtttacaattccctacacatctgttccgagtcacgcattcattcatttaatcaatcgtcattcaccaaatatttttgagagcccactgtgtgcacagagctgggatgggttttgagaaaaagttcaactgaagatgaatccttgggaagcaccaataggtgaatgacgaat

SEQ ID NO: 57819 - DNA, 1076 bp, Homo sapiens
cacgggccctcttggggccacggaacaaggacggtggggcctggtgcccaggcgagctgctttggctgcgcggacttgttgcggtggctgggttgtgggtcctccggcgccgagggacccgagcttcctgggtacccggcaggctgcccgcccgctgggggctgggaaggggcgtgccaatgcgcgtgtgaaagggcggggccgagtgacgggcttggcgggtggggaacatgcaagagctcgccgggcggccctggagaatgcgaagccggaggagaccggttcggcctgctgcagtcttcctaggaaccctcgactcctgtgtgggctaggatgagggtcctctgacaggggcaaggatttgggcctttggagaaccgatccttacgcaggaggccgcaaatgggctttgcaggggcaatcaggagactggacaagggcaaaagaagagcagccttttcccctgggagcccctcctgaaggtggggatggctgggtgggtgcggaagctgaccaggcagcctcactctgcaaagggaatgtgccacccggtcctcagtgtggggctgagcctgtcaaaggccctgcctcagtgaatggggcaagagagacaataagggaaaaaattaataaatttttggcaggcaccatggcaggcaccaaggagggatatggacaaaatgcaactggcccatgtgatagagagccctgctgagggactgaaagcagggtgagagaggaagggaccgtgtgtgtgtgtgtgtgtgtgtgtgtgtgtgtgtgtgtcagactgagagagggacttggcgagggagggcaagggagtatcggggcacagaatagcagaaggcacagaacccttttcagggtcaaggctttacttgttggggataacttagctggtctgggtcctctccagacctggatgccctcacactgtcccagaagctgactgcccattgaagccctcttagttgctcctcaagaggagccaaacaggtctgagctggctagggagatgggaggaggggcaggagtggggaggagggcaggtgcagggagggcgagagaggagg

SEQ ID NO: 57820 - DNA, 1052 bp, Homo sapiens
aactagaaaaggaagggaggaggaactgtgggcttaatggcaggtagtgatgagtcctgtctggcttagagagatggaaaaggtggtgaaagaggagatgagatcagaaaaacaggttggggtgggatcatggctgatccgacatggagtgcactgggactcaactgtaggctctgagcagatatttgagtggaagagaccaatcaaagttcgtccccaaaggatccccaaaagagtcctgtgcccgctggtccttggagatgttgctgatcgatgagatcagccagccagggcctctcaagtttcacatctgtctgctccagggaagattattcttgcagcctatgcagtgcccacatgggatggatggagggagaggactccttcagcctccatgcccagaggttggccctctgagagggtaggggcaccccttatcctaactcttagcctaaactcaagtcttcatcttcctctgttcctttggtatgccaccaggctgttccagttgccatgccctgggaattgattaggccctactgtgtgaggtgcagtgctctgccctgaccaagagttgttcctccactgccccagccctgggaagtgctctgctgaaaacagtcccacaacccacagcaaagcttgaaccagactacctatagcagaaccaagacattaaaccaatttgggactagacaggggagcttttcaactgcacgctattcagtggcaggcataagtggtgtggtgccacgtactagctctagctttattgtttgatccaagaagccttcctgaaggagccggaagttggggaggaatttaaaggagttttaaaggaatatttataggaatcagaggctgagcacagtggctcacacctgtaatcccagcactttgggaggccgaggtcgtagaatcgcttgagcccaggaattcaagaccagtgtgggcaacaaagcaagactacatccgtacaaaagaggtttttaaaaattatctgggcatggtggcttgtgcctatagccctagctgctcaggaggcttaggtg

SEQ ID NO: 57821 - DNA, 1005 bp, Homo sapiens
tcccacactctgcatagagattggatttcctgttgaaattgtatctttggattacaatcgtaaagttcccagcttctcaactcaagctgtttgcagcagctctgtgtagcctaagtcatcgtcattactctattgggttctgggagggaagatccggagtatagtggccaaatgcacaagctatggggtcagagagacccgaattcaaatcctgattctgtttgagaccagcctggccaagatggtgagacctcgtctctactaaaaatacaaaaatttgctgggcgtggtggtgcgcgtcttataatcccagctactcgggaggctgaggcaggagaattgcttgaacccaggaggtgaaggttgcagtgagctgagatcgcgtcactgcactccagcccagggacagagcgagaccatgtctcaaaacaaataaacaaacaaatcaaatcctggctctatattaactagccatgagattccgagtcaattaacctccctgagcttcaggttcctcatctattaaatgggtcaaataatatctgtctcataggattgctatgaagattaaatgagataatgcatgtaacacactgagcacagtgcctagcaaatgaaaagcgccccaaaattgattgttttatattactatctcattgttatctacccactccactatgtgggtttatagaggaaggagtcatggcctctgcccttggcagctccctgtcctgatggaggagacacagtgctgcactcgacaacccactggttggttggaggaaacatgggtcttgcctcagggagctcccattttagtggaggagatgagccccagcctgttcttcctgagtcctctattttcctggatccttgctcatgagccgtggtatgccctcagcctgcccctctgccaccagtccacccatctcctcccttttcccctgcagccaggcctgccatctctagaaagcccccatctctcctttctgtgtccttgggccc

SEQ ID NO: 57822 - DNA, 1050 bp, Homo sapiens
accccctcccaagtcatgaaagtcaaaaatgtctccagacatcaccaaatgtcccctgaggggcaacatctctgttgagaaccactataatagaggcaccgtagtatgctgagcctcagcggaaggtgtggtcatttctgggtggaaggaccagagaagcctccctggaagaagtggtctgaggtttaggaagcaaaccaaaaggcagacttttttattttgttttggtcagctttttatccctagagtctaatatggtgtttggcacatagaaagtgcagagaatgctcatcaagtacgtaaacaaacaaatgaatgaggaagggttgaacatgcagaaaatggaaagggaaatgcattccagattaaaggactagcatcagcaaaagctcagaggtggaatgaacaggtgtctctagggaatcacaggcagcccagtccctgttccatggataaggaacagaatagcggcttgtatgaccctggcttaggacgccgtggaatcgccttttctggagatgcttaagaaaagttctgcctgaaggaaaggaaaaggagtggtttatagaactgcccactaattgatcacaactccgtcctgataaacatggccatggtcttggaatatttctcaacacagccctctaagaagttactaccagtcatttggagttggaatgccagttgcacctgtttaactccctgactgtggtctagagacctcatgtcagaactgggggctgctgttctgcttgaagccagcccagaaagggaggcattagcctctcttggtcattcttcacgctttgtgtgtggctccattttccaggccatatctcttttccctttaccctgccccattccttctctgctgttgagctgccttgtggctgagttctcgtctccctgctgtctcacccgttattcaacgagcctgtgttatgtgccctggagatacagccatggacacaccagagttgctgcttgtcaggtgtggatatagagaagcaggcaggcaattacattacaacgtggtgaatgctgagttgt

SEQ ID NO: 57823 - DNA, 1064 bp, Homo sapiens
caagactctgctcacgcctgtccccaggagcaaagccttggcccgctgttcccatggcaaccgccagtcagtgctgagcaaaggagggtgccagaacacggagagctggaggggaccagcagccccctagtcatcacagtcatcactgagaactcccccagttggggtgtagaggcataggggaagtcaaagcaatggctgggaaaccttgagggcaaagggactccctttgttctttgaaggagggaaaggaagtgctgaatggagccaggcagctgatttcccatcgcttctctcatccctccttctgagcctagggtgccccctttgcgtcctctggctcattaaagatagatgaccctggggagggtgagggccggggtcaccagctgctggggcttcttgccctgagttaggctggggatcatttgcagggagaatgcagccaggaccaccagccctggctgcagagggaggagggtaagtctgggaagctggccccagtgggtgatcagcaacatgtccctaagaataggtacatgctattgacaaagatgagaagtgaaccgggagccgtaaatagccaggagcctgtgttctctgggctctgtgttctgtcggttgcttattcattgaaagtcagggatgggcgagatgcagtctccagagtgacgcagtgggacgagccctggagctggagacagagaagctgggttctaatcccagccctgctgctttgtaactgagacctaaatcaaattgcttatcagtctcttcagctgccaaacgaaccaagaagctgcctcacaggattactgaaaggctcacacagcaggaggaatgtgaaagaagctggcacacagtaggcatttgcctccttgcttccaaatgtagagggacagtagagatcgtctgccaaaagggttcatatatccaaaaggcagggttggccagaccctgagtgctcatgtcgcttgtccactgcctcctctggagagcctctggctaagcctagctttggcccagctcttaagttgccccgggaccagcctcttccatgctca

SEQ ID NO: 57824 - DNA, 1095 bp, Homo sapiens
gtcaaacagataacgtatcacaaaggtaacacacaaccagaggcctcatggaggaggtggagcttgggcaggtggggaggaggtgacagggcctgtgggtggaggggaggcattgctggggtgcatgtgaggggacagggcacacggcggctgtgccaaggactaagtagtgccttctgctctccacccagctccctggagatgacctgctacgacagcgatgatgccaacccacgcagcgtgtccagcctctccaaccgctcgtcccctctgtcatggcgctatggccagtccagtccgcggctgcaggctggtgacgcgccctctgtgggtgggagctgccgctcggaggggacgcccgcctggtacatgcacggcgaacgggcccactactcccacaccatgcccatgcgcagccccagcaagctcagccatatctcccgcctggagctggtcgaatccctggactcggatgaggtggacctcaagtccggctacatgagcgacagtgacctcatgggcaagaccatgacggaggatgatgacatcactaccgggtaagcgcaggggcttcttggatggcgggggaggatggtggaaagaccactgggatgcgacgccttaaaagtggagtggaacccaaaacgggttttggtttgctgtgctgctatgaaagtacacaaaagtgtgctgtgtacactttgtgattgcctctgaaattcgatgtggtttattctagacttgggtgtggtgtaggcagggcctacatccaaggagctgattggtcaatgaaggcgcctccctctcattggtctctgtggctgtcattctgtcaccctcctccctggctctttgccctcaataaactggctcaaagagccttggaaaagcattttattcccagctcttatgcgaactctgtgtagaccctggacaactaaatctgctttcccatttgcaaaaaaaaaaaaaaccaaaaaggttattaacatcgtatctgtctacctaagaagagaaaatgagagcttgtgggtgaaatcgctagtcaaacagtgagtagcagcagtagctccacttcctttgccaggggttcgt

SEQ ID NO: 57825 - DNA, 1034 bp, Homo sapiens
ctgggaggctgagacaagaggatcacttgagcccaggagttggggcgggggggctacagtgagctatgattgtgccactgcactccagcccgggtgacagagcaagactccgtctcttaaaaaaaaaaacatgaataagtgggctaggcgcagtggcttatgtctgtaatcccagcactttgggagtccagggagagaggatcgcttgagaccaggagttcaagactaggcctgggcaacatagcaagacactgtttctacaaaaaaaattaaaacttaactgggcatggtggcatgtgcctgtggtcccagctactcaggaggctgaagagggagaatcccttgagcccaggagttgaggttgcagtgagctatgatcacacccctgcacaccagcctgggcgacaaagaccctgtctctagaaagttaaataaattttaaaaattaaaataaaatagaaaggtagggtacttattgggtccacagtaaaggaagcagtatgtagttgaagtagatgatagctgttgcttcattgaagataatatctaacaattagaatgctgactccagattcatacacatagccttggctgatgcttctttgtggtgtagggaagaagcactgggctaattctgagatctggagttcaatcctaagcacggctctaacttgctgtggcactgagaaagccacctagcctctctgagtcttagtttgttcatttgtaaaaaaggtaatcatttttgccttaagaggatcaaatggaaaagaatagtaagagtgctttgaaaagtataaagagctgtcagtttgaaatctattattctggttgggtgtggtggcttatgcctgtaatcccagcactttgggaggccgaggtgggtagatgtcctgaggtcaggagttcaagaccagcctgaccaacaacaacatgatgaaaccccatctctactaaaaatacaaaattagccagtgtggtggtgcacacctgtaatcccagctgctcaggaggctgaggcaggagaattgctt

SEQ ID NO: 57826 - DNA, 1015 bp, Homo sapiens
agtcccagctacttgggaggctgaggcaggagaatggcatgaacctgggaggcagagcttgcagtgagccgagattgagccactgcactccagcctgggtgacagagcgagactccttctcaaaaaagaaaaaagaaagtaatggcagtgctcgctttggcagcacatatactaaaattggaacaatacagagaagattagcatgtgcaaggatgacacccaaatctgtgaagccttctatatttaaaatatatatattaaattaaaaaaagagagaaaaagaaatggcaaacaagccaacagataaacatgcaataggttaggtggtgctgtgtgtcataaggaaaaataaagcagggtaaggggcagagagtgatggggtagcgggtatttgagagtggatagtcagggaaggcttctttgataaactgtgcagataactggggagagagctgtccaggcagacagaagagtatatgcaaaggcccagaggcaggaatcggcataagttcaaggaactgcagggaggtcagtgtggctgaagcagagttagcaagggggcaagtggccagaaatgaggtcacaggtagccagaggccatgtgtgccatgctgaggactttggcttttcttccaagagagaggaagctactggaggacttcagggagagggacgatgtgatccaacatgttttgcaaagggtctgtctggctactatgaggagagcagaccacagggacaccaggggaaccaggaagcatggaagggagactgctgcagttagctaagtgagaatggatggtggctcacaccagggatagaagtggaggtggggagaaggttttgaggattaaagaagataacattggccaggtgtgatggctcacacctctcatcctagccctttggaaggcttaggcgggcggattgcttgagcccaggagttcgagaccagcctgggcaacacagcaagactccttctgtacaaaaaattttaaaattagctggcgatgat

SEQ ID NO: 57827 - DNA, 1079 bp, Homo sapiens
gccctgtctgggcctaattttctcctctgtgaaaatgagcggtttgaactagatgctctctaaagtcctttttggctcaaacgttctggattttctgaccacatgaactgggtctgatccagggtacctggcatttcctgcaggaagggcctggaggttgaggaggaaagacagcagccatgctggtctaggaaaggagagaagcgccccacattcatgcatgaggaactctggaagacacaggcattgctaatggtaaagaaatccattgcctggacctggacccaatgtcactgtggcttctaaacctgtggccaaacaaggccactctattattaatctttcttgctgttaatgttctaaagcaagtataatagtacctgcctcaccttagatcactaggttatttgaaaatagaataaactcatggatgtgaaaatgctttgaaaacttctacacagagactggaaattattttcttagacatctgtcaaggtcacgacagatgattccctcaggattcagtagggtcattgggggatctgggagcaggtttttgaaagctgggattaaggatgtggccaggtaattccccattgatcctgccacagtatggaaagggttaattcactgaagtccctctcccaattcctttctctttcctttccctgcccctccattctggtttaattctttctctttttaatcactctgctgtaaaatgcccattgtcctgcttctgccactatgctatcaactaggcctggctaggatgcagaggagtcacaggcccagctatcacccacaggcccagagggacattctctgactggccaaaacttgttcaaggacaggcttttccatctgaggaatgaaatagccttatgattgatgggaacgagaagacatgagggcaggtcagtggacagagttgtggatacctaccttgggaccctaatcctctcaagggtctcatttctggggctcaccaggaaatcgggtatgtgatcaggccccagacaggtgaccctggaacccagaaacccacaagcaagcaacactggaatttagagcacacc

SEQ ID NO: 57828 - DNA, 1095 bp, Homo sapiens
caacaggctgctctcaaatgtgcctgcatccttctgctccaccaatcaagttgaatgctttcctagaattgcatttgctcccaaacctgtttatgccagttgaacttggataatataattattacataaattgatgaaatatgagcataaaaagaaagttgtttccataaagactatattggaagtttcaaaagggaaattgctagcctgggcaacatggcaagacccagtctctccagaaaagaaaaagcaaaattagccaggcatggtgacacatacctgtggtcctggctactcaggaggctgaggttggaggatcacttgagcctaggacgtcgaggctgctgcattgagccatgttcacgccactgcactccagctgagcaacagagcaattctctctccaaaatgaaaagaaaaaagaaaagaaagaaaaggcatgttgctgagttatatgtaggacttgaaaggttagaggagattataaaactctagaggattttgctttcagattgctttatgttgttaaaattttgctccaccttaaagaaactgacattagacttgataatgcactgtaggtatgggtgtgaagactcaagttggaaaagcagaagtgtatcaggaaaaattctattggtcctagtactttgaatgacactgaggttcactggcaactttctgtgtaattttttataacaaagacctaccgctgcaaggattttacatgtaatgagtgcctaaggaaggtatgaaaaacccttccctggaagtctcccaaagcagaaaaacacccatttgcgtggatgacttggtgcatcagtgataggggagaaatgactgaggtaaactgttcatggtatgagagttgaccaagtcagggtggggaggggaggaagaggggcaggtggacttggtgactctgcctccctttcaaacagagcagccctgtgtttacctgtttcatacattgaggacttctggttaaaatgttagtaaaaacgattgctcttcttaaaaaagggcttgcaagccaccagattaggtcttttccatgtctttctttctccaaatctatatgagatctaaataagc

SEQ ID NO: 57829 - DNA, 1038 bp, Homo sapiens
agtggcacaatccataaatcatagctcactgtgacctcttaacttctgggctcaagctgtcttcctttctcacttcctgaacagctgggactataggtgcttgccaccacgcccggctaattttttagtagcgatgaggtctcactaaggctggtcttgaactcctggcctcgagcgattcttctgcttttgctggaattacaggcatgagctgctgcattctgccttctttcagtttctatatttgatattctgtcttgatatagattgcacactattatagttcataccatactctacatctccagtgctgtcatcaaatgacattcccccaaatcagctgaccaggggcatctgccattaacctgggaaactattctgagttcattttcatccagcgaggcacaagagggttgaccccaaagcctaagctgtggggcatcagagcactgacgtctttgactcggaagactaacccaagtctgaaaagaaagacagggctgtccaaagcaaaagcatcactgttgctacctggccagcctagttgcggtggaatgagacatcatgaggatgatgcagctggttcccaggtggttgtggaaagctgttggctgcacccacgcataggacccctcttggcccatccaacgcccccaagagccacagggcctcctgcccccatccatatgtctcagtatggtggccccacttgtggggactcatccggcattttttttcttgtcctcaccatgagggattgatgttttggattcttgcccacgagttgcatagacttcctttacaaagtaaggtctttggggccagatagggtccttgataagttttcctaaagaggaaagatgctagaatgggcagtccaaaaagagtgcctgtcccaccacatgtgaagtcagttaaattatcagtagctgctcttcagctgacaccctgacatcgatttcttttcttcccattctactgcaggcatatgatgttgacattttatttggtggtgatcatatttaaggaagtacactg

SEQ ID NO: 57830 - DNA, 1040 bp, Homo sapiens
atttaaagattttgttgactgaataaggagaccgtgaacagaaaaaagatgacctcctcagcttttgtagaaacactaaagaagacgttggaaagtggacttcttatttaataaagaaaaaaagaaggtgataatggaaggccagggattctggagtgagaaaactgaatatgatacaaagaagtcaaaaagcggggaataatgtgttcagagggaacgcctggcaattcatttggtttgtggtgggaagcttcattccgcgaagagagagtagctcagtggctggaggtgtttatagccagatcagcgtttcacaccagcagtctggcctgggtcttttagagctgccagaaactgctcagagttgcacagatttctcagcctagtagtatgaatttggggcctgattcctatccctttttcctctttcagtactcactttgcgctcacagggtgatctgagatctgaagatgaatggcaacgtcttcgtttaataaagtagacttttatttgttgctttatgcatcaggaacatatacaggccatatacgttctatatcacttcttccaacctgtgtagaagaatttgtgcttctgaccaaaaatggtttttgcttctgtcaaccctacataagtcattccatcccactttaaggcatcgcctacttccagaatggaggattggcaatgacgtacaagcagtacgaatgcttctttttttctttttcttctctattcttttccaacctcttcctttttttctgagtcaaaactaaatcagaggccatgctcagtgattcatgcctgtaatcctagcactttggtaagccaaggcgggaggataacttgaggacaggagttcaagaccagcctaggcgacatagtgagaacttgtctctacaaaaaaattaaaaaaaaaaaattatctgggcatggtggcacccgcatgtagtcccacctactcaggaagctgaggtgcgaggatcccttgagctctggagcttgaggctgcaatgagctgtgtttgcaccactgcatt

SEQ ID NO: 57831 - DNA, 1147 bp, Homo sapiens
ctcactgtgtcctcacatggccttaactgtgcacacacagaaagagagctctctggtgtctcctttttcttataaggacacgagtcctatcagatgagagctccactcttataagatcatttaatcttaattacctccctgaacgccccatctccaaatacagtcactgggagttacagctgtaacacatacacttggggggaacataatttattccataacaatggtctaaatttaagaaactctcttaaccttagggcaaaaattcaatgccagaatcaagaaagcaatgcctaaagcagggtgttaggaggcaagatgataatttaaagaaaattttctgagtcatagacacatttgagaatctgaaagtatgatcagataccagaagattgcacatgcatagaattttatgtataactgcaagggcattcggttctccagaccagttacttttcttttgccactggcaagatggcgtctgtgaagaacaagcacagaaatgcatggctttattctgactgagtggggttctgcctaggtctggacctatggccctattgccaccattaaaaacacttgaacctttatcagaaaggagagtgagctaaagtgggtatgctgaaggtggctagaacttcagcaaggaagccttgaggtgaactagatttagaaccaagcagacaagttttcacacttttccattatattaagaatcatcagaaataacagaagtcctttctctatgggcacattagggtggccttttatattcttggaggtgccatgtccctgtgtttatttgctttaactcctttctaagtgccatacagaactctgtcagtcactataactgagtgacttaaaagaaaaaggcaatggtggaaatctattatttcagcatcgaacagaatgatcaaggtacagtagagcattggagtataattttcttggatgggtttgatcttcaggaaatattcttttttttttttttttttttttcttttttttgagacagactcttgctctttcacccaggctggaatgtagtggtgccatctcagcttactgcaacctctgcctcccaatctcaagcaattcttgtgcctcagcctcctgagtagctgggacgacaggcgcgtgccac

SEQ ID NO: 57832 - DNA, 1011 bp, Homo sapiens
ggtgattaggcttctgattatattcagtgcatgttagagggagggaggagtagaactgataagaagtctttcacagtggctcaagtgagaggacattaggctctgaaccagagcaaaggcaggggaaagttaaaggaagagacagatttgaaaggaaagtggtaatacaatcaatgatgtgttacagtcttgatgaggagggggaggaaaaaggagttgaagacatacctaagtttttgatagagcaatgaggggaaaaggtgatgctttttagtggaaatagggaatgagacgtgtaaattttggagggtagactagatgatatgaggagaatagtaagtgggaaaataagtatcccatggagaaagttctttaatttacctctataatctgttatagctcccttgaaatatccgttgacaaggttcttcatcttcattgtcctgttatatctgactcaatctctcatatgctcattcagactcatttcctctctgttctgggggtagatgaaaatgacaaagtgccattgttcttataagaactcgccccaaataaaaacttttgacaccatttctgtcgtacatcagtagcctgttggtggttgtttggatttgtagattagattatacagggttattgaggtctctgcattctttgttgttttcacctcctcgtgaatttaggcctagcttgttgttgcccagctctcttttctgtacttgagatctatgtgagaaacaaatataaagagaaatgggagggagacagcaaaatccagcttagagtgagcaaagaaattctttctgccaaacaacagatgcagtagccctgcataactctgagccctgtcctctttactttattctttttgatgccatatttaagctgccttcctttctccctgctatcttgagtgaccaggcagttgctttgcagtactctgactgatgaactgtaaaatttgcaaactcttctaaagacattctattcttacacctcaaccagtca

SEQ ID NO: 57833 - DNA, 1086 bp, Homo sapiens
taacagaagactggagacattttctggagagagtaaaacaggtagtctctggactggtggactcctgacacaagtgagggcatagattttaaactaaaacaagggagaggggaataaataaaactttgcatattgaatgttgaaagctccaggctcttctctaactcagctcgtagaatgctggtcttacatgctgcaggctggagtttggaagactcacctctaggaaatctgaccaacccatgagaaaaaacttaaatgaatcagtccaatctcatctccctatactgaagccatagttgacaagtcctactgcatgtgcacaaaggttctcaataacttataatgagtgtcccagtcttccatataagcaaacagccaagcttcatcacacatctcagaaggtctataacacgaagtcccgccagtacaaacagaacaaagcaacttggaaccagaaactatgcaaggacattggaaacctgcccctccaaatgaatgagtgaatgaatgtctccgagagttgaaaaagagattgtatccttgaaagaaagaacagtatgctgtttaaaattttttaaagaagccttggaaatttaaaatatggtagaagcctgggcgcagtggctcgcaactgtaatcccagcactttgggaggctgaggagggaagattgcttgaagccaggagtttgagaccagcctgaacaacatagtgagaccctggctctacaaaaattttaaagttagctgggcatggtagcacacgcctataatcccagctactcgggaaactgaagcagaaagatcacttgagcccaggagtttgaggctgcagtgaactatggtgcatcaccacactctagcctgggtaagaatacaagatcccgtctctaaaatatacatatacatatatacaatacccatacatacatttatgtgtatatatatgtatgtctatatatttatatgtgtgtgtacctatatatgtatgtgtgatagaagaaatgaaaaacttaatagaaaggatggaagataaaattgaggccattgctcaaaaagtagagtttagcagccaggctggctca

SEQ ID NO: 57834 - DNA, 1043 bp, Homo sapiens
cttctttctcccaagttagtcactcaaggcacttattttcataggatacagcttgacatctcaggaagatcctaagaaaacaataaataaaatggctacagcaagagaattatagtgcccccaaagttggccccttgggtaacttttagccttaatcaacattttcctgtagtctctaattactaagagatattgtcatactctattccatttgcttccccaccttttttttcccttccacaactagttgttagatggatattcttgatcatctttgtgtttgcctctgcctttttaatcaaaatggaccattctactctgggagcaaaacaaaaaaaattcctagcctccccacccctcccagccagagtctttcagacaagaaactttatcagcttatcttgtacctgtttacccaaatttaggcctctaaaagtctacaatacatggacaatgttcccttctcccatggagggaaagaaaagggtgggtttttaagatactggtcagtttcagctcttttctcatttcccgtcctcttgcaggcaaacctgagggcaaagctacagacaagggtaagcttgcagtgaagaatactgggctccaacgctcctcctctgatgctggtcgggaccgcctgagtgatgctaagaagcccccctcgggcattgctcgcccctccacttcgggatcctttggctacaagaagcctcctcctgccacaggcacagccactgtcatgcaaactggtggttcagccactctcagcaagatccagaagtcctcaggcatccctgtcaagccagtaaatgggcgcaagactagcttagatgtttccaacagtgcagagccaggattcctggctcctggagcccgttctaacatccagtaccgcagcctgccccggccagccaagtcaagttctatgagcgtgaccggcgggcggggtggacctcgccctgtgagcagcagcattgaccccagtctcctcagcaccaagcagggaggccttacgccttccagactgaaggagcctaccaagg

SEQ ID NO: 57835 - DNA, 1083 bp, Homo sapiens
ccatctgaaaaatttctattctttcagtactcagacatctcctttgttaaccccttcctcccctgttgtagaaaagtaagattattttttgtgccatcacaaaccttctcagaaagcaaagattttctacccaccagatgagaaaactgaagctctttcaggtggaatgcagggtacatggctagtgatgtatttggctagtatatggctagttcttggccttggaccaccagatagctaagtattgctagaaaaatcatgaaaaatggtaggttgatatctccataaaactgtagagggctggctttagttaagtccttagactgattcaagctgagtccatgactccatgctaacttctggttcttgagaaaaggaatcatttcttatttaattcttaccttttgcactttttctatgttgaaacatgattgggactcaataaatgtttgctgaatgaatgatccaaaaaaatgaataatgtgattgaggagttggttggttctcctttctcttatcttctgccactagacttgcctgaagtctcacatcctctctaaatctgttctatgtttttcccacttgtacttggccctagaacttcggatcaagagacaaaactcctcagatagcatctcaagcctcaacagcatcactagccattccagcatcggcagcagcaaggatgctgatgcgaaaaagaagaaaaaaaagagttgggtaggtaaaggtttggggggtgggaagtaggtagaaccgtggtggaccgccttcacctcagcatagggatcgaatccttccaggattaaccaaggtgtagtcccgtctaacactgagccctagtgtgatgtccgctcagagcatggtctcccagattctcccttccctcaatcatttcctacttgtccccaaggccacccctctgacctttatatgcatctgctttctttgggctctccatactggttaggccaagatgtatttggcaacagaaggatgctgaggatatactcagaaggaaacatcttatcagttctgtccccaccaccccccattcccttctatactatggagagattttat

SEQ ID NO: 57836 - DNA, 1077 bp, Homo sapiens
aaccactagccacataacaccaaacatctcggaacagttctggctttgggaatactgaactacacatattctcacttaggatcttattgatcttaggggcatatgcttcaggcagcttgtcataggatctctttacacacacacacacagcatcccatgaggcagtgctatggagaaaacttcactggattgaaaattaggaagcctgagttctagtcctaagtcttacgtcaattatgcaatttcaagcaagtcaactctctggccttttcaggcttggttcttcatctctacagagaaatgagctttatggtacttttgagccctgactgctcagtgataagaagtcacctggagccagccagctgcacacatactcactcattcatgtctccaccacagccaagttggtcctcctttacatcttgcctggtggaaaccccaagatgcaccacccaccagctccatccatcacctgacggccttcctatgttccaggagagacgcttagaaagcgtaccctcaaatttttccttcttttttctcaccgtcccaaagatctggtttgcctttgtcccctataacctttgacccctcctttactctctgcctcttgctgccatttcatatctgtgtccctgtgtgtgtgtgtgtatgtgtgtgtgtggtgtgtggtgtgtgcatgctgtatggatgcatgtggatgggtatgggacaggaccctggtttgcatctctagctcacatccctaacacccaagctcatcaacaccaagatcaaacaagctatggtcagattataatgccccaagtactctaaagaaatgctgggaaatagcccttcttctaggacattggaaatcatagaaaatgctgtctggctgttttaaccattctgtgatgtcctgggcacaagaaatactaaaagaagcttgagcccactgccttctcgtgttctccacagaatcatattgtcagtttctggttgacagatgactagatgaacagattctgggctgatgagccctagtcagaggcatcatgaggtggcctctgaggcccacagtgagccaggttc

SEQ ID NO: 57837 - DNA, 1005 bp, Homo sapiens
caagcatgtgccaccatgcatggcttctcacaggatattaaaccgtccaggcactgggatcctggggacctttgaggctttatggagaaatgctacctaggaaaagcatatgctctgcactttctccatctatttctgtttcctctgatagacattctttgttgtggcttttacacctgtgtttgtatattttcttcttcttctgcctgtcttttctgtcaggactatatttctaaaatggacccagcctctaccctgggactaagcactgagtccatccatggctacagcatcagccacgtgaaacgagtgttggatgcagagccccccgagatgcctccttgccgtcgaggtgtcaataacatatcagtctccctcaaaggtcagtctttgtctcttggggtgaggtggtgtggcatgaaggcagggacaggatcatcaaataatccatcatgcattcattcaccaagaactcactgagaaggtataatatgaagatgcttaagtaatgtgagatataaaaagatgagtaagacccagtcctaactttggctcccagggacacttttgctaagccttggcttcttgcttcactcctcacccccagctcacagcatgtccctaaaaagaagatctaagttttcaaaactaggggttaagggactcttatggaaccatggggcaagtggctctgagtttcttcagggggctcctagataaagaaagaaaagccctttaggatcccttgctatcctcaagaccctggtcaatactcatgctttctggggtgggggttcaggtctgaaggagaaatgcgtcgacagcctggtgttcgagacgctgatccccaagccgatgatgcagcactacataagcctcctgctgaagcaccggcgcctcgtcctctcgggccccagcggcacgggcaagacctacctgaccaatcgcttggccgagtacctggtggagcgctctggccgtgaggtcacagagggcatcgtcagc

SEQ ID NO: 57838 - DNA, 1580 bp, Homo sapiens
tcttgtggccagtttggcctttcactgcactattctgatggtgcctgactgaatccaaatatcctagctggctcttactatttttcacaaatgagtattcacatataagagatgaacatccatgtgagatcatcccaatcagaatataagactcaaggagtttgacttggtggccaatacctgccttccaaagagatcctacctttgcagatttgctcctttcccattgccttgaaggtctggcaatccctgttctttcatttgacaagtacttactgagtactcactatatacaaatcattaggttaaaacagacacacacacacacacacacacacacacacacacacacacacacacaagacctgggcccttaagtttacagtccagcaggaaatgttaacctccattcagctacgcccccttgttatctagaccttcgggatcatctaagaaatgtagctgaaacccaaggagccagctagaaagaagcttttgattagatgtacaatacattgggggcagaagatctgggatcaattaagatggagcctgaaggactatggaatcttgcttgtcaggaatgggcaagtctacttcctgccatttctgaaagccccgcgggaccagcttctaggctgagctgcctagtaggctgaagcttcaggactctgcaggtcaaggatatgtgatgagcaccggcctaagtgtttgctcttcagattcctaagtagcacaagactttatcagaatctataggcataccaacctggatcactcttccacccaaccgaggagtagatgcatctgaatcttcatatcggtatattaagtccaaaagatggtccgggctgcccctcacaaaagcttctgcatccacgtggtaagctcccatggatgacagggttctgtatgatggagactattattgctattgctgctaattccatgagctgtgaagatccctaaccaactcagctgtaacatatgcaattctgtggtgggaagaggctgtgtgtccaaggatggtgctgaaatcactgccttaaggtctctgctgtgcagaatgaggaggcccccgagctggctgttctaacttagaaggaagagaagactggatgggcctgcttgggatctaggcctcttctaaaccctatcctaagctccagttccatggcaaggctcagacttttaatgccatcttaatctgatggttgagcgcttcactctattttctggtgctgcccagccagtgccttctgccatggatgttactggctacttgagaaaaaggagaggggagaaccccttctttcattccaactgcctccgaccccaaagggattcttggctctctggtaaccatggataccaccatgaattttatttggatcctcagcaggttgattctggaggcctcatgctatgactttttatttctcttcctgggatccaccaccctctactctcagctgactgctgcatttaggccaggtctccaattgctttcctccagaaagtgtgttcccgtctagtgaggtagtattgaagcctcggctttccctctggagcctgggacc

SEQ ID NO: 57839 - DNA, 1050 bp, Homo sapiens
acctacgtcctgcttcttggttgagactactgggatccttcagaaaagaaacactgggtcccatagctaaattctcaaccgccaggcaccttcagaagaatccagcctaatactggaatttgtgctattatcttcctctccagccccccaactccatccctcaccacagttgtctaggaaatgacatgaattcaatatctaatgtcaaccaatggggagagccacaactccaggagaggttcctgagctgagtcccttaatttctggatgaagaagaccaacaagttttgtccaatgtatttgtttctcagaccttgcctaggcactaaaaataaaatactaggtcattggaggctaatgtgggacctgatgtctgcgtgtgtgtgtgtgtgtgtgtgtgtgtgtgtctccctctctcacacacacaagagcagtttgctgttgctgtttcctaccttctgaggcttcaaagtattttttaaaatctatgctttgtggcagctctacggtgcttatctctgtctttgtgtcaatccttaagtacccatgtctttttcatgtctaaccattgggaaggtagaggctggcagggaagacaaatctgctacaagtccatgggaagaccctacaatgaaatgttcattggttggtatactgttttagtcttgaattgccaactttccaactgatctatccatattccttaagtactaaagacaaaatagagggcttctttttctctcttaatgtcttgccttctggttttcctggtttgcaagactaagtgtacctaatctcaccatctcttcacttctagctctctgaaacaagggtcacactactcagagggataaccccttacagtggtctgaggagtaactatttcctaaagtattctaaaagagtaggaagagagaaatggtagcctgctgcttctcacagacacctcacatcctcacttgggatggcatccacatagaaaccctgcatttaggtaaaatttgcctgactgaaggggactcagtcctccaaatcaaggtcaagaagata

SEQ ID NO: 57840 - DNA, 1052 bp, Homo sapiens
ctggaactaagtgtttggaggaaggactaaaccccgggggaggtgagtataaaataattccactaagatcacctcctcagtccccagaaggctgatggtggatcctctggccatctcctgtggggtcttactgctcctctgccatttctctatgcctgaagacacgaagatgatatcaaggcagagctaccatatcgcagccagtctctaggctactgctgtgcagtggctcccactttctaatgcttttttgtttttgctttttctaacaaaacaatcttttttcaaaatgaattccaacccctgctagcttccttccccgcctccatactgttttaggcagcaccgtttatgtgacagagtccgtgtttctcaaatgcatggtgttcctcaggtggagagtgggcagaagtttttgcaacactttttttttaagttattgggtgcaaaatcccaaaccaggatatgtgtatgtctgtgtgtttatgttttttatttgaccctcccctctttcaacctacccccttttatatctaatgtagaaaaagcgaaattgaatctggaaagcaaactgttgtatatagttgcggtaacaatcatgaagagagagccgggctgtcccctcagtaattcattttaaataacaaattatttaaaaataaaattcatgccagagccagctgaagaggccttccttcatcaccactgaggccacccccaatctgggccctctgtccatctggcatgtctcctcccagcaagattcatctgttcaatgccatttgcgtttcaataaagttatctcctgtactgtccactggttctctagctccctctctgcctggtttctgtctccatttatcttgtggcccattccttgattggcaaggccagactgcttgtggtcatttgcctaacccagaagtaacctgaaaccctaagctagagtctcctgactcccatggttgggggtgggaggaacccctgctcgcacattatggacatagaatccttcaccggatctcaaaacatccagcccaaacatcaaggct

SEQ ID NO: 57841 - DNA, 1060 bp, Homo sapiens
ctctgtcatccaggctggagtgcagtggtgtgatcatagctcactgcagcctcaaactcctgggctcaagtgatccttccatgttagcctccttagtagctgggactacaggtgtgcatcaccacacccagctaattttgcatcggttttatagcacggagtttaccatcaacatcatactccttggaaacaattatttatatagcttttaagtaaactaaagtattatgggtatgacactcttaaatggtgagtgatatccttgtatttctagtaggtatgtggtctagacagaataaattgggttaagtaaaagaattttgtattttccctctttcatccccctataacctaatgcaaataagctctttgtctttgaatttttgaggctttgaaacatgtggtcatgttggacatgtggtcataatttttgaaactgtaggggtctgtagagaaggaaatctgttcatctattttattttaaaatttgtctttagttaacaatgatgatgttatttgaagattttctttgccattatatatctgcttttgagcaaatatatgttacttgaactttaatgctgcttctttcatgcgtgaaagaaattagcttttagaaggagtccatcttaaaatacttgttgtaggtacagatcccttggctaacttgggtttttggcccctacgttggtcttaatcttctgatgatctcttattctcaccatcccttccagtctcagtgatgtgtgaagcaaggtggttagtggaattttgtatatgatctttgataggttaccagacatgattaacttattactgtattagagtgaagagcttctagctactgtgatcatcactggagtgcatccttctggcagggatatggaaaaaatatattcatgctaagcttttctctgaagagaaaagacttggaattctctggttgatgagaaaggacccttaagctgtgataggacctatgtgtaaagtttgcctggtcttcatgctctaatgactcctgtgatcagtgccagagtgaactgatggaaaatgtgtggtt

SEQ ID NO: 57842 - DNA, 1082 bp, Homo sapiens
aacaatagctactagctgcatatggctgttgagcacttaaaatggggctagtgcaactgaggaactgaattttaaattttttaaaatgttaatagctatgtatagctagtggctactgtaatggactgcataagtttagagatcacagatgaaccctccaaatgaattgtcaagtttgtgtataggagttttctgtagacatgcagtaccttgtactcattgtttttccaacacagttcccaattgaactgggctctgccagtcacttttaacctgatctaatagcaggtggacttttatcccttacaggcaaaaattgttatccgggagctattgcctaatgggttgagagaatcgataagcaaagtgcgctccagtgtggcctatgcagtgtcagccattgcccactgggactggcctgaagcttggccccaactcttcaacctgctcatggagatgttggtgagcggagacttaaatgccgtccatggagccatgcgtgtgctgacaggtaccagaagcccttttccctggtattggtacttggatctcaagcgacaggagtattaccagaagctatgtgatataatggcctggaccagtaggaattgctgctgatgttattcctccctcctagtttttatctctccatctaccctccagctctattgtttttttctagggaattaagtttgtatagtattacttctactcccaaacctaccacttacagatacagtattagcatagtgatggagtattcagattttggatttttgtagtggcttcaccttgatccttcacttaccttctttgagcctgagtttccttttatataaaattaagatgatagtagtgtctgcatcaaaggagcttttggtatagtttaaatgttagctaatctatctttattgacttgttcagtaaagtttagttactatgattatcattattactatatattatttgtccacttagttcaaccaaggcaaagttaagaattgtaaaatggatttttatagaagtatttaaaaagaagataaaaacagtatagccatgtaatcctgaccttcatttagcca

SEQ ID NO: 57843 - DNA, 1016 bp, Homo sapiens
ttaggtcaataaaatctgagaagagtaacatatacaaagaggagttgaggcctagtaagtctgtacatattttattacatgcatcaaaccagcttgccaagcgaaagtactgaaaacagaagcaaaggtaagaaacctcgaagtgtaactgaatgttgacagatgggcacaagataaattaatacagaattttcccaagttgacctcacaaggacttttatgcagttctattacagattttctttcagtatttatattaaagttttcttttttaatctcttgtatttttctttatttccatattattctttctccttctaacaaataatcagtaactcttgctacttttgctttcacagaatgagaccaccaggccagtgtctttacctgtgtgctgtctgtttgggaactgccacctagaagcagttcagaaaatatcacacttaatatctttatgaagcagtattttttttttaacagtactacttttttctttgtagaattcactcgtgaagtaacagacacacagatgccacttgttgctcctgtcattctcccagagatgtataagatcttcaccatggctgaggtatgaaatctcagctccaagattatagtgagttcaggctctcttcagcccccagcctttcaggtgggagattatggtgtttgcaactgatctcaatacctaaaaactagaactgacaaagatctggatctgaatctgcattaaccttagacctttcactcaactacaagggcaagcctttgataaaagtgtgaaatagctgaaatatttcttcacatatcgtacttcctggcatccagtagcccctaagtagataaatagtgccttccttcatgctacttccagcctcttactgagttatcccacctacgcttgcctacctcagctaagtaatgggaagcaatctatcactgcattgcacataatagacccttaatatattgcatatatatttgattagtgtgtatatgaatgataactcatttat

SEQ ID NO: 57844 - DNA, 1245 bp, Homo sapiens
gctttcaattagcaaaaaatagaattgtgctgtaaatgtagcagcattaaaaaatagagtacctatttctgtaacacttactctctagtaaggacttagggataaagataataaataaagggctaataagcaagagacataattcagaactttgatgatagaataggaaattgggcaaatgaaaagcctcctaaaagaaaagggctaggactataatttagaaaaggagatactaaagaaagatatatggaaaagtttataaacaaaggtattcactagatattttttacagtagtaaaaatttggaaattataaaaagacattagttaattatatccataaaatgaaatactgtgcagccattaaaaatcaagcttaaaaggaatatctgaaaccatgggaaagagcttacattataataaatgaaaagatacttttcccaaaaaatccatagaatatgatcccaagttttgatttttcttttagaaaagcatgtatgtatagataggtatgttttaaaaaaaaatacatcaaaatgttgagtgtttaggtagtggaattacaggtgttttcattattacttttctgcattttaagttttttttttcctgtagtgaatgtatttattaataccttattactagtaaaatattaaggattctttttttaaagagagagctccaatattgaagctcagaaagatgtacaggataaggattatttatataatgtgatatactgaacatgttatttgatagctttttcactgaaaaatgtgtactgaggagctttccacattgtgttcttggatatatctcattcttttcagccattactaatgttccataaaatgggtatatcataatttacccattctgttaatggacatctagggtattcccaatttttttctattacaaacaatgctgcagtgatcttttaaggtatactttaatgcacattgcctatatttttccatactaaatagaggaggatgttttgttctatagataaagaagattgagctaaagttccctttcttcataaggctctgctttttaggagttttgccttttgccccagaagtagctttgagagttcttcatgtctaccgtggctaccccataggagatatgtatgatttctctcatgcatcaaagccagtgttttggcaatttttgcagctttcatgtcttcttaaagtatcagttgggctttttttttttttttaagcatttggtttta

SEQ ID NO: 57845 - DNA, 2610 bp, Homo sapiens
gagaatcacttgaacccaggaggcagaggttgcagtgagtggagatcgtgccactgcactccagcctgggtgacagagcgagactgcctcaaaaagaaagaaagaaagaaaatggctcttcttgttccagaggtaccctcagtgaattgaacagagtgccacctttacacagtgccactaagtatgtcacctggttatccaatccactaccatgtactactgcccacccctatggctaatcaattagtaagctattatgagaaggctgagagtactacccatttaattattccttttattttggaaacttgcctttcattaataagctttctctgggttgctatgtaatacccatccagtaaggatcttggttgttgggcaacccccaccccagaggcaattctgacttttctttttcttctctctttcagacagccattgatatcctgacaacagtagtacgaaatacaaagcctcccctttcccagcttctcatctgccaagctttccctgctgtggcacagtgtacccttcacacagatgacaatgccaccatgcaggtatctgagacatggagagtagaagagggaagatagctccccagccatgggcttatactatgctgagaaatctgacatggttttatgcttttgaaatacggaattctcaactccatatttacttagcagattcaggaagggttcagtctgcaaaagccaagcatttctggtgctttggagcatgttacagtttttaaaaatatggataccaagcaccctgcccatctgtattgggtattgctactgtgaaagaggttacagacatctagacttggggccataagaaagtctttctgcatatttcttctagtaataaagtcagcagagtgatgggcctctagagaggggagacatgcctgaatattttttctctttttgtttcttgggtgaattggttaccttttcaggtgtctgctactgtgattgattagaaaggttataggaacttgccagtgaatattgatcagcttggaaatccctaggcaactagtggtttgtgtaagacctatataaagacctacagtatccccagttattccaagattgtaagcatatttttttagtaccagaggtagacctttatgattaaaattcattttgcttggccattgtcccttgtgattaaaaaaatatatatacacatttgtgagatagctgattaggtaaagggggaattatgtaatgcacgtctatgtctgtaacagtaaatgtcttaactccagtggtatgagcccaccacaaacattatagactcaccgcttttatgaggcataggcctctgggaacatttgtttatacagactgagggccttctggcatctgtccctcgattactaatcttgcttgccacccctgtctccccagaatggcggagagtgcttgcgggcctatgtgtcagtgaccctggaacaagtagcccagtggcatgatgagcagggccacaatggactgtggtatgtgatgcaagtggtgagccagctcctggacccccgcacctcagagttcactgcggcctttgtgggccgccttgtttccaccctcatctccaaggcagggcgggaactcggggagaatctagaccagattcttcgtgccatcctcagtaagatgcagcaggcagagacgctcagtgtcatgcaggtaagagagcagtggggagtgggcttcctactccctggctgatagaaatgaaaattcgtattttggtcctgagttattttattttaccctcttactagccttgtaggacagttaagtaaaatgggacctgtctgatctgtttggcctaagaaacatggacaaggaaatctcccatgttttcttgtcctgtggataataccctcagtgtagactgtatttcttatctgactggccagttccctctcatctcctatgtctctgaaattgatttccctgaagcaaatgtccttattttctcctagtccctgatcatggtgttcgctcatctggtgcacactcagctagaacctctcttggagttcctgtgtagcctcccaggacctactggcaaacctgctctagagtttgtgatggctgagtggacaagccgacagcacctgttctatggacagtatgaaggcaaagtcaggtagaacctcatctttcttttctgggcattctgccaccactcatatttcttttttttttttttttttttttttttttttgagacagtctcgctctgtcgcccaggctggagtgcagtggcacaatcttggctcactgcaacctccacctcctaggttcaagcaattctcctgctcctgcctcagccgtccgaatattacacacatgcaccaccatacccagtgaattctttgtgtgtgtgtttttagtagagagagggtttcaccatgttggccaggctggtcttgaactcctgacctcaagtgatccacccacttcggcctcccacagtgctgggattacaggtgtgagccactgctcctgacacatatttcttttttttcctgatttgctccattgatttttgtttgacatttcaaatggctctctgtattcccttttc

SEQ ID NO: 57846 - DNA, 2416 bp, Homo sapiens
tcattgagactaaccaggagggtttggccatttctgattctctttcactggggactacaagccacattgcagaagcctttggggcccttctattctggcctatttggatttggggagggaaaatgcatgaatgtgctctagctctagctgcttttcatctccaagtagatgactccaatgatatgtgggaggaccaggaggaggaagaggaggaggaggaggatggtttagctggccaacttttatctgacattcttgctacaagtaaatatggtaagctgtttgataagaggacagccatggtaaataccttttctttgcacactgatcccaacagtggggtacccaagaaaggggagaggtgggcccacagggacatttcttgggcttttgcaccttccgcctcagtcatgtggtagtatatcaccactcagggcctgatcatgggcctttgtcctgacccgccctgtgttggctatgtctaacagaggaggattactacgaggatgatgaggaagatgaccctgatgccctgaaggatcctctctatcagattgatctgcaggtgagggtgtccagagatatcttgcaaatgacaatgtcccaggccatggaaacaggaatatgggctcaaatccatttatagccaggcatggtggctcatgcctgtaatcccaacactttgggaggtcaaggcgggaggattgcttaagcccaggagttcaagaccagtctgagcaatgcagggacaccctgtctctacaaataatttaaaaattatctgggcatagtggcacacccccgtggtcccagctactcgggaggctgaggtgggaggatcgcttgaggccaagaggtcaaggctgcagtgagctgtgatcataccactgcactcgagcctgggcgacaaagcaagaccctgtgttcaaaaaaaaaaaaaaatccatttataatttaacatgggagcctcatgggaaagagttcctgtcttgttgagtggtccagggttttgggtgggctggaactttgcacttgatgtgttgtaattcatcttctagaggctatgttgtgaaggtccttggggtgatacagccttggaaaaatgttgtttccctgtggattacctaaactagatccaagaacatgaaagaccatccctcagggagctggcatttgtctaaaaaccagcattccctgtgccatttgattgtggttcttgctccactgcaaatgggtgacttgcaatgtctcactaatgccactcttgctctttcctccaggcatatctcacagatttcctctgccagtttgctcagcagccctgctacataatgttttcaggccaccttaatgacaatgagaggcgagttctacagaccatcggcatctaaaaaggggagcctttctacatttgctccttctgggccagccgcaaaccattttgcagccctcactggccttgagatgcactttcttctcaacctaaagtggcatcttgacccttggcccttggcctcggcagtgacactgatgacaattcagaccaggctcaccggtgccgtcacttaggaatgctggaacaaaggacatttctcaaagttcccctgaagacatgccatctctagaaccttttttctccccgactctacccccacctctgttcctagagccctctgctggcgagtccagaaacattattgcccagaaggattatgtgtttatggattattttgccccgcctcaggagcgcaggaagtcactaccatttatattctaaaacagacctatctatgttcataggacttctgatgtgttcagataggaatcctcatgagagatcattatgctttgtgccctggaccactgctgctctgggttctcaggaggaacaggcaagagcagcttcattctaagcctttccagtgacctcagccttgcttctcttctacaacactaaggctcctctgtcagaggaggtcgtcttgtttttgcttcattgcatgacataacccttcccctcaagctgttcctatatatacatgcacacacaaaataagccagacagatggcaatttgatcttccttttttagaaaaaaaaaaaaaaatggggaaaagggattttttttaaatccacctgacccaactatatttaatatgcctctcccacacattaccacagagtctgatattcaaaggttatcccctttccctcaggaagcctctaaagtgcttaagttgtagccctcaaatttgcaacatgtatttttctaggacagtaaagtaatctttacaaatgaatttagttgcatggtataaggtgtctcagcacctgtttgccttctattccctttagaaggtaagtaaaagtaatgggggaaaggattaggtggagcctgtctaaacattctagtgtgt

SEQ ID NO: 57847 - DNA, 1038 bp, Homo sapiens
cacagagtggatattcccattctgttgatgagaaaaagagtggagagactgtgtccagtgtcagcaggaagaaaaaagatctgttggaggccagtacatgttgacagaaactctagaccatattttgtctcctgtctttggccaaagagaactagcttcagtctgaaaagggcagggctaagtggttacaaggaactaaaaagttcaaggtaagacaaatgaggtaaaaataaaaaagagcacttagctgctctgagacattttagtctcctgactggtaaacagcagctggggcaccaaggggctcccaggagtttgtcgagcttttattggagtgaactgaaaggaaaatggaaggaatgctataagactgaaaagaagttaaagccctaggaaggaagctgataacacaagttacagacgtatatgtgacattgatttgggagaatgaacctacaacaaatgacccaaaagcacctaaataagagtgacgagagtttaacagacattcattatggacttcagagaaaatgatgctaaactggtcttagaatcttctttaattttgttaactaggtaaataatctggacattttagtcaaagcattagacagacagagaagttggtaactgaccactaactaacaaactataaattcacccattgtgggttgacctggtaagttcccccagggctgtgtccttggcccctcctttgatattagtgacagatgactttttttatgccttacccattccacaaaagaatttgaagccatttacacaagagatagtactagtaaattaggagtgctgatcaaatttttagataataagaaacccttaggaaggatgacaatttagaatccaaatttaggatccaaacaaataccattacaaactataaaaatgagcagaatctaaatgtaacatttcaataaatgcagattgataataacatctgtgcagagttgaggactatagagtactgtgctgtcactaacagtattgtgtgctactaagagtttaatggctggg

SEQ ID NO: 57848 - DNA, 1138 bp, Homo sapiens
ggaggccgaggcaggcggaccacgacatcaagagttcaagagcagcctggccagcatggtgaaaccccgtctctactaaaaatacaaaaaaattagctgggcatggtggcgcatgcctataatcctagctactcaggcagctgaagcaggagaattgcttgaacccgggaggcagaggttgcagtgagccaagatcatgccactacactccagcctgggcgacagagcgacactctgcctcaaaaaaaaaaaaaaacaaaaaaaaaaacaagttttgtgaatttaagtttccctaatggatggtacaggtcaacatttgccatctaatgacacttacattccagttttttccttttttgagtaactgggaaaagggtggcattactgctggcttcctaaaattgaaaagtatactagggtttttaaacctgtgtagaatacatgatatggtagcaaatgtgctgtaggaagaaaagcaatgaggaactactggcctgactaggaggcctagaagtccctcccaggcttgagttgttctgacttggcatgattacatagctgcggcaagtgacgtttccttcaagccttggttccctcatctgtaaaatagggaactaatacctacctcacaggattgtagttagaattaaggatgacttcattaaagcacctctagtggtggaagatgtcccatcctatcccccacccatagctgggagctatgtttggctcattcttcctgactcactggattacactgtgactcagttcaatttcacacatgctgctgctaaattagggtcttggtgagcctttgggaggacagctctgaggaatgaattgtagcactgcagccctgcctgaggaacatgatagaaacaggtggtaggcccagctcttgccttccacctactaagcagtttttctgtggttagctgtgtgacataaactatcggtgtattaatttgctttcactagattcccccccccccaacaacttagtccaagaacatacctgaattctttgcatttccttgccttagttgcttttgtagggtggacagcaggactgcatgagaatagctgtgcttctggaccctatggtgaaagctctagtgaactgcaattaggcccaggg

SEQ ID NO: 57849 - DNA, 1030 bp, Homo sapiens
caagggtacacatgggagattcagctctgggcaggaaagacagtcccttatctgaagatgattcaaccaacaatgacaacactgatggctagggctggatggccacattgaacacagccacgtggtccctgcagtcatggagcttttagtgtaggaaagaggagatggatggcaatgggcacactgagtaggtggtgctggattcagaggcgtttctctttgtccctgctgctgcatttatgactgtgtcctgcgtgaggacatactcttgcccatcaggctaccagcaactttctggggcaggagcctatcctctcctattccagctctcttgggtaggtgtgccagcacccacaggggcccaggatggggtagctcctctttcggctgtccttccctaacctactaagattctactgggccttccatggacctgtcctgattctctcaccccagaacacaagaaatactcactgtctacactgtctgctgttgcggctggggatcaaccctgatttagatttgggtcttcctgatgcctctaccatttactggctgtattaccttgaacaagttctttaacctccatgagtcctagtttctcagtctgtgaaatgcgattgataacactgatgaaccttgcttagttcatggagttgtggaaagattccagtgaggtagatgtggaagcccagaagtgtgtgaaagggtgtacatggcaggggattaaggtaggcttttgatgatctccctggcttaatttgcagttcctcggagggtacctcatgtagcatggggcatagtcactggcactcagtataaacctgtgaagactgacctctcccatcctaaaacactgtctccacctggaattaactgttgcccacctgaaattaactgttgccctccctatgctccggtggctattgcagtacaggcttgctctgtgaagggctttcactgtgaagagtgtttaactggatgggccccaggtggccccagcagcctgccttccctgctagtgaggcca

SEQ ID NO: 57850 - DNA, 1143 bp, Homo sapiens
accaagaactggggctctggcccactccctccagccacctagggacttcctgataccaggcactgcagctgccagtctcatctatctttacaagggagggcagggaagagctgactatgggctggagggcctgtcaaaggtcccctgggacagcagatgccttacagggctggtgtgcagggcagggcaggcagcagggcccagggctggaagggaccgggggagttcacccactgcagtctcctgccgcattccatgtggagtgccaaatcttttattgttttccaccaaaaagaaagattctagagtctctggaaaagaagtttaaggaggggccaggcacagtggctgacccctgtaatcctgtcactttgggaggctgaggcaggaggactgcttgagcccagaagttcaggactagcctgggcaacatagtgagtgagactctgtctctatttaaaataaataaataaatatatagacaagtttaagggaggtccattgtcctatggggaaagttggattcctggcaccagctgtcctgggtaggggccgtaatgcctgtttcccttggtggaatgtggagcaggagtcctctactgaggctaggcccagctcattagacatcaaagattcagatcttgtaacaactgatattgcccctagaaaactacaggttccctttacggctgccaggaaaactgggggctgttccggaaaagttctgcccatagtggcatatgagcccactgggtctttagacagttggcctatgtgcaaatcccagctctgcccctaactagctctgtgaccttggctgagacacttagcacctctgaacctgttgtctcatatgtacaatgggactgatccctctggggatcctcactgggttgtaagtggtagaaccaggactcaaacctagatcccgatgacaagaaagccttgaataggagataggctgtaaaaatctgggtccttctgagaagtgattaagcctcgagggcaggcagtagggccccaacctcctcctatctgagcccctgccccctttgcttagtatcttggtattgtttagcagggtgaaatttgttcttacccagaatggaactacattgtgtgcttttccatggaaaatgaaat

SEQ ID NO: 57851 - DNA, 2334 bp, Homo sapiens
gctccgcccagcttgcccggcatcactcgcggcattggagtcaagatggaggagtacgcgcgagagccttggtgagcttcaccgctgtctttgcatttctcttgcccccctgcccactgccctccttctcccttgtccaggctcccaaggtgcaagccagactcaaccgcagcctcgtcgacttgggcctggtaactgggcaatgcggtctttcgcggccagtcggcttcttagccctgtacttagtacctccccggccgcgtgagcctccctctcccaacccagcacccgtgtgaccttgtgatggatggtaaggaggtccagacttgagtttgatagaacctcggaacctcctcccaacgcagggcgtaatcgactttatgcggggccagttataatcccccctgttcgtcgaggtgaccttgggcgcgtccctccgtctcgccttgctcagttcctgcgttgaggaactgaagaataggcatttgagggagtgtcattcttgaggttttacttgtatcatgatatgtgtccacagagtgaagcattttaaatgaatggaacatagattttagccaaggggtctggataagcttctttattgcgtggggccttgttttccttcttggaattctttcttgagggtagagggggacaaaaattacctgggaaataggaagaggtaatagcatgtgttctctgaaaagccatggacagaaattcattgttacatccagcgtttattgagtatgaataaaccagacacatagataattataaaacgatgtaattgctgtcagaagtctcaggttgccagagtttaaagtttctagggtcataggtaaaaaatcaaatcttgatatttcggttaatcatttgttttattgtgtaagagcaacaaccaagatgtcctcaatttgtgaaagtgcccaggaccttaaattactactctggtatcctagccttgttgcatgttttatgttcccctctcccataaatggcatacaaaatataagttttagggtctcctggctcttcaaacttatcttcttcaaagcagttatcctccattctggattgtgctcagatatgtaggactcagcacactgtaaatagctgtttgatgtactataatgacacaggttagcagagagttaaaatatttaactatgttgagttaaagatcttagaaaaataaggccgggtgtggtggctcacgcctgtaatcccagcactttggaaggccgaggcggatcacgaggtcaggagttcaagaccagcctggccagtatggtgaaaccccgtctctactaaaaatacaaatattagccgggcgtggtggcacgcgcctgtagtcccagctacttgggaggctgaggcaggagaatcacttgaacccaggagacggaggttgcagtgagccaagattgcgccattgcactccagcctgggtgacagagtgagactccatctcaaaaaaaaaaaaaaaaacaacttagaaaaataatgggttttcatttactaaatcattaggtagcccctttgctttctcttagtacgtatgccctgaaacaatataatcagttacctggttatctttgtagtcaaaactgctttgattttttgactgccctgtttgattacagcatttcctcaagtcattttataggccaaatatttattggttgcagtgggccctgcagtataatctgttccattataatccttactgtattggcaaagaagattttatggtttgtgaatgagaaatatggtcttttttttccccctgttcttagcccatggcgaattgtggatgactgtggtggggcctttacgatgggtaccattggtggtggtatctttcaagcaatcaaaggttttcgcaattctccagtggtaagtgggtgaatggtcttattttatcatcacttgcaacttgggtttgatgatattactggtggtcccatcagtggcttagaaatgtacttctaatatattttttgttgcttccttttttttgttatagggagtaaaccacagactacgagggagtttgacagctattaaaaccagggctccacagttaggaggtaagcagaattttcattttaactgaactatttttttctgttcctttgaagatggagctatttttatttttagattacaacaattagtgattttagtttggtctaacggtttgtcacaaacatatatccctatagtttcttcttgatttgtagtttgtttgaaaaattaacctgaattatgatacccatttgaaaatcttgtctctgtccttcagacactcggtgattttttttttttttc

SEQ ID NO: 57852 - DNA, 1046 bp, Homo sapiens
cctccgcctcctgggttcaagcgattctcctgcctcagcctccccagtagctgggattacaggtgctcgccaccacacccggctaatttttacatttttagtagaggcggagtttcgccatgttagccaggctggtcttgaactcctggcctcaggtgatccacccacttcagcctcccaaagtgctgggattacaggtgtgagctatggcacccggctggcttatttcttataggctttgggccgttgctaattttccagctgatataatacaatccagctttattcgaaagataagtattctaactcttgttcggtgtttattcaaacttgtgtttgcatgtatttgtttggactataaattttgagactatagtgagtatgtttttgactataatattttaaatggaagatgaaatttaaattagtatttgcttgtttctttttacaataaaataggtagctttgcagtttggggagggctgttttccatgattgactgtagtatggttcaagtcagaggaaaggaagatccctggaactccatcacaagtggtgccttaacgggagccatactggcagcaagaagtaagtagtcattacagacatactagtagaagccacacttttaggaaaacctcatctgcctcaattgaatgacatctgtaatatataaaactgattattgaccaggcacattggctcatgactataattccatcacttgggaggctgaggcaggtagattgcacaagtccaggagcttgagatcagatatagggagacctggtctctacaaaaaaaaaaatttaattagctgggtgtgttggtgcatgcctatagtcccagctactcatgaggccgaggcaggaggatcacttgagccaccgcactctcacctgggcaacagagtgagaccctgcttcaaaaaaaataataattataaaactgagcattgtttaatttggcatagcataaatatacagtatatggtgatttgaaaaaaaagtaaggggatctatttatttggaatatttgagaatgaa

SEQ ID NO: 57853 - DNA, 1254 bp, Homo sapiens
aaaacatgactaggatacttatactttgtgaaaataattttaaatagctactgaaaaatatgacaagaagtgggagaaactcttctaatcttgatatatggcagcttgttacagcaattgctttaaaaacttgaagtttgcttcttgctataattaatccgtctgactttcctagcatagtgtttgaaaactgttcattctggagcatagcaagccagtctgtcatatgttataccaaatttgaaggttctccagtactcttatgggaattaggcagatctataaagaaatttagggttatagctttaatttagcacatttttttgttgttgattgatttactctctatagagatttgttctttttaataatataatattcaggtgatttttaaatcctttttatttctcacttgcaggtcctcagtttgcagaagacccctcccagttgccttcaactcagttaccttcctcaccttttggagactatcgacaatatcagtaggacttctttcctaggatttctttaacagaacgagttgtggttcgagaaggatttcagaagatcaagttacagtctgtttttaaaaccataggtgggacagctatggccaataggctataaagagacatttagcacttttttctatttaaaggaacaagcggggaagggtgctaaaagataatacgtttatttattcacacttgaattgcatttgtgatcaaaataaatgtttaaatcgctaaaggaaaatacagtaagtgcttgaaagatgaaggaccaaaaggccaaaaaacagtgaaatatgatcatcatctccttgcggacttctctgcctggttttgtgtgttctgttattcaaacaataaaaagctggtggaacttactctttcttttaagataagttgtagacttcgatgtttcatgctcatgtacttcaaataatgcatgttttatagttagtccctcatcacttgaagtgacttctgagaattatgcagagtcaacatggatcatttcacagtgagatgctttatggattgaaggatatggtaaaatgtttatagtttactttgaaagtaaaatatactatgtcttggttttgaggatattggatacaaaactctcttcctttagggctactgagtcttgattcctgatcatcagaaatttcaccagaaacaacttgcttccaatatacccaattctatatgaagaattcatggagagtgtactggcactggaagagtttag

SEQ ID NO: 57854 - DNA, 1087 bp, Homo sapiens
aatgtgtaattaactaacatcatgcctcctatagggccacatgtcacttccaatatcaggaaaatgacctgttctgaagtgctcatccattttccaggcccaaccagaccccaaaatacatcgtttatgcagaggacttggaacacattcaaaacagtacatactttattttcaagcatacaagaaacactaaactcttccagtgccagtacactctccatgaattcttcatatagaattgggtatattggaagcaagttgtttctggtgaaatttctgatgatcaggaatcaagactcagtagccctaaaggaagagagttttgtatccaatatcctcaaaaccaagacatagtatattttactttcaaagtaaactataaacattttaccatatccttcaatccataaagcatctcactgtgaaatgatccatgttgactctgcataattctcagaagtcacttcaagtgatgagggactaactataaaacatgcattatttgaagtacatgagcatgaaacatcgaagtctacaacttatcttaaaagaaagagtaagttccaccagctttttattgtttgaataacagaacacacaaaaccaggcagagaagtccgcaaggagatgatgatcatatttcactgttttttggccttttggtccttcatctttcaagcacttactgtattttcctttagcgatttaaacatttattttgatcacaaatgcaattcaagtgtgaataaataaacgtattatcttttagcacccttccccgcttgttcctttaaatagaaaaaagtgctaaatgtctctttatagcctattggccatagctgtcccacctatggttttaaaaacagactgtaacttgatcttctgaaatccttctcgaaccacaactcgttctgttaaagaaatcctaggaaagaagtcctactgatattgtcgatagtctccaaaaggtgaggaaggtaactgagttgaaggcaactgggaggggtcttctgcaaactgaggacctgcaagtgagaaataaaaaggatttaaaaatcacctgaatattatattattaaaaagaaca

SEQ ID NO: 57855 - DNA, 1055 bp, Homo sapiens
tggcacaatctcagctcactgcaacctccgcctcccgggttcatgtgattctcctgcctcagcctcctgagtagctgggattaccgccaccacaccgggctaatttttatatttttagtaaagatggggtttcaccatgttggccaggctggtctcaaactcctgatctcaggtgatctgcccacatcagcttcccaaagtgctgggattacaggtgtgagccactgtgcccggccaagttttttgctttttttttttaaactacatatttccccatttattggcttatgagttatatactgtcttcaatttatattacttaagtggtttcctttaaaactttaatacagatacttaagatctcacatttatccctactctccatctgataatacaaggagcttagaatgctttaacttcctgcagccaattaagccgactgagttcctttcctcatgggggcccagtgtgcaatggctgtaaatagcagcttccttggtagtgtatgcagcctgtttgttgtatgggttgctctaagggaccttggagacagtcctttcagatggatgttcatgtttctgaccttacactaccccaatgtaggctccaaactggcatgcgaggtgcctttggaaagccccagggcactgtggccagggttcacattggccaagttatgtccatccacaccaagctgcagaacaaggagcatgtgattgaggccctgcgcagggccaagttcaagttttctggccgccagaagatccacatctcaaagaaatggggcttcaccaagttcaatgccaattaatttgaagacatggtggctgagaagcggctcatcccagatgggtcaagtacattcccaatcatggccctctggacaagtggcgggtcctgcactcatgagggcttccactgtgctgccccctcttaatactcaccaataaattctactttctgtccacctaaaaaaaaaaatgctttaacttcagttacccctctctcttatgtacttttagtctgttattttagttttatcctgattccctcac

SEQ ID NO: 57856 - DNA, 1008 bp, Homo sapiens
ctgggattacaggcgtgagccactgtgccaggccaggaattatttcaagaaggaaaggaatcactgaaggaaagaatgagatgcaaaaaggaacagtgagcaaaaaaagtagataaatttaaacaactgtataaaacaacactaataatatactaataatgtttatgtgagggaatcaggataaaactaaaataacagactaaaagtacataagagagaggggtaactgaagttaaagcatttttttttttaggtggacagaaagtagaatttattggtgagtattaagagggggcagcacagtggaagccctcatgagtgcaggacccgccacttgtccagagggccatgattgggaatgtacttgacccatctgggatgagccgcttctcagccaccatgtcttcaaattaattggcattgaacttggtgaagccccatttctttgagatgtggatcttctggcggccagaaaacttgaacttggccctgcgcagggcctcaatcacatgctccttgttctgcagcttggtgtggatggacataacttggccaatgtgaaccctggccacagtgccctggggctttccaaaggcacctcgcatgccagtttggagcctacattggggtagtgtaaggtcagaaacatgaacatccatctgaaaggactgtctccaaggtcccttagagcaacccatacaacaaacaggctgcatacactaccaaggaagctgctatttacagccattgcacactgggcccccatgaggaaaggaactcagtcggcttaattggctgcaggaagttaaagcattctaagctccttgtattatcagatggagagtagggataaatgtgagatcttaagtatctgtattaaagttttaaaggaaaccacttaagtaatataaattgaagacagtatataactcataagccaataaatggggaaatatgtagtttaaaaaaaaaaagcaaaaaacttggccgggcacagtggctcacacc

SEQ ID NO: 57857 - DNA, 1041 bp, Homo sapiens
gaacgggtggatggccggcgactcgtctacaagtttggcaaaaactcaagcggctggaaggaggaagaggttctccagagtcggaactgagggttggaactatacccgggaccaaactcacggaccactcgaggcctgcaaaccttcctgggaggacaggcaggccagatggcccctccactggggaatgctcccagctgtgctgtggagagaagctgatgttttggtgtattgtcagccatcgtcctgggactcggagactatggcctcgcctccccaccctcctcttggaattacaagccctggggtttgaagctgactttatagctgcaagtgtatctccttttatctggtgcctcctcaaacccagtctcagacactaaatgcagacaacaccttcctcctgcagacacctggactgagccaaggaggcctggggaggccctaggggagcaccgtgatggagaggacagagcaggggctccagcaccttctttctggactggcgttcacctccctgctcagtgcttgggctccacgggcaggggtcagagcactccctaatttatgtgctatataaatatgtcagatgtacatagagatctattttttctaaaacattcccctccccactcctctcccacagagtgctggactgttccaggccctccagtgggctgatgctgggacccttaggatggggctcccagctcctttctcctgtgaatggaggcagagacctccaataaagtgccttctgggctttttctaacctttgtcttagctacctgtgtactgaaatttgggcctttggatcgaatatggtcaagaggttggaggggaggaaaatgaaggtctaccaggctgagggtgagggcaaaggctgacgaagaggggagttacagatttcctgtagcaggtgtgggcttacagacacatggactgggctgggaggcgagcaaaggaagcagctgagactgttggagaacgcttacaagacttcatgcaagcaaggacatgaactcagaacactgaggtcag

SEQ ID NO: 57858 - DNA, 2775 bp, Homo sapiens
agacctgagggagcgggatggggagggagctcggctgggaagtcactgggagcaggtaaaagccaggcatggtaggggcgcagagaggaaacgggacccaggaggccagctcaccacccagacaacctgggcacggctgccctagacctcatcctcaccctcccttctccgtaggtcttagtcctgggtaacaagcgagaccttccgggagcattggatgagaaggagctgattgagaaaatgtgagttgggtgactctatattactttctgctctcccaattccccaaccaccagaccaacagcctaggcttgctgctgttcttagtattagccacacggtggcagcagagccgaccttttcaggcacctcaccctcccctttgtagcctcttaggtaagaaaaaggccccgctgtcccctagccccaggccccctggacgttcgtagcctcagcggactctactctggtttcccccaggaatctgtctgccatccaggaccgagagatctgctgctactccatctcttgcaaagaaaaggacaacattggtgcgtaggatgggggaaagggaggagaggggagaggcatttctgagtgttttagtggctctcaggttctcgctccacaactttccctgaagtccaaagccctgtggctcttgggtagaaaaggcagccaggtggcccagattctgggcactatcccagcttgtcgccaagcggttgtgtgatctcgggcaaatcgatccccgctctgggcttcacctcctcgtttctaagattccagggctggacccggtgattctcaggtccctgctggctctgacatgctgtggctctgtctctttcccagcacctgaattccgctactactcattcagggccatgtggcgcttgccagctctggacttcttgtttgtttttgagaaagtgtctcgctctgtcacccaggctggagttcagtggcgtgaccatagctcactgcagcctccaactccactcctgggttcaagcaatcctctcacctgagcttcccatgtagctgagactccaggtgtgcgccacccctcctggcatctctggacttctgatacccttaggtttggtttcttgggcctctctgctgccccagcacggccagtacttgcaggccttataagctgttctcttttctcctatcagacatcaccctacagtggcttattcaacactcgaagtcacggagaagctgagactccagcccttctccctcagaccagggaccgtcatcatctaaacctgaagccgagctccccgcccacccctgtcgtccccctaagcccacccctcctcacccagtgtgaggagggccctctggggaccccagagtcctgttctgctgaggtttgaactcctgtttttattgtaaaataaattgccccccattctggtcccctaacttctcacccttccccgctgcctttgtcccatcacccagccctgcctccctcccagcagccctgggccacagcccccgcccctggcttttccccggcccgctcttgtacctcccttttcaacactctctgttattgtcctgtgtgtacagtatatatatgtatatatattttaattttttaatttaagcaaagactaaaatcaaccatttgatgctgcaggggcctttcaggatctgggagggggcagtctggagagaaggagggagacgcaggtggacttggggcaagttcagatcagaagaggtgcaggctggcacctgcggcaggtaccagcctgggcactggtggccgcctccctgtcccgtgtgtttccaccgcccaatctggcttgtcctggcagtgcttgaatgccacaggctggcaggggcctctgggggcccctcccctcgacccccagcctgggtagagccaccaggtacgacgaccaggtaccagaaaccaccaggcacacggggcagaaagccagcgtccatgccccagcagccccctcctgcctgttcctggctcccagctcccgcccctccccagggcccccacctccacggcccacttcattttctgttctcattttgcagagttgcacaaggagagaactcagcatggggggttggttctttgggttctgtttgtttatttgtttaatttaatgatttgtaaagtgatgttcctcttccttttttacacttttcagctcatatttaacctctgtttggaaaatgattcttgtaactgtacatttttttgcttcctaataacaatgacaacaaaaaaaataaatgaccagttttgtgttggggggggtgtatggtgctggttacttttccgcagttggcatgggttgccctacaggcccacagggccaccagcacacccccgcacgctgggcaccaacagagccacggagcgcgagcacatgcccgcccggggagcacaatggcgctgcacaaaacggcctcccacacgtgcgtccaggctcttgcgccacctccttctcattctcttttcagactttcatgtagtcccagctttgagccagcagctgccacttggggctgcagagctctgttgagggaactgcccagggctgggtagaggcagcaaggggacagggctgggtgctgttgtgtgcgaactgagctgcactctccttaggcccagttcaggcctcagcccctctttcccaggccctggatctcaccagcagccaaggttgagccagaaccagaaccctgtccctccggcccccagttcctaccccagaaccagttaactgt

SEQ ID NO: 57859 - DNA, 1028 bp, Homo sapiens
accccatttcccaagcgcctctcgacgccagctgccggtcaacccccgccgctgaagcctgcggattccctgctcaccccacctgcggattccctgctcaccccacctgcgggtgcggcccctggccccccggctccagcgagggaggagcgcgcgctcgggtgcgagcaggacacggcccggccgcgagggagggcggcggcggcggcggaggaggagggcgcggaagccacacccatcggcgagccgattccggggcagcgagtcgtcggcagccgcgctcgagcctccgcccgcaccgagccgcgggacccgggccgtaccggggaggggccgctccgggccgcagcgcgagggcagcgaggggcggcggggacctggcaccgggcggggccggcggcagcgaccatgatcgctttgttcaacaagctgctggactggttcaaggccctattctggaaggaggagatggagctcacgctggtcgggcttcagtactcgggcaagaccaccttcgtcaacgtgatcgcggtacgagggcgtcgggcgcggggtccccgggcgcgggccgcgggtcgggcctgtccccgcccgcgccgcgccctgctgagccggggtcgccgcctggcatagccgggcacggccgggcgccgggcgggggaggagccggccccgagcgcttggggcctagtacggcccgtgccgtgggggaccggggcggcgcgcgacccgctctctcacccgggccggtactgcacggctgggggcaggggaagggggacgaacagacagggccggtgccacggggcaggcggcaccgaggggctctcgaagcaggagggacccgctgccggctgagacgggccccctctggcccccgcgcaagggggcatgacggggcgaaagtgcacgggccttcctgtcccgcgggtagagggtcacgggacggggcggccgagaggcttgaggagggggtttgggcaagcccagccccacccagagggcttaacccctccttgccggaagag

SEQ ID NO: 57860 - DNA, 1039 bp, Homo sapiens
ggagaggggggagccagagatttagtgtagatcgtttctcccttttctccacaccctccacatcttgctctcctcgcaggcccgcttgcccctcctctggtaaatgtgacgagtgaaggtcccacccagctctgggcatcctgggtccatgcccccaggggccgagacagctacccggtgaccctgtaccgggcaggcaccagcgccgtcggagccaaggtggccagcacaagcttttcaagtctgactccaggcacgaagtacaaggtggaggttgtcacgcaggctgggccccaccacattgcagcagccaacacctctggctggacccatgaggcatggggaaggcagcgatgcaggagaggtgagcaaggctgcctcagagagccccgggtcttccctcagtggtgccccctttagcccattttccatctccacaccccagggccctgcaggggtcagcaggccctggcatcaagcatggggctctgaggactggggctggcggcctggctgattgttcttcctccctccttccctccttctgtagccctgcacacacccagtgagttggtgtccatgcatgcgagcaccgctgtggtcaacctggcctgggccagcagccccttggggcaggggatgtgctacacccaactctcagaggcggggcacctctcctgggagcaccctctggtgccaggccaagcccacctcatcctgaggggcctcacacctggatgcaacctctccctgtcagtgctgtgccaggcagggccgctgcaggcgtccactcagcgcgtggtactgcttgttggtatgctgacgtcagcggcggggaggacgaaggtgccctgagatgcaggtctgattcaggtgggcagcactgcccgctcgactctgagccactgctctctccagatggatgctgcacccactctgctcggggttatgccccttacgcttctccaggtgggcagtcatgtccaaaggagatgtttttccgcctggctgatatccctttccatgggcataaatgtcc

SEQ ID NO: 57861 - DNA, 1060 bp, Homo sapiens
ggaattgccttcgttttaatatcccacctttgatctattgagaggctgacagtgaggggaaggatcttattagatggcataaatcaaagctgatgaaatcactttcctccaacaagcttttcccctgggtgaggagagagagaaaagtgctgctctagctcccacctcccctctctcctcaattgtaagtgggtatggaaaggttaattcaaggctccatgcaccatcacccccaccccacctctgcagggaagtggagttctcactccagcttctggtggctcagttgacctcctctgctccccatgctctctgtcaccatgggactgtcccaccaggagtactcaggctccgactccccagagttgtcacttttgggctcttcagggcttgtgtgctctgtgagggcctggtgatgggttccagatggggagaggcactgctgggatgcaagggatgagccccaagtgttggatgctgccaaggaatggttctcagagaccagggtcttcatagttcctcaaccagtgacctgggaagtgtctctgggggccccccattgcactgtatgtgggggtgggcaggaatcggtgaacaccttcttcttctcccaagaggacaagggcaggagagaggtgaacagtgaactcaaagaacaccggactcaaaaccaatgccttctctggctttgccatctctttactctgtgaccttggacaaatcactcagtccctcagagtcccctttcctccctggttaagtggggtccctgttagctgtcacttccactgctgtgatctccccatcaagcaatcatctgaacaatgctgaaagtgcccataactggatcaataaaaaacacagactgaatatccatggtgggcaagtttcagggaaagaggggacatagcccgcgtcttcaggggtcttcccatgtaatgggggagaaaagtgaccaaagtgggcacttgggtaaagttgttcaaagctctgaagttggccttttactatctcccacctctatcgaccatctttcccagctcctcatctctctggtcca

SEQ ID NO: 57862 - DNA, 1051 bp, Homo sapiens
tacttgtacccaggtggcagagattgcaatgagcggagattgtaccactgtactccagcctgggtgacaaagtgagactctgtctcaaaaaaaaaaaaaaaaaaaagtctgagtgagaaactattggaatttctccattgccagagtcaccaaggtctaacttttttcctttgatctggggcatgagagaagcatgagatttgatctatcaagagggcatggagggagcaggatgtgcaaaagcattgagccgggaaataataaaacattagggaagagcgaggagacctaagttagcagggacaaaaatatatgggagggggtgtacctgtctatctccatctctctctctctcatctattgagagaaagctgcttgaggacagggcccctgtcttagaaacttctaaatccctcagagcttggcccaacattagacacaaagatggtgtttaagaaaaacataatgagcagatgagaggaataaattaatgaacaaacaggcctgggtgggtggcactggctggaggtgtctgagcgtgaagctgtgagtgagacagcatgaaggtggaagtcacgatggggatggcaggaggaagacagaggtgagcagagtccagggggacagagaagccagaaacttccaaagaaaaagagagggaaggaaaggagcctgctccgcacaggttatgtacttttcagtccaacatgttatttattttgaaatgtttttcccaactaaccaaacacataattctggcttccagactcccagactctcagctgggtgcctcagtcctcattttcccatagtgccatccacagtcattcagcggcccattccgcaccttatccccctggctgcgtgctgttgacacttctgtttctttattttagggccttgaggccaagccagcctccatttgaggaacatccctcacttgggatcccctggaagctgtgtcttttctgtatcttccttttcctctcacacacccttggcttcctctgtggggacccaccagggctctcacgacaaatgactaaggaga

SEQ ID NO: 57863 - DNA, 1110 bp, Homo sapiens
cagtagatgtttcataacagttgtcacctattgggcaacactagacggcaggcagcatctggttaattttttttatattgcaggtagcagggatagtggagtggtgtctcagattctttttttctaagttgtccttttaacactgagaagaatctatatttgcagggactagttgcagagatgggggaaacttttcttaggggaccattcatggaagaaagttaaaggaaaaacttcaggttgatagaatttcctcatttagcaaaattcaaattacaggaacatggaaagtagcacatcatagttcttgctgagttatgccatctttcagattgagttaaatagcagtggtgttacttgtaaaaagaaataaaaattaaaacaaaaaaattgaggaagatgtctttgagagaatatcgtatgcataatactgtatttaaatcttgcaacaaagaagtacatggaaataatattacagagcttcatttttctccatcctggcatttgtgtgaaccttactgtgtttcaccctgtctcctctttaggctgatgaggaagagatgcttgataatctaccagaggctggtgactccagagtacacaactcaacacagaaaaggaaggccagtcagctagtaggcatagaaaagaaatttcatcctgatgtttaggggacttgtcctggttcatcttagttaatgtgttctttgccaaggtgatctaagttgcctaccttgaatttttttttaaatatatttgatgacataatttttgtgtagtttatttatcttgtacatatgtattttgaaatcttttaaacctgaaaaataaatagtcatttaatgttgagtatgtgtttatcctgaatgtgtgtctgggagtaaactggccagagagctatataatcagaatgttaaaatatttggaattgttgtcctttagtttgccaacttaccagcatcactagggatattgaatgtttgacacagatgtaaaatagctgtagaaacaattcaattacccttacactttcaggggtgatagcttttctgaggtcttaaaataatgtgggaagaagataatagatccttttgcaaatttgtttttttg

SEQ ID NO: 57864 - DNA, 1063 bp, Homo sapiens
ttgtgctttcttaacattaagctccccccggctttttcttttaacatttattttaggttccggggtacatgtgcaagtttgttatataggtaaactcatgatatcacggggatttgttgtacagattattttgtcacccaggtactaagcctagtatccagtagttttgcccttctctgtcctcccaccctccaccctcaggtaggccccagtgtctgtcgttcccctctttgtgtccatatgttctcatcatttagctcccacttataaatgagagcatgtggtatttggctttctgttcctgcaaagaccatgatctcgttctttttatggttaaggccccttttaattcaagtctcctttaaggctctcatcaggtgagttacagttgtagttttgtacagaacggggaagggaagaaatgactatctgacagttgaaacatagacatctaatcactaggtcagatcctggccaaacttgttaaagtcttgggagaacagcttaataatcatgtggtgcatcagttctaaaaatagactgggaactttgcaaggtcggtgtctcactaaagatacataataaccaaatgcaacgtatgaattgtaattgggtcctgttttgaaaaacccagcaataaaaaaaaaaaactggggagaacaactgaaatctgaacagtaaatgatattagggaattagttcttaaatttttcaaaggggtaatagtattgcatttatatgggagaatgttcttattcttagaagatatgctggagtatttagaggtaaagtggcttgaatccaggtggtagatatatggatgttttcaatactgttatttcaaactgatttattttaaattttcatagtgaaaatttaggaagagagaaagtttgcctcccaaaggcagtctccctgacatttctataataccaaaattattgtgaccaagaaactatttaaatgtatttagaagcaaaattatgtaatgaaaattatctgttgtcttattctttcataggtacccatttgaacctcctcagatccgatttctcactccaat

SEQ ID NO: 57865 - DNA, 1024 bp, Homo sapiens
aaaatagtgtttttgaaaagatagcaaaaatataaatacttagaaatcagtctaacaaaaattagataaagctttatagagaaaattataaaacctttggaaagcatcaaaaaaaagactgaaacagcgtgttcatggatcttaggattcaatatcataaagatatcagttatctccaaattgatctatagcatcaataaaattacaatccaaaccacagaaccctgttatgatttggattataatttcagatatacatatttatgtatatatttatggacttatgaactgattctcaaatttatatggaagagcaaagagtcaagaataatcaagtcattcctgaagaaaaagaccaggtggataagctatagtaaaacatcacattgtacaccttaaatatatacaatttgtatttgccagttatacctcagtaaagctgggaaaaaatttaaataataaaaaatgaataagctatagtaattcaaacagtggagtattgtctcagaaataatccacttgaccagtggaacaaattcaagagtcccaaaacaaatccacacatatagaaatttaatttatagtaatatcagcagggaaaggatggactgattcagtaaatgatgttagaacaattgactattcatatggggaaaaactttaaattggacccccacctcactcactatacataaaattcaattcctagtggattcaatatttaaatttgaatagcaaaattataaaatatttgaaggctatgtaggaatatctctacatttgggggtaaggaaaaatttaatacacaaagtataaatgtaaagaaagagattttaagattgattatgttaagagtatgtgtttattgaaagacaccatgtacaacatggaaagataagcacaaactgggggatatttgtaacacattaaaggattggtgttggctgggcgcggtggctcacgcctgtaatcctagcactttgggaggctgaggtgggtggatcacgaggtcaggagttcaaga

SEQ ID NO: 57866 - DNA, 1054 bp, Homo sapiens
tagggcaggcctcttactacgagtcccgtgatgacccgaggccgggcagcgcctgcgtattgaagccgagggagcgtgcgggcggtactactggcgggaggagtaaagatggcggcgcgagggtctccgccctctgctccgggctgaagcgctctgagagaggcggcagcggcaactcgagccccaacagtaatttagtgttggtagttttggcagcagctgccgaggccggagcaatggcggaactggagcacctaggagggaagcgggcagagtcggcgcgaatgcggcgggcagagcagcttcggcgctggcggggctcgctgacagagcaggagcctgcggagcgacgaggcgcggggcggcagccgctgaccaggcgcgggagccccagggtccgcttcgaggacggtgctgtctttctggccgcctgctctagcggggacaccgacgaggtgagaaagcttctggcaagaggtgctgatatcaacacggtcaacgtggacggcttgacagccctgcaccaggtaactcctttcttggtcttagaggcgtccagtctcctacagatgagcctttgaccctgcgagccaccccatggggagtatcagtgttgccgccgactccttctgcatggacactgcccttttgggctaatcggtttcattcttggccagcttcctccactaatcaagtctttttctgaccccagggtcttaggaatagcgtcaccccgctgcttggtcagtgtttgtatttccctccacctacttgtgttgtcatggttactggtgatttttgtccctggtcttatccctgtagattagttatcttcacttatgtctggttggcgtgcctgcacaccgcgtcactcataggcacagtgtcatttgtttgatgccctttcagaaaattcagttgttgtgtgtccccgttatagaatatcttatatcacttaaagagtaaagccctttactgggtaaagacaagcaggtctgaaaccacacctcttgttttgttgatttgtagtacttcaaaacagtttgtgttgcct

SEQ ID NO: 57867 - DNA, 1120 bp, Homo sapiens
tttgcctatacagcatcttacaacatcctccattctgttctgaaatttctcctctacctctgtcctacataacagttgttcagagtttgggcttgaggacactctataaatgagacagttgagacagattgaaagcaaggtaacacacactctttccttaaccttcagtgcctctgcaacagcatctgaaattttctgtcttggcaagcttcacctaattctgagcaccctgctagtgaagtgctctgggaggctgggatttgactgcagataagtaagcacttaccatcaaaggagacagggggcgtttctcattttcatttccataaagggatgccattgctttgccaggctatgtggaaagtctttgccttaacagtgaatcttgagtcctctttcaggtttttacctgtccatattctacttttggaacatgaggtttctacctttttgctattcctgatcttttcctggacttaggaatgacttctcttaccaacaaatcacggaagcttttcttgttaccttggtactaccagtaagctagtcggggagagtggaatctaactcttctatttgtgatctcaagggatgtttgtgttattcattggtttgtatttttcattctacttcccttcttctaggacatagcagtctgaagtttggactacaggctatgttttgttgtatcattatgcttgatgctttcaggaaaaaaccaagttgttcagatttctcaagtcttaatctctagtgtgtgttctgttttcagcctcaatagtgaatttatattatcagatatacaaaattgattatacccagatttggactgttaaggcctagcagaaacaagacgcagctttaagagaggtcaactatgtttctgctcatagccagcatttccttggcctcggacagtgctgaggtcagagcaatgtagaaaaacaattttctgtccaaggggtcagatgcctgagagatgcaactcaaacacctacagtgaggggtaacatatacagacatttgtcaaaacttagtgaatgtatacctaagattcgtgcttttcactgtatgtaaattttacttcaaaagaaaaataatactgtaaagaggtatttaa

SEQ ID NO: 57868 - DNA, 1015 bp, Homo sapiens
tgtgatctgtttacatgtacaggaacttacatagagcttatattcatatttaagtataacattacttatatagaactatatttatgtttaagtatatcatttttgctcttgtgtagaaaggagggtcccttgttaactctggagataatacaagggtaatataataatagcagctaacacgtaacatttaactgtgtgccaggcttgaagtgtttttatgtacattagctcatttaatcctaattgtaactccatgaagtagttcttatgattggtatgataatttaacagatgaggaacctgaagcagacagaaataactcgtcccaagaacacaaaactacttaaccagtagacctgggatttgaactcaggaagtcttatttcatagtctgtgctcttaactgtatgctgtactgcttagggttatataactgctttctctcgtgtcttctaccatgtagtactctacctgtgggaggacatgacaataagtgttatggactaataatatattattagctttgactatataaaacgcttgatgaaaatatgctgggaaaataataaccttttatttaatatctccttttacggataatatttggtgtgctgatttatactttctgcagatttaaactgcctgtaatttctttgtggcattcactccttactcaactcagatcccaggattgtcttccttcttttccccaggcttacttgacagctatgaagcattgcccatgccatagctttcaggctgtgctcttgtgtcttgtgaaacacttgtttatgggcacagagtgatctggagttaaatagaaaaatccctctccatgggacaacaatttactctacatgccaacttggcagcagggtagaccactggggggctgtgattaagacaggtagccaagagaggaaggaggtttctaatccagactcatgctaataaacagagtggtaaccaaagcactttaatgagatctttgtgttttgcatttagtctagttagg

SEQ ID NO: 57869 - DNA, 1031 bp, Homo sapiens
ccagaatcttgctagttcaaagacatttttaaccaaacttctttcctcctataaggtactgggggtgggaggggagggctgtgatcattgaggactaagtactttttgttttttttttttccccttgaggcagttgctgtgtgttacactgttgccttaacaacaacaaagtcaggaacaattccaagggcttatctcctttaatctttacaaaaccttatgaggtaggtggtactcccaatgctatagatgagtacatatgcttatagttaagttagataccccactctaggttgtacacatcagcagagctggtttgcaagccctggtctgtctgactccaaagctggtgcttttatttattttacaaatagagatggggtctcactgtgttgcacaggttctcctgtactcaagcgatcctcccacctcggcctctcaaagtgctgggactacaggtgtgagccaccatgcctagccaaaactgttttaaacaacataccatccttcactttgtggagggtatggggaatgatttagacagttggcctcctttattttctgtaagatggttcttcacagattgatgatcgccaaattacatttttagattaggctagttttgttgttcttgttgttctgtcaaacttccttacagtgtcattcccgtaaaattttgtatcaaactggctgtagtggcatgtagctgtagtcccagctacttggaaggctgagacagaggctttttgagcccaagagttaatgaccagccctggcaacagagcaagaccctgtctcaaaaatgttttttatatcaaggatttgggatttataagacacaatatcacaaaatttaaaagaagagaactgaagtagtgatgaggtgaaggagattaagaaaaggagaggagaagtaagaggggaggaaagagaaaagacaagttttctcccgtttgatacctggactagctgggcttattttagggcctctggaatgtggctgctgttgtctttaaaggccaaagaatgat

SEQ ID NO: 57870 - DNA, 1023 bp, Homo sapiens
gtatttatgtttatgatgtgctttaatctaaggaaaatatcctgtcaaacttaagtggagctttagtaatcctggctgtctggtatctggtttctgtaggagttgatctagagcagtcaagaaaagaagaagagcagcagatgttgcaggatgcccgccagtggctcaacagtgggaaaatagaggatgtgaggcaggctcgctcaggggctacagcccttcatgtggctgctgccaagggctactctgaagtcctcaggtattgtccatttacatcaatcaggagtggttcactgggagaagatggaataggttttggaagcagaggctgaattagattttccgctatgacgtgtttccttttttgttggtttcctctctgattgtgcagtcttttctcacattttgctggtattcatccatggattgtctccctccctcctaccattcctctagcttctcactaacatgtatgatgtgaaacagagttgaggtacatggtcctaggaggggacttcttccagttctctgatttgtcattaatatccctgcaacgacctcttcttgtgacctgtaatacttgtgatcatttgttccgttttgacttatataatttcttttgtgtcattagattaattatatagatcttgagtatgcgatgtccagctggcacaggatagccaaacttatatgagggatttggactctactactctgtctgttccatttttccttacatccatacatgcttcttgtagctcttggtacttaatgttcacaggctttcccaaatacatgggttgccaaaggcattatatgtgcagttgttaactggactcttccagtatttcatatttcacctaatgcagggtttttaataggtatagcagtgttttggtgctccatttctgcctgatagcgctatccataagggccccaatgtggtttgggtcttcaggagtcaaatcttttctcttccatgcatacaagttaaattatagctttatagttagcaaaaaattg

SEQ ID NO: 57871 - DNA, 1069 bp, Homo sapiens
cttcaagaagctgaaagttaaaaacagccacaaaaaactaataattacccttgagttctagaaaatgaatgtgatatgttcaaatcagatgtttttccaaatagaaagtaccagagtggaggatacctcatagcttttctttttcttattgactaaaagactatctttatttaagcacatttattacagagaagaatatatttcttaaaaaataagtaaatacacataatactaaaactgtcatttcatataggagagtatttggtcagtgattcatacttactccagttttatgaaacatctagaattcagtcctcctttctctgctcctcattttgaatcttttattgtttggtcatgcatgtctttggcttaattagtgctatacaggagaactacataagtacggtatttttgttcagactgcagaatggaaaacccaccccatatacagatgaagagtgaataagccatattttttactcataaagcagatgaataatttgagtggggagaataaagattaatgacattagggtgggacattaggggccaaaaaaatcaatgactttttttgtttttgtttcttttgcacgtgctgtcactcaggtaatgtaaactaaagtttaggacaaatgtggaaaacagcagttctgaatcaaagaactatatagctcaatgatgggacagatcaaccatacctaatctctgttgtgttcagcattatgtctggtatggtaaagtgaagattctggttattttaaggctcagtggaaaagtcacatacataaaactcatacaaacacaacttaaagttcattttgttctctttgttgagcagtcaggatcactgaaactaggattttcaaatgcagtgtcaatgctgttatttagcagcaacagccttcctgattataagttgtatactttgcagagttaggttcttttaattttaaaaacttttactgaaataagtttagactcacatggaagttgcaaaaatagagagttcctgtgtattctgtacctagcatggtaaggtttttgaacatcaatagtattattcatg

SEQ ID NO: 57872 - DNA, 1668 bp, Homo sapiens
gctctagctgacctttccaatgctgtacatagataaggacatattttggccaaactggactgcttaatttcctcaaacctgccctgagctttcctgcttctgaacatttgtaccatttaagccgaaattcatttcaggccatcaatgctcattgagtgatttctgtagaaaactataggatctagcaggttgaaaaagtctttctttaggtttttctaatataggaagctgaaaggaaatgggccacctcactgttcttctaccccacgactgttctctgtttatgtccctctagcactgcctacttaactctgctgtagcactcatcattttggctgggaactctgggtttattattgaactcccaggtctcagctcaatgcctggtacataacaggcattcacattcattaaatgttttttgttgaatatatccagtcagggaatagaaaggtgtatacatgaataaactacatgtcacatgagagatataagtgtagtcaataggattcactagtaagacacactgtatctagttcagggaattacaataaaactttacatttgtatagtgctttttactttgcaccacacttaaacatttttctttaatcctcacaaccatactctgaggtatgtattattatcactactttttagaatgggaaattgacactgtaggaggttaggtgaattaggtttcatagctggcaagtggtgtgcctaagatctggactttgatctgggactccccagagtagtagtagggacccagtggaaattatctgcataagaagtgaaaggtaaaactgtagaaaaggatgagatccccaaaggacagattatagatggattttatatatgatataataatgtggagatagttttcagtttttatctgaaagttggagttggagcctaccaagatgggaataacattgagtttatttttttctgccaacagttgcaagagtttacaagttgttagtttatatccaagcattacagggccttaataatctgttttgataatgggcaaatcttttctattagcagaaaaggacatagacacaaagataagatttttatactagtacttgttaattctcttgtcttaaataacagataaaaagccagaagcctttgtcaatcattccaactctgaaagcaagagtagtatcacagagcagataccagcaccagctcaaaataccttctctgcctcttctgctaggagggtgagtactttttacttaatttgggaattagatttcaccctactgcagtagcacacatctagaaaggccttaaaggtacattcttgcaaaataataaaaatacatttttcctgtcataatctgctcccataacaaaaaacacaggctgggtggcttaaacaacagacatttatttctcacagttctggaggctgggaagtctcagatcaaggtaccagccagttcagttcctggtgagggccctctttcttgacgtgaatataaccaccttctcgccatgtcctaacatggcagagagaaggagctctggtgtctctttctcttcttataaggtaaccagccctatcagattagggccccaccctattaacctcatttaagcttcatcactcctcacagacccttatctccaaatatagtcacattggga

SEQ ID NO: 57873 - DNA, 1034 bp, Homo sapiens
taatttgtgctgctgttttctttatttactcatcctgactttcccatgagaattatttcccttcatactgttttttaatggaagaaagttaggaataagcttttgaaagctaaccttttgtaaataccactcaaaatagaattagtgttggatccagaaataagatgatataggtatattaagttctgcttttttactcaaaatgttttatgctgtgccagtattgtacctttcttgtgctttacttgtttttattttacaggagagagaaaacaaaagctatattagttcactagcaccccggaagctcaacagcacaagtgatattgaagaaaaggagaacaggtaatcctaaaaccagccaaaagatggtcctcatcctcttaggtctactggacatagtcatctcctgggcattactcttctgcatttttccctcaggtgtccttaccacattatgaattgtttattccttctgcttagaacacctctcaactcttatatccttgctttgctggttctttatttttcaaattctaactccaggttagacattaccttctttaggaagtcttccctgatttttccacacatgcattagttttattctaccagcaggctctgtaaaggtagggtctgagtctgtctggtttcttaaggacccctagttcctagcacagtgcctaacacatagtaaacactaaaataatgttatttaattaaattgaccaacttctaatttgtcagaaggtaaaattaaagtcttcctaattagttaaaataaatatagggattttgaagtattgctgcatctcagggcaaatgtgatctcaaaccttagccagcggtattggcatcacccgggtacattttatttttattaaaaataattttctttaatagaagcagggttttgctatgtttcccaggatggtctcaaactccagacctcgagtggtcctcctgacttgccctcccaaagtgctgggattgtaggtgtgagccactgctcctggcctgggtgcatgttagga

SEQ ID NO: 57874 - DNA, 1049 bp, Homo sapiens
agcgattctcgtgcctcagcctcccgagtacaggcatgtgccaccatgcctggctaatttttttgtatttttagtagagatggggtttcaccatgttggccaggctggtcttgaactcctgacctcaagtggtctgcctgcctcagcctcccaaagtgctggaattatagatgtgagtcactatgcccagctgcaaagcactttttaagtgaggatcaaaagtgacttcttattacaaaagggttagagacctttgacatgaggaatttggtacctgttgaaattaattggttcaaagttgataaaagaaagcaggcagtaatacttctcttctgtacagaaaactggtatataaaacagaataacctgaagaatgtgtctattagccatgttatagtttgcctgtctggctcttctctctctgcattgtatcatggacaaaaactggtggtaggaatcagtgttttgttttcctttcatgcttctacagagaatcagctgttaatctagtgaggagtggctcctatacccggcagctatggagggatgaagcaaaaggaaatgaaatcccacagacaattgctccctccacctatgtatcaacttacttgaaaaggtaccaggctcaaagggggtgggagatgtttctttcactctagccatgggaaatgggtaatgattgtatgcctttttatgtccaattaacaccgcagaaatgaatcaaaatgaattactttcaggtttcttagaattaacatcttgaataatttaaaatttattatcttaataattgaattaaagtaagctaatttcagattctcactacagatctggctttatactttatcctctccatcctattaaaactttcaatcagaagtggctttcagtaatctctgggcaagactgaatttaagttatccttgtccagtagctggttctccttatctgaaacagagtagttctcatcccatgtgctatttttggggggaggaagggagggacactataaagtggtggggggtgggaaatggggacagttttctatt

SEQ ID NO: 57875 - DNA, 1042 bp, Homo sapiens
attctactttcctgctttccctcattcagtatcatctctcttcctccacgttccttcactcttttggatgattgaccaaaaagaccatccttcaaagagtgatgattccttcattcttttggatgattgcctgcttgctgccagtgactcagctctagctggagttgatcacttcacttcccagttgtcataccctttctttggtctatattcatttcaagtgcacaatctgggtgggaaggtggtgctgggaaatggtgggtgagcagcatgtcctgaagaaagtgactgtgtgctgttttgcagtgcttcatttggtagaagtagtgaccccacaagtccctacatttcagccaatcgcaattcatctcctgctacctcacccattaccattggttcatctacctctcggggcagccagtggcaacctgcctcttcttgccctgcaccaatcagtgcaaacactactgcatctgtacatcatggcaggtaaggcttcttgaagccatttgagttgcattcatcaaagttaatggctctgaaaacacatatgaaatttgaaccaaagagactttatcactataaaaacaagttagaactcctgagaaaatgtctgaatttaatgaagatgcttttgctttgacttgtattaaccagtcaacagttgcatattgaataatcaaagggtatgtataattgtacttggtgtttggacatcagcttaatgtgactgatttcatccctcaacaacctaaccagttgtgattacaatttaaggatcatactattgtggtaaattaaatattgaaaacattttcatattttacttctattaattttccagtaattataataggaatctcttgtatttagtcttttaaatgacatgcaaacccaaatcagaaagaaagctaactcattttccaaaagcctatgataaccttctgaaaactcccagccaatgagagtattttgctggaaacattgtgagaagggacagatttgtgtttgtctaaactgtgttgtgggggcagtatcttct

SEQ ID NO: 57876 - DNA, 1019 bp, Homo sapiens
ccttcacctcccgggctcgagcaattcttctgcctcagcctcccgagtagctgggactacaggcgcatgccaccatacccggctaattttttgtatttttagtagagacggggtttcaccgtgttatccaggatgaggatgatctctatctcctgacctcatgatccgcccacttcggcctcccaaagtgctaagattacaggcgagagccactgcacccggccgtattactatattttacatatataatattatatattatataataatactatattgctattactataactattaagagctgcaactgagagaaaataattacagctgccatttgttggaccccattatgtgacaggcatttggttggctattatactgggatttagtttgctcatatgtaacgataaatctaaatagtagtggcttaaataaggtaaaggtttttttttttttcttgcacttaagaaagtccagaaatatgcagagctggcttagtagctccacagtcattaaaggatccaggttctttcgctccacagttcttgcatcatggctgccatttccatgggttgcctgatggtccagaataactgctgaagctatagctatcatggctgtactctagggaagaaggaagaggaaagaaggaagcagacaaagaaaaaatgcttctgaactgagaattttcccagaagtactagttgtctgcatatgtctcattggatacctctagtggccaggagactttgagaagtgtggacttttaactaggtatattgctgccctcaatgatatagggattcagttcataaagaagaaagggacaatggatatgggttagacaactagctgtctcatgcatacatatatcatctattctcttataatgagccccctattatatgaagtattattttatagacgaggaaactcagaccaaatggttaatcatctgcccaaggtcacacagctagtgagggcctgagataggatttgaactcagatttgtacatttc

SEQ ID NO: 57877 - DNA, 1009 bp, Homo sapiens
gattacaggcgtgagccaccgctcccggctgtcgttatggatttaagcatatcttttttctgtttgtcttgtgatagagacaattgttaggcattatttcaccattttgtaatggagaacctgtgaagcacagagaaggatcttttgttttgttatggatagtctacgttgacttctctggcagcaaagaaaggaaacagtatgacacaaggctcaaagaaatagaactaggatataaacttttgattaatttgagaagaataccagaaaaagaaatgaataatatgtgatgatatggtagaagaatagtgactagatattctgtaatttctttagagagaagttatgagagaatattgtgaattgacatagaagagatttaaggtagaagctaagaaaaactttttgattgccagcattaagagaaacattagaaaatgtgaccgagcaagaatgggtcattttctcctacttgaggaagtattaaaaatagaatgtactgcatttgggagtttcaaatgtacttaaagactaaggctataattatcccttgttaagattagaccaggtgaaatcttatcaaaatttagatttcagtttgacttcatattattttgaatatccaaaggaaggagcttttatatttgtgtgtattaagagattgtcttttctccaatgtatgttcttggcacctttgtcaaaaatgagttcactgtagatgtatggatttatttctgagttctctactctgttccactggtctatatgtctgtttttatgtcagcactatgctattttggttataatagctttgtggtatcatctgaagtcaggtaatgttattccagttttgttctttttgcttagggtggctttgctattctgggtcttttgtagttccatatgaattttaggattattttttctatttctgtcaagaatagcattggtattttgatagggattgtattgaatctgtagattgctttgggtagtatggacgttttaa

SEQ ID NO: 57878 - DNA, 1050 bp, Homo sapiens
gtaatcccagctactcaggaggctgaggcagtagaatcgcttgagcctgggaaatggaggttgcagtgagccgagattgtaccagtgcactccagcctgggcgacagagcaagaatccgtctcaaaaaaaaaaaagaaagaaagaaagaaagaaagaaatgtgaatggtttgaaaatacgtttaggaggataattccgacatggtagatggaacttataaggctcccttgcccattataaacagaaattcatagttgaattcagaagaataatagggaactctcagatgacaaaagtgaagagtactcaaaagccagagtagtttgagtgacccagggttggtgtcagacctatatgtagaccataaggtctggacactcagattttaatgccgtgtgtgtagaacgcatggctgtggacctactaaggctgcaagttgtaactaagaaactatatcaagctagaaatctcaaagggttcatgaaaagggtactttgcccatagctcaaaggagtggcaaggaaggaaatctatacaagcgtcagggtagggcagatgactcacttgtgagaaattttcactattcgtatagtttagaaatcccaaaagtcaaggatttaatacagaaactgtgtctgtactcttgaaactctggggccctggcacaagtaaattcaaaaccaccttgaaggaacacatctgcaatccagagtaaaagactgtaaactgtaaaaacagtttcaaccaaagatgaattcacataaaacataaacactgaaggtcaccatgagggaagagttctatgacaaactcatagatgcagactaacatgtaataaaagttttaaatgcagaaagaaacctcaaactattattggaataggtaacaagaattacagttgaccagctgtattgaagatagacacacgtataggaacagtttggtaaatgaatcaggaatggtttttaaagtataagattttgcaaaatagtattatctatatagaatcttgtttaaatgggaacccacatatataaagcacctaacaac

SEQ ID NO: 57879 - DNA, 2351 bp, Homo sapiens
taggcactccataacaatagccatttctggctgttactttatctccttatttcttatttcctttatttatctatttaaagtattgttataggcatgtatttctgtaagaattctcaagtcctctttagaaagagggaataagccaacaggtaaaccaaatctttctttcctctagccttaaaaaggcaagagaaagtctttgttctcacttttttttttagaaatctctgctaattgtcttacatgtcacccaactgagaacttggaaatcaaactagaaggcttttcattctttacttctcatatttagtctgtcaccaagtcttgtctgtcattctccttaagaatccttcaattccatcttctcctctctttctgttaactcaggccctcctaactgggccttcctctcccctgccccacccaccattccaccatctacagtgcagcattagtgatctttcttatatgcaaatctcatccaatcactgactcctgcttaaaatctgagaatggtcctgcaagcaatgctgtcctcccttgttttgtaggatgtctctctctttttttttttttttaattatactttaagttttagggtacatgtgcagaacgtacaggttagttacatatgtatacatgtgccatgttggtgtgctgcacccattaattcgtcatttagcattaggtatatctcctaatgctatccctccccgctccccccaccccacaacaggccccagtgtgtgatgttccccttcctgtgtccatgtgttctcattgttcaattcccacctatgagtgagaacatgcggtgtttggttttttgtccttgtgatagtttgctgagaatgatgatttccagcttcatccacgtccctacaaaggacatgaactcatcctttttatggctgcatagtattccatggtgtatatgcgccacattttcttaatccagtctatcattgttggacatttgggttggttccaagtctttgctattgtgaatagtgcttcaataaacatatgtgtgcatgtgtctttatagcagcatgatttataatcctttgggtatatacccagtaatgggatggctgggtcaaatggtatttctagttctagatccctgaggaatcaccacaccgacttccacaatggctgaactagtttacagtcccaccaacagtgtaaaagtgttcctatttctccacatcctctccagcacctgttgtttcctgactttttaatgattgccattctaactggtgtgagatggtatctcattgtggttttgatttgcatttctctgatggccagtgatgatgagcattttttcatgtgttttttggctgcataagtgtcttcttttgagaagtgtctgttcatatcctttgcccactttttgatggggttgtttgtttttttcttgtaaatttgtttgagttcgttgtagattctggatattagccctttgtcagatgagtaggttgcaaaacttttctcccattttgtaggttgcctgttcactctgatggtagtttcttttgctgtgcagaagctctttagtttaattagatcccatttgtcaattttggcttttgttgccattgcttttggtgttttagtcataaagtccttgcccatgcctatgtcctgaatggtattgcctaggttttcttctagggtttttatggttttaggtctaacatttaagtctttaatccatcttgaattaatttttgtataaggtgtaaggaagggatccagtttcagctttctacatatggctagccagttgttttctaggaagtctcttattctctttagattctgcccagatcatccccttgcaacattttattcctgatactcctcagatttcctctccagagctatctctttgtggcaatttttgtcttaaattttaattatcagtacttaatatgtccagctcccttacaagatcttgcttcagaacagagcatttggaataggtaaagaagggtaaagtggtggctgggcacggtggctcatgcctgtaatcccagcactttgggaggctgaggcgggcggatcacctgaggtcaggagttcaagaccagcctggccaacatggtgaaatcctgtctctactaaaatacaaaaaattagccaggcatggtggcgcttgcctgtagtcctagctacttgagaggctgagtcatttgaaaccaggaagcagaggttgcagtgaccactgcactccagcctgggtgacagagcaagattctgtctcaaaaaaaagaaagggaaggtaaaatgggaaactggttgaatagaatgaacaaaatgagcacatgaaccagtacact

SEQ ID NO: 57880 - DNA, 1092 bp, Homo sapiens
actagtggcaaccatattgggctgtgcaggtatacaacatttccattattacacaaagttctgttggtcagtactaaagaaagtaacctatgaaatataagaaatgtagtatttggccagactgagaatagacatttagtgaggagacttagaggccgtttgttcagaatcagtataaatttggattcaccatggtttaaagctaaatgggatctttaaaattttagatttacccctttgttttacagatgaagaaaactagagttccaagagattaagtgattctcttaagaccaaacaagtaattaatggcagagctaaaattagaacccaggtgcctgttctttctattgtaccatagtattagcctcccgttcccaattaggaacagcaaggaaaatttgaactaaaatttacctcatagggtcctagcaactgtagagtcaaatgcatcctccaaagaagaatttatccctaatatttttaatgtttatagtttgttcatggcagtcttatagcatgttgacggaaatttctagaaatgtaaaaatcatactttcccaagaatggagtgttgattatgacagacttttgggaaatgtcaggggatgctaggagaagtttaatgcaggacattgttatccattagttcccgatattgcaggatttgctagaagaaatgtcttgctacataaatctacatagctagaaataccatggtactgagtggaggaaacagtgttcattgtggtgcaatataagaaaagctgtacctgaagcaggagaacatggttaaaatccctttaggtatataacgttgttacttgggtgttttagcatctccttaggcctttattgactcatccgtaaaataggaatacattttttgtgtctacctgaagtcttagaattagatcaaatgacatcttgaattcataaagtctgtaggcataggtctgtgattcccgtgatccccctaagtctgtccccctgccccggcccccagtagctatccatatgtacttccaggttgatattaaagaaggtttttttgggatctctgaagaacttttgtcgatgtaatcttatgtt

SEQ ID NO: 57881 - DNA, 1041 bp, Homo sapiens
cgtaacataaaacttaccagttttaccatttttaagtttacagtttaatggcattaagtacatttacattgttgtataactatcaccaccattcatctctagaactttcttcctcttccaaaactgaaactctgtatccattaaataattactccccatttccctctggcaacgctgcttccactttctgtctatgaacttgactatgctaggaacctcaaataagtagaatcatatagtagttgtccttttgtgtcgtattttacttagcatagttatcaaggttcatccatattatagcatgtgtcagagttcctcccttttaaaggatgaatatttcagccttttatggatactgcattttgtatatccattcatctgtcagtggacattgggttgcttccaccttttggctgtttaatgctgctatgagaatggctatacaaatatctccctgaaaccctgctttcaattcttttgggtacatactgagaaatggaatttgctggatcatgtggtaattcaatttttaattttctgaggaactgccatactgttttccttagcggctgtaccattttatgttcccatcagcagtgcacaagggttctaatttttccatatcctcaccaatatttttgttgttgttgtttttatgagatggagttttgctcttgtcacgcaggccggggtgcaatggtgtgatcttggctcactgcaacttctgcctcagggttcaagcaattctcctgcctcagggttcaagcaattctcctgcctcagcttcccaggtagctgggattacaggcacccatcaccacacctggctaatttttgtatttttagtagagacagggtttcaccatgttagccaggctggtcttgaactcttgacctcaagtgatctacccaccttggcctttcaaggtgctgagattacaggtgtgagccaccatgcccagcctgttttttttggtaatagccaccctaatgggtgtgaaaaagaagacaggctatactttagctcatcttttccaccat

SEQ ID NO: 57882 - DNA, 1039 bp, Homo sapiens
ttccaagtgccaatctccagcctcgctaatagtgcaggaagaaaggccgataatgaatcagcatagggtgaggcatcctttttgtaaaagtcttatatttgcttgtttcatttctttcagttaaattcttaactgtttttctcccttgagcactctctcctaatgctagcaggcatgatgccattatctatatgggcctacagagccacatgcctggtcatggcctagtgtaaattcctacatttctatttcaagacaatcagtagtatcttatgaccacctctctaccccagctccattttcatccttcaggcagtacagttgactcagctctgcaacaacaaatgagccagttaaagcggagggcattccattgaaatggtgctgttagctaatcagcatggatacagttgagaagcccagggcagctctttcctttcttggtttttagttcaataaaactatatctgctattgaggtcatgctggcttccttctcttacctagtccactccttgagaattataatatctattatttttaaagttatctcttcccaagactctaatatcttggcttttttttaactgaaatataatttacaattaatgcacagattttaaatatactgtttgctgggttttgacacttgtatgtaccagtataaccactacccaaatcaagatatagaacttttccatcaccttaaaacgtttcatcattaacgctcaagaataagtgatactaatctatggtgatagaaatcagaagagtggttgcctctcaggacagagaattgaatggaaaagatagaaatcaaccagcagtaatatttaattttttttttgagacagggtcttgctctttcgcccaggttggagtgcagtgatgtagtcatggctcactgcggcctcaacctcccaggctcaagtgatcctactacctcagtgtcccaagtagctgggagtacaggcacaagccaccacacccagctaatttttggagtttttctagagatggggtttcaccacgttgcccag

SEQ ID NO: 57883 - DNA, 1024 bp, Homo sapiens
atcttaaaaagttgagctcatagaagtagagagtaggactgtggttactggagtctggaaaagggagatagtcagaggttggttaacagatataaaattacaggtagggggaataagttctagtgttctatagcactaaagggtgaatatagttaatgataatttattgtatattttcaaatagctagaaaagaggattttgaatgttcctaacataaattatttttgatgctagatatgctgattaccttgatttgatcattacatattgcatatatgtattgaaatatcacttcataccacataaatacgtactattataatgcatcaatttaaaatttttaaaaagagagtatgtgatagactagtcatgcattgctatgctggggacagcaaggaacatgcttagaaggctggggaccctacttaagcccaacatagtgcatagttttagtctgaacccatctccactggtaaatccatgaaccagtgaaactaacaatgaatatgtaaaattgacatcttagcacctccttgacagatgtgtttaaaaacaattctgttttgtttatccacgttaggtatatgacagtctctgagaatcttaatagatcctttgtctttctgaatgaaaaataatctgcatcttaatttgaggaatagggttattctaattatatctgaaaatgcttttatattcagcagtgtgtttgctgttttctttactatagtagtaatcacatagaatgtttgccctggagggaacaagcataggtacgccacagaagataatgaccatttggatatttctatctttttttacctgcatctttggcctggattccattttctttacattgagttttatctattgctttcttactgttttccctgtttgctctggagctgttttccaagccaatcctgttgtataattgaatttatcactagagggcacaagtggtcaacagaaaagatattggtgagcaggcagaatggtgccctaaagctgagcagaagacaa

SEQ ID NO: 57884 - DNA, 1038 bp, Homo sapiens
attataatacagtaatccaggagaaaactgacggtggtttgtaccaggataatagcaggcagtaaagatgctgagaagttgtcatattcaggatatattttgaagttagaaccaatgagatttgctgttttcttggatatcaggtgagaaaacagaaggtcaaggttgacactaagactttttagctaaggcaactaaaagcatggaattttattaattgagatggagaatactacaggaagaatacagaatacatttggtgggggaaaagtagacatttggttttggttttagaattgttaaatctaataggtctgattgacatatttctacatggaaatgtcaagaggacagttagatgtaggaatctgcaattcaggtttaagggccaagctggaactacatcttggatatcagtaaacctaaagattggattttaaaaccatgagattgaatgtgaccacgaagagaatgaatgtagacagagaagaggccgaaagagccctggagcactccgaaattcaaattgaggagaaggggaagaatcagcaaaggaaactgagcaatcctggtacctgaccctgagaatatggatgcagtttccccctttttccaaaacgaaatcaaacaaaacacatggaacaataggcagttttatcattgttcttattttacctttttttttttttcaagggctatttcccatgaaatctgctcagtctgtttataaatggaccatgcaatggtataggagacctggacattccagggcatcttctggtgtcttttgagctagaaattgcttcctttctgcaaccttgtctagaggcctttgaagtccagggatgtcataagactcttcttactacatcagagggattctattaattaccatgtctgcaaatgatctgttaacttacctcttggtctcctttgccaaattttcttcagctctattacatctttgaataaatgtcacttcaatttcagttaagaagactcttgaggccggccgtagtggctcacgcgtgtaatccc

SEQ ID NO: 57885 - DNA, 1052 bp, Homo sapiens
gtagtgttggtatatccgattgacctttcctggatcagatgaacttccctgaaccaatttctatagccagaaattagatgagatttagcgagagaggcagtgaagcctgaaccctgaaaccaagtttaattcaagtccctcctctgctacttactgtgtaaccttgccaaattatatactccctgtgtctcagtttccttaactttaaaataagagaaatcatagtacttatcacataggtcatttctttaaatgagataatacatacaaagtgtacagaacagtgtctggcacatagtaaattatcaataaatcttagccgccatgatgatcataatgataacaatagtggtagtgctggtcatagtgatgaagaagaaacaagagcagcagctaccacttgttataggggtagggttaggagagggtcagctacatggaatagattccccacaggaaatagggattctgttatcaaaagaagagaaagagataaagggttggaaagataaattatagctaccaatagtcctctgtaatcacatccagtagtttgagagctgaagagtatctcgtaggtttgccagtaaggagatgttgctgacttgtgagagcagtttggtggagtggggctggggagcatgaaaggatgatatcttctctttgtgactcatctgcgtataacgattttgatggattttctgggaattaatagtctttggttagtagccatttgccttgtgggcagagctccaagatagtttgccgttaaaaaaaaaaatcctcataaaggcttaaacagggttcaaacagatctaatcgtcatatcatttggcacattgtggtacctgattccatctaaattgttttcccctaacaatccttagtccacatttctgctttctctccttgttaagaatagatggcaggtcaacattcttgcctactcctgcaagagcatcttgaaggaatgaaaggcaattatacttctgctgcaaaggagcattttccacatgttatgctaacagttatgaaaatagctagttattgga

SEQ ID NO: 57886 - DNA, 1345 bp, Homo sapiens
atggctagctgtgtgccaactttccatccttcagacctataaaatctgaatcagtttggttttttactgcattgtggtgaaattaaacaattcacataaatttttattgtggctgatagtcaaggctctaggaagctctgagatttaatcttgagttttccttgccacttcaacccaattaaaaaatttttttttttctttttcttttgagacggggtctcactctgtcacccgggctggagtgcagttgtgtgatcttggctcactgcagtctccgcctctagagttcaagcaattctcatgcctccacctcctgagtagctgggagtataggtgttcaccactacacccagctaattttttttttctgtatttttagtaaagatgggcttttgctatgttggccaggctgatctcaagctcctggcctcaagtgatccgcccacctctgcctcccaaagtgctgggattacaggcgtgaaccactgtgcctggcctcaatttaaaaattattaatccactcttaacttccatttagtggaactccaattttattctttcttttctcattgtcttccctacatttctgttcacatgaaatttctaattgtacagactttgcagtgtgcagagtcaaatctctcatatcctgtaactttgctgcatgctccttagttttttctttatctacacatatatctggtcagtttgatacatttttttcttttttggtcttctcagctattagaaacagacatgtttgtagaaaagaactcttaccatttgttgcgtctgggacttgtgtggagggtttttgttttggtctgggttggtttgctttttctatttaaaacttagattgtgtgtacacccacacagaaacttcatccagctaccaggctattcctttgtagagtggtgatcaaacaaaaatatgcatctggtgattctttcatttgatttgaaaactgatttcagaaacacattattttcttcttttacctggcagattatttctgagcaagctgaagaatggaggactcagcctacttataaagtaccaaactgttaaggtcacagaaaattatttctggaaggtacattagaagttgttctagcccaactctcttattttacagatggaaaacctggggcccaaaagagggcctggcttagcctaagctgtacaatgacttagtggtagaaaatgaactagaacatttctgaattcccagtccagcattctttccactaagctgatggctgtcttccaggtgcaggagtgcaggttggtacttattacaggactctgctggctgcagtggctctttctggtgctgtggaa

SEQ ID NO: 57887 - DNA, 1005 bp, Homo sapiens
agctatgttgttcacattaaaaagagataggttttcatttctgctttttgtaagccattgctaaagttaaatttaattgcaaaatactaaactcttgaaccaattctaggacaggtttgcagaatgattttcttaaaggacctttataatctattaccctgaaatgaatttctgagacttaacattcgtaacactagggcatgattaaatatatgggagcaagattgggaacattttgtcagctagtaaagttattgtgagctccatgctgtgcaacttgtatatcctgtcttgctttgcctctctgttgctgccttgtactccaaaatagcaccatctcttctccctactcccagcaacccactagactatgcagaagccattagtggatatattttgttggtctgatttttagcttttttgcttgttcacaaagaacatgtgtcaaaggccctttattacactgaaagaattgcgtgacttttctctgttctgcattttcttacatgtggaattaaggctgactctttactctaaaatgattcattttgtggtaaagtccctaatatgtctccctcactcaggagcatctgtgcaggagtcaacattaaatgtgagttatcattattgatcttctccatcacccccaaaaggggaggattttcacatcgcataaattaaacaggattgagatggaaaaatcagaagaagaagaagtgacaaagaacctcctgtttcctttagaacttatttcctgcccccaagtaatatttttggcccttctaagtacccagtaataaaacgtcgctataaaagcatagaatagtaaatgaagctgttatgaattctagactatcttccaacttggctgtgtgctgttgatggtctcctttaaaaataaattgtttgtttagtatgagatcaaaaattatttatataaaaatatatggaagagtagggcttgatattttttaacagtatggagatctttttagtgatacaaat

SEQ ID NO: 57888 - DNA, 1107 bp, Homo sapiens
ttccttgacttatatgaccttggttttttgggggtattttgttttgttttgttttgttttgttttgttttgttgttgcccaggctgaagtgcagtagtatgatcttagctcactgtatcctctgcctcttgtgctcagaggatcctcccacctcagcatcttgagtagctgggactacggtgggcaccaccatgccttgctaattttgggtttttttgttttgttttgttttgttttgtttttttggtagagacggggttttatgacattgcccaggctaatcttgaacccctgggctcaagagatttgctctccttagcctcccaaagtgctgagattacgggcatgagccatcacgcctggctgaccttgatatttttgaagatagcaggccagtcatatatgtccctcagtttaggtttattcagtgttttctcatgattagacccagcttatgcatttttggccacagtgtcatagaagcgatactgtactcttctcatttcatgctgtcagtttgtcatgttactagtggtcttgtctttgaggactggattgagatgacgtctgccaggtttctccatggtaaagttagtttttcctcttttgtgattaataaatgttgtctgatgtggtactttgagattgtgtaaactccagtttctcctctacttttacccactactttgaacatccattaatacttctttcttggattgattttacagtcatggttgccaaatggtaatttttctaactttattaccccttctacatttattagtaggcattctattgtaagcaagaagcttttctcctcctatttatttttttcattcatttatttatatcaatgtctactcatgggttcctagtcagtgggttataattcattgctatcattatttattatgatgctcttattatcccaggtttggctttttaagcaggcttctgtgtccttgtgtcatatcatttaagtgttgtttgaggactttctcaccttctagcacaagagatcaggctcattttctttccttaccccagctctggaattagccatttctccagggagccctgttcctcttagtacaaagtggcatttag

SEQ ID NO: 57889 - DNA, 1086 bp, Homo sapiens
tctgattcattctcaatctaaaagaatgagtttgtaaaactcttttcaacctatattcctcagaccaacttccaagtagttgatcacttcccttgatttaatttcacaaagttaatcataggaataaagaagttgtcaaggcagttagaaaagaatagcatattgagaaagtttgaagtgaaaagtataaatttcatgtggaaaaagggaaagcaggatagagtttccaagagtccagagaaaagagggttgttactttggggataaacccgttggcttagaaaacatttggcctagaaattttggttagtgtagtggtaacaacaaagtgcaaaagattaaattttagatgtttcttccaggtcaaatccaaaatccttcaacactatgcaaataaattcctctctttttaatttcgttttccctgtactactgagtcctgtagccttgcaattgcactactgtctgttttctctcttcatttctgacccttctttcttttccctcacctttataccactttccattgtcattttcccgattgtggcatcttaggaaactctggtaagctttatacttacagatccagccagtaaggtctgtaatggacagataactttctttgcagtgagccagagcttcagtttgcttcctcacggtgcaacaggaatggcatctcattaaaattgaacattaagggcctgaaggtgctttgactaatttttctgtctgggcgttgttacttaagagatctagaagttgaaaaatcccccttctcatagtattcggagcaatcagccttagagactgctgcctactctgaggcaggggacactggaaggttggtgaggtttgcctctgagcatgcccccaaagagcctccctttattcctagaagctggcaggctttcttttcctcctacaagtggtaacccgaattctgagttgaaagtgaatctttgcccttggctcctctccagcattcctcactgagcgaatagggatttggaatgtcagaaaatagaagaggggaggggaaaagatgtgtgtatgactgtgagtgtttatatgtaaaagcagcttcgt

SEQ ID NO: 57890 - DNA, 1528 bp, Homo sapiens
cccatctctactaaaattacaaaaacttagctcggcatggtggcgggcacctgttaagcttttcgggaggctgaagcaggagaatcgattgaacccggaaggcgggggttgcagtgagccaagattgcaccattgcactccagcctgggcaacaagagcgaaactccgtctataaataaacaaagaaacaaacacatccctcttcctcactagagaaaatttcatccatccttttggcatgccctcactcgctcctaccgacagtaagaatgactgttataagtggtatgctcctaatattgctattttggtctctgttgatcctaaataatgaagtaattttttttactgctacttttggctttcatatgaagtttccattagttcagtatcttttttgtgtctaaaagttgagaagttcccttagtaacagctctgatcatctctgatttgttactcaggaaaagcggaaaaactttcagattcacttgcatttctaatgggaaccacaccaggtagatattgatgagaatttgaaagctcagtctcttttctcataccacgaaacaaccctaatataagatgctgggttcatacaattagtagtaaaactttcttttgacagtaattttccaacattaaaaaaaattatttttcttctgagtcttcgtagttaaagaaaaaattctaaactacaaatacattagacacttctagctcttgatttttaattactatgtatattattgggtctaacatttataaattctataaattaggaactactcaatttagatggtttagcatttttaaattatcctaaaagtaagagccaggtaatctttggtcagtattctcaaatttttcttatttgctaatttaaaaatttttcaatgcagggtatatttaaaggaaacaaatactagagtatgtccaaattgtagtgcttatctgatatttattatattgaataaatcttgaagtaagtgggtcattagctgaaccctgggaatcttttaattaggcacattttcattgaattggtatttgttataataggatttgacctgtatttataaagcaagatcagtagcattttcccatttagtctggattgctattccttcagttctaacatgtcaatttaaaaaaatgacaaaaacaaaaaaatacaaagatgttacataatatttttcagtcagccattaatgtgcataaagggaacatttaatcaattagctttgttttataaccagtcctacaaactaattagggtacatttgataaataattggatgataaaggattgttgccttcatgagagcttgtctacatagcaactttggttagcaggccagaggcattctgcctctttgccttccagactgtcagtgttgacaattattttttgcatgtgctttgtgccttcctctgacaagtaccaaacagttatttagcatattatcgtatcctctatacatccaacactacatctgatgcactaccaatctggaatccatttttactc

SEQ ID NO: 57891 - DNA, 1039 bp, Homo sapiens
taaatgaaagacacagttcctgccctcaaagaattggcagtctaattggggagataaagaaaatcaagaattagaacaccagggaggtgaattttctaataaagacataggttcagggtgttttagatcagccatgtggttaatacattagcctgatgtttggagaacaatagaagctagatggacaaagaaggaaacagtacattacaaaggtagaaaaagaatatgagaacataatggcattattctgagagctgcatatcggtgtggctagaacaaaagatatatttagaaatgtaataagaaatgagagaggaggcttagcaaacccaggtcacgtgaggcttagtatataattttgaggatttggggagttatcctgtggataaagaataaaggaatgaagatttgaagtaaagttgctgtgctcagaattgcatattagagaaataactttggcagctatggaagctggactgggaggagggtcaggacatgatcaggtcactggcctttgattgcagtattccgggtgagaaatgttaagggcctaggcagagatattttttctgggaaatacagagaagcattcagttgtttagaaggtagaattgataagatatggactgatagaatggggataaggatgagcctgagagagggcagagtcaggagtgactaccaggtctctggtttaggtgactgggtagaaaatggtatgataagtatcaggtgcaggggctcacacctgtaattccagcattttgggaggcagagatgggaggattgcttgagcccaggagtttgagaccagtctgggcaatggagtaagaactgtttcttcaaaaaattgttaaactagccaggtattgtggcacgtgcctatactcttagctacttgggaggctgaagtgggagaatagcttgagctcaggaggtcgaggtttcagtgagccatgattgcaccactgcactccagcctgggcaacagaatgagactctgtctcaaaaagaaaaaaaaaatagtgtgacaaaattg

SEQ ID NO: 57892 - DNA, 1067 bp, Homo sapiens
gtgaaactcaaacagtgggatttaaggcctaaataaggacttttaaaatttacgatatactctatgctgtattctaacaatattttggagggactgatcaggcttcttaggtgttcattgaggctgtgtttttttttaaaatcatctgaatgtatttcatagtttcagatgcccatacacatctgtgtgaacctaaaactccaagctatggggaaagtaaatatagatattaaatgtgagaaatgtgacccatgtgctagagccacacaagttttagagctcctcattcccctgttggtcattttcatcctatatagtacacagcatgtgaaaggctcgatggaaaatatgccggaggctgcaaatgcatttatgaatcacaagagtttatgaattatacatataaaatggcttgccttaggtattttatggaggccttagtatatccatatatttccttctacaatgagtgcattttgtgagtttccaaaagatcagaaattcttcagaagctgggaatattcacaaaagggaggtgcaggtctgcatagatgctaagagctttaaaattctaataatattaggtagcacaatagagacaacaaaagatgagtctatcatttaatgaacttaatggtttttcttttaaaatatagtgatatgtgctgcaatatgtgagatgatgttacatgatatcatttttacatgccttaaattgatagggtagtcacaatctggcatatgagatttttcagaaatatttataatatgaactgaatgtaaatactgtatttgactatgtttaactttttgttctatatgtattaagtagtcagtaaagacaaatcaagacatataatatgatgaagacatatgtgatttaatacttgcttttaaaagttaatttttccttggaagtatactctcttacacatatgtataccaggtcacatggacgcctgtttttttccctgcataagacagcacttttggtattgccctgattctgaatgtatgtaatcacctagtgcagctgagaggccatgtgctatggatgtttcttttag

SEQ ID NO: 57893 - DNA, 1070 bp, Homo sapiens
ttgatttatagataatggctaagattgatgcttggtaaaaccctaattttcctgttttaatgaaaaaaaaaaaaaaaaaaaaaaaaaaaagcttgtttcgtcaccatagaggcagctgccagagtctacacagcagaatttaaaactaaagatatagtaaaatcttacccaacaaataggatatttacaaagaagaaactaaaaaaaaaaaaaaaaaaaattcaagtgaggtttcacatttcaagaaaaagtcagcagcaaaaaagcatgatttaattgtcagaaagttaggcctcagtctgcacaccatggagaaatgagctcctagttcaataggaggaggaaaaggcccaagggaccagtttgattgtaaacaggtcatttttccatacctaagacgatgtggaaagtacatctttggaaagagtgtcaagaatgctacccccatatgaagggtatagtttgaaggctgttctactcagaagcactgagagaaactaaatggtcttctaaattattgtttcatttggttacatgtgaattcaattccttgaaccaaaggtacgaagttttaacttggtactctaaccagcatcaatagccaatataatattctttttttttttttttgagacagagtctcactctgtctcccaggctggagtgcagtgacgctatctcagctcactgcaacctctacctcctgggcttaagcaattctcctgcctaagcttcccaagtagctgggactacaagcatgtgccaccatacccagctaatttttgtatttttagtggagatggggttttgccacgttggccaggttggtctcgaactcctgacctcaagtgatccacctgcctcagcctcccaagctgctggtattacaggcgtgaaccactgcacctggcctaatacgatattcttacaatttaaaaaatgaaagcagaggaatggtggcagggaagctgacattttaagagttcacttccttgtagttatcacagttaattcttactgttagaataagtggtaacttgccaaggtcacattgctagatgtcagagcag

SEQ ID NO: 57894 - DNA, 1018 bp, Homo sapiens
gtgtggtggtgcatggctatagttctagctatgtgggaggctgtggcaggaggaccctatgaacccaggagtttgagagggaagttacctatgattgcaccactgcgctttagcctgggtaacaatgagaccttgtctcaaaaaacaaaacaaaacacctcaatatctgaaggggtctttatctagttttttggagaggtgaagtaaacccagaaaactgcaaggaattattattacttaagtgccttttcttctgcttattcagagctatggtaatttttctgggtgtggtggaggaaggctgagaggtttacatgtcaccaaagaaccggaaaattgaataaagaccctacttttttataatctctgttgctgtcttcttctacacggctggtcagggtggctaggcgggcctcccgggcctcccgacgggctcttgctgaagcccggtcaccgtaagaatcactggttgtaggattactacctcccgattccaacctgtgggagataatattaaagataaaaattggttttgagaacaaagtagtggggagaaggtaatgctcaggggtagtttgcgccttttctaagaagtatttcggagccctggccagaaacaactcataacattctttccttcaatctctctgccagcgttcccagacctcagggctaaactgcacgagcttggagagggaggctgaccatcatttgccaagaatgaagcttattgaaaaattagtggtttggacctatgagctgacttaaatcttaagagcttttcatattagtttaggattgaacagcttccctcaaaagtgtgcttttaaaagtaaagatttcttgaatttcaatggctcttggaaaaatgattacaatgaactgtcaatgaatcagaaacatgtggacttagagatctgagctggaggttgaataggaatgaaatggccactagggcatgctacgtatgccttttaggtgctctacaggtttgctggaatcccaaacattttaggga

SEQ ID NO: 57895 - DNA, 1202 bp, Homo sapiens
tagaacaagttttccagctctgggagcctcccattgggtgcctggggaagcctgagcatggccataagctttcttccctggtgcccctcccaacccatccctttgctggcaagaacacagattgaatcattctgcagcaaaataaaaatgtattcacatattgatttcctgccccagtacattaactctgaaatattcagggatgcttggcactctcccactagaataagctcatgccaccagatacacttcacagctcactactttcctttctctcctcaccatgacctgcagtgaccatcacctccattagccactttaatggacagctgccatcctgggcagttttgagtgctaagaactggaaatctacccaaagcagtcaatttgctgccatgggaggcagtggggcagggggaggggaggagggtgaaaggggcaagatggatacagagctgcagggaatatagagctggtcagggtagccacctggagattattttgaaacatctgattcctgcaatgcatgatgacacatgcccataatcacttagcacctactcagcttttttctttcttcaggcatcttattttaccagatacatgatgccaagcattcatttggtgagacagggttattcaactgggaagccaaagcactgggatagtattaggcagatccccaaatgtctttctatgagcaagcatccctaatatgcagtttgggagagacatttattgttccagtggcctaaatagattggttatttattgaaaaaaaaaaaactttttaagacctgttgaggttatagtttacaccagatctggtgctcataatcaatcctgttactctataattccagaatgaaggagaaatgctgagccttgcccttgcatttcctaccactatcccaaggctgtaactgtaacattcacatagaattttaagcaatacctgcttatatctcaaacattttaaatcttccaagttgattcaagcagcaagaaatagaaataataaataattgattctcatgagatggtagaacagtatgccctagcacctaaacttctgcatcttgtgatttttttcaaacgcaccttactaccacacagaagtattctctcccgcttagagcagtgagttattagagataaccagttcttttttaatttttaagagatggagtctcgctatgttg

SEQ ID NO: 57896 - DNA, 1153 bp, Homo sapiens
agttttgtgccactgcactccagccaaggtgacagagtcggaccctatctcagataaataaacaaagtgaaagaagggagctgagtatgaggggaagattagaggaagggagagagaaaggggcagcagctagatttaagaacacaccaagtcctcagctctaatctcagtcatgatgaagggtccctgaagttatgcctcaaccatgttaatttggttcagaaggctccaaaccacatgctggactttcattctcaaaagcaatccatatgtgccttttgagagcctggcagttatattcatatggcatatttagatcttagccaagaatcagacatagctctccttccctgttgcttttctccatcatccttccacctgccacccatttgctccatgactcctgcctttctcatttcctttcttgcatgcaaactaaaaacaaaaacaaaaagtcatgtgatttctttgtcctacttttctctcctctggtctgtcttgtctctctctgtcttttctgtctgtccttttcatgtctcaatctctacagaacctccaccagctaaaacagattcaaaccttgaagcagatgaacgagcaactgcaggctgagaacagggccctgacccgagtggtggccagactctcggagtccatcgagtcctcggacacccaggagctctagttcttgcccctactctccaactcacttccctcctccactactccaggcaggttcagtcttcttgttagtcccagaagctctgtgctcatcccctccatccgagcctccatatgcaggttcctgcaaagcttggttatctgcagatggaagcagccaggactgagatcatagaatgggacataccagcctaggtcaagggaggcagtgagagagacctcagctgggctaccaatatattcatttggtaaggtcaccacattagcttctcttcccctggagactgagtatgaatttgttcactcagctacacataggtatacacgtgtatgtgcatatacctgtgtacatgcacatatacatatttcattgacggggtcattgccagatggaaattgatctttcttagccaatagcaacccaagtccaacccactcccctggagcaactggggttgggccttgggtaacc

SEQ ID NO: 57897 - DNA, 1014 bp, Homo sapiens
aatttcagtttctaggcgtcaaacatttttggtgttttgttttccatcccacgtgtaataaaagaatgatctttggagtcaggcacactgggattcaatattagctttgctgggtgccttgaactagttatggcacttttcatttccccatttgtagaaatcgggataacaactgtatcatagtctcatgaggcactagggagaccctctagcacagtgccatccacattatagatattcagtaattttctttttatttccctgatacaaattatttatgtatctgtgattcatatttgtgtacatacacatatatttatataatttaacctatatcttctctgagagatcaaggaaacagattatattccttaaggcacagttagatctcctaagtggttaatagcagagccagagctagaactaaataggcctcataacacctcagcacaggtcaccctttactgggggcattacctgcccctggggtcctataggttgaaatgactagtcaaaggacacctgtattgaacagatacagatgtagctttctgtagcctgcatagtggcgatgtacttacctgctatcctaaatcgctcttgctgccagtgggacccacacataaactgtacccttatcaacatcccattaggatttttcagatgcacagcgtacttgttgaaagtgcctgatcatgtaacaaagacttgaacttccaggatggaacttgaggctatttttcctttttttcacaagttagacaacagtatgtgtaatgttccaggatagcagaactaataaaattgagtttccactccctcccctgcccaacaagcatctatttctgtgaattacaatgccatcccctaaaactgctgatgaggcctctgggtatcctttggtgactgtcagtggggagctttggggaggattaaatacatgcctagtgttcactgtgcctcacagctctgtgagtgtaagttttctgagttttaattgttgaaagtggatat

SEQ ID NO: 57898 - DNA, 1325 bp, Homo sapiens
aaatggccctggcttcatttattcctttcctttctatccttttatatttttcccttccccaccccctcactcaatggtataaaagctaggacagagcacctgacctcagttgtctttggccattgtgggaagtcattattctggagacaagaaaatcatcactctggtgccttggtggcagcaccactgcctgctccctggaaggtagactatggcataagtgtcagctcattgttttcgtctcccacttatcttcccccttcaaagtgattttctttataagaaaatttgggctctgaatactccattctgcctcacttccttgaccttgttttcctctcttcgccctgacacctgcttctaatgagaaatgaagtcagtgcaaggaggaatgagaggtggggaggggagattgttgagagatggactaggaagtggaagcaggctggaaagacacatatggcgaaagtcaagtatctgaggccacttgcaacattgtgacaaagaagatggaagatagcagcctactgggctgtgagaatagtggtgaatttgattatttccagtggttagatttagcagagagatttactttcttagaaattaataggggaaatggcacttaatagaggtttaatggaatgaagtactttcaacccattgatgagagtcatggaagtttagagtggcaagacccagaggtcattaggtccagctttctattattgtgtcacagggacccctgctaccacagctttcacccatgggcatggtcaggtagcctctggtggctatgcatttattactcaaaagttgggcaactctaataacgagagagtttttcctcatatcagctgaagtctgcctgtggattctccttgtagtccagatctactatctgcaactctttaacggcacttgagatatgtgcagtgggtggtctccccctcagtcttactttgagctgctgttactctagtcctttaagtcattcctcatatggcatgcttttcttacctgtcacatcttggccatcctcctctagacaaaaccagcctttaaaatatcatgtccaggcctggaaagaatacaaatccagtgcaaaattaaaccattagttcttgatgataacctagcattaatacttacagtattttctttttgtaggagttttatcccttggttcacttgagtgtgcaagtcattaaatcctcatcattttagggttgccagtgatattcagtgtttagagtggttcattcccttaatatatactacctctgtctgttaattctttcctaacatgacatgtagctctccatggt

SEQ ID NO: 57899 - DNA, 1059 bp, Homo sapiens
gaaaggttggctgtgacagacagatgactataggttaaagggtgatgtcaaggacctcacaaggtcatgcggtctgctctctacctccagacagggctgcattcatctcagataaggaagatctgaaggaattgtctcgttttagaaagatctccactacaatagcctagagcaccccactgtgcaatgtgacagtccttgccataggaaagtctaatctaactcctttttggatgaactctggttctgtcttcggttgagatgagacaataacttcttactgggcattagggtgttgcggacgagtcccagtttgagacaagagagctgagtttaatttacaggctctgcctccaattttgtgaccttgtgtgaccttgggcaaggccctttcttgctttcctcgcctgtacattgagaaggtagaactagataacttctcaggcccttgcaaccccacagttctgtggctgcagttctgggctggtgtctgagtccaggaagtgggcttggctgggtgatgggagcaggtggtctccaggaattcccaatgcattgccctcccacttctgtcaccagagtcgagacaaattgagacaaatactgtatatgaatttcaaagccaggcacacccctggagggggagtccccaggagaccttggctctactggttattagctgtgtgaccttgagcaaattactttatatcttagagcttcagttactaagtagtcaaaacagaatgagaatagtggtggtattttagggtttttatgaggattaaacaagaagcatatgtaaatacttggtccagtactgagctgtctaagtcctcaatgagtggtagctattgttaataataataatacaagctgcgtagcaagcaggtggcagggcagctgtgagtagtggccatggggagcagggaaagattgtggacttgcagtgtgatcttcctctaccatcttgaaagcttccctacaaaatgggaacatcagctctgtctcactgtctctctgtctctctgtctgtctgtctctctctctctctctctctct

SEQ ID NO: 57900 - DNA, 1034 bp, Homo sapiens
tactttacaggggagggggaaaggcccttaattccgggacctgacttacctaccttgtgggggtgtctacactgcccaacattcagaatgttggggaactaccaggaggaatcactagtggtaaaggagcagcctgcagccctgggatgtctgagaggatcaggaggatgctgatgctggacagagaatgagttaaaccctgctcccccacagtgttccctgccccctggacactcaaaataactctgtagaacaaccttagtatgcagatgaggaaggggtgctcagagggattaaatgacttgcctgaggtcacacggctagtgagttgtggagccggactcctcccacaaggccactccacagagctgtttgccaagatagtcccttggtctcttctccccactccatgctcacctcatcccctcctcactttccccactgactctgcaggaattatgttattgggatcccaggatagaattacagccaccagcatccatgtgcttgagagagctggctggtccctgatgggggatgggttatgggaatatctgtgtgtgtatgcacacgtgtgcacacgtgtttgtgttgagggaggatctgaggcttatcattgcacatgtgaggtggtgggctcaatatgtatgctcaggggtatgtgctaatctccttcccttccttagggagtagggggctaagagtggtccagccacaccagcccctgcctttcctgatcacagctcagcagggaggagagcgatcccttcccttatagatcagatccagtaattcaggggtctcaggagattcagtctgggggcgggctccacaagggggttgaaagttccctcccttgctgaggctggcccgttggagctgctccgtgagccgttaaccttcctggagctgcaggccacatctagaacaccatgtcctgactccccatttggatctttcccccaccacactgtctttgtgactcccgtcaccatccgaggctgggtgaggaggccacccggggacatctctac

SEQ ID NO: 57901 - DNA, 2256 bp, Homo sapiens
ggatggtctcaaactcctggcctcgcgatctgcccgcctcagcttcccaaagggctagacttataggcgtgagccactttgcccagctgtaagttttaaagaaccatttactcagttacaaccagtaaagcaggcgtgtttcagaggagagtttagtcattgtttgcttaattgtcaggaacaatacaaactgctctggaagaataatacgggtatgtgcagggggtgggagggcaagaacaacagctttctgaaggggtgtttgtttctgtgtgtatcaagagaaagcaggaaatgggagctggctaggtcagcggtgatgaagactctctctcctgtcccagctcatttctgtttgctctaactatgacagcagggcttggaacaagtttgcagggatgaaggcctgaccagaacatcagggaaacaatccaagtgtgaggtagtgcaagtgctagtagacctatgatcaaggatggacaaaaagggaattctttaagcagaaggtgggtggcaggcaggaaaagtacaggggctttcagtccccagggaaagctgtgacaggggcacgatgcagcagctccctgctctcttctctctcctccctagaaaaaaacagaaaatgaagccaccaggaagcacactattcagcagaaagtggtaaaacaatgtaattgagggagttgtagactttcttcctgaaaaacgctcagtgttagatagctctcccccaccttttgtgggttcaaaatgaccttgtgtggaagcagagggattgccctgatggccctgcatgtgcatgcaattgagtgatgctggtctaagatactagaggctcatctttctacaatgatgaacagttgaaaagcaaagtatctaataataggctgggtgtggagggggtggatgtcttttccattctttcctcttccagctcctgaagcctgggggaataagcaagagggatgttgagctcttgattaggtttgtaacccagacactactggtcctgatgaattaaaagaacattaaggctgtagccagcgacaccacatttttcatttaaccaaattgattacagctctgactctcctaatagcctgggaaggcaggctggcttcctctgacgtgcttaggagaagaagctggggcaccagattgacacaaggctttgatcagaacagtaggcagctgagtctgctgccgtggaaaagttgaagcgcatcaggccagttcgcttggcttgattctgtgcgagggggctgcagccctctttctggctggagtcctgcagatactggttgttggcatggggagcaggaaggaatgaatagagtagagccagcccctttggggaagcaacaagtcctggaacacacctggctaagggtgggggtggtgggtaacctctttgaatgtaaaggtctcattagtccattgtaacttggctccccatttcctccactgcccttgttctggctgctccacaggtgaagggggagggcctctgtgcctcaggggctgtgagcacagcttcagcctgattgaggactccccagaggtcttcccccacctttttcgtaacatccactgagtcggcagccacttgccgccttgctctgaggcaagccaaactggggatagtctccaactggggatggtctgccagtaacacctggtattattggcacagtgatctgaaaagtgccctccactgcctcttctctccccaaagcctgaatcccacttgttctttgcatctcctcatattgcattcattccacctctcactcactcacctagtacgtattgaagactgacctcaggccatgtacggttttgtacccaaaagcgaggcaggatgctacagtcctattataaaagttaactccaggccaagcgcagtggctcatgcttgtaatcccagcactttgagaggctgaagtgggtggatcccttgaggtcaggagttcgagactagcctggccaacatggcaaaaccccatctctactaagaatacaaaaattagccgggtgtggtggcgcacgtctgtaatcccagctgctcgggaggctgaggcgggagaatcccttcaacccaggaggcagaggtggcagtgagccaagatcgcgccactgcacactgcactgcaggttgggtaacagagtgagacttgtctaaaaaaaaaagaaaaaaaaaagttaactccaaaagagttaaagcggatattcaaattgtgctgtaaggaagttctg

SEQ ID NO: 57902 - DNA, 1667 bp, Homo sapiens
ttcgagaccagcatgaccaacatggtgaaaccctgtctttactgaaaatacaaaaattagccaggcatggtggtgggcgcctgtaatcccagctacttgggaggctgaggcaggagaattgcttgaacccaggaggaggaggttgcagtgagccaagatcgcactactgcactccagcctaggcaatagagcaagactccatctcaaaaataaataattaaaaagaccaataaacatgttttgcttgtaggtcttagcatgtgtgcacatgtgcgtgcacacacgaacacacacacagctatcttgagtctagaaatgagaccatgtgcaatcaatgttctgtggccaggggttagggtggtaggaacaggatctaacaaagggtgttcaatcctcctttttgaacttttctccagccaggccctagacagtatgaggaggtaggcagctatcccatggcttctagactcactgggcttccttgggaaagtcactcaacctctctggagcaaacaatgtagagaatcatcattaggcttgctggtcttctggagccagaaataataacagttactgtaatactcaatacgcactgagcactgactgagcatcaggtactgtcctagatatcagataacctaagctgactctcaccatgctgctatgaaatgaagtcactaactcatggcctctgagaggtgagccgagattggaactcaggaagtctgtctccagaatccaaagtggtgagcacggcagtatgtagtatgcagcctcctttcagaagtcagcaaaggaagggaacttacaggccctctaacccaactccagctgtgagtggtttttctaaaagcataaaatggattatgcttagattccttcaatggtttccattaccttctgaagaaaatccaaacagttggtctacagaatctgtcatgagcttgcctttgcctctgatctttccctcctccccaaacctaccctatactctagctccactgagctatttacatttccctaagccacataatagaagctacctattttgttaaggccctgcttgctgtttagaaccattatactatttaattttcacaacaatccctcaaagtaggtggtgaagtcttcatttaacaaataaggaaactgaggcgttagagtagtcacatagctttctgactccagtgcttaagctcttcaatgagtgcactgtatacttttatccactactgctgtctttgcctgggatgccattctcttcattgcctacctagaaaaccagtctttcctctggtggtagctgaaaggttatttcatcagggaagcctgccgttatttcttgacttcctaccaggttgagttagtggctctctctctggttcccacagcatcttatacttttcttttggtacatgtttctcactccctgcatcaaggaggctgtgaaatccttgaagtatttaagtgttcccctccacgttgcccgctccctgcagggctcctgacagataataccctgggtggtggtattatctgcactctaggcaattgcttttttccgggtgtttttgtttgtttgtttgtttgttttctttttcttttttgagaccgagttttgctcttgtcacccaggatgtggtgcaatctcggctcactgcaatatc

SEQ ID NO: 57903 - DNA, 1553 bp, Homo sapiens
ccatatctgccagatccttggatgtgggggcaactccagcgttcttaaaaggaaggctggccgggcgcggtggctcacgcctgtaatcccagcactttgggaggctgaggcgggcagatcacgaggtcaggagttcgagaccagcctggccaacatgttgaaacttcgtctctactaaaagtacaaaaattagctaggcatgatgccatgcgcctgtagtcccagctactcgggaggctgaggcaggagaatggcatgaacccaggaggcagaggtttcagtgagccgagatcgtaccactgctctccagcctgggtaacagagctagactccatctcaaaaaggaaaaaaaaaaaaaggaaggctgtgcccaagtctactgcttttttgctcaggaagacaaattagtagcccagtctgaactaatggcaatcacagttatctttcttgcttgtaatatcaatcccctaatatactgaaaccatagggtggggcaggtgggatgggatgttggagaggaagtggctgttttccaggcccttcgggacaagccaggaggagcttctaataagcaacagaagagggcagcagaggaccaggattgagctgcttcccctcctagttccacgggagggaaagcggtggtggaaagacttgaatacctaaggccactctccattccgtttctggtctgtgacctgccctgaagttagacatcaggatctaatcttctgcaatgttttgcccctcacaaaattcttcagttcattgtgtatatctaacctgcttgctgtttggaagattaggttggagatttaatgttttttttttttttttttagtttttactctttttttctgtttttttaaaaatagagataaggtctcactatgttgcccaggctggtctttaactcttgggctcaagctatcctcttgcctcagcctccaaaagtcctgggattacaggtgtgagccaccatgcccagtctaatttttatctttttagtgatggagtcttgctattgcccaggctggactgggctgtagacctaagactgaagatcaggctttggattctcattctacctgaggtggagccaatccctaagccagtgatgatcccagttatgtgcctagcatactaaccacctactaggctttgtagatttgtatagaacggggacactgcactatacccaaggagcttgaaatttaatatagaaggaaactatgtaaaataatgtttcaagtttcttgttccagtgtgcgtgcacattgtgatggagctagagaagaaagagcaaggcttaggaaaggtgaaaatttgatttgagttgacacttgaaataaggttattgccaaactggccatgtggctttgccgaagatggagccttggcatgtttaaaataagactggtttacaaggtccccaggggtactctgtccttatctgcccctcccctcataagtttggtttgactgcagctccctaaagcaccacctaaggtaagtcaggggcattggctgcaaattgttccagtaatggttct

SEQ ID NO: 57904 - DNA, 2100 bp, Homo sapiens
tgatggaggttgttaaaaacctgaatttccctgcttcattctccagtgaagagcttaagaaaatgaggctttggatattttggcagaagtgtctgaaatgcacctgatttgccattatacccaccatcaaaagcaacatggccctttgggtattagtgcaagattagcctaagaatagagtagatctctacctggaagagggtgaaacatggctctctactgatttgggttgtactctgaaggccctttgtaatgggtttctgcctctttgtatttcacttaaaaaatcttgatggatatttggcagtctgttaagacctgcttctggcttggagcaggtattgattggtatttagtacccatgggtgtttttctgggctcagtcttgcctatgtttcttgccatatgacacataccggaatggattccagatgctatatacctgtaacaggagacagaattggacaacaaggattttaagagtcattgcccattgtaaagcattaagccagagctggttattcattatcagactaactacatactagtccatgctagtgtcagcctatattaaaatagtctttccttgccatagtgctggcgaaaacccaatcccttctgatgaaacattgcttcttgggaagacaagctgaggaaagcaatgaagatcccagtgtcggcctttattgagctatgtatgagggtcagggtccctcaactcctagtgactatgaagcagcagtgtgatggcttcgccctctttgcccctctgtcatcaatcctttgcatgtggctattttaagcttctcagctttcttttgggaggcttcatgtgtaacttattatagaaatgttactgaaaagctgcctaaacaaaaaattgtataaagtaggaatttgtataaagtaatactgttgtaaatccatcttcaagatgtaaagaatcaatttgtaaagtgtatattttcacttctcccttcaaatttatgtgaacaagtttttcatgtttcaatattgcttacataggaatacaccttacgtttttatcagtataaatggaacatttaaaaccagtcaacaacagaacagataatccagctccctgtttgtgttctgggttaattttgcaaggatgaagggctagaaagtggtgagtttcggtgtgtttcttattttcaggataaccggctgcattgcagtagaggaatggaatggtgaggtcatttgacctgttccaggtgagtggaggccaaagaacattctttctgcctccccttggatgggaaaattgagaaattaaaaagttgcctttctgaggaaacaaaagttattttctctatttaaaataaatgtccaaaggcacccctctaaacaccaaaacttttagctcctggcaaacttacctagctagaagttggagaagagtgcggtttcaaaccatgcttcctttctgcccttgccaatacgttctcactgactgtgattctgctgtgaacacacacacacacacaaacacacacacaagccccttctgtgtatgatcaggacaagtagttcaacagttaataaaaaagttaaattattggatgagaaagatatatttaacctaaatcataaatatgtatatccatttaataaacactaaaattgagaaaaattagtttggggatgagggccttcattcataatagccataatgcattatctatgatgtgagcttgattgagcttctttaaaatgcataaagaatttgaacaacaaaagaaatttgatttttttttttgagacagtgtttcactcttgttgtccaagctgtggtgcaatggcacaatctcgactcactgcaacctccacctcccaggttcaaatgattctcctgcctcagcctcccaagtagctgggattacaggcatgtaccaccacactcggctaattttgtatttttagtacagacagggtttcaccatgttggctaggctgatttcgaactcctgacctcaagcgatccacccgcctcagcctcccaacatgagccaccacacctggcctaggaatttgattttagaattctaaatacttatcattttctccaatcttttg

SEQ ID NO: 57905 - DNA, 1075 bp, Homo sapiens
ttctagttgtctgcagttttctgcagttgttgtgatgtttctcttcgtctgatggtggttctggggccaatagagaagaatagtctccagagtacaatttggaatcatcgtggtttggccttgttagtattcaaattcttagaatcccctccatcacccccgactttgagataggatgccaactgtcccagtcctcaccttccattgagaaattaagcttaaaaggagaccctgctgctaatataaagccactgcctttagagagcttttgccatcttagtaagcacaacccctacccccatccccactagtttttcttcttcacctgtgggtggtggtacacagtccctgacaatagcatctttgaggaagtcagatctttgtatctctgagtgagttagaaaaggtaggcatgtgtgtatttgaaccactccctccctggatgagaaccactgatcattttatgtgtgatgatgctgaatttaaagagaatgtcagttgcccaaagctacactgtactactagtaaataacaaagcctgggttttatcttccagttttcctacagtattcctcctaccttgtacaccatcacactactaatgaacacagataacgtttactttccagtttatgcctttgttgtatccctaaaatgactacagactgatgtgatctaaaaaccatgtttcattgtgtgttagctgtgaagctggcctgtaccagagaaacctctgaacttgtaggggaaaatgataaaatgcacatggaaactgacacttcagtttccatctcagtagtcctgcagctttgtgaggtgggagaggggaagggactgtgttaagttagagcctgaaccagaaggagggtcagtgggtaaagaaagaaagggtagatgaggtgtgccttccacctcacctaaatgaatactgtttgttttttgtttttccttccagattagactttgggggatttcttatatagaataaagggcttgattatatgtagcctctatcctggagaaaggttatgtaatttggactatgtaaaggaagttgacttctttacagcttcgt

SEQ ID NO: 57906 - DNA, 3252 bp, Homo sapiens
gttaaggatactgcggctgctgccacttccttctagtgaactaactgacccatcacatttaaggcccctgagaatatagttaggatagaaatctactaggaagcctgaagccaaattagggaagaacttcactaaagatagcatgagggctgatgttggcatttagaatttcatttttcatggcaaatttcatttgccataccaagtagtatggcacaatcattgaatgtgttcagttaatgcgccttacacctataaggtgtgggggtgtacatccttcaagaaggaagattattagtgtggttcctcaggagcctgtaggtcacaggatagacataaacacctagacagaaactattatagtagttagtcattcagggatttggtgaaaggaagactcttagtgggcacctctccatcttctggtattggttggttaattggaagggtaatcacgtctttaacattcctttttccagtgatcctttggtagcattaacagtgataggggaaggaagtatgttaaacccaaactggttgtcttatacaagactgggaggggagtggttaagatgcagtatttttttcccgtgtagattgggggatcatctgatttctaatttacatgttctctttagcttcattagttttagtaataggtgacccataggcgaaaattgaactttcctatcttccacccagaatgactgttgccgagggaagcgagatggaattaacagtcttgagagaaaactgaagagacgcctggaaagagagggcctctccagtgagcggtgggaacgagttaagaaaatgcggacccccaaaaagaagaaaatcaaactgagccaccccaaggacatgaacaatttcaagttagagagagagcgtagctatgaattagttcgttctgctgaaactcattccctgccctcagacacatcctattccgaacaggaagactctgaggatgaagatgccatctgcccagctgtgagctgcctgcagccagaaggagatgaggtcagtgaggtttgggccatagaggacgtgctttcccttaactcagaaaccctgtaagctagacctcatctcgctgggtctttctcctctgcttatctgctttgagctgatctgaatggattgctcagcccttcccccactgatatctgtgctcttaccatcgttcctgggtctcctcccttttcttgaagaaactcttgttcttccctttttccttttcttgctcttccagctttcaccttcccggcgctaagaaggtgggagggatgctgatgtgatgccctttggcttacttatcacagggcagcgctgtcttaaccccaaagcagacacgacttgaagaatgactttgactcggttgctttggctagggggccagctacactcatttggcttagctgttgtgccagaggtcccagtggtgggacagtggctgttattggcaaacggcctgaatttcttgaggctggcctgcccaattttgaatccattttttcctctgaaaaccccatcttcctgctctttgtaaccaggtggactgggtccagtgtgatggcagctgcaatcagtggtttcatcaggtctgtgttggtgtctccccagagatggcagagaaagaagactacatctgtgtgcgctgtactgtgaaggacgcaccaagccgaaagtaaaaacacaaaaacagatacccccctacttaatgtaattcaggactccaaccaagaggatttcttcaaatctcagcaaagctacaggactggtactcaagccagcctgtaaacggtgctatttctattccttatgggatcatttttccaggactctttgaagaaaagaaaaaacaactaaaaaaatttttgacactttttgtattttttccttaagagctatttgtggttgttgaggtttgaaaagctgactgttttttttgcaggggttcccaccaatttggaaggcattgaagcttgcaccttttcatgtacagcattaaaattttacctctctctgggatttaccagcttaagagtccaactcacttccagtgcccaaaagggcacccaccagaaattccagtaaatcctcatttgaggaagctctcccttgtttactctgttaccacattggggaaatttttaagtttttcactttgggagtttttgtttgtttcttcttttcctttatccacttttcttcttcctggtagactaggtttatttatctgagcaataacttctatgttggtttcagtggctggaattaaaacaaaacaaaacaaacttccaaacagtgtgttggtgctttagcgattgattgatgtacagaacacaaatgtctagtttctagtgtcactgatgaactagtgatgtagaaaagagacttctctgtaagtaattgccacagctgtattttggctttctccctgtcccttcctttctcccctattttttggtagcttgtatcaaatgttacagtttatattgtggaataaatccttcgtcctaacataacactaaatgctgattatttagagccattagagcacagcttcttctgcccctctactgttgcacagccagaaggggctgcttgcttttgcctctgcccaaccaggttgcagtagcagtggatgttagcctgcaaacaacattaggggattcttcttttgtgtcctgctctgtttggtgggccatatgcctacagccctcactaacaaagaacccctctgtcttcaaggactagaacctatctttaaagccgtgctcttttaaaataagctttctcagaatgttggcaaatcacttcaatcctcaaatcagtcttccttgtggaatgctgcctttattatatttgaattgacaggggaacttggtttagggttaagacgttggaaggaaatctaaggaaaattaatcctcacagaggtccgggtttagtatatgtcttgagaggagacttgtgaattcccagactctgcctcctggtttcctttctcatttctttctaactgtagctatcattactggctgtggatagcccatagctattttccttgcttttcttttttaaaggggtctgttctgcagtggagaagacattctggtgaccagacttttgcttaccttttcctattctgttgccaatttttgttttccccacattctatagccataaacctgaagatgagtaaaactggtgggtctttaataaaacaacaacaaaaacagcagt

SEQ ID NO: 57907 - DNA, 6852 bp, Homo sapiens
taacccagaaacacatgttgcacctaattgtcatctctttaagtttcttttaatcttgtagcgttttcctccccaccccactttttctcatgtcactgactagacagttatcccatggtatgctccaccttctggatttgtttgattgtttctttgtggagtgttctgttctctgtatttcctataaattggaagttagttttaaagccctggtgcatccaagttaaacatttttttaatataatgcattaaaatgtcaggtaatactgtatattctatattgcatcacaacaggagatatatctggatgacctaccattagtgatgctaagttttacattgtattggagcaacaccaatgcatttcatcctccataaccttaatgcttttactctcctagtttggctatctctttctaaaaatacagttcccagaccagcagtattagcatcggcaacagcagctttacctgggaacttgttagaagtgcaaatttatggaccttcctctgacccactgaattagaatatttggggataggactaaggaaactgtgtttaaacaagccttccagatgattcttatacatggtaaagttagagaaccactgggctgtctcaacttatattttagtttcctgaataatttatattgagttgctttaattaatcattggtgagtggattggggtaaaatattgttttgttgccttttatttgtgtaattcagtatgaaagtcttgagttactacaaaccttcatttctgttgaaatttttttcaaactgttaataggaaccaatgagatgaatgaatttagaagggtataaatagaacaaagggaccacagtatatgccatgttcacatttgtatccttagagcctagcacaaactaggttctctaggcccagcacagtggctcactgtaatcccagcactttgggaggccaaggtgggaggattgcttgaggccaggagtttgagaccagcctggccaacatggtgaaacaccatctctactaaaaatataaaaattagttgggcgtggtgatgggtgcctgtaatcccagctacccgggaggctgaggcaggagaattgcttgaacccaggaggtagaggttgcagtgagctgagattgcaccactgcattgcagcccaggcaagagtgatactccgtcttaaaaaaagaaaaaaaaaacaacactaccaccaccaccaccaacaaaagacccaaactaggttctctgtttgtgtaatgaaggaacaaatgtcacttctacccccaatatcattggtcagctggcaggttagtcagcgtttgtgaatttagcatgttgagatcatggagtaatctgaagtactcaatggaccaatctgaattaagcttttcctgtttttcatagaagtgttcttttctctaaactgctgtaatttttcttgacttattaggctggaggacgtgtgccagtgttagacacactcatagaacttgttacacgaggccgatctatccccgtacatctgaattctttgccaagactggaaaccctagtagctgaggttcaggcttggaaagaatgtgctgttaatacattcttgactgagaattctccatattctctcttagaggtaagtttacaaccagctcatctgcaagaccttagatctcctagtttggtaaaacatgcagttcatcacatacaaagatgacatcacagattaatctatattctgtgagttgttcttcccgtaaagccagggagactcttctaattttctggtgaagcaacctttaaatgttttcttggttgatttagcataacagtatctaaagaagaaaattttttcctattgggtgaaattcctctgtgttgaaattggactcttaaacttggccgtgcttcgcccacctgaatttagtaagcctgataaatgatctcccccattttttaaaagtgctttaactgcactttttgtattttctgtaaacttgcttgtgcatcatgactgggatcaaccagtatatatcacatttttaacttgttacttaattgaataaggaatcagtctatcttttatgagtcttcctcctccttttgtaaaggagagcctcagggttgcatgttccaaagaaaatcttcaatactaagaaatgcacatcctttttactgcttaggcttttattttgggacttcctacataatgctttatctgaaatttattttaccattggttgtgccttgtcccacattaggtgctgtgtcctcgatgtgatattggccttttgggattgaaaaggaagcagagaaagttaaaggagcccttgccaaatggaaagaaaaaaagcaccaaattagagagtctgagtgacctggagagagctttaactgaaagcaaggagactgcttcagctgtatgtagggtttttttcttctcctttctatgttattgggaagaataatttctaaccctttctgttttataggaatttggagaaggcaagtagagtaacttgaaagcgttcagttttactaaaaagactttttgaaaattgtcaagtgttaagagttttgaatggtaagatgcatagaggtgggaaagattcagggtaggcttcccagtctcagggtcttgcaggcacagaaacagtcttgtttagtgcctgtgggttgatccaggaatgctaactaaagatattgagactaatattaatagatgtatgaaaatgcaatgctaatttattagtttatagttaagaagtacatttaaaagtttactggatactttgatactcatctggaataccttacatctctgacctgcatttagtaaatactgttgattcaaagatgatagtttaaagaagatgaggcaatgtataactaatgttacacattaagcaccttatcgggataaaaaagggatagctatgtgatgcttttaatggcacaaagcattgcccgttctagagtgggaatgtatacctgctactgggactagattgaatgggttcatctgtggatctggacaccttctcccattgatttctttgtagctgccagacctcttgtgatagacatgggttgccttgatttatttaggtattttgacacagatgttcttagtgtatattcgtatattcagtcaggttctagacagaattctgccatcagaggtcctccattccatctgtggtttgtttttataaagactaactgaaagttacagtccccctctcctgaggtgtatatatgttggtttgaaactttatatgcagtatcttttgtagattttagtctgtccatctgtctgtagacccctggttttaagaattctccctacgtattatctgttaatttatggtagaactcaaaggttagtcatttgctttccatctctaagctgtcagaagttaccttgttatcatataacccacacatattacctgtgtattatatttacaaaagaagtggatttttttttttttttaatatacccaaaggtctttacctgatttgcttttaggctttttttttttttttttaatagagataatggagagtttattctggccttgtaagggtgcttcatctggtgaatcgtgatggatctgaaaggggatagatgtggtgattggaaatggttttttaactgtgacagattttttgagaacttgtttactatgtgccaggcaaagagtgtcctatcccacatctcttacttgtcatctcaccctgtaaggtgggcactattatcacctccattttacacatgcagaaatttagccacaatggaatacatggcaccaggtcactcacagcttagtatgaggcagtcaggatttgaatacagatgatctactcaggatcccatgctcttaaccactaggactctgagttttaggggaaggccaagccatctcggacatcatccttgattgttaactctttttcagatggcaactcttggggaagctcgcctaagggaaatggaagccttgcagtctctcagactcgccaatgaagggaaattgctgtcgcctctccaagatgtggatataaaaatctgcctatgtcagaaggccccagctgcccctatgattcaatgtgaactctgcagggatgctttccacaccagttgtgtggcggtacccagtatttcacagggcctgcgaatctggctttgtccccattgtcggaggtcagagaaacctccattagagaaaattctgcccctgctcgcctcccttcagcgtatccgagttcgccttcctgagggagatgcacttcgatatatgattgaaagaaccgtgaactggcagcacagagcccagcaactgctttcgtcagggaatcttaaatttgtgcaagatcgagtgggctcaggactgttatatagcagatggcaagcctcagcaggacaggtgtcagacacaaacaaggtgaatctggactttccttgttgggttattggaatttgcaaagctctgtacctttctctcgaacctgtagctttggtgttgctattcccttggtgtgatcactttactgttaacagcacccactttacctgtagcttcccacttcaagaccatgcaggtataacatattcttttaatttcctctgctcctattagaagttgtttcccaggcactctttctatagagcacatatttagcttttcacagatacaaataattttttcatttatatgtatgctgacccatttatattttacatatacgtatatgatgtatctttaagtctttgcttgactaaaaagttttttaccctgcttcttctcatgtaagtcaattagtagaaagggaaaacacttcctgccttttatcgctttttgccctttaagggaaaatattttttggaagaagtgtttgagcactgtgttatttcagaggaaagctcctgggttacacaccatttgcgatctttctgccaaaagctggattcttttgacatcactggatgggcagagttttctgttatcttccataggtggctgcagtaaaagaatgtgaagacaatagaaaagtacaatcaggaagacagtattcaatctttatgaggttaatctgatggtttttaaagttggtaaacatctctgtaccagagataccacaactctcttgtgccatatgagcacagacacatggattatatgagttaaattgttgataagatgaagaccaaacaaaaaaaaaaacagtctgtcatatttgtttccttggttttttatttctttgcaggcttctgaaatacagtgcctgacacatagatgatgaattaaatatttgttgcatagatgagttgtggcatttgtgcacactcccaaagtggagtcattggtgttctttacccaggatgtgctaggagtttacctttcttagtaaagggaaaggacacaactcttatattaattcatggtcaaaggagtgtttcccctagctcctttaataaaacactaaggaagataggaaagtggttatggatgatttctgacaggtcctcatttgatttactcaaaggggtacatatgtgttcatcgtattttaatcttcaataaggagaattagaaaaggattaaaaggctgtatgatctgttctcacactgagaaagtggcttatttcccagtggccttctttacatctctgaaatcagtccaagtaaaactggaaagattaaaggcttggtctttgggaagatatgagttgatttggccagttctgaaatgccaggagactcttcagtaggggaaaatcaagttgtttttttttttttttcccctggttgcctgcctgggtaatgcaagctactgtcattggactaatgggagtatttttaatcctgaagagattttattataaaacgttttccctccattaggtatctcaacctcctggcacaacatcattttctttgcctgatgactgggacaacagaacctcatatttgcactcccccttctcaactggacgaagttgtatccccctccatggtttgtattttgttattacgttgagggctggatagtaatgagtgatcttgtattactaggtttttattatagatgatcaagtaccataaaaaggactttatgctgaaatgtaggatataggctattatgtatttgcaaaatagggaagggatcctatttgaaggcttataaatgcaaaggaacagagaggaagactttatatccattgtcctcagggatgaaagggttcatgccacaccagctgataaacaccaagcttttaagtcagatgctaagtcatgggctctcttgttgcttcattacttaggagacttgtggagaatcttagggataatccacatttgctagagtcctgatccttagtcatagcatctcagtgtatgtctagtaatgtggttagagctccttgatctactcagactgttgacactgtggccatcagtctgtttctgtgctttctgttagaagtcatcaaggcagaagtacaatctcttctgcattagcaataaggtaaatgagaagaggattcagtgtataattaatactagtaatcagaagacttaggaaatctagttttggctctgtttattatattgtggctttaggcacattaaacctcacttcaactgaaggtaatttgtaatttaagaaggagagggtagtagtggtattaggggcagtccttctatttgtctcataaacccaaatgtgaatgtgaaacaccctttgttgttatcattttgatttggtctggtcttttacaggtgttagtccagaagtgaatgaactattgatggaagcccagctgctccaggtatcccttcctgaaattcagga

SEQ ID NO: 57908 - DNA, 3033 bp, Homo sapiens
atggctggctaagttctttaattttgtagagaggagatcttgcttgtgttgaccaggctggtgttaaactcctggcctcaagtgatcttcctgccttggccttgcaaattgctgggatttacaggcgtgagccactgtacccgccctaaaacatgtcaggtcttagcatttttatatttaagttcaactctaggcacttgtttaaaaaactccgtgttcagccaccaccctgcaaaaatcaaatcaacaaatttgttaataatttaaagcattgcaaacatttgtaagttacatttctagacaagaactgacaaaaccagtctcctctgaatttcataccagtagtaataaacataatgattacagaaaatatgacttttttcttcattcctaggccttgtcagcttcaaggctttaattgaagaatctgaaatgaagaaattcccagacaatgatcttttgcgacaccttcgcctagtcacacaggatgcagagaagtgtgcctctgttgcgcagcagttgcttaatggcaaaaggcaaactaggtatgcgcttctgactgcgtgagtttggattctttggcacctatgtttggaaacctgttgtgactcctgtcttgaatttctgtgaccacctgggtgtggtggacatgtatgtattcttatatggcttccttgggcctttgtctttacagatatcgatctggtggagggaaatcccaaaatcagttgacagtgaatgagctccggcagtttgtaacacagctgtatgctcttccatgtgtcctcagtcagacaccattactaaaggtaaccatagagggatgtgtgggagaatactttggtaatcctgtattttgtatataaactctattgatattactaagtaatcttctttgatgattaatatgtacatttatttgcagatgcttttaataacctattgagtggtatatgtatataaagagattatagtagatccacagaggggaaataaagttggaaatttttactttgaaagtgaccttggctgggcatggtggctcacacctgtaaccccagcactttgggaggctgaggaggtggatcatgaggtcaggagttcaagaccagcctgaccaatatggtgaaaccccatctctactaaaaatagaaaaattagccgggcatggtggtgcatgcctgtagtcccagctacttgggaggctgaagcaggagaatcgcttgaacccaagaggcggaggttgcagaaaaaaaaaaaaagagaaagtgacctcagctagtttaagctgggataaggtgtctgttatagtcacttagtatttgctgttagttggcttatgtgttatcttatttacctatattattactaaaattaaatgggatctcattgaatatgaatttaagattctaagtttgaaagaagccaattactgaaattactgttttaatgcaacaacctgtgtatttttttttaggatctcttgaatcgtgtagaagattttcaacagcatagtcagaaactactctctgaggaaacgcctagtgctgcggagctgcaggacttgctagatgtcagctttgaatttgatgttgaacttccacagcttgctgagatgcgtatccgtttggaacaagcccgttggctagaagaggtgcagcaagcttgcctagaccccagctcccttactttagatgatatgagacgtctcatagacctaggggtagggctggccccgtattcagcagtggagaaagctatggcccggctgcaggaactgctcacagtgtcagagcactgggacgacaaagccaagagtctcctcaaggccaggtgaaaaagcagacttctctttctttgggaaggttggacagttatctccagcttaaacacagagcacaatgattggtctatggcaagtgctcagtagctgcggttattatgcatgtggaagacatgtagaaatagctgagatatttggagctgctttgggacctgagtaaaagaatgttaattttttcttattttactgattaaaaatgaataattcaattggacacaccttttctagagttggtttaatgaaatttccctggatcctgttaatatcgtgtctttgagagaggaaaatatttacaaataggtgaagctgtttaaactcacagttaatacggttccaaggagtcttaaagagaaatgtgtgagagttaataggcactgttctgcaagaaaacagtgcagataattttcaacaggaatagacaatgtcatttgaaaaaaattatttgccatactgaatttcctttgaaatgctagtttttttggtaaccataagaaaaatgaaccatcatataaaatgctaagaagtctttgtttgcattttgtaggccacgacattcattgaatagccttgctacggcagtaaaggaaatcgaagagatccctgcatatctgcccaatggtgcggctctgaaagactcagtgcagagagccagagactggcttcaggatgtagagggcctgcaggttggttttaaaaagtatatacagaatgtgtaagtgcatccataaagagcaatattggcgccccgtccgggagggaggtgggggggtcagcccccgacccggccagccgccccgtccgggaggtgaggggcgcctctgcccagccgcccctactgggaagtgaggagcccctctgcccggccagccgccccgtccgggagggaggtgagggggtcagccccccgcccggccagccgccccgtccgggagggaggtgggggggtcagacccccacccggccggctgccctgtccgggagggaggtgggggggtcagccccccgcccggccggccaccccgtccgggaggtgaggggcgcctctgcccggccgcccctactggaaagtgaggagcccctctgcccggccagccgccccgtccgggagggaggcgggagggtcagcccccaacccggccagccgccccgtccgggaggtgaggggcgcctctgcccggccgcccctactg

SEQ ID NO: 57909 - DNA, 3795 bp, Homo sapiens
tttcgagacagtctcgctctgtcacccaggctggagtgcagtggtgcaatcatggctcattgcagcctcgacctcccaggctcaagcaatccttccacatcagcctccagagtagatgggactacaggcgtgcaccgccacacccgactaatgtttatatttgtttgtagagatgggatttcaccatactgcacaggctggtctccaattcttagactcaagcaaggcttggcctcccaaagtgttggaattacaggtgtgagccatctacctggcccagagtctggttttagggttggtaaatgatacgtgttaagacccatagtgtgatgtttggtaatttgataataatgggtcagaggtgtttggaaatagaagaaagatgaatgttatttttttctttccgtgttttgatacagctgccattaggccgacagtgtgtggagcattatcgcttgcttcatcgatattgtgtgttttcccacgatgagatgatctgcaagatggcttccaaggctgatgtattagatgttgtagtggcttcaactgttcagaaagacatggccattatgattgaggatgagaaagctttaagagaaactgtccgtaaattggtaaggcttatggaaatccaactgcatgttgtcattgggtattatttagtaaaatttttacgcactttaatatcattttaagcagtctttttaaagcctattttctttgaggccattgtaatagatgtatagtagtatctcgtggttttaatttttattcactatcttatttgccacatgtacatatgtctctttgaagtagctgttcaaatgtcttgcccctttaaaaaaaatgttttgtagaaacagggtctcactatgttgcccaggctggtctcaaactcctgggttcaagctatccacccaactcaacctcccaatgtgctgggattacaggcgtgagccaccacacccggcttgccctttatttttttaaaacatttggtttttgtaataattctttatgtattctgcataccagtttttttttttttaaatcagataggtgttttgctaatgttttctcccagtctgtggcttgtctttgattttcctaccagtgtctttcagcaagcaggagtttttcattttgatgaagtccagtttgttaattattttcttgtgtgaatcatgtttttttggtttcctatttaataaatcttgcctaatccaaagttacaaagattttctcctacaaagtcatctagaatttcatagtttgaagttttacatttaggtctttcatctatttcaagtaatttttgtttttcaaaaatatgagtcaaggttcatttttttgcatgtggatatctagttcttccagcagcatttcttgaaaagactatcttttcttcattaaattgctttggcacctttgttgaaaatcaattcaccacataagtatgggtctatttctggactcttgtgttctggtgatctatgcatctattctattgctaatactaaatggtcttgattattgtagctttctaagaagtcttgaaatcaggtagtatgagtcttctaactttgttttttttaaaaaattgttttatctcttttactttttttaatgtacattttagaatcagcttattgatttctaccaaatcaattcctgttggaattttgattgagactgcatgaaactatggatagtttgggggagaattgatatcttaataatattgagtcttccaattcatgaacatagtataattttatattgcatgttttttggcactattataaattgtacttttaaaaactgaatttctaattgtttattgctagtatttagagagacaattgacttgtatattgaccttgtctcctgagaccttgctaaagtcacttaattcccagtagctttttcatggattcttttagaataataatatctgcaaatagtaatactgtttttttttttttttttaaaaatatgtgcctttttgggtagaatcctggaatattggctctctgcagcccatttacattttaacagcaggttacctaccttaccctcttatattttacagttgggggaaaatagtgcccagagggtttaagtaacttaccaaagtcttacatcaaaaatggtagctcatttttagaactctgagactttttccatatatggaatttacaaattaaaattaggtatgaactacatgattgattctcaattaaaatccatggagttggtccttaatcttattttaaacaaaaatgttaactttctccatcccatgaagtcctttttaatgaccaattcaagaataaaaccaaaatctaattagcattttccttaccttcctcatctttgttggcccatataattggcagatatgaaatagttaaaaggttaaaatacaggataacagaataaaagaaagaagcccagtagttcataaacgactggcattctcaaggctggattaggatccagttttagatagggagaaaaggtgatagaagtttggtctttaaatgacaaaaggtgtatccaagaagggttctctagatgttaggtggtacagattatgttgaaatttactggttcaagaccttatttttcctgacagtcttttaggaggaaatgtttaattatgactttagtctttgctattgcacaaattttctaactattcagttaatgatatcctttcatataacttcctgtaaaaggctgagagaccactcagcatcttcccaaactcaatttctgcacgatagtcttttccactcgtcccatcttctttccttttatttttgtccttttaatagattctccatatttcctcagaagtaggaaacatattcctttcttttaatcttatctatacctcttatctatacccaaaatgtggacaaggctaatttgtagtagaacagataactaatctcagtagttttacagtcctatggtgttcatactcagatcaaaatgaccaaacataaggacctgccttgtctgaaaaaggagatctccctagacaaatgaacttgcctgtatttgctaggtcatttgtttctttgtatgccacacatttttaatcatgcatccctattttggtaaagcttttttttttttttcagactcaagtactactgcatgtttgtcttgggctggtggattatattatcctttggaggtctctctaaagtatactttattctagggagtgattgattcggaaagaatggattttgagctgttgccagatgatgaacgtcagtgtgtaaaatgcaaaactacatgcttcatgtctgccatctcctgttcttgtaaacctggccttcttgtttgcctgcatcatgtaaaagaattgtgttcctgtcctccttacaaatataaattgcggtaagtaggaagaacgattttttttcctatggaaaacagttgatccttactaaaagctcaatgataccgcagttctagggctgaaatgttaagtataaaacatctagttttctccaaagctacacgtctcaaagctaagtgtggtggtattatttccaggtataggtacacgctggatgatctctaccctatgatgaatgcattgaagcttcgagcagaatcttacaacgaatgggccttgaatgtgaatgaagctttggaggcaaagatcaacaagaagaaaagtatgtgatacagaaagtgacttggtgattggcaaattggggcttattgtgatgtagccaaattaaagtcaacaaaacatttcttgaaacagcc

SEQ ID NO: 57910 - DNA, 1132 bp, Homo sapiens
attattatataataataagctcagtataaggatttgtgtgcctagagcaatataggtacttttggggtgagggtggtggtaggaagaagggaatgatgggaggtaagtttgagttccaaatgaggaggacctctgtatgttatgagattcttgaaatagagtgggattgctttaattggtggtagaagatgctacttgaggggtaataataatatattaggatattcttaattgcagctgtttttaaaagttataccttgaaccttaatatgggcacatttttgttttgtgttcagatactaatcaactttggtagtctgggatactgctccatcttgtgacataaattagtatctctaggtgatattctactataataatttgttttttctggctcaatttcagaaagctgcctttttttgaaaattatctaatagactgtgtccagattgtctttagtaacaatgtcactctttaagaaactcaaaaatcttcaatttctgtctctttaggtttaccgaactaatcagtgtgctggggagtttgtgattacatttccaagagcctaccacagtggttttaaccagggttttaattttgctgaggctgttaacttctgcactgttgattgggtatgtaattacaatgtagttaaccttttcaaatttattgtttttcctgaggaaatggaatataatgttttaaagtgtcatgtgggctgggtgcggtagctcatgcctataatcccagcgctttcggaagccaaggtgggcagatcacctgaggtcaggagttcgagaccagcctggccaacatggtgaagccccatctctactaaaaatacaaaaattaggcgtggcggtgggcgcctgtaatcccaattacttgggaggctgaggcaggagaatcacttgaacccaggaggtggaggtcgcagtgagccaagatcacgccattgcactccagcctgggcaacagactgaaactctgtctcaaaaaaataaataaatgtcacatggatagttgccttgacccattactgctcagctggtcagtctgcaaattgtttaccagtccacaatgagataaagcacttgtaccacagtgtaaatcaagcatgaattacctaagc

SEQ ID NO: 57911 - DNA, 4755 bp, Homo sapiens
tccttatgagaatctaatcccccccccacctcccagcccttgcgccctgcccttccccatccatggaaaaattgccttccatgaaacccatccctggtgccaaaaacacagggacactggcgaccactgctatatactgtgttttttgtgttggttgcctacattgctctcagacaggtccagtgaaaagaatgaaaggatggactcaggtaatgtatttgaaagcatctcaaagtataaagcatcattgaaacaacaaaccttattactgtgctgttgtcaactgtacagtgctatacgtcattcagacacaactaaccattattactatacagtttatgttacattttttgaaacacagaaatatctcccggtcataaataattgctttccttggctcccttttacagttgtggcctggctggtgatagaggaacataaattccttttagacagtagaggtttcctgaattgcctaagatcaattatagaacattatagacacaatttttccttaggatgctgttctttgattcccatcactgagcttaattggtcacagacagtttgtgaggaaactcattttttctattccttgtatttccagatggtccccacagagcttgttgagaaagaattttggagactagtaagcactattgaggaggatgtcacagtggaatatggagctgacattgcctcaaaggaatttggcagtggctttcctgtccgagatgggaaaatcaaactctcacctgaggaagaggtaggcatataagtggcttggaaattgaggtatttattgaaattctgtttggttggcttgaagtaacttatgattacttttagcaaatccttaattaccagatttttaatgatttcaagaaaagtagaaagagcctacagaagaattctagtcctaactatgtcactatgttgtggtcataggggaaaattacttatcatcctttgccttcagattttataaccttggtttctccttctgaagaaaacctgaaggcctgagaccaggtctatttattttcaaactttaatatttttgagtatttttttccatactagcgaactcttaggaagagttctgtttctatcttggtaggaaagtgtgatttttttttttttttggtagttttctttgaaagtattacatatgatcagaaaagtacatagttatatgtatacagactgatgaatttccacaagctgaacacacccatgtaaccagcactaactaaaacaagaaataggatattcccagcaccccagaagttcccttttcgcccgctctccttcactacttttcctctttcaggacgagcactatgccctcaggataatcactatcctgacttctaacactatagattagtttgcctgattttgaactttgttaaagtggactcatggcttatgttcctctatatatatttaaaaagagacagatacagaagtatgtgctgtgtgagtccatttatacaaagctcaaaactgggcaaaacgaatctctgggcatcctagaaggtcagcatggtggcccctcctcttccacatttctttttttattttgaaggataatatttttagctggccttctaaaacgttagcattgtatagctaaacctttatcctcttttgtcttcttatttttaggagtatcttgatagtggctggaatttgaacaacatgccagtgatggagcagtctgtccttgcacatattactgctgatatatgtggcatgaaacttccttggttgtatgtgggaatgtgcttttcttcattctgttggcacattgaagaccactggagctattcaattaactacttgcactggtgagaagttccaaaaagaacccatgagtagtatgcatgctggataggaaaactttccttttcagtgcagatgtgtcttaactgtgtctgaagagcattgaactacttttttccctaaggtttttcacttctgttagaacaggcatcctgacaagttaagacagtggttcttaagattcctagagcatccatgaattccctgaaattgcacacacactactttgcaagaacaacgtaattctgggggaagggtagtttttatctgaagtaaggaagtctttgtctaggccgggtgcagtggctcacgcctgtaatcccagcagtttgggaggccaagatgggcggatcacctgaggtcaggagttcgagaccagcctggccaacatggagaaaccccgtctttactaaaaatatgaaaattagctgggtgtggtggtgagcacctataatcccagctacttgggaggtggagggaggagaatcacttgatcctgggaggcagaggttgcagtgagccaagagaccgcaccattgcactcctgcctgggcaacagagcgaaactctgcctcaaaacaaaaagaagtatttacctatagaaaaagcatattctaaataaaagttacttttactatagaaaatcccatttggtggcagtgctagcctggatacccctttgggagaagcgtgaattatagtaggtaccacagtgtcctccaggtctgtgtaatgactagcctctcttttgttgtgttgaattcaggtatcactatgcacagtagagtgagccttatcttggtgtgcacattgagggggcaaggcgggagggatgtgcagatatttgggcttctttactttttaaactcttcaagccatttcttcacatctgttttcttctctatttttcttctaaatataaaaatatttgaaaatctgtaactcactcaaatcctcacacaaggaatttgaggatgtaccacaagaaagagaattggcatatatatgtatagaattaattctgcttccctaggcagtttctcccagctgtaaaatgaatattatatttaccatacctcgcagggatgatacagataaattgtttgataatttaaagtcctttgaagaataagaattccttagaaatgctaattgccttactagtgtttgatttaacttcgtctgccagaatgggcaagggaaaagaaaaatggaaagttgccttacccttgtgggttgctttaggaaactgtgataacaacatatcctgaagtgaatacgataccttatattcttagaaattctggatattggctgggcatggtggctcacgcctgtaatctcagcactaagctgaggcgggcggttcacctgaggtcaggagttcgagaccagcctggcaacatggtgaaaccccgtgtccactaaaaatacaaaaattagctgggcatggtggtgcacgcctgtaatactagctactcgggaggctgaggcaggagaattgcttgaacctgggaggtggaggttgcagtgagccaagattgcgtcattgcacttcagcatggacaacacagcaagactcagtctcaaaaaaaaaaaacaaaaaaaaaacaacaacaacaaaagagaaattctaggtgtctgcattttctaaagagtcagataaaaatgagagtggggagagggacttcagatgttcagatggaaagtcttctgttcatacttgaagggggaaaatgcattacatatgttcacatcacattccttttttgttttttttgagatggagtcttgctcttgtcacccaggcaggaatgcaatggtgtgatctctgctcactggatcctccacctcctggggtcaagtgaatcttctgcctcagcctcccaagtagctgggattacaggtgcctgccaccatgcctggctaattttgtatttttaatagagatggggtttcaccatgttggccaggctggtcttgaactcctgacctcgtgatctacccgcctcagtctcccaaagtgctgggattacagacgtgagccacagcacctggctcacattcacatttctaatgatatttcgtcagtttgtggattccttttttgcgtagtcttacaaagccgagtctgaaaaatatgaactggtaacccattttgtttgtgttggtgttgcagattgatttatttttataatctatttccaggggtgagccaaaaacctggtatggagtcccagggtatgctgctgagcagctagaaaatgtaatgaagaaactagctccagaactctttgtgtcccagccggatctcctccatcagcttgtgaccatcatgaaccccaataccctgatgactcatgaagtgcctgtatgttctgggttaatcctcctgccactcaagcttaattcaccacttctctttttcctttttattcacttttttatgatgttgatttagttctgtgttttccatagcatgacttgatagcagaaacagctgttttgctgcagtactgtacatttactcagtaggactggatccttagataccacaaaaactaatttgttgcagctgataactagattgctaaacagccttcctttgcaagtaataattgcaattcattggttttagtgtatttataagtgaaaatctatttcaaggtcttgagcttgtattttagggtgcccagtctgactgaaaagtctagaggttgctaaatgaagtgacaactatacagtcatgggaaacctaacaacagggatatgttctgagaaatgcgttgctaggtgattttgttgtcatgtgaacttcatggagtgtacttacacaaacctagatggtatagccaactacacacctaggctgtatggtgtaggctattgctgctgggctacaaattt

SEQ ID NO: 57912 - DNA, 2310 bp, Homo sapiens
tggcgtgatctcagctcactgcaacctccgcctccccagctcaagtgatcctcccgtctcagcctcccaagtagctgggactacaggcttgcaccaccatgcccagctaatttttgtattttttagtagagacagggttttgccacgttgtccatgctggtctcagaactccggagctcaggtgatcctcctgccccagcctcccaaagtgccggattacaggtgtgagccactgcacccagccattaggattattttgcattaatattatgtagcagtcagtctattacccttcttagggttgaattataatagtaaggaggtttattttaagtatagcatggctataaaggtttgagtgcttttccacgtagctatgttacaacataaggatatctccatcaatgggaggttattaggcatgggacagggataaattatttaatacctcataatagggatgaccttatcaatggatctggaatattcaagtctattggctcacaaagatctaaggcagcttatactgcccctgttaactcccagtattaggttataatcaaatattgctggcctgagagccattctgtttccatcaagtggtttatctctattttgatctattgtatgttgattttatagttttaactcccaggaggacattattgctctcattttcagtattgaaaacattatttgattttgaaggaagtcgagtctttagcctgcctcttataaatatataaatttatccaagttgtggttgttaaaattgacattttatttgctcattagcaaataaataaaatgtatttcacttgcttattaaaataaccacatttttcaggcaggtttatttttataatgtagacctagcatagaagtaaaataaacaaattaaagccttgttttttatctgccagcttgatgattgaccaagtatacttgatgttttcagtgtcacctagaacgtaattttctttattttcaggaatgtagtaagccacaagaagcatttggctttgaacaagcagccagggactataccctccgtacttttggggaaatggcagatgcgttcaaatctgattacttcaacatgccagtccatgtatgtacatatatactgctttgatttaggattttaatagcttttggagaaaagtgtacctgaagacccatttttagttgaggcctcactctagtaggcattgtcacacagaaagcagaatgaaactttaatttgttttgtggtatttaaaatttcacaatactttaaaaagcattctaattttttattttagaatttctctaaagatacctcttccacacagattatacagcaccagtaatagaacactaataaagaaaatcatcagcaatcattttggcccaacaaatataaagaatacttcacaaaatgtattaaatgactgctgtgtgccaaggtgtactatgcattgggaacacatttgttgtatattgttatgtaatcataagttagtattataaatttcaggatgagtccatttttaattcccctttatgcactttgaagcataagcattttccattcagcatttaatactccatcaaatgagtacaccaaaatgtaatgctttaattctggatatttaagctatgatttttgtcactactaataaagcactgcagcaaaccctttatgcatgtagtactctttaattggatgattttcttgggatgattattgaggtcagatgagagtcattctccctcattccatcccagttgctgtatcaatttatggatcccagcaatatatgagtgaatttgtttttccccagcacctctaacatcagctattagttacttaaaatgtttgcttatttaatggacttaaatttatactccatttgaattttcagttctcttgacttccttatgtgttataatatttgccaatatgtttgcttaaccaatcctgatgacttgcatgtaacctcttctatttgtggttaactgtatattttgacagaatattagatgaggacattgagggatagacatttaaatgttacctgcctctggatttacaccagattaacaacagattgacatttagtctggtgactctttattctaagggcgtgctgctacaagttgctccttttgttatatcatatatactggaagtccccaaccaccctttcccaacctggccattgaccaataccagtcggtggcctgttaggaacagggccacacagcaggaggtgatcagtgggcaaacattacacccgagctctgcgtcctgtcagatcagtggct

SEQ ID NO: 57913 - DNA, 1516 bp, Homo sapiens
ggggttttgccattatggcaggctgatctcaaactcctggcctcaagtgatccacctgccttggcccccccaaaatgctgggattacaggtgtgaggcacctcgcccagccacaatttgttcttgatcctttgacttttccctatttgtttttttgtttgtttgtttgtttttgagatagagtcttgctctgtcacccaggctggagtgcaatggcaccatctcagctcactgcagcctccatctcccaggttcaagcgattctcctgcctcagcctcccaagtagctgggactacaggtgcgtgccaccatgcccggctactttttgtaattttagtagagacagggtttcactgttagccaggctggtcttgaactcctgaccttaagtgatctgcctgcctcagcctcccaaagtgctgcgattacaggtgtgaaccactgtgcctggccaacttttccctatttttaaatttctcattcatgctttaatagtagtttcaaaggtgagctctcttccttaggaagagagagaagtatgttttgaatgccctgttaatagaggcaattggtaggatatagtcaccttgagattccagttggatttttaaagattatttcttcttaaaggaaatattcatgtatatgacaatttttttaaggccatgaatattaaaatagaacccgaggagacaacggaagccagaactcataatctgagacgtcgaatgggttgtccaactccaaaatgtgaaaatggtaagaaaatttgtcaatgaataggaaagaaaaagtaaataaagtaaaaataactattcataagtaaacataagctgaaaattcaatagaaaaaaattaaaaagtaaaatttagagcagccagtacatagtagtcactgggttgggctttgagaaaatcttaatatatcaacagtgtccttgttctcataattaactgactagtgggagagagaaacagaaactatatgtatgcatattaggagtgtggatgagtttctcagctgtagcaagttgctactttgaaatttgattcaatgcagttacttaagtaatttgtgaaaaacataggtgcctttgaccgaatgtctgatagatttatttcaggcaaggcaaacagacatgcttcctaaatctgaattgtggttaattgcttgcctgggtatcacttgatgtaagtcactgagaggtggatttgagattcttttaagagaaatcttatatcctatataggaggcacatacaaattaagaagttactaaaatttgttcaacctagggattagtgaactagtggaaaggcagcacaatgcacaggaaagtaatagagatacaatataaagtaatacagtaatcttggcacaaccgctaactagttatgtaaccttagagatgtttcttgatttactttaacatcagttttcttacctttgaaatgggtttgttgtgaaggattaaatactttatggaaagcattgagcacaatgcctaccacatgat

SEQ ID NO: 57914 - DNA, 1029 bp, Homo sapiens
tctagtgatctcgttcccataccagaggtatgaaggttttggattcctgcctagcctgatggatatgtgagttttaggactcagagataatatatagggaactgtttagagctgggaagcctcatattgcattaatcatactaaatcagtaactggttttcaataattatcaaaaatgaaaaaaatcagccattttgttttctgaagaaatagataaataagagaatagtttttcactttggtaagttggagataggaaaaaaatttagtgattcactttttctgaatgaaggagactgcccagaataggaaaatatggttatttgaagcccataagcatgtttaaagtaaattaatctatgaatcagttctttcttgagcatattcttgatcttatacatgtgtatataagaaatgccccagtgctgtggatgcctacatctgccttgatgacacctgatagtaatgatattgcccatggaataaactcttttagcagtggacatcattaaaatgtatgaataaacacaggcaaagtgagaaagcacagttccacagatacttcagtattaccacaaaaaatggttttatttgctttaccaataagtatcagcactttaagaaataatagaaactgagattggcttctataccctcaatgaggaaggagcccttaatagtttagtgatgttagaagtgtgtagtttataataatagtttattaaaataatttatggaaaattattgtggaagcaaaattttctgtaaatactgacagaccttggaataggtcagcaaactcttagaggctaatggagttatgacatttatataactacttaggatttggcttattgcgatgattgaataaagcataaagcaaatagataagaaccaagaaccttctaggaggaaaataagaattgttcttccgaatttgaatagaaacacttctctttgttttgagacagagattggctcttgttgcccaggctggagtatagtggtgtggtcttggctcactgcaac

SEQ ID NO: 57915 - DNA, 1011 bp, Homo sapiens
gcgaatctcattagtgagattctatggtagtaactatgctcatagtgttagtgcttcaggaaggttgttatttccacgtatctcattccagatatagctgctataacacaccctagagggttacttttggaacttacttttacaaaggtttttcgtgatgttcctgggtcctgttatgaaaaagtagtgcttacctgaaattcatattagcttcggtggcaatattttgtcgtgttaatgttatattggcattaaataccctcctttagccagcttagaataaaactaaaaagaaaaaccaaagaagagatgcatttctgatcagaaccaaagttattgctgtgggctacccgttgatctttgccttgcgagttagactttgtagggatatactgtggtaaatggaaaccctagtgaggaagactactttagtcaaatgacctgttttctcaattcaggtgatatctttggatgataactttgctagttatatctgaaactatacagttgtaaaatctagaaaacatattggattccttatttttttttattccgaacacttgttaaaaatgagatttttaatatggaaaattgttttgggagcttataaggggcctttctaacaatatggaccttccattaactgacagtcgcaagcacaaataactccaagtggttcattgggaatgccttgagactgttatggcctgttgtaacctgatgatgtcagcaatgaaaaatcaaagcaacaccacctgttaaaattttttttaatgttttaaacctgtatagatgtatgtatgtggttggtaactgcagacttgtctttatttttatttagatttttaaaaattgtaggcctgttgtctacataaatagttgtaaaatgtaccttacaaaaatccagtgaaactctctaagattaaaaaaggagggaatcctttcagtccttgcacaccggggaacaaggtcgtgaaaaaaaggtcttggtgaggtgccgccatttcatcc

SEQ ID NO: 57916 - DNA, 1232 bp, Homo sapiens
ataggctgggtgcggtggctcatgcctataatcccagcactttgggaggctgaggcaggtggatccccagaggtcaggagttcgaggtcaggagttcgagatctggctggccaacatggcaaaaccccgcatttactaaaaatacaaaaaaaaaaaaaattagctggatgtggtggcaggcacttgtaatctcagctacttgggaggctgaggcaggagaattgcttgaacccgggaggcagaggttgcaatgagccgagatcgtgccattgcactccagcctgggtgacagaatgagactcagaatgagactgtctcaaaaaataaataaataaacaaacataaaaaataaaaaatagaatgttgaatgtggaacctttttgcctcttatagtcagatctagatacagttgcccatagtagattaattttctcttcttgaactcttcctaagtacggaagtgatagtgaataaagggagagagagtccctttaatgatgctttgtgggttgtaacattttagaaacatgtcacttatatacttaaaaaggcaatgtagttttatggttaaaaagcacttaagtatttatacaatcaaggagtctgaaaggaataagcatttaaaggtacccttttgtaaacattgcatctacaatataggtagatatttgtgagggacttactctgtgccaagtatgttttaggaagtgatacacattctttgtagaaagtttaaaaacataggaaagtatggcaaaaataaaatcactcctgatccttccacctgttacttctctcacggctatttttatgcatacattcacaaattcaagtgtactgttcatatacatcattgcatcttaggtttttttactaatcatatgagcatttgctgtatcattgaatagtttttgaaaatgcaatttctaatgactgcggcaatccgttttttatagccagactttattttgatgtcttctattgtagaatgtttaggtcagttctagttttttattataatactatgatgaatattccttgtatgtaaatttttacacctatttctgatttttgaaatagttattagggagagaagaattgaagaacatatacttaagaaaaacagaggtgtacagtaaaggaattattgcaaaagggtgaagtagggtgtaagttaaatttcaggaagcttgagaaaagttgatgcactgttccagtggaacagaggcctc

SEQ ID NO: 57917 - DNA, 2421 bp, Homo sapiens
acagataaggaaactgaggctcagggtgataaaaaggtaaaaaaatgctgagccatggccgggcgtggtggctcatgcctgtaatcccagcattttgggaggtcgaggtgggtggatcacctgaggtcaggagttcaagaccagcctgaccaacatgtcgaaaccccgtctctactaaaaatacaaaattagctgggtgtggtggcacatgcctgtaatcccagctactcgggaggctgaggcaggaaaatcgcctgaatccaggaggcggaggttgcagtgagccgagattgcgccattgcactgcgggctgggcaacaagagagaaactccatctcagaaaaaaaaaaaaaaagaagctgagccataattcaataccaggcccatttgattctgaaatttacattctttccatcaaacatgctggcatgcatcctagtctttagtttttggaggcttatttaagagcccagaataagaccaagtattacagtcccttctttggtagagatttagttttaggtaacctggttctttccacatgattgctttggggatgtgaaaagtagcttagaggggacaaaatgtttatggaccatgttgtcaagagagatgttgaaaatttctaacttaaaattaatagtgtgtgtgtatatatatgtgtgtgtgtgtatatatatatgattggcaaaacatgtttttaaaagataaccatagccaagaacattttccccttggagtcatacttagatgtgattagaagtgacttccatatagttgtttctaattttgctattttaacagttagttgcagaagaaggtggatttgcagttgtttgcaaggatagaaaatggaccaaaattgctaccaagatggggtttgctcctggcaaagcagtgggctcacatatcagagggcattatgaacgaattctcaacccctacaacttattcctgtccggagacagcctaagggtaagtttgggggctagccttaacctgttttatcttactacttattggtacattgtcttttcagggaaatgaaaaagccttgattgtgtttggaagaccttgttttagaagaccttattttggtggggcgcggtggctcactcctgtaatcccaacactttgggaggccaaggcaggtgaatcacctgaggacaggagtttgagaccagcctggccaacatggcgaaacctcgtctctactaaaaatacaaaaatttgctgggcatggtggcgtgtgcctgtaatcccagctactagggaggctgaggcaggagaaccgcttgaacccggaaggtggaggttgcagtgagccgagatggtgccacttcactcaagcctgggcaaagagcgagactctgagactccgtctgaaaaaaaaaaaaagaccttgttttgtgttttttcctctagtgtttttgttctgctttgagagcagctatacttagaagtttgtttctggaatgagtaagattgtggaggaaatttttttactgtccaaagctgaggagttgattattatctacttgttacaactttgcattctctttaaatttaaagtagctaaagtattcctggctgtcatatgaaggtataagctgtgaaataacttgcctacctgttctcttctgccagctgagatttttgaggagattgtcagaatgttgatatggtaaaaggggattttataatgctacatagctaacgggttcctcttctagtaattcctatgtagccaagttcatttctgacaaaatggtatttgtgaaattattcacttaaaaacttttaggtaaaacagtactgtaaaagcttcccatttatttccaggccttggtagaaagaagaggggtgtcattatccattcacaccctttgagttattttaggactacagcagtgagtcctataactttaagaattgttttctgtgctgtagagaggtaggaagagaataacatagtttttgaggggtaaatcactaaccaaagtcctgtcctaatactatacacacacaaacacaccatctgtaatgcttaaatccagtagattttttcttccctctctcccttattgattccaggtgaacactttttagcctagaagaaagtagccaatctgacattcaaaacttttttttttaatacattatatgaatgtttagtgagcccatggatgaaattgtttagaatgttgaatgtgagccgggcgcgatggctcacgcctgtaatcccagcactttgggaggccaaggtgggtggatcatgaggtcaagagatggagaccatcctggccaacatggtgaaaccctgtctccactaaaaatacgtaaattagctgagcgtggtggtgcgtgcctgtagtcccagctacttgggaggctggggcaggagaatcacttgaacccagg

SEQ ID NO: 57918 - DNA, 1109 bp, Homo sapiens
gtcttactgtctcatccaggctggagtacagtggtgtgatctcagcttactgcaacctctgcctcctgagttcaagcaattctcctgcctcagcctcctgagtagctgggattacaggcacgcgccaccacactaggctgatttttgttaatagagatggggggtttcatcatgttggccaggctggtctcgaactcccgaccttgtgattcgctcgcctcagcctcccaaagtgctgggattacagacgtgagccaccgtgcccggccggccatgtataattatttaaccagctttattttgtgtatttttggccgtttctcactgaatttagaaagtggtattatatgattttgctgaaagagcattaaattaaaaaaaaatttttttaagtggtattgtacttaaatattctgtgaaagaaaataatggcaggtaataggagctttaaaataagctaaatgagatgaaaactcaattctttgtcttttaggcccaaactcgtgtaaaattgaatttcttggaccagattgcaaagtactgggagttacagggaagtactctgaaaattccacatgtggagaggaagatcttggacttatttcagcttaataaggtaaagagctaatgaccatcttacttattttataatcttactgacagaatgaatttgatcttctttgccttaaaaaggaacttattgctcagccaggtggctcgcacctgtaatctcagcactttgggaggtcaagggaggaggattgcttgagaccagcctgggtaacataaggaaaccctgtgtttacaaaaaatttggaaattaggcatggtggcacgggccctgtagtaccagctatttgggtggctaaggagggaggatcacttgagcccaggaggtggaggctgcagtgagctgtgattgcaccactgcactccagcctgggtaactgagcgagaccctgtctcaaaaaagaaagaacaaataaacttactttttgagatgtgtgaaatgagattctcaagtcagttgagtgatgaggatcatcaggtcttgaagccttgtggaatattttgcttccacctgtttttctcattttcacactttacaa

SEQ ID NO: 57919 - DNA, 3280 bp, Homo sapiens
gactgggtttcatagaacatatacaattaaaacaatgctttggtccttagttgatgttattcttggtaaactaacaagaatgtgcttttgtgacactgatttctaattggttttgtctgcagggagttagagccaactttcgtagcctctgtagagcatatactttttcattttgctaattatcagatctcaaaatgacagcctttctataattagaaggataaaaacagtattctaatatattaaatatgtggatgttaatagcacatcctctacagagtgaattttcctggcattttttggaaaaatcttcagcatcttttgaaagttgttctcacagtggttgactttattttttaaacatttctctcagttaaatctgcttttagttgttgttaagttaatgctggcactgaggaaaatgtttacctgatgtttctcaggcctctgaggattttgaagcttcaactttctacttaattgccttcctaaggaatacatttttgagtcctaaggaaactaattcaacttctttttttttttgagacagagtctcgctctgtccccagtctggagtgcagtggtgtgatcttggctcactgcaagctccgcctcccgggttcacaccattctcctacctcagtctcctgagtagctgggactacaggcgcccgccaccacgcctggctaattttttgtatttttttttagtagagatggggtttcaccgtgttagccaggatggtcttgatctcctgacctcatgatccgcctgcctcggcctcccgaagtgctgggattacaggcgtgagccactgcacccggcctgaacttttaaataataaggttcttgtactttatcttgtaagggttaaaataaaactattttcaagtttttttgtttgtttttgtttttttttgagacagtcttgctctgtcgcccaggctgcagtgcagtagcatgatcgtggctcactacaggattgacctcctggattcaattaatcctcccaccccagcctcctgattagctgggactacaggtgcatgccaccatgcctggctaacttaattttttttttgtagagacagagcctcaatatgtttccgagtctgggctggtctcttctcttttctcttctcttcttttcttgttagacagagtcttgctctgtcacccaggctggagtgcaatggcgcaatctccactcactgccacctccgcctcctgggttcaagtgattctcctgtctcagcctcctgagtagctggttataaagaatgagagaggtattttatcaggcatgcgccaccatgtccggctaatttttgtatttttattagagatgggatttcgccatgttggccaggctggattcaaactcctgacatcaggtgatcctcctgccttggcctccgaaagtgctgtgattacaggcatgagccatcacactcagcacccaggttggtcttgagctcccaggctcaagcagtcctcccccttttggcctcgcaaagtgtgaaccccactacacctggcttactttcaagttttgaaagtaaaggaaattaaaataatctcagtgaggaatttatatggaactgcatgtaatctgcaaattcttattacatctagttagtatgaaaaggctgttttatgttagaaaaagtgatttatgatcagttttattgatagggagtacaagttttactttttggccagcttacattatattccttttagacacttaagcatcaagttaaacattatcgcaatgtttctaagtggggatttggattatttatttgactacataatttgaggattatttttcaaaattttcaccttagaagctttattatgatctgttgtatttacctttcataatggcttcccctaccccccatttaaaagtcatggcttggcttctgccatgcctcacacctgtaatcctggcactttgggaggcctaggtgtgaggattgcttgagcccaggagttccagaccagcctgggcaacatagcgagacctcatctctacttaaaatgaaaagaaaaaaaaattcgtgtcccattgaggtcagactttgccaaaggtattttagttccgtatgatagtgaacattacaaataaatttaatttttttattggagtctagttttgcagctgacagtgaatgtcccaaaactgaatgacatttatctcttctctcattctttataaccagaagagatgacagagtttgtagtgatccatttttcatgcaaaaatgatcttctcaaactatttctttagttttaaacatatttatacccactgtatgagcatccttattgacagatatgtactaatttccatttgatgaatcattttcaggattcattttagctttatgctaaaataagtatattgtgtatatattcatacatagaagctcattttaatttgtaaaactttaatatacaggcttttgagaacatcaaatatctttataattgtgttttggtattagaaggtacattatctgatcaatcagggaataacattatatatcacctgtaagtcttagttgttaaaattttcaggccattttgaaagtatgttaagactaaatatttgaacatttacttctatattctgacacattatttttcatatgcttttgatctcagcttaacccagatcaattcatttctgaaaaccaacagcttttataacacactggaagcaaagctctgagcaatataaaggcttcctgttagcctaccatagaatatcaagaagcagtgtgatttccttttgctaggatgtgttctgtataaattaaacacattactttggcttttagttattgagctaaacaaaaataaatcagactttaatctttttcacttgggatggaggtattttttaactttaacaaagtatagtattttttaactgacatttaaaacattaaccataaaaaggcagtacaactatgttaaacatttgaaggccttaccgataattacctttgctttttagcttaacattttatcatgcatcaccggcgggcatttttattgaagtctttgttatcactaaaacaaaacaaaatttcatttatgtatttattttagagctaggttcgtgctctgttgcccaagcaggagtgcagtggcacaatcatagctcactgtaaacttaagccccctgggcttaagtcatcctcctgccttagcctcctgagtaggtaggactacaggtttgcaccactatgcctaatttttacattt

SEQ ID NO: 57920 - DNA, 1033 bp, Homo sapiens
actactctaatcacataaccccagaaacaaagaacaaatccctatcaagcccacataattacaaggtctttaaggcaggatcctcccaattttctgtggttataccaactcatcatttggtgacatttaaaccagatggtaatatctcatccttgccaggctttaacttggaagagatgggaggtaggagcccttaggatttgtattctgttatctttataggacagtggggaaaggggtggatataagagaagtttatacagtgaaatttgagtattacctccactttgtaaaattccaggtctttagacttttgcctgtctcagagaggctttcatccaatatgatgtattttggacaaattgagaacagccaccaaattttccagtgggaggctggcttcagggatttgtggtagagtatgggtttggggtttttaaaaattgtgcttggtagcagcccactcttctgggttcctctataactactgtttttctctggtaaccttgtggcttttcccatcttccatttctaaaatatatttttgatttatagaatatatagttgctcatcaagatttttttgacaagaacaaagtttagaatttgatttaggattctaagataatttggttttgaggggtaacattagccagctaggaaatgaaaacttcaagagaatagagattttgtggaaagaatagagtaggaatcaaaatgttgggtttctggcatgtgttccattatttccatgttatccttgagctcctaaccttaaggagggtcatgactattttcagagctttattctattaacctatctgtaaaatgggcagcttaaaatatcagcccttctttacatagtgaggcccaaagagggaaggaatctagcccaaatcctggtggagccagatttgaacttaggctgtgcaggtcctcagttactgctctgaactactgcattgccttttatataaccatagtaatgatacaattgtgatttcatgagatgattaatgggaaattatgaatct

SEQ ID NO: 57921 - DNA, 1068 bp, Homo sapiens
aggctgaggcaggagaatcacttgaacccagaggcagaggttgcagtgagctgagatcgcaccattgcactcaaacctaggcaacagagcaagactccatctcaaaaaaaaaaaaagaggggactactctctacatgggtttacctaagaggcaatgttatgaggtccaataacagaagatatatttgaataaaaaactaggaaatttaagtttatatgattacataggggtcctaattaactttttttttttaacataagattgtctaattgttggtaaataataaaatatagggagtaaaatacagggagtcagtcttggtgcaaggtgaagattgtctaattgttggtaaataataaaatatagggagtaaaatacagggagtcagtcttggtgcaaggtgaggccacagagctgtaatgggcctgaccagcctcgcactgtacaagcaccaatctagagctaggactgaagctgcaagatgactgacaggactctgggggcattagctccctccaacaaatggtggtctcacgtttcaagggctgtggtcacctccttcctcgtgacacccctggacatggtggaaggtccatttgcagcctcagtgcccgctggtggccagtgagctgacaccttcctccagacttcagagcctctcttatgccaagctgccctcctctctccaatcctgtactacaatggtgtcctggagcctctgtacctatgaccaaatggtccccgctgtgccacctggttttaagaccctaccagcttcactggcaccttggatgcctctgtgaagattctgaggcacaagggcaccaggaccctgtggagtggcctcccagccaccctggtgatgactgtgccagctaccaccaactacttcactgcctacaaccaactcaaggcctgcctgtgtggctgagcccttacctctacataaccttggtagctggtgtgctggtccaccctggcactatcactgcaatcatcagtgccctggagcttatgcagacaaagctgcaggtttagcatatgttatactatgtgctggtacctgt

SEQ ID NO: 57922 - DNA, 1059 bp, Homo sapiens
actgtgtgtatgtatatttttatttatcacgtttttttcttttttaaaaattactttttttttttttgagatggagtttcacgcttgtcacccaggctggagtgcatgcagtggcgtgatctcggctcaccgcaacttccgcctcccaggttcaagtaattctcctgcctcagccttcctagtagctgggattacaggcacctgccaccacacccggctaattttgtatttttagtagagatggggtttctccatcttggtcaggctggtctcgaactcccgacctcaggtgacccgcccacctcggcctcccaaagtgctgggattacaggcgcgagccaccgcgcccgggttaaaattacttttcaaaagccagttcctctattatgtaaaagaggacaggaggggtattttctagattttaaaaaataggtgggtagagtcttcaatctagttacatcatgaccttggacaaagtcatttttctgcaacgtatgcttgtcatctgctctaaggggatctgacactgacctagggctgctgtccagactaattaattgatggattgcaaggagcttaaatcccaaagctttatttgctcattgctaagaagagtctggggacagatttagtgagacaagggttagtgccaagtacacatccctcattttcccatatagtgaagggatttccccttgtcccccggggacagagtcttgctctgttgcccaggctggagtgcagtggtgcaatcatagttcattgcagccttgacctcatgagctcaagccgtcctctcacctcggcctcctgaatagctgggaccacaggtatacatgccaccacacccagaattattatttttttttagggacagggtcttgctgtgttgccgaggctggttcgaactcctggccttaagccatcctcccacctcagcttcccaaagtgctgggactacaggcatgagccactgcacctggctgtgaagggattgttttctttttttcttgttttgttgcccaaactgtaatgcagtggcacaatcacagctccttg

SEQ ID NO: 57923 - DNA, 1070 bp, Homo sapiens
aattgtacacttccacaaattcattcagaaatgtttctttttctgtcattattagatgaattctttgaatttgctttttacaaccaagtttatgaaccagattaatgaagaaaagatgtctctaggacagtgaggcatttcagttccataattgtaggatgtttggaacaaagatgcagaatttgactggaatgcattcttttaagtcctctaccccccaccatgatttaagacactcagtcctttaactgtagaccatccttcttaaagcaccatcagcatatatctttacacatggccttagagtcatcccatatgtgctgctgctgctttttttttttaagcatttaagctttctttcggatataaaaactaatcattttgttctgccagacccgtcacttcagggagtaaattaaaaaattttattacaaaaaatgtgaagcatacacaaaagtgtaaagaatagttactttagctattttcctggatagaagagcagaaagtggagtagcagcattggagttgagacaaaactagggatcttcatttgtaaagaacagcttagcttagcttttgtcctattcaggttataagtgacatttgggcaattatgaggtgagctttctagccttcagtcagtgatggtcattttgcccaattaggttggggatagtatttctcagttttagtcaatggctttgttgctttgttacacatttgttgggacatgtcaagtaacttgaccagctgcaggtctgttggcacatggaggtgttggagtcggttggtgggtggaggttagtctctgctaacatcacttcatttctttatctgttcatttttgtattggccagactttatctgaactttcttttcttaggaaggggccttctggtcagagtgggtatttagcctgacaaaacagagctgacatcagtagtaaccaagaaacagaatgatgttctagccaggcatggtggctctcacctgtaattccagcactttgggaggctccaggcaggaggatcgcttgaggtcaggcgtttgagatcagcctgggaaacata

SEQ ID NO: 57924 - DNA, 3719 bp, Homo sapiens
ggtcctcgcctccgctcccggggtgcgggggtgtgtgatggggtggggtgggggtgggggacttgcgagttgtcgtgcgaggaggaaagttttcaatatggcggcgggagcccctggtcctttgtgtggtggcggcgtcggcccggagcggccctcacctgggcgccccaccctccagaccagggcacccctccaccgcctggtccccgggcctccaggtgtcccccgggccggggtcaagaagggggcggccagcgctggctgggggcggggaggagccgcgggtccagccccggagcggatgtttgtggggggcgttagtgtctgggggacacttttggggcggcgggggcaggacgggcggcggtgggccccgatgcccgcccgcgctcccgaacgcgcacactcccggcttcttctggctcagccgctcggctccccggggaggcctgggctgtgctggtggggatggggtccgggcgaggccgtgtttgtaggggaacgtcagacggagagacctccgaagatttcgtgctcgtttcccccggccctcaggctccgggcactgaaaggcagtcacccaccgcagcccttccagccctgtctacagcgcctcgggcctgggggcagtgagtgaggggtgggtgttgctgaaaccatccgtaacggctccaacgttcgctgaggagagcccggccaactccttcctccgtggccggaactgggtgcgctcctacacccctgttttttttgcccacctttcgggagggtctgagtccgagttggcctaagcggcggttggacgggctgggaccgttgggaagcgggtttaactgcctttcctgctgtttaagaatcttctccccactctcttcccccacccccacttctaagtagaggaagaccccttcccacccctttctcccttaagcttgctttttgtaatgacattttgagttgtagggattctgtttgtaatcgttatgttttggaaagctgttttcagggagatccctgaaaataaggcttcttaacccttccctgccccaaattaaaacacggacacctactttagtttttcttaagcaagtttgaaaatggagatgaaatacatgcttcagaaaataactggccagcgaatatgagggaaatgtttgaaaatagatccatttcttacagcgaagtgggcaaggttgattcttgctgcttaagggaagtacgtttctcttagtgcaaagaggcctgcagaagttataacagggctggttagagccaaggttttaattcttgaataataggtcatgtttcacactgtagtaatgtagcttcatgtcacatgctaggaagggtgaatatgaatattgcacatttgcataatgggattttattcagaaattgggtaacttgactaagttcttagtaaccaaaacgtggggagtcaggttcctgggaggtgtcctccatgttggtattgtggtataccagggctggggtaaatcctttatcttgttttcttgttctttgccttttagagggccctttttctgaaaagatagtgttgctctggttaggcttggctacccatttcctcatcttggctagaatattaatggtaatctttgcaaaatgtgtgatcgaattgcctttttctcactctgaatgtcagacagacatgatggccaccattttgtattgagagtgctacatagtacagcctgaggaaaggggttaaagaggcaccaataatctacaaatacaaccagtactctgtttggagacctcctttgtgtggaggggacttgcttcctcctttgtttaacaaactcctttgccaaatggaaagagtttgagagtatttgttgttgatataaccacaaaaagggaaatctttccagaagttgtagctcttgaagaggggtcttgttggaacaaaggcttcttaagagatgtaaacagtctttgttttagaaactgttttgtttttgggaaagctaactgtgaacaagtggtttcatatagttgatatatagcaacaaaaaaacccttcaagaagtgtgaaatattttccatggtgatatatataatgtctgtatttctggatgatttttgttcaccgagtttttggaacacaaatggttatattagaaggggaattggaactattggtattttacttgttagaaggtaaggagaagtataaaacatttctgtctccttttgttcttacctttgtatctttaccaatggtacttaatatagtttcagtttatagctgctttctcagtgagactcccaaactgcttggcttctgaaaacttagagtacttacattattttgtatatggcagcttaggggttctcagaaatttgaaaatatagtaagataaatgtgagaaaacgtgattaagtcaagaagactatacttcaaatctgagtttgaagtttaatacaaacctttgtttcaaattatatcaactatgtaggataaccaggcttgttttctggaccaaaaccttcttaaatttacaattcatctggcttctggttttgtcacctttaaaatgcaaatttttaatttcctccatgatactgtacttagatgtctgtttaaggacaaatgatatttttccatatcactttgtggtatttggagatgagtaattttaagggtgtaactattaggcagaaaaatagttggctgctcagtaaatacttttttgtctcccaaattttgataggaatatatttatggctttagtaacttattttcttgctttcaaatgtctcacatttggccatagatagattccacaaatttctttttttttttttttttgagacggaattttgctcttgttgcccaggcctggagtgcagtggctcatcacaacctctgcctcccgacctcaggtgatccatgcgcctcggcctcccaaagtgctgggattacaggcgtgagccaccgtgccgggcctagattccacagatttcttctttgtgtccggagaaggtttaaatcaaaccccagaggccacaagagacaaaaatttttcagctttaacttcttgtggttactagtttgattccttcatctttatagccaagtgtaaaactgcccttaaatgttttaatacagtcaccatttttgagtgagcctgttggttccactcctagagaagagggaggaacttatacacttctttgtatggtagaagtgttaatgatatggagctcatttactccctttccagcgtatcattctccctaatttggggtttgatcgacttaggcctaaccctctctctgttttccctatttctttggtgtcatgaaatctttccctacttgtatctttggccactttaagcctttaacgtttagagaagaggcttatcagtagaaacatccttgagcaaaggaagaacttataactacttaaaaaaaaaacccttttattgaaatataccatacaattcacgaatttatgatgtgtaattcagtggtttttgatattttcagagttgtacaaccatcaccacaatcaattgtagaacattttcatctccctcaaaagaaaccctgaactcacttgtaactactttttttttcctttttttaaattatactttaagttctagggtacatgtgtacaacgtgcaggtttgttacatatgtacacatgtgccatgttggtgtgctgcacccattaactcatcatt

SEQ ID NO: 57925 - DNA, 1038 bp, Homo sapiens
cgatgcaattagaacagtgcctaggatatgaaagtgccccaaaatgttacgttattattattattactactattgccttctcatgaacatgctatgtgtatgttcaagctgttatctctactggaaaatccttctccgtttccaatactctttccaaaaccccctcctgggttttactgcacctaccattgtgtactgacgtgattgaatgattggcttatgggactgatcctttctaccagacttaacttcttcagggcaggaactctgatacatagtaaatggtcaataaaagttggctcaactgaaaccctaaggataaactccatccacagcggaaggcgcggccccgcccgattcgggggcggggcggggagccgcgcgcggagggtgggtcgatgggggtggggtgggactctttttcctcgccgtggcggcggaggcgcacggcgtgggcttgcggcgagacgtcgtcgtcggaggctgaaaaagcccaaggtgctgccgttgcccgtacaactcggacttgctgttgctcgagccgcgtctgcacgggtctcggaccgagcggagctcgcagcctcggtcccggagcccaccttcgcctcgcccttgcccagcctgcggtgatggaggcggccaccacactgcacccaggcccgcgcccggcgctgcccctcgggggcccgggcccgctgggcgagttcctgcctccacccgagtgcccggtcttcgaacccagctgggaagagttcgcggaccccttcgctttcatccacaagatccggcccatagccgagcagactggcatctgtaaggtgcggccgccgccggtgagtcacgccagcaccccggatccagctcgtggctgggggagggagcggggacgcgcgggtccggggaggcccgaggcgcggggggcggggagccggtcgccccgccggcctcgtcaagtttggggctgcctagaaggtcggagttgaggccgggggaggaagacgggggcttctccagggtgggagatgaggagcgtgggag

SEQ ID NO: 57926 - DNA, 1012 bp, Homo sapiens
caccagcacccctaatttgggtctctgggctgaggggcccctggcagcatgctcaatggccttggatagctggaatgtttggaattgcctgcatcttggatgaaagtcttaacaatagaatgaaaactgctgcaacactgtgtcagcactttacagaccaccactgtaaattcccagttgaaactgggaatttggaattccatgttcaaccaaatcatgctgagtgcccagcacagcgtctgacacactaaatgctacaggtgaattccctttttcctctttcctggcaggaagcggggataggggaaccactagaaatactgtaataacatgaataagacaaggccattagccgggagcaaatcatagaacatcagccctgtgaaatgagtggtattagtgttaccatttttcagatggagaaattgagactcagaaaggttaattagccaaaaatcacacagacagtaatagcagagctaggaaaagaatgttcatcctagtacctaactttgatcttcccaaaacaccaaactgacttctaaagctgaagaaagaggacacagaagcttcatctcagatctcaccaccagctgccccttaatctgccaacatcgaaccattctctcccctctagactacagtggcttcaaactttgacttatctccagtatttttttgtacatagcaatagcaacaaaagtttcacaaaacaatattacctttgtatggccaggcacggtggctcatgcctgtaatcccaacattttgggaggccaaggcgggcagatcatgaggtcaggagatcaagaccatcctggccaacatggtgaaaccccgtctctactaaaaatacaaaaattagcctggtgtggtggcgtgtgcctgtagtcccagttacccaggaggctgaggcaggagaattgcttgaacccaggaggcagagctgcagtgagctgagatcgcaccactgcattccaacctgggcgacagagcaagactccgtctccaa

SEQ ID NO: 57927 - DNA, 1046 bp, Homo sapiens
ttttcatttccctgaaaagacaatgtaccaataagtagtaagataaagcaggtgaaggctagcccccagttccatcaggagcatgcactttcccacctgcttccgagccctgttggggccgagagtccccagcacacgcagcatgaaacctacttgccctctgagtctaagcttggaagagggcaaagttaggaaggggaagctctaaataaatcacaatataacatgacaaatatgtgtagaaatgtgactaaagtccagaagcagggcaaacctgcggtaaatggcagtggattttggaggctgagtcagttggccagacagaccaggaaggaacaaggcggggggaacagcatactatctcagaactgtaacaggctccctaatgctggggcttaaggtgaaaggcagagtggtggaaaagagatgaaaactcaacacgggtaggctgtgtgtccatggaacaggaatcttctgaccaaagtgaaaggtttgtgccaaagagtgagagggactcccccagcgcgtaaacctttgagggcagggtgtgtgttcatcacatgccgcgcagtcctggtcccccatcccatgcatacttgggtactgagctaggttgaacccagtgggaggcaggaagataggaattggagccccagcttatggtgggagaaagacggtgaccacttaaagccttagatgtctgggattagaatccaagggatggtaataaatgtagatgattctcatatccctggcaccttcacagtgaagctggctcattagccagggagagagggaacaaagttagaaaccaaatcctagtgaaagttcagggtgtcgagctgggactgtctctgcgtacttcctggggcactctgggcagcctgaggagcaggctggggggctgttgatgctggcttcaccggggacttgaacacctgctcaaaagaaatgtggcaggactcagctaaggaggctgtatggaattcccttgcggacaggaggaatgcggaagctgacagcacgtgcttcctttccccacccct

SEQ ID NO: 57928 - DNA, 1045 bp, Homo sapiens
acctctgctctaggttgagaatgacattttattgtgaagatgggtgtggtccctcttcccttgaaatcttgtagtttctttttatattagctcctcactgctacagcctagaaggtgagaagcagattttaaccccatctggcagccattcaaggaaaacccagccctggctgtttactcaggctctcttagaatgagagtggagggtgtaggatatgagggttaggcctttgccacattatacaaaagtttataatttgccacatctggacaagtaactttcttcttttgttcataggcaagacttctttaatggatagtatcatttactgaacctactgggcatggtcctcatggagttttggttcaactggaatctctgtgccaacccaggatacaaacttccatccagatgcatggatacaaatttccatagctccggggctgctctaacagtttgatatcagcagacgtgtttaagccttcaacttgatttccaattattccatcatttctattctgaaatgactcactgtcgtagaaggaagtttattatataaccaaggtttcaggtatcctcctgtcaccacctctactattcaggaggcctaaaattgaaataagtactaaacagaaaccttaccatctgaagtcccttccattgttttctagttgcttcctcattcctttacccccaaactttctaagggctccccgactgcagtgcaaggtggccttgggcacagttttgcaaccaacctactcccctggaaagatggcttccttctccaattagcctgaatgagctttagtaagcaattgagagaactgtgtttttccgacaaacggtcacatgtccatcgttatggcatgtgcagaaaaacagagttatccacacaagtcaggagcaaaacccaagtagatgcctctaggggcacatggcccctcacatcacaagccagaacctaagctaagcattttttaaattgagtttgagactagcctgggcaacatagtgagaccccatctctatttaaaaaatgaa

SEQ ID NO: 57929 - DNA, 1768 bp, Homo sapiens
gacacttgccaccatacccagctaattttttttgttgttgttgtttttgagacagagtctcgctctgtcgcccaggctggagagcagtggtgtgatctcagctcactgcagcctcaaccacctcctgggctcaagcaatcctcttacctcagccccatgagtggctgggactacaggtgtgcactaccacagcctgctaatttttgtgttttttgtagagatgggggtctcactatgttgcctaggctggtcttgaactcctgagctcaggcaaccctcctgcttcagcctcccaaagggctgggattacaggtgtgtaccaccacgcctagccctggctaattttttcaaactactttttgtagagactaggtctcattatgttgcccaagctaatgtgcatttaaaatatgtgcagttcatatgtcaattatacctcaataaaactatttaaacaaaatacagtgggcagtaagtaaagctaattcaggttgtttggttagagaagacctcctgagaaggctatgtttgagctgactactgaggaggagctagccataccaagatctgagggcagaacagaccaatgctgtttgaggaaggcaagaaagccagtgtgcctgaagcataatgagccggggaaactaggaccatgtggggcccatgttgaggacagcagtgaaaccgagttcccagaccacccagctggtgcccctctttcatttctcttaagaatcaggctcacgcctataatcccagcacttcgggaggccgaggcaggcagatcacgaggtcaagagatcgagaccatcctggctaacacggtgaaaccccatctttacttaaaaaaaaaatacaaaaaattagccaggcgtggtggcgggcacctgtagtcccagctactcgggaggctgaggcaggagaatggcgtgaacccaggaggcggaggttgcagtgagctgagatcgcgccactgcactccagcctaggcgacagtgggagaatctgtctcacaaaaaaaaaagaatcagggcagagaccagaggcaaagaagagccacccagcatcatcgtctacagcttaatgagagggcttctctttttttgtcattcctgctagggagcaatgtgaagtgtacctagaacgggggtgttgatggaactgggccagttcaacttctgcgttctttatgttctttcccactgcagcttttccttccctccatgagaaagaagccagctctgtctgacggcagcaatcctgacggcgatctcctccaggaacactggctggttgaggacatgttcatttttgagaatgtgggcttcaccaaggacgtgggcaacatcaagtttctggtctgcgcagactgtgaaattggaccaattggctggcattgcctagatgacaagaacagtttctatgtggccttggaacgagtttcccatgagtaactgaggggaggggtactcagctccatctccaaagataaacctactccccacaagaactggcctttaatgtggtataactgttccgctgccttcttgtctgtgctaatataaatactgagtaccagcatgtccatttgaacatgcagagggttaatcctgcttcctaaagcctcaagtacatgcctcctgcttagttcactttgtatcacatttcctaagctcccttttcccccagttttgggacactgtgcttacctccaaaaatctcatctcttccctggcattctccctaggctctgttttgcccaggggct

SEQ ID NO: 57930 - DNA, 1516 bp, Homo sapiens
acgagccgccgcagtcagaatctgaaccccggctcttcaatttccggcaaccgcgccctcctcgcgcggccttaagccccgcccctcgggcctcagctcggcgaggctccgcccctggggccgctgaaggctagggagggaaccgggtcccgccccggcatcttttgccgcgggaacccttccctgggccacccggcccagccagcccggccctctgcccccgggggggcttcgagcgcgggccgtgcgccccgccgccgtccaaggccggtgctccgcgggcgcgtggaagggaggcgccccattccggctctcggagctcccgccagcttgcaggacccggcaggtgcctctcggccgccgctcaccgcgggtgttgctgggttcctttcccactttagacctcacccgccagtcctgaattcaccgtctcatttatgacgggcacctatctgctccacagaggatccccaggaacaactggtgttggggacgcggcaaaataaccctggtaacctacccactttaccgaggcactggaagcctgtggttttccagatgaatcatatttcaagtgcagtagatccctgacgtcctggaagtaaatttcgaagaaaaactttttttttcccttcagtttagggattttaatacccttcctaccaccatcatcgcaagtgagaaagttgaaaaaaaaatttatttcggtaaactgtgttgaagtgcaaatataatgtcatttcaaccatagacacatcctatcattcaaaattatttctaaaaatatgcagatcattttattatttcacgtgcttgaacagatggtgaagtgtaatgtctagtagaagagcaagaggtacccattcgtccaaaacagcctttcatcaaaggaggaaaaaagggaatctgtgtctgttgttttgtaggtattttgatgacttttgatctagagattggtggaggtcccggggttcttttaagacttcaaggtttaggagtagagttctcaattaattttacgaagttagtggcattatggagtcagtggaaagaacatggatcttggaattgaaacatacatggaattgagtcctgactatcattcattaacattaaaacagttaggctgggcgcggtggctcatgcctgtaatcccagcactttgggaggccgaggcgggcggaacacctgaggtcaggagtgtgagaccagcctggccaacatggcaaaaccccatctctactaaaaaaaaaaatacaaaaattagttgggggtggtggcacaagcctgtaatcccagctactcgggaggctgaggcaggagaatcgcttgaacctgggaagccgaggttgtagtgagcggagattgagtcactgcactccagtgtgggcaacagaacgagacaccatctcaaaaaaaaaaaaaaaaagttatttaacctccatgagatgcaggttgctattgtgtaaaacaggggtgtccagtcttttggcttccctgggccatattggaagac

SEQ ID NO: 57931 - DNA, 1040 bp, Homo sapiens
gcagtgatgattgtacttatttgacacatactccccgtcgtcctggttcttgttcctgagaagggtgggtaacagatattccaggaaaaagaatgcacattgaatggatgtgagagaccacattgcctctcccactgctttggggagcactttcctgtcatttctaacttaccacatgcttggtgtactatatgtatgttgtgcctcatatgttgcaaagaactaaggtgagtatagcctactagatatgggcaatatccagcctagatgattggaaagataccagtttaagtaaacttggtaaaatccaagtctttttttttttttccaggaacaactacattttctcatatacaggtagctaggggcaacacagttccattctagagggaaacaaaagggagagccccacaaaactttggggacaagggagagagagactcatctgacacttcttttggaggtcaggatttgtatatcagaattgaagttagaattaagtgaattaaactgaatttgattgtgagtgaacctagaacagcactgaagtattacataacctggaagactgagaagggtatattatttgaaggatctttttatttccccgaggtctttcgcactggagacagcataaaagagtgaacaaatgttgggatgagagaagatgacatcaatgtgggagttcagtataactggggataaactagaagaacctgtgattttacagtcatcttattacctgccagggctcatctagccatggcaatgtttgccttgaatgggggtgaaagcctttctttgttggatcaaatactactacactattacacttccacactatttatttggggatgggctgggagtgacagtagcctagtagttcagctacctgattactgccccattcttttagaagcacatgtctgccaaggagtggtttgtactgctgtgtttggtacatctagtcttttttctgctataagttttccttacctgtcctttagtgtagattttattcatcacaggacagaataatc

SEQ ID NO: 57932 - DNA, 1507 bp, Homo sapiens
cctttttgctttcagaaatatcagtgtaatagaagctgttcaatattcatggatgtttcattattgactacaaagttggcaaatcaagttccaatgtgctgggtggggaactggcactagttgtgtttttgcaaactcctaggtggtctttgaatgcttttaaggattttgttttaccccattctttttagatgtcttccttgtctataaaacttaattgacttatctcatttaaaaatactttgtttttgctctcagacttttaaaggacccttggaaaatttgtagaggaaagagttcttagaaatctctcattctctaatagtctgtaatttgtttattctgagcagatatgatctatgtctctggaggctttgatggaagcaggcgtcacaccagtatggagcgctatgatccaaacattgaccagtggagcatgctgggagatatgcagacagcccgggaaggtgccggactcgtagtggccagtggagtgatctactgtctaggtattgagtctgggatgcaggaatgggagggaactcaatgggtaatgggctgtgggtaaggattcctttttaccaaaatgacgttcatagacttcccttcaactaaaaccctggtgtgtcttaatatattttccattaattgggattatctttttcttataagcataatgtcagatttctcttagagttattggaactcttgtgggaaaattgaaactaaaataattagttgaagcactcagaaaaaaaccgaccaggaatgggcatgaggatttaccactctttctggaatggtctctgtcttccaggaggatatgacggcttgaatatcttaaattcagttgagaaatacgaccctcatacaggacattggactaatgttacaccaatggccaccaagcgttctggtaagaccagatctgagggaggggacaataggcgatgctgtcagacctttacatatataatggtggtgcatgggacaaaccgtagattaatgtaaaaatgagattctgctctcctccttgtctctgttttctctaaatactaggataaagacagttgatacttacaactagattataaatttgaaagcaaaagccttcatgtctttgttctctccctacgttttagaatatctagtacaattttgcctgtgtagtacatgcttaataaatatctgttaaataaagtctctaatgcataaggacaaaagagtagctacttaccttcaccaagagctttttgaagtggagcaggctgggatatagaaaaggagagagcactgtgctgttctagtttacttactctgggtaaaaattgcttcagaaccataatcacaactcctttccctccatctacctttattgccacctttttttcacttcctccctttctcctaattagaagggttgggctctgagttaatgaaagtaaagaagagaaccatttttattatttatcttttatcatttcaagtccaagccaaagggtttata

SEQ ID NO: 57933 - DNA, 1040 bp, Homo sapiens
tccctggaagggcatccaaactatgtaaaaatagttaaatgtaagcgctgcgatagatgggaaatactgctcaacatatctgtttatatcatttgatttttgatccatctagtatgttatctatttttcaagtaaattttaaaaatcatttctggaaaccgagagcatggttactaccagcaatactcctggaatcacagggctttgcaaactggttttctgtagtcagaagttaattatttgcatgtgctctttgtactcttatagtattacaggtatccccagtgcctaactctgctgtctgctatatttcagcctttcatccgctgtagtttacaatgcagggatctggttgatgaagcaaagaagtttcatctgaggcctgaacttcggagtcagatgcagggacccaggacaagggctcgcctaggtaagctggtatctcggcagaatgaggggatgcttttcaactacttcttgcaggtgacaacatagttgaaaataatactctataagaagtacagacacctcgtttcagaccttttcttctatcatctcagacaagtcactttaccactctaagctttctttcctataaatcaaggatgtcttctctatctacttcacataattatttggaaattaaatgagataaaatataaaagcactttatacattgtcaggcattacataatatgttacaattttttgtcaatattatttagattctgtgaattagagataattttagtgccacataatggcaggtaagtagtatatgcttccacccacctcttcacttccccttatgtggtttttccattccggaatgaagagaggaagaaaaggagcccagtgtggtagaaagtacatgggttttggcagttactgttggtgcaggtaccagtttacctcgtactagatttattaacttgggcaggaaccttaacctctgtgtgcttcagttgcctcatctgtaaatggaatcatcgtagcacctgcctgtaacattgttatgaagagtaaataaagttatttat

SEQ ID NO: 57934 - DNA, 1030 bp, Homo sapiens
gttagagaagctcctgcttcagaggcttgggtgaacagtttgaggggtgagcctggagatcattagataacaattatgacttaaaattatttcaagagctgacttcgaataaggcaacagattcccccacctgccttccttaaagttatagagaagaccagaagcaattcaggaatgggaaaaattctgaaacgaaggccaatacgtgactggtgatttattaggtactatctatcttagagagagagagagagagagagatacatatatatatatgtgtgtgtgtatatatatatattttttttttaacccaaattgactataattcttttcctggtctgttagctgtgtctgaaaaaaattgttttcccaagagcctagctatttctggaagatgggaaataatggtggtgggcaatgggaagcaggaaggaaaaagtgaacgtggttacgttttgagatggtgagctaattggaaaagtaggatccacggtgtgtaattatacatttacaggtggattctgaagagccagtctttgaggctgtcatcaactgggtgaagcatgccaagaaagagcgggaagaatccttgcctaacctgctacagtatgtgcggatgcccctactaacccccaggtatatcacagatgtaatagatgctgaggtaagtagtgcaacactctcaggatccaaaaccttgacggactcttaccttagtgttatgtattcaaaattgagtattttaatgtaggcacagagtctcctgttttgcctctctaggaatgccagtgagagtggtgctgggtagtccccaagcatatttctaagaaaagcgaatttcttggcaagtcaggctcttgacacaaatgaaaatctgtggttcaattttgtgttttgctgtctgttttacatgcctctgagtgttttatataaacacttgataataaactttgtccccttctccattaaacataaattgttccaaattgcccttatgccacacttagcaagcctcttcatttttgacttc

SEQ ID NO: 57935 - DNA, 1328 bp, Homo sapiens
catcttctataccctcccctgcatcttatccaacaattgcctgggttagtttaacttcccaagtatttctccagtggctcaccactgccacaactatagtccagtaagcaccgtcaccttttgcctaatgtaccagagcagcatctaacctcttctagctcttggccctttaaactgttctacccacagtagccaggataatctttacaaaacatcaatatgatcatatcactagcctgcttgaaaccttcggatgatttcaagttgctctgagagtcaaatccagtattctaatgctctctgtacctggcccttgcttaactctccagcttcatattttactcctctatcaccctcattcactctgctacactagccttctagtcatttcctcaagctgccagttcttttttgctgtagaacagagctgttcaatagtacattctatgaagatggaagtactctatatctatagtgtctggtttgctcccgctagccccgtgttgctgttgggcacttgaaatgtggctaatgcaactgagaagctgatttttaatttagttttaattacggtgaatgtaaatagccacgcatgggtagtgtattggacaatgcatttctagtgctttttagtgtgctcttctgtctgcctcggagtactctcttactccccctggctaactgctactcatccatcagatttcaatttgttgcttcttccgggaggccttccttgcctcaccagtctaaactaggaaatctcatgttgttctgtctcatagccccagtacctttcctatgtagtatgcaataatagtgagattgttcatttttctgatttagcagtttgactccccatttaagagcaaggatcatatctgatttgttcaccatatctgatttgttcaccattgtgtaatcagtttccaggacagtgcctggcagttaagagtggggttcagtaaagccctcaaatgaatgaactttgtgaaacatctgcgtttttagagtatcacagttcttaggaaaagttttttttatctattcacagtgacactctgaaaggtatctcccagaatatgtactctgtaggggctggtagaaggggcacaggacctctattcaggtgtctgtctttgggaagtcctaggtgttattatatacctaagtccttccagtgatgtagtgtaggtttttttagagtgtatctcacattatctaattggtcatatgtatgcttagatctaagttccccagatgattaattaaatatatcttctcaaatagcatagtgcgtaatacacagtagttccttgaaggctaattga

SEQ ID NO: 57936 - DNA, 1031 bp, Homo sapiens
agaatgctggaattataggcacgagccaccgttcctggtccccagtttttcttttttaacattcagttatgttttcagtttttatatatacataattgacacacttttagtttttaatacatgatttaaacagtgtgaagcttttgcattagtgcatagccataacattaaaatactctgaacttttcaattagataaatatgagatttgttattactatcttctccttttctttcactctagtcttttagtaagttttcatgtagagtagaaaatggatacattatgctgaattcgcaattggttttatagtttgattcccaagagttttataggcatttttgttgaattgtgccaggtctctggatgtgattcatcttgcaatactcattttaaagattaagcagagacaggtgtaaaggtcttgctgaaagtggcacagtacataagccagaaatagagtttaagttccttaagcatagaatttctaatctgtttcttaggtgttgaaacaagggttcatctgataacatgtagagaagatgctgagatacaagaatatatcctagatcacacctgtccaactattctaaagtgtttgctgcctgtgtctgtcctaggtgtgaaacaagcctgctgtgagttcttagaaagtcagttggacccttctaattgcctgggtattagggattttgctgaaacccacaattgtgttgacctgatgcaagcagctgaggtttttagccagaagcattttcctgaagtggtacagcatgaagagttcattcttctgagtcaaggagaggtggaaaagctaatcaagtgcgacgaaattcaggtacggatttgtcttgatgttatggtttcttcaagattgggcaattacaaaacttgcaaataggatgcagttacttaccatcagggcttcataattaagtgtgcattttggctcaaagatttcattaacccctcctgtaccaaatttatttgcatttttatggagagggagtttgccactttcttcaattaga

SEQ ID NO: 57937 - DNA, 1227 bp, Homo sapiens
ttccatgcggtggctgtttccttgtttgacagtcttatgtctgttctgttcaggcgtgttcctgggacttggcttgagtggcgtcgtgcccaccatgcactttactatcgctgagggctttgtcaaggccaccacagtgggccagatgggctggttcttcctcatggctgtgatgtacatcactggagctggcctttatgctgctcgaattcctgagcgcttctttcctggaaaatttgacatatgggtaagaaatgaatcttccagcaggtcctgtgatggtgagtgaacagcccaaagttaaagggctgaggaaaaggtggtatgagactgggatcatatagtgtttggaggtacatatatgtgcattgaaggtaaatcatcaatattaacattttggtgtatctctgacaaggactgtgtttttaaaactttctaaatataccactttaatgttattaacaaatttgtttaattaaggataaactagaagaagcaaatgctttctcctacttgtttcttattcctccttgcattatcctaaaggctcttttctttttattcctacagttccagtctcatcagattttccatgtcctggtggtggcagcagcctttgtccacttctatggagtctccaaccttcaggaattccgttacggcctagaaggcggctgtactgatgacacccttctctgagccttcccacctgcggggtggaggaggaacttcccaagtgcttttaaaaataacttctttgctgaagtgagaggaagagtctgagttgtctgtttctagaagaaacctcttagagaattcagtaccaaccaagcttcagcccactttcacacccactgggcaataaactttccatttccattctcctagctggggatggggcatggtcaaacttagccatcccctcctcagcaaggcatctaccggcccctcacagagacagtactttgaaactcatgttgagattttaccctctcctccaaccattttgggaaaattatggactgggactcttcagaaattctgtcttttcttctggaagaaaatgtccctcccttacccccatccttaactttgtatcctggcttataacaggccatccatttttgtagcacacttttcaaaaacaattatataccctggtcccatctttctagggcctggatctgcttatagagcaggaagaataaagccaccaacttttaccta

SEQ ID NO: 57938 - DNA, 2255 bp, Homo sapiens
tattccatggtgtacatacaccacatttcctttattcactcattggtcaatggacacttaggttggttccatatctttagagttgtgaattgtgctacaataaacatacatgtgcatgtgtctttttcatatgactgcttttcctttgggtagacacctggtagtgggattggtggatcaaatagtagctctacttttagttctttaaggaatctctatacccttttccatagaggttatactagtttataatttacattcccacaaggagtgtataagcattccccttttaccatatccatgccaacatctgttgttttttgactttttaataatggcctttcttgcagaagtaaggtggtatttcattgtgcttttaatttgtatttccctgatgattagtgatgttgcctgtagctctctgattcaaaaacatcaaccatcaaagtgtacacattcccttttttcttacaggttttttttattttaccctcctgcaggtttcgtgctgtttctctttttgggaatcttgaccatgctcagaccaaatatgtacttcatggcccctctacaggagaaggtggtttttgggatgttctttttgggtgcagtgctctgcctcagcttctcctggctctttcacaccgtctattgtcattcagagaaagtctctcggactttttccaagtgagttaaaagaacaccataggaaaatactgtgcactgttgtcacatcttgagatcccagtgcttactgggtgataggagctcatatcactcctaaaggtttcttgatatgccagaggaaaggctctctgttctgtggcgatagtggggtgatgaagcttttctcttaaacacttcatgaacagacttactgcatcctcttcaacagatggagagaccaattgtggaatatattttctacctgaaaagcactatcttttgtgaggcttagagtgccagtgcactggctgctttccaagaccttgtacaagcgtaacttactattagcccaagccaaagtagggtgtggtaaatagtctatgcttcattctgctggtgctcctacccagcagtcaagtaaagcttatctttgctgcccatgcattgctggaagctccagatgtccatcatcgtgtgctttctctcttgcccagccgtgagcctgaggttctatttgtttgcttgtttttgttgttattgttggttttggtggcgacagtggtgtattattttgttttttctaacaacaccagtaagaaggtacattttcctcatttaaaaagtcaactaagatagaaaaagctagagtatcccttaatactactcccaatttaagaattttgtttttagaactcattctatcagaataggagaattttcaaagcctttcctgagtgtgatgctgggaaccagctggattgtgatggaatttctaaattcaagtgtctactatgggagatacggctgttcactagtaagggaaagggatagagttctttgaatggggattcttagagatttttccatcgtaaaatagaagtgaccttgtggaattttaatccagaatacaggatagattgtatgggagtctacaatacaggatagattgagggaatggttaaatctgggagcaggtggagaacagaaagagctagttaaatgagccatacaaattcatttcccccactgatttgtttcatttttgtggttctttttagactggactattcagggattgctcttctaattatggggagctttgtcccctggctctattattccttctactgctccccacagccacggctcatctacctctccatcgtctgtgtcctgggcatttctgccatcattgtggcgcagtgggaccggtttgccactcctaagcaccggcagacaagagcaggtaggtcggaagatgtacgtacacctcagaggtatttagaccttaggcctgataggctcaaacctatttgagccttaaggtttgcagcttgagaaccccacccaaaccctgatttgtgtttcagaactttcaaaacagcatcaatttcaaagctcagttctcaacccccagtgtcatactatttcagtagaatgccaataggacagatcattacccagctggtcaattaactgcaagcacagatgtagctactcttatacttggtttgtgacagtttaaaaatgtagcaagcacagtaattttagtgacccgagtcccaagctcagaccaagggattaaaatt

SEQ ID NO: 57939 - DNA, 1033 bp, Homo sapiens
tgggattacaggtgcccgccaccatgcccggccaattttttgtgtttttagtagagacagggtttcaccatgttagtcaggcaggtcttgaactcctgacctcaggtgatccacctgcctcagcctcccaaagtgctaagattacaggcatgagccgctacactcagccaggattttttttttttttttaatggtcaaaatatgagtcaggactctgctagccccattcatgctatgtcttggatatcccccagtccaggctggttctccactattacctaggaccattcagagcctgactgacatcttcttagactagttctccatcactgcttgtccttggggaaggtactatctagtgccctacccagagaaagtgtatatgttctaggtctgggagggacgttggagggtcatcccatatgatgtgctccctgactggctaaaggacaacgactatctgctacatggtcatagacctcccatgccctcctttcgggcttgcttcaagagcatcttccgcattcatacagaaactggcaacatctggacccatctgcttggtgagtgatttggatggggaaaggtggaatttgttgtctccctaactgcgaagggattatagagcccaacaaagttgttcagatcgattggcagctgggattctacctttaaactactaatgactttaagctaataaccttggttgacccttgatcactgatctttaagactgagagtaaaaggcctagaaaccaaagaaattgggactagatatttttttgtgatccctggcagaactgttctaggtggagacaattccttgtacttcgtaatttccaactgtaaaagtaaaatgccaacatttcaaaaaatggtcttttttgtctgggtttctgtgaccagtgccactttctttgaaacattggactgcaattacacagctaaacctcatagctttctgattttttttttatttcaatagctcttgggttacaaaggggtgggggggggtttggttacatggatgaat

SEQ ID NO: 57940 - DNA, 2965 bp, Homo sapiens
aggggtttgttctgattttacaccatagactaaaacacacttgtaattctccattgtttgtgagtgatccaccccatagaagtggtattttcagatcctagtattatttgctcttctttcttgccagacgtccgatccctatctctccctttcctgtctctgtgttactacagtttagaagaccaaactggacaatggactttgctcactatgatgacatgatctccattgacctccattgtatgtactttaatgcatgatgatatattttgtatgatgagttgtagctgatggctggtttgtgagttaactggggtctcaggttttggtgactctgggtctagaagatgtagagaggtggtataggagctagtgatagaggagctagagggaatcggaagaactaatagtaaatgatttggactgaaaaaggaaaagactttgatgatagccagaagacttgagggcataaaaacttttcagatcaaatgatgaaattagtaagaatgccaatctggattctgcacatgatctttggaccctaattgcccaacttaaattttctctatattattctcattgcctctagtaaaatagttacatagcactcaaagttactaaatttagtgtgtgaccattctagttgaggggttctctccctccactgccctcctggagcaatcaaattgtatcacttatttttgtgcatatcacaaactacctatgttatctggctctttgaaaacaatactataacttgttcaacttgtattttgcacagtgtcttgtattttgcacagtgtcttagaatgccttagggtgctagtcctaaatacacttgctaaatattcaatgaatgtgttgacttactctggggaaagggataagagaagccaccacaagcacaagaaaatgcacataagcccttatctaagtggctagaagctaagtcatatgctggcaagctggaatctgccccattcattcattcattttgaaatgggttctaactaaaataaagtatatttattattttatgatccatgtattgcatctcagaaccagaattttgttttgttttgttttgtttctgccctggtagcctgatctaagttacttccaacagtaacttagtaagtaacaagctaagtgtgcccctcttttcagatttatctaagatgcccaaaaatatttatgttttttgcttgtgatataaagttgttttttggtttttttttttttgcttgcgatataaagtattttttagtaaagctgctgattcagtagtacttcactttgaggaaatatgttttgaggtcagcctattgagaaagatttccttgtgtccctctcacacgggttgcccatcctcgaggttttcataggcttccagcttcctgttctccttagctcaattgttcactatgactgtgtgctggcatctcgtcagagtcttgcacatttaaaggaagaggaactgtctatgtgttgacaccatataaaggtctgctgtatagcaagttattgtttttgtctctcttggactagattgccggttgctttcaactgtgcttgtgggttgagcatagcatgactcatgactgtttagaagcttgaggattgcccttacctgatgtgttagtaagtgttctccagaaagcaccaataggatacatacatatggatagagatgggatttattcggggaattggctcatgagattatggaggctaagtcccacactatgccatctcaagctagacaatgaggaaagtccataactggttcagtttaaggctgaaggcctgagaacccaaggggctattggtgcacgtcccggaatcccaaggcaggagaacctggagtttctgatgtccaagggcaggaaaagaagggtgtcccagctccaggagggaaggagggggagagacagagagagttagggagtcagagaaagagatttataatccctgagaaggaattgtgattactcttagataaaaaagaactgacacaagatatcaaagatatttgtatatagtgaatagccatggatgatatagtgtctccctcaggagcaaagttatgtttactgcccaatataaaagattggggctccctaagcttaagtttcctctcccggaatgcaacccactccatgtgcagttgttacctggccctccctgcattgcaatgtggttatttgggtttgggtggggcttgggtaaccaatgcaagaaaatgctaatattctggctactgctattgctataactaataaagtcctttgtatgggggtagaggtggggagagaactaataatttacagcatagtggaaatctttggaaactttctccctctttccctctttttttatttgcatttccctgaggcctgtttaaagactactgtgaaaatccaacccaggaaaacctaaagtgtctgagatttttcctagaaaatggaattctgggtttttctgattttgtgtgtgcctgtctctagtttctgaaatactcatttgagtagggcttagattatgggttgtggtggttgaaacaagttattgtggagctggttattaggtatgtgtgtggcaaagggtaaattggggctgcctccttgtcttcaccttcctgcttccaggtaagttcttgcttgcttgcaggacagattgtgatgaaagcttgttatcccagggttgaactcaggctataatcctgtaatagaattagtagacttcgcagagaaattaaccactaggcatctgtcccacaaccaagttccttttgtatgtatgacacatttatcagagcatttgtagataaggtctaactgagttcagttggcatttaattcatttctaagcctggatgatcttgtagtaattgcagccagatgttggctttatatttttattcctcggtctcagagctaggcctttcttgggcagagtgagcttt

SEQ ID NO: 57941 - DNA, 1043 bp, Homo sapiens
ctgttcgctgcagttgttccccatcagtactcaagcactataagccttagattcctttcctcagagtttcaggttttttcagttacatctagagctgaaatctggatagtacctgcaggaacaatattcctgtagccatggaagagggccaaggctcagtcactccttggatggcctcctaaatctccccgtggcaacaggtccaggagaggcccatggagcagtctcttccatggagtaagaaggaagggagcatgtacgcttggtccaagattggctagttccttgatagcatcttactctcaccttctttgtgtctgtgatgaaaggaacagtctgtgcaatgggttttacttaaacttcactgttcaacctatgagcaaatctgtatgtgtgagtataagttgagcatagcatacttccagaggtggtcttatggagatggcaagaaaggaggaaatgatttcttcagatctcaaaggagtctgaaatatcatatttctgtgtgtgtctctctcagcccctgcccaggctagagggaaacagctactgataatcgaaaactgctgtttgtggcaggaacccctggctgtgcaaataaatggggctgaggcccctgtgtgatattgaaagggttgttgtgtctggggtccttgtttccaaatccccgaggacctagggaggaagggtttgccaccatgcaactctcccaggtgttccaaagaacctttgagaagttgtaccatgtgctgaaatgtgagctgccagcagactcagtgatcatctcagcagctgtctcagcagagccagagctccgcttctccctggaggctctcgaggtgggggaaggagaacacacattagaggggacatttttgagcccagctgcccctcacagtgttcccttgataggccactcttccccttcttccttctcttggcctatccttcaccatatttatccttcagggaacctggcacacaaatcaaagtgttgtctttctgtttggaagggaagccttcttctttaaaaagtaacctga

SEQ ID NO: 57942 - DNA, 1200 bp, Homo sapiens
ctcttccccaccttcaaaaatttgcccccctgggtgagctgtggagtgagccagagatagctttcagcccttcccatgggaacagctgggtgcattagcaagtccctggagctgctgtgtgccacttgggaaaatagattcacacctggctctgtgcctgtctccttcaccagggagtgacactttgccagaagcagctgatacattgtgtggcgctgaactgactcacagatagccctggccccattgtccctcaactatattattgtcagggctggctcaactcaagcttccacccaagctccaggatcagatgtcatagcagctgctcaactggcctcaggcatattttcaactctgcatttgttttctaagttcgctgtattgactttattcttccactgctctcttcacctgacctctcagggcattttaacattcagcccaacaagaaatctccaccagaaccccgagtggcgaagaaactgggaatgattgccggcgggacaggtgcattacactgagggcctttctctcccaccattgttgactgttgccatgcaaattcctaggtgaccctctgaagactggtaaccatagccaagctgttgttcatcaggggatttccagcaatgcttagaactccctagtatctgaaaaacaaaatcataagcaggtagaaaccaaaaaaaattttaactgatggaattagagaaacaaattaaatgagctttcctcattttgaatggatctaatagttttaggtgagagaagagagaagcagctaggaatgactagctaggaagaaagaaaattagcattggacactactgtgcattagacactgtgtagtctaatacactactatatattagacacaaaaattagacacatatataggtatctatgaagtaggtactagccttttccttttacagagagacaatggggttccagagaggctaaatgatttccacagggttatttcactggtaatggcctggagcaaaattagtatttggctctgcctagtgcctaagtacatgcacttaacctctgcaaatacagtgttctagaaccctcatcattgaatccggaggtacttgtagtcatttgtgacactggagtcctagcctccaaaggactttcagaagagtcttagattagttcctaagaaagatttctacaatatgaacttag

SEQ ID NO: 57943 - DNA, 1383 bp, Homo sapiens
acggtgaaacccagtctgtactaaaaatacaaaaaaaaaattagccgggcgtggtggcgcacgccagtagtcccagatactcgggaggcggagccaggagaaccacttgaaactgggaggcggaggttgcagtaaccgagatcgcgccactgcactccagcctgggcgacagagcgaggctccgactcaaaaaaaaaaaaaaaagtattgaataagcaccggagaccctgagccaccgagtagcggagggaaagggtggcgcgcagaggggcccagccccgcctctgccggaccccgcccccaaaaggccccgccgccgccacctcctgctaggccccgcccccgacagacacccccccccccccccgccaggccccgcctcctgcccccccagccgcgaggtcctgcctcctgcccggccccgcccccggcctgccccgccctccgacccgccccgcggcgcattgtgggatctgtcggcttgtcaggtggtggaggaaaaggcgctccgtcatggggatccagacggtaagaccctcattcagtatcctccactgggggacccctccccatctggttctggccactcagctccggaccaggggctgtcgctgccgaccccgccccgcagggctctgggcccaccgtggatgctggggtcccgatcccgcacatccgggctcgggactccgccaggttacccctctgcccttggcatgcctccgcgctggagctcgggatcgccacccctgggacggtcaccacccaagccccgggctcttacccagcctggcggtcacgctgcctcctctacccacagagccccgtcctgctggcctccctgggggtggggctggtcactctgctcggcctggctgtgggctcctacttggttcggaggtcccgccggcctcaggtcactctcctggaccccaatgaaaagtacctgctacgactgctagacaagacggtaagttggggaagaaagggccagggtgaaggaggggaccagagtgctcctggcatggagggtacagcacccacggtggttgggatgtccaagggacgtggcagcgccaggcgcgcttggtgaaacacttgtgtcctccaccctccagactgtgagccacaacaccaagaggttccgctttgccctgcccaccgcccaccacactctggggctgcctgtgggtaaggaaagtgtggaatgggctcctttccctggtatcctcagaaggtgactcccctcctgggatctcatgaaacacgctgcttcaaccggtttgctccacacaccattccccttcccccacttggctctgcatcctccaagctgtgaggtgccactgggcccctctagagtgtggcttccatgacccccat

SEQ ID NO: 57944 - DNA, 2526 bp, Homo sapiens
ggaggcggaggttgtattgagctgagattgcaccactgcattctagcctgggcaccactgcattccagcctgggcaacagagtgagactctgtcccaaaaaaaaaaagttaaacttcaaaatggtatcgccaatagttgttaaataaaggccttaagaacaaaacctatttacttgggcaacaggaggtaaaagtttccagcagctaggatgagcaggaaatgataagtttgaggggtttccttggacctatttaaaaccattttcttaactgtgcaatcaatccttgggagaaatgaaattatcgagtatctttagatatggtgtagaagatcagagattattcttttttttgtttcagaagaactggacggggctggaggagaagagtatcccatggatatttggctattgctggcctcctatatccgtcctgaggacattgtgaatttttccctgatttgtaagaatgcctggactgtcacttgcactgctgccttttggaccaggttgtaccgaaggtgcgaccacagagagctcactcttttatctgtgtggctgatttcattactgtttgtgatttggagctactcactggatggtgacctcttttcactttctctactccatgtctgggcatgacccagctttggactccttgagcccctctctaatttaaatttgatattattaattatccaggtaattgtcttccgtgtggttgcctccttccccactccagtatccactttcagcaaaacgtcttgcttcaagtcccagatagaagagtctttgacttttcttcagaggcttattttagctagaatgtttaaagctacagatgcctatctgctcatctttccagctggattaggtgttgcttagatttgctagttgtctttaagtattacacagtttttgtatttatgcagccttatgtatagttgtagtggtgaggagtaggcaaattatatgattagtaaaagggctagtttttgatgctaggtatggaagtgtagtgacaattgtaaactgtcaggctgtggtgggaaggaatgttgaagtagaaaggagtggagaactcactgtgagatctgactggagaacctggtggctcttcgccagtataggttcctccaggacaggttctttttgagcagctaaagcataatataccgataccaattcagagtttgctcttttgttcagtgaaaaagtgaggacttcaactttaaaaatggatggagaactgccggattacaaggcaaagacgtaaaagtcgccaagaggtcaagtagcactggggacaggctatctactggccagtggaatagtgcagtaaagttcatacagagaccaggagtcttagaaaactgacctagagcaggagagacaggtcacatattggtaggagtaatgtgtcatgtttcaggcactacacgctggatgcttccctgcctttgcgtctgcgaccagagtcaatggagaagctgcgctgtctccgggcttgtgtgatccgatctctgtaccatatgtatgagccatttgctgctcgaatctccaagaatccagccattccagaaagcacccccagcacattaaagaattccaaagtaagtgagaatttgtgttggggtttgactaatgaactcttgtatggtaggcctgttatcatggcttgtctccagcttccttgatggggaggggtgtaggtcccaggctgctaggggactaatgtaaacttcagggctcagagatttcacttctccaagacctttctgctgtgctggctggcttatcttaccttaaagctttctggtgcttttagtgtattccttattctttttattttaatgtatttgcatacattgtacattggaccactctagatataatggttttgatggtttgggctaggaagagcataactcaaatggtagacgtatgctgtaatttttaagaggggctttaaatcacagtacagaggtataacatgaacatctcactatttttctctttctaatgcaaccttgacatcagggattcccctttattgttgacctccttaaggattctggtgtagacttgacttctgtagcatttggaagtgccctgtgccaggctattgcccggctctggtaggtcatctcatagactataaggtaccctgattcataaaccttagttctctcaagttctttctgtgttctaggctctttttatctcaggatttccctgatattttatattcacatatttatattcaagtttctgtcattcttctgatttgtaaatatgtctactagcctttggtccattctctctttttctcctacctgatgaaattactaaatcacctttggcaaacaaggttactctgttcctaccccaaatctgatgttccatagcatttcccattctcttgtagtttgtttttatggtattgcacattatataatgattcttctcccctagtttagctctagggtgatcatatcctacctaatacatattaattaaaagggta

SEQ ID NO: 57945 - DNA, 1031 bp, Homo sapiens
cagtagcatagcttgtgtgggacactggagccgttgtgatggcagcagaagtgttttccccttaaagccaagcccattaattttgatggaacagcaggacgtacagggcatgtctgaagggcaggacagctggcacggcggacgacccaccccttatcccctgggaggtacttcacttcttgtgcttaaccctagctgtagcctgactttcactgaggggcttattctagacagaattcagcctagctctgtagtttccttactggctgtctgctcccagaaggtcctgagcagtttgcttctattatagggccagccctctctgcctaccttatggccttgtatcatcttgcctggtggctgctggctctccttacattttaatgtagaggattagcctgctgaatcagagaggatgctccagtctctagataccatgtttctgtctttgaagataagacaataggagttgatgtcagtagcctctgaggttgacttatattggtccctcctgtccttattgaacagccctgggattgtccgtttttatgttgcaccagtgtcaacttgggggtctatctgtgccaaagtaaaatctcagcattgggaccgtggctggctttagagctgtcaaacagaaaggtttttggtgattattttggttgtagtgtattttgatttttttctttttctttttcttggtttattttatttttactttcttatagtgcttacttttctggtgcagaaagattgttgggaacagacaggaaccaatgtgggaattcaacttcaagttcaaaaaacaggtacgtggtcttctctttgtttttcagataataccttgttctaagagatttccctagatatctttcttagtctgtttgtgttgctataacagtaccacagattctgggtaacttaaaaagaacgaactttatttcttaacagttctggaggctgggaagtccaagatcaaggtacttgcaggtttgatgtttggtgagggcctggtccctttgcttccaaga

SEQ ID NO: 57946 - DNA, 1640 bp, Homo sapiens
cctcccgttcagtacgaagatgttcataccaatccagaccaggactgctgcctactgcaggtcaccaccctcaatttcatctttattccgattgtcatgggaatgatatttactctggtaagtggggactcaggatgtcattctcagctcctttttttttttttttttcattctgaaaggaggtgaaccgcagctcttttttttttttttttttttaagagacgtggtctcactctgtcactcaggctgaagtgcagtgatggaatcatcactcattgcaacctcaaaactcctgggcttaagctatcctcttgcttcagcctcccaagtagttaggactacaggtgtgcaccaccacccctagctaatttttattttttgttgcaatgggtgtctcacagcgttgctgaggcttgtctcagactcctagcctcaagcagttcttccacgtcggcctctcaagtgctgagattataagtgtgagccactgcattcagcttttttatagatttttgctatatctgaggtttgaaggatatttgtaaatttaaccatgaaggaaggtatcttttttcaaaaaaaaagtttgaactcagtcctgtatattagcaacagacagatttgtggagacattaattatatctgagagtattttaccttgtttccttctttgtaggaaagggaatgtttttgcattttcatgtgtagtgatgattaatgattgagaaacattatcctattaggaagaatgatgagatatatacatgggcactgtatgtcaggaccttgaggcatgcatatggggttacaaatgggatattaaaatacagggtgaccagctcagctctgtcctttgtgtgatattatcactgttcaaggcttggccagtaattagtaaacaacgtatgtgcctctggcatatttttccaggttttaaaaatttttcattggcttggcaactggagagttcatgtaatttgtcttctctgtatcttaggcttacattcagaaatacatgaggttccccttccacaatgaaagtagcttttttaaaatggtaaatgacttcaaataatacataaatatactgacaaagtaaaggtgacttagacttccactatcctgtaactgcaattaatcttttgggaactgttctcttaatgtgtctgttaatatgtatgtactctctctctctcaaataattttgtataattgagattgtgtcatatatacagttttgttttgttttttttgagatggagtctcgctctgtagtccatgctggagtgccgtggtgcgcagtctcggctccctgcaacctctgtctcctggtttcaagtgattctcctgcctccgcttcccaagtagctatctgggattacaggtgcctgccaccacacccagctaatttttgtatttttggtagaaatggggtttgctcaggctggtctcaaactcctaacctcagacaatctgcctgccttagcctcccaaagtgctcattagggaggctttctttagcatagtttaaacgtgaagctgagaaggccttataaaattctccttaattttttatatctttaaaggttggctgggcgtggtggctcatgcctgtaatcccagcactttgggaggccgag

SEQ ID NO: 57947 - DNA, 1817 bp, Homo sapiens
atgctcttcaggttctagggctcctgttaggggagggagaaatgttgaatcaagagggaaaacaactactatgatttataaacatattttaatgtaaaaatttgcatttaaaaggagtggccctgttttctgtgttaaaaccccatttggtgctattgagtttgttctttattcttttatcccagtgaaaattgttgatcttgctgtagggaaaaattaaactctttgaatctccaaacaaggaagtttcagcattcccttatggatcagaggaaccttagaggcctgaaattgttgcttccagtttagctgcccctcaaattcaagtgaatattttcccttctccctttacccttctccagaaataaagcaggtgacagggttttcagaatcttaccatattgacttgtgtatcttttttaaaaaataatttgtgatatttattgcatacattttcttttggcagttttggattttaggtatttttttgcatgaggctgataatggtgatgatgactttatacccttggtactatactaggaactttacatagtatctctacttctcacagtcttgcaaagtaggtgatattattcccattttatagttgagaaaacggaattagtgactgtacctataacaccagtaaatgcagagccaagattctgacccaggtctttttgttgtaccataagtttaaaagatgagtctcatttttcttgtggtagatggtggtaaaaaggagtaggcagagtgtacatagataaaaaaaagtaaaagggtaagtaaaaaattgattgtggtatatgttattctaatcagccaaaaaagtttagaagattgatgaaatgatcttttaaatatgtatttctgaataaaatgtaaaaccaagaaagttatttcaggaaggatagtgaccctttccttgaactgttagaagggcatttattaggctaaaacgtcattaacaaaatgcattgcatgttgaaaccagcctcttgaaccataagcacttagcgactttgctctgccctgtactgtgctgcttctgctgtcatcctgtgtgcctacagaagcctggtcttccgtccatgcagaaatgcttatgtcctcctgttgtttagatgactcctattgttcaggtgtactctgagaagagaatcacgtttttctgttttgctaaggagaaaaccttgctgcttgtctctcctcccaccctccaccatccaaaattaaccagtgagctggatattacctggatattgccaggaggtgggcattaagacagtattctttaaaagtgaaaatcttgtgaggcaaactgctaaattcacatttttgtttttttttttttaccatcttccctaggaatattcctagaaagcatctgcttaattttgctgctaacagctaaccttatcccacgttgagggtggtattaaaactgttcacacagagtgagcctgggtcagtcaaaaacagaatttgggcatttgagtgataacagacaacctaaggacaatgagcactttgcagatctctacaattaaaagttgcctctttgaggcaggaggggagaagcacagtccctgccaggttgcctgaactaaagatgccatggagcaggagtgtcttggtgcattgttccccgcttaggagtacctttaaaaagggggtgaaataaatttggcttaataattgtattctgactcagctctgagttttttgtgtcaaattccatggtatggtgacagatacagtactagatactgcctcagctctctctcagcataatattgacaaacatttggtaaaa

SEQ ID NO: 57948 - DNA, 1079 bp, Homo sapiens
caaggaaattatgccaaatggtgaatatattgggtggaagataaatgagagaaggttgtatgtgtcactgatctcaactatagcatttgctgctgatatagaacatgctgtgtatatatctataaatacacacacatgaacacattgcatgtatataaaaattgttcacacttttagtggtgcttactgggtattggtaaaggattgagtaggcactgtgatgaaacttcacaaagcagatggaaaagatgcattaatagccacagggggcagggtaagggagcaattcaggaaaatggagaggcttagctaaaatttgtcagtcaggaattttggcatttgagacttgttttcatactatgtatatgtaatagacaaacccttcattttgtagtaacagtgttagaacagccaggtgcctgaaggcaagcgacacaattcactgaagagcatactacagatgtagtatccggatatcaagtttccccacttaaaaaatgggtgcgatcaaaggaaaagcaaggaacgggcaggagagcaagcgtgaaaggtgacaaacttgacaattacaaggccgagactaaggccaatttagggaacgggctgttagactaggaacaagggcgagttcagagggaggggcagaatgtgggcagcactcctgggccctgagacccttctgcggaataaaactctggcacttcgccacctcctaggctgaaccaagatggcgcgcggcctcaaagcggcgctctcgtcacgtgcccggacccgaggcgcttgggggcgggaggcgtggcctcggtcgcggcagcccagccccgcctagggggcggagccggggggggttgtccgcggaggaagggggcggggccccgcggccgcgcgcttgggcggcggaggctgcagctacctcggcgccggctcggctctaggacgtgtcgggctgcacgggtcgggggcggctccctgctgcttccgagcctagccgcctggccttcggcatttgcaggcaggtgagcgcccagagcctggactggggtaggatgcgtcttttccccatctccagctcccctcga

SEQ ID NO: 57949 - DNA, 1100 bp, Homo sapiens
gtgtgggggaggagggtgtagaagggaattcgcatccagtggagttggggtttgtgctgctgagcatgtcgtgatgtcagaaccgtgtggtgcatgaggtctggctgctgggctgtaaaggagggctggaggggcagggcatggcaggcagccaggctcctgggtctcatctctgagttgattgctgaaatcttagagttggaaagagttgtcagggatggcttataggtcctcacagagcctctgaggatggcagagctagagctaggcaagagaatgagtagtcaggctgtggtggtgatgaggtggggatgaaggctcagcagggctggggagctgggtgttaagggggttttaagatatgggcagctagccgaggccttcgaatgccaaggacattcttccctgggctttaggccctactgtgttggctccataggtgagttgctgtagaaacaaggtgtggcaattgagtggtatggggtgtgtgtgtgtgtgcacacgcgtgtgtgagtgtgtgtgcttgtgcatgtgttggagaggaggagaggtgaggagcagggaggactgagggagtgaaagctgcctcaaagtctgggtcctacgtagggaattgagagaaatggaggggagggagtggggtcagagggagggacaagtgtgtattgcagccacatgaagtcaccatctgtccccctctggcctgctagctcacggacctataattagctctggagggcatacggtgctggctcacaggagcgtgggacttcgggtggccagcagagtggaggattcagagggaccatggtccttgatgtactgtggaaggggctgcttctaggggaccctctgcatttgctgtactgggaggggcctgaggcaactgagaatgtcacagggacagggctggtgggggaaacagcagtgggggaaggagctctaagcgaggatggcaggagactccagggctggtctgagcctgagacctccccgtttgttgcctggctgctggcccactgcacaagaagcacgattgctgcccagctcattgctctgccttcagagaggctcgggtgctgcaacctcggggcctcctt

SEQ ID NO: 57950 - DNA, 1740 bp, Homo sapiens
tgctgggccttctcttccctctttcatatccatcagtttctgtttggaccttaatccaccaaaccagaagcagaattcccctccatcagtttctaaaggaaaatgtcattgaattcctggagaaatggaaatgccaggtgggagggaggatgtaatctggtcatattggtggctggatggggaagggtctgcagagcagactcagtgactttctcactcttgtgtacaactctgttcccttggattctaacacatggaatgcatggaggacccagagatgtggacccctctggagaagcacatgctagctacaggtttactgacctgcagtgtggatggattgggattttgtgggggaggtggtggaagtaagggatgggtgagaggatcccaccactgacttgcatgtgcaggacactgctttgggggtgaatcctgaagcactgaggggccttgggggttttcaggaatttgccaccttaacccgggagctgagcatgtgtcgggagcagcttctagagcgggaggaagagatatcagaactgaaagcagaacggaataacacacgggtaagtggggatgaccttgtgtcgcgcgcgcgcacgtgtgtgtgtgtgtgtatgggggtgtgttgtgaacaccttgaccaagagagcaggcaagagtggggccaggcacagtcctagctcaagccccatccttccctcttcctgtctcccatcctggggtgagagttacatcgtttaaccaccagtgctgggctctccacctgtagttgctggttcacagaaagctcagggtcctggggagaggccggggcagtcaccttgagtagtatcagttggggcgggagctctgtgcccatttggaagtatttcagtgttttcacagtggggtggctgtaactcatgtctgctcggggatcacatggaccctgcttgtagcccctggggcacatgcttacagccctccctctcaccctcccctgctctccctgccagctgcttctggaacatctggagtgcctggtgtcccgccatgaacggtcactgcggatgactgtggtgaagcgccaggcccagtcaccttcgggggtctccagtgaggtggaggtgctgaaggccctcaagtcactgtttgagcaccacaaggccctggatgagaaggtgcccacctgcccgccagcccccacatccagccaggctgccctggagcctcccatgtatcccttctctgagatttccacatccggtatttagggagcactggctccctccaaacattgtcttaacttcaaggtcctcctgttaggctccctcctgcaaatgtgctgcttagtaggcccttcactgtcctcatgctcagtggtggtagaccaagcccagtctcttccagcctgactcaagtggggtccccctttcttcctccatctccccttacctcgagcaggtgcgagagcggctccgggcagcgctggagcgagtcaccaccttggaggagcagctggcaggtgcccaccagcaggtaatctgcctgctcaccctcagtctgcagctcctggaagtccaggctggttcacccctgtgccctactctgtttcttgtcagatttctccctgccatggctggaagctgctaggcaaggctaggctgagcacctctttctaggagacattttttaactaagacaggggctttggaagggtctggaatgtatgggaggttctcttctctttgactc

SEQ ID NO: 57951 - DNA, 1068 bp, Homo sapiens
agcagggggcaggggtgcgggatggagcggcagaagaggaggggactgtggagctggggccgaaacgcctgtggaaggtaggtcatggagagctgtgtagcaggggtcatgtgttccccaaggtgggaggttggaggcccggctctgccttagttcagtagactaactgcttgaattaaatttgaggctttctctgatattcccccttctcttttcttcttctccctaccccatctgcaatgaaatctgtagatttttattttagtgcccaacacatgctgggcacatcatacgcttgtctgcttgaattgttaggcaccatctgcctcatgtggcagcatcaggcaagattccttctctgtctgaacctttgttcccccagtcacgcccctttctgggttacaagaggctggcatagcagataaaactagaaacttgttttcaagagagacaaaggatagcaaggtgtttggtcattgtcaggagtgacctcctggggcccagagggaggcagttgtagccagaggagtgctgtgatgttgggggcagagccttgacctgctctgggtgtgctgttcctccttccacccctgggataggggagtggggtgggtgggatgctgctgtgactcacagagctactgtccctatccctggaggaggatacgggccgggtagaggagctgcaggagctcctggagaagcagaactttgagttgagccaggcccgggagcgactggtcaccctaacaacaaccgtgactgaactcgaggaggacctgggcacggcccgccgggacctcatcaagtcggaggagctgagcagcaagcatcagcgggacctccgggaggtgcgtgagggcgcaggcctgctctgtgacctcattgtggagcgtgtggagggagagccaggcaaaggctctggggcgtgagactgaacacctgcctccttgcctggctccattgttggggggcggtcatggaaggggtgggccaaagccagaaactgacaggagagtgtagctcatgccccttaatgggttccaatcagccaggtgtgggtgggga

SEQ ID NO: 57952 - DNA, 1026 bp, Homo sapiens
agcatggggattatttacagtctcttgaactgctagcttcaggatgttttaaggctaggcctgagcgaggaggaggcaggggagacctggcaggtattgaagtacctgggaagaaaggcaatggggatggtggtcctgctccaagatgataagtggaggctgagcgtcactggtactgggggccatgatccccagggccaccctggcaccagggtgcaggggatgcggggcctgagcaggaagaacagagatctgcgggctgcaccgacccatccctgcccctaggctgaagaacggcatggcaacattgaggagcacctgcggcagctggagggacagctggaggagaagaaccaggagctggcacgggtgagggcaccaggccgggccctcaggccccctccttcccgcaggacaggctcccagggcggtctgtggaaggggcacggaggaagggcctggccagggacacagccacagagagtgggaggaggctggcaggtgaagggggaggtggtcaggagactggagagagtggctcccagaggatgagaagaggacaggggagggagtcaaaccccagcaggagagggtggtcctccctgggagggcggcctggtgcgaggcagacggctgtgcaggtgcgccagcgggaaaagatgaatgaggaccacaacaagcggctgtcggacacagtggaccggctgctcagcgagtccaacgagcgtctgcagctccacctgaaggagcgcatggctgccctggaggagaaggtgcccagaggggcggggttgggatgcgagaggttagtgctgggtgtggggcggggggaggcgggactgtgatgggcgcaggcggggtctcaatggggtgggtggccagcctggagaggtggggctgagactgcacacccagaggctcaggtctggaatgggagaggaaggcaggggcctggctcacagctgctctcccccagaacacgttgatccaggagttggagagctcccagcggcagattgaggagca

SEQ ID NO: 57953 - DNA, 1047 bp, Homo sapiens
gattgagacgcgtgtaaccagtggcagcatggaagccctaaacctgaagcagctgcgcaagcgtggttccatccccacctctctgacggccctgtccctggccagcgcgtccccaccactcagcggccgctccacacctaagctcacctcccgcagtgctgcccaggacctggaccgaatgggggtcatgaccctggtgagaggcagctgaggagcaggcctggcatcactggaccctgcaccgggggaggttttaagggatggtaggactcacgtgctctcagctgggcctgccatcttcttcccatggtgtgtgcagaccccgacatgtcaggccaccagcctgtccttctgggtttgggaagggcctaggtcatatcttctttgccctctcccttggatgagcccagactgcttaagaaactcacccactgccctcacctcttcctttcttccagagaaataagccctggcttgtttttctaggccagcttttttttttttttctggcgtgatattctctccgggcctgtgtgaggcactgaatcctatcttctcatcctaagaccactgggctcccctggggttggctctagggcacccagagggtgagtctgagcttacccatccctctctcttgcagcccagtgacttaagaaagcataggaggaagctgctggtgagtgctgcctgatggcccaggtactaacgggttcactgctcccatgccctttcctttcagcttcctcccccagggcccttgagtctgagtctgaactcagagaggcacccagggcctccccactgcatttctccatgctccgccacctcttctgggctgggtaggcaggcccgagatctctccctctatcccctgacggctccactgtctgttcagtcgccagtgtctcgggaagagaaccgagaggataaagccaccataaaatgtgagacttctcctccttcctcacccaggacgctgcggctagagaagcttggccacccagccctgagccaggaagaaggcaagaggtaagtagagcagac

SEQ ID NO: 57954 - DNA, 1030 bp, Homo sapiens
ctagctggctgaggaggaggaggagggagagcacgcgaggaggaggttggggaaagaggaaggagaaagaggaatttgctgagacagggagaggtctgtgtgtgaaggaaaggggtggtctgggaacggggaggaggaacatggccacctctgctcagaatatgggagtgtcagcccagagaatgaggtccagctccttcttccccagtccacaggggtgaggggagttgtggagctggccacagacaggggaagctgaacggtttgatcaggggaagaagcattttgggtgaagccttatgattttcgatgctctccacacacgttggcacctaaacctgagacagcacctcagattggtttctggattacccaaacttgttgcctactgtgcactgtgggggggtgaccgggacttaaaagaattctaagattctgcctctggccacgaattctgaagggttctagcatcaattcaaggagatgtttagtagaagacagaactctgcatgttcccctttgtggttttgtgcaagtgaatgcacccagagaaggaggctcagagacacagctctcagtgtgtggatttccacacccctgacccaagccagggtcatccttctctctgagccttgtagcccacttgtgtttggggctctgggtttcctttgcaccttggcttggaggaaggacaggttctgtctaggattctagggtcgataacttgggtccatctggctggaaaacacccccaaggctgaggctcctggggagactctctgaactggggatgacccgcttgatgccattctctgagactgcttggatgcagggacactgagcagaagctccaggaataatggtcccgtcaggccatgggttgtcctctgccaaggagcctcctgctgcttctgttccccacccctgatccaggcaagggaggagaggcagaggggctggctgacacacacatctctttccttgtagttctgctaacagactccgaattcagtatgcaggagcctatggt

SEQ ID NO: 57955 - DNA, 2106 bp, Homo sapiens
gtctcctgttgggctttgggaagatggcagcattgagccctgccccttccttcccatcctcacaaagggctctccctggtcttcaggaggatatgatgttgattctaggaggataccagcagccttggttccctgcctttcacataccacccatggggctccatctccccatccctactctgccaaaatttccacgtctctgggcagtttccaggatgggctttctggggttttatatggttgtcaggttgggggaaacaaagggaagagggcatttgtgaatattgtcttggtcctctaacacaagaatgcggactgctctgtgggcccctggggtggagtctttcattgtcggccatctccatgattgagaccagcccccatttcagaggactcagggagggagctttgtccttgtcctttgggctcccagcctgatggggatcctggggacccacacccaggaccagctaggtttcctctctgcctgcagtcttctgggaatgtctgggtcacccatgaagagatggaaactctggaaacatctactaaaacagtgagtctggcccttggcctttgtccctgggcctggggttgggactgatactcccatgaggatgaggggaaggctgtgggcagtcagagtgggctgccatcgatctcacgtgaggttggtatccctgaggtgtgatctgctgtcacggtggagggttgtcgggagaggggtgaggctgggagcggagcagtttgtatgtgtgtgatccttcccaggaggtcacaagcttgccctgggccactggtgtgctacagcggaggagagttgggctggggagggctttgccctgctatggacctgagccacagagtctctgcccttgtgcttcctccctggtggaggaatggggagtgttgggagagctgggcatcttgcctggctcccagtcaagcctgggaggtgtgtgtttttgccacacacacatttgccccacctcaacgcaaacatgggtgcacacaccaaccttgtgttctctcttaaccatcctgacgagctttccccagtcacccagccagatactgggatgtctttttcctctccttgatggggcctagggtagagctgatgggtttcttgactttgcctgtttcccctaacacgctgcactcgttcctgctaggacagtgaggagggcagctgggctcaggtaagactccctaccctgtctagaaccagctcccaaaacttcaggacagtgttcttctggtaggttctctccgcagcaggaatctctgagtccttcatatgaaaagccctggacataggttctctgctcccatcagagtgccccccgcccccacccagttccctcaaactgcttgttctggtttctcagggtggcaggtgaggagccctggaggactgtggcccctgcattcctggcccttctcctcagtctcattcttttcctgggaataatcagacctagattagtatgagtcttcttcctctccctgtccctctcaggggcaccctggtgaactgagcgaaggtctttcatccatttcatgagcaaacgtttattgagcaaatataaggattaggcctttcctggctctctggatatagaagtaaagaaagcaagccctcatggaggcagtaaacaaataaaggaataatatcagtaaacaaaccatgtcaatagggataaaaaagacagtctcggctgggcgcggtggctgacacctgtaatcccagcactttgggaggccgaggcgggcggatcacgaggtcaggagatcaagaccatcctggctaacacagtgaaaccccgtctctactaaaaatacaaaaaaaaaatagccaggcatggtggcgggcgcctgtagtcccagctactcgtgaggctgaggcaggagaatggcgtgaacctgggaggcggagcttgcagtgagccgagatcacaccactgcactccagcctgggtgacagagcaagactccgtctcaaaaaaaaaaaaaaaaaaaaaaaaaaagatagtctcaataagtaaacaaataaagggacaatattggatagtgatgcgagctgtgaagaatgaagcagggagc

SEQ ID NO: 57956 - DNA, 1087 bp, Homo sapiens
cagaaaactcagcatagtggttcccttttagaggggcagtaggagatgtgtgctgacagcgagcatcagtgtgcaaacagtacagtgtgggtaatgctctgctgcttagcttggttggtgtccactgttgctaacttcatttatatgcttcataatgggcacattacatatagtcttatatgtatcagctattacattgtaaaagagaacaaaatagactttttctatctgaaaacatcaagtaagggtaaggaaagagtgaggtagggtcgctatgaaaactaaagctttctcaagttgggtggtcacggagcaccctgcccaggtcaggaggccacgtccacatggcacaggccctgcaggaccacacggcagggtgtgcgtgggaaagcaacagaggacctggagtgttcttggagcagaggctcaggccttagagaatgagtgctgctggctattcaggcacaggccaccaccctttatttttttcagtcttctgccaacatttaacttccttgcttcctccatgaagccagccttgtcccggagtgagacaggcttcctttgccacgctgcaggtcctctgtaacacagcctctcccctgggctcagcgggcttgaggctcactgagagtcaggaaggcacgtctgctgcacaataccgcaaatgcaacccagagtcaacaggaaggatttcatattagctgctgccgggatagctacttctgttcattagtgtagataattgatatgtgagtggaaccgtatcatttcgagatcttaaaaagttccatttaaaatcctcacctcccaccactaccagcccccttattgaagataaactgaaattgtattggactgcccttcctccctcatgggtggaggatggattcatgtgtctcccgaccagctataccagcctcagcctgctggctctaccttcctcccccataatagcctcctgcatctcatttccctagaccctggcctatggggacatgaaccatgagtggattgggaatgaatggctacccagcctggggctcccgcagtaccgcagctacttcatggagtgcctggtggacgc

SEQ ID NO: 57957 - DNA, 2860 bp, Homo sapiens
tctgtccttataatgactaggtcattgtgtctagtcctaaagacacaaaaagtcatttttctttagcttcacctcctttgagatttttccccaggtctgaattttattgcttgtctttgggcttgctgaatttgctgtgtttacctgacaagactcaaactgaacctggtgttcaatttaggtgtctcattccaagttgagagggaaggtcttcctgggccattgccatgccgacatcccagatcggaacctctccgctttgggctcacatccctttttataggatatcatccagtcctctcctcctctttgctgaaaagatcttctgttcaaaagtgtctgcggcgcaggtcccaaactggcagcctgtgggcagaatttggcccacagacttgtttttgtttggcccacataaatcttcaccactcaaattgagctgccagtatttaaacagtagattttatatacaattctggatttctggcttcttttgaaaacttgaaagctctgtcaacacattctagcatggaagcaaccagctggagctgaagagtggagtccactcaggatgggtgggcctgctccagggcctcccagccccccagcctgcttctctcacttgtgttacctgcctgttcccagcaggcatttgtgctggagaatgcagtaggtggccacggttctaggatttggcagtttttaggaagtccttcttaacatccagcttcaagtcgtgtgggtggctctttgagccaagtcttttgtcttgactggataataagaccaggagtaggggtcttcgaggttctctcagggctctgtggatgtcctgtggtctctccaactcagaaatcttatagaaagttaaatctggaagggatcttgttagtgtccccattttatggatgagaacattaaggcatggggaggagcagtagcccaaggtcactcagggatgatagcagagtacaggggaacccaggtacgctgactcaagtccagtgctcttggcactgcacagagcctcctggcttagaacccttggcctatgtgaccccagcatgagggctgacttgtgagggaagaccgcatcctcccctctgcacccgcccccacccaaatcagctagggctgaaaaggaatcgtttttctctgcccggaggctgccaggcccagctgcacctgtcccctactcagtgattgatagggctggggagagatgagctgttgccccaccaagccgggatgtgcctgggctgctagaggatctgtcagcctggccccagccaggactatggaaatcctccccgcaacccctctgccccatccccaggagagaattgtgacctgaacatggggttctaggttcagctctgaatcttgagtacttcagagtttctaaagcattttcacatctcaccgccaaactatgtgtctacctgcttttattccacgtaacatttcacaagcatgttcttacgtctttaaaatttcttttaaatcatgatttttatgacaagaaagggatattttaaaaccttattttacagataaggaaaacaagttcaatagaggttgatttccatcaggtcacccagccaggtgattacagaatggggctcaaatccttgtctcttgacaccctactcagagctcttttccttgggacatggtgctctattgagcaggtcttctagaagagctcctgttttggtaggacaagcatgcatgatagtcataaatgtcaccctaatagtgctgccactactgagtgcctgtaatgttcccaagggctggctaagcccttgtatttattgtcacctgcaagagaggtgtgaccccatctcacatttgctgggtgcctctcagctaggaaagggcagagcttaagggctttgtatttttgccatggtatgcagcagctttgaaaggaactggactgaaaattatagtgagtgagattgaaattagacagaaggcatttccagtcatgagctgtgtgtgcgcatgccccttcacagtggaccaaagcttaaaccagcggcttgagcaacataagggtggcttgggccagaaaagggttcctggaagtggcatctctgagctctgttctaggcagaagagcctcctgctgagaagtgaggggagaaaaggagggagcagtctgcacaatttaatctcacaaagcagtgccctcaataagagtcaaaagcaggtagagttgggagggactttccattctaattctctaaagatgggaaaactcagagaagctgaatgacaaagtagcattcaaggaaggaagaacactacagctcttccaagatggaatgagctgccttgagaagtaatgagttcgctgcccctggaggcattcaggcacaggctcagtgactactctgaaggaagctgtaggggtgactcctgccttaggtgggagcgtggactgatggcctccagggttccttctgacccacagaatctgtggttctatgcctggcttagttactgaatgcttgctctgcacctgatactgtttaagtacttttagtaatttatgcgaattaattatttcctttaattcatcaagcatttgtagagtccctgctctgtgctaggggtttaggatcagtgaacaaaacaaagatccctgccctcatggagcttatgaattctaactggaagagacagtcaaggaataataaatatatggtatgttaatagacaaaacatgctaggaaaaaattagaccagggtgagagggattgggagtatgggctaggggtggtgatggtgataattgcaattttaaatcggatgaacaacgtgactagtgagttggactgagaaggtgacattt

SEQ ID NO: 57958 - DNA, 1602 bp, Homo sapiens
agcagatcatggagtatcttataggccattgtaaggactccgagtgaagtagggatacaaaggggtatcttgtttttgcttttccttccacttgcaggtggtaggggtctttgtcgttccagtgcctggagagagagggacatgttggattcattcaaagaactttttttcccatcaatccatccccaggcccgctccctgactgagagggaggatatgggttagacagagaaagggagtaacctcgggatgggtcgcaggcaaggccctggggaaggaggagcatgaggaggctggggtgctctttgtgctggaggcagtaggtctggacatgctgtggctgatgctggatgtgagacaggtggtgtgggaatgtggccccactgaggctctggcttgggggctgtgtgcctgcagaaccagtcttcagtatggcatcatgtgtctgaagaggctgaattatgaccggaaggagctggagaagaggcgagaggagagccagcatgagatcaagggtaagctcgtcaggcttggagagggttcgggagcagcctgcttggctggtccctgccttgggccaagtggaggggaggcattctgtgtctcagggaatcttccagtctgaaaaggaagatgcagcctcaccttagggagctcccagtctgatggaggagacatagtccatgccaagttgtctataattcccctccctcaaccccacataccagatagcagccaccaactggacaaatgcagtgaatcctctgggacggtgttatagactggtgtgcctgtggaacttgttgatctggatggggctggatgggagatgcaagtcttagaggagaccttgaaggtggaaagaataagaaggccattccagcttgggtcagggggatgacccgtgcaagggttctggggagaaagcttggagcctgttggcctgaccccgggtcctgtaaactggcagggatggagtgagtggggggttggttccccaggcacccaggtgccagggaggagagaaagaagatatggaaatttagggatggagtgggggtcagagagcagggtggactgcggctctgggtttagggagctctgcttctgtccttggagggcccttgatgaaacgtagtatctccttccgtcccttttcttcccccacactccagatgtgttagtctggaccaacgaccaggtggttcattgggtccagtctattgggctccgggactacgcaggaaacctgcatgagagtggtgtgcatggagccttgctggccctggacgagaacttcgaccacaacacactggccctgatcctccagatccccacacagaacacccaggtgggcagccttttaatcagtcaacttgagtctctccctgtatccctcacttgctctctttctttccctcatacacaaaggcttaggtatcttggggggtggggagcttttctagggcctatgccagaggggatcgcaatgtcctcaattctccaagtgatcgctgtgcataagcaagccctcatgggaacacatggccttcacatacagagcacacctagcgtgggcctggcacacagtgtgctcttaca

SEQ ID NO: 57959 - DNA, 1972 bp, Homo sapiens
acaggctgggatggtccttccaagaaagggtcatttcagacgcagccctgcttgggctattcaatcttagggtgtctatccacgtctggctgtgccaaatggtctggcagctggttttggcatccccagcatcaccactctcccaacccatcaccgtgactgcagttcctgcccccattctcttggggtcagggaggggctgggaagggctactgaaggccccattctcccacaggatggtgaggctgggaggaggaagactgaggtagagattccaggccctggcataagctgaatcccaaatttgagtttgggaagaaccagagagaaatggatccctgagctctgagccaagggtgaggatggggaaactctaagctcccacctaataagaagcataggcagaccagccagagggagagccaatggcctctggtagccttaagcccaaagggcagtgggaatgtcccctgccccaaccatcgggtggagctcctgctgggctatggggaagggaggttgtgcggatcttgactctagggcagaacagatctaaccatgcattgctagctctgctcccagcatcccttccccttctctcctcctctgcctcacttctttagtaatcccaaccctataaaaatgaacctaatgggtggattgaatatacattgagcccaaagtcaagtttggggaaaaggcagactaaggcctcctttctctgacctcccaggaagaaaatagcttctcctacagtgattcatgtcccaggtccaggaaatccaatgttggtgaaggcagccactctcttgcttgtccccaaatcacctaaccctcatccagggctattttggtgggcagggactgcctcctcccggaattcctaagatccgcccagctgccaccattttcattgctttccccagcagcatgatgggaacccaagctgagggatacaggtcctgatttggtaggaatattattcccaagaaatacccgctcctcacctactccctcatcctaccaaggtgcctgaaaatgttcaagacttatgttcagggtgggatgatggaaccgagggcttcatcaaagtgagaggaaaggaaaagcatctggcatgtgtttcttggataggggccagtgcagtgccatcctacaggtggctggagcagctgctttgcaacctgatcaccttgagttctgagcagggactaggcttgcaggtgagataatgggccagggcacccagtccagaaggagcaatggcacctgggcagtgccagggcttaaagcccgctgctccttttcggtagaggagaggcccatcactggtgtggtggggtgggctctcccttaggcttgggcaaggcagccacctgcccttgctctcccttagtgttccctggcctccctgccatcaggttgctgggagtggagatggagggattattgagcagaaaatgagttggatggagataaacagctcccatccctgggtaatggatggtaagatgatggagattcctaagattggtggagttgggcaatgcatagccatctgactccttcagggtgctcttgatgggctggctgtaagggagactcagtcccagcctctcccctctacaactcctgccactgttggccatgtcgtaaggcagcagctgtgccaggatagctgggtccattcagagcaccttgagaagtgttgcagggaggtgttaagaagagaactctgtgcaaacagtgatggaaggctgttgtcttggtgtatcccttgcctcatagtcaatatattttttttttggcgagtcaccagtgacccgagccctccacaccagcctcctgtatctcatcaggtcccttctcagtactgtatttgctcagtgcatcaggaatgggtgtatgggtgtgtgtgggtgggtgtgagtgtgggtgtgtacgtaccaataaacaacctggttttaagaca

SEQ ID NO: 57960 - DNA, 1047 bp, Homo sapiens
gggtgctggcaggatcagttgtgcttgtggcgcctcactccctgcacatgctgctcctgggctcgagcttggggagcagacagtgcctcctgactggttttcctttagctttgatcttgctggctgtccttgccagggcttggctgccagccttggtggttgatagccaacctttgacctttgacatccagccttccccctcctccacatgtgctaaccacagtgaaatcacagatgcacaaattatcagaactgggaagaatcttaggccaactgcatcattttaaagaggagaaactgagaagtagggaggaggaagtccttgtctaaagtgacagatggcagaatggagtaagccacattggactttagcagcctgcctgccttgtcttcaagagccaggaaatattcatttaatatcttctacatataatcacaccacctttacctaggtgatcacttaggtacacacacacacacacacacacacacacacacacacgttgtctagagtctcccttctggacctctgcctgccccagatccttccagattcctgtcactgcccccctatcaaagatccttgcccaattttctaccccagtgatcttgcctctgttgggtggcaaagggctgatgtgacatagctgtgacatagatgtgatgttaggcccttggcctctcctccttcccatacagagcagatagagagcttcactacttatggatatgaggccttaggttggttccttaccctcaccaagcctcagttttctcattttggaaatggggataataacgcacttagcttattgcctggcacccagtcagctaataaaatgttagctattatttattattattaatgggactatgattattcctaaaagcagtagctctctggaagacttctcatctagcctgtaggagggggctttggctccataacttttccatggtggtacccccatccctaaaacaaagtcctgcattctaggagggcttctggaggtctcaatccctaccctggccccaaccattgtcagc

SEQ ID NO: 57961 - DNA, 1001 bp, Homo sapiens
atccggaagaaagcggatatcctgacaggtgagctgcatttgggccacttttgacctaacaatatttgccaatcaagaaaagacagctgagaggttgaacattattcatgagagccacatggggttaggggataaaagttggagtctccgggcacagtggctcacgcctgtaatcccagcactttgggaggctgaggcgggtggatcacaaggtcaggagttcgagaccagcctgaccaacatggtgaaaccccatctctactaaaaatacaaaaattatccgcatatggtggcgcatgcctataatcccagctactcatgaggctgaggcaggagaatagcttgaacctgggaggcggagattgcagtgagccaagatcacaccactgcattccagcctgggtgacagagcgagactccgtctaaaaaaaaaaaaaattggagtctagaacccaccaaggtgggggccctgataacaccccacaccccgccctgacacatactgtgggttggaatccaaaacagctgcatcccaagagcaggtcatctattccctgcatgctgcagcccagcttccagtcatctgggcggcccagaaaaacctcaatttttaaagctggattaaacttactccagactgccaactaccaggactcctaggcttgttaggcttggaagaagcaaataaaaatcatctctggaagaaaatgacatcatcccaggcctcaattattcctacagttttgcaagcacaatgtcccgaacataataaaaaaacaactgggggcgttctgctcccacttaaaaaatcctgcgagaacatggctctcattataacatcacgtgacagctggaacacctacagcagcatagattttaaaagccatcagagagcagaagtgaggctgcaaacagaacaaagcaaaacaaaaataagttaattaaaattccagaaagtaataagtaattcaaagtaataagtcattcccacagccactttc

SEQ ID NO: 57962 - DNA, 1083 bp, Homo sapiens
caggttcctagcactgacgacagcgagcgatgacctcagcgccgccaaggctgcgagggcgggggctggggtggcgggggcggggaaaagcgccggagcggggccgagcggagcggctccgggccccgcccccatcctctggccgcgaccaatgagcgccgccgccggctgcccccctacctccctggacctcctgaaaaacgctgcccggggaaagtccgggcagagcccgagcagcggccagggtaacgctgtcttgtggacccgcacttcccacccgagacctctcactgagcccgagccgcgcgcgacatgagccacgggaagggaaccgacatgctcccggagatcgccgccgccgtgggcttcctctccagcctcctgaggacccggggctgcgtgagcgagcagaggcttaaggtcttcagcggggcgctccaggaggcactcacaggtgagcgcatgccgaggggcctggcgccaccgggggtcggccccatccctgccagggccgtctttcttctactcctgcggcagggtgacccacgggagcagctttgggactcggtggccctcctccgacccccggggcggcccgcagtccccagtttcctgggtcctcctccccagccctgtgctcgggtctcggccgtggcggttctgatggggcgcgcccctctacgctctcggaggcgcagaccctggtcctggagtgccagcccgagtccccagcttatgcccctgtctcattacgggctcgtctccctcgctggaccctcgagatcttaagaccctcgatggatgttgttgcgggccgcccggtcggccgaggggtcccgatgagggaagaaggtgcagtcgagccttttcaacaatttggagtcccagtgcggttcttcctgccggtcggggtgcgctgtgcctggggtagtccactggttgctgactggcttcaagttggaatttgggccccctttgtgttatctttggttccccttagccatctgccacctattgtggtagggaggagagcctcgtagctcgtgaccctgccgtgcgggccttcaagttgggaggtgaaga

SEQ ID NO: 57963 - DNA, 1568 bp, Homo sapiens
gcatcaaccacaagatggaccccatcatcagcagggtggccagccagatcggactcagccagccccagctgcaccagctgctgcccagcgagctgaccctgtgggtggacccctatgaggtgtcctaccgcattggggaggacggctccatctgcgtcttgtacgaggaggccccactggccgcctcctgtgggctcctcacctgcaagaaccaagtgctgctgggccggagcagcccctccaagaactacgtgatggcagtctccagctaggcccttccgcccccgccctgggcgccgccgtgctcatgctgccgtgacaacaggccaccacatacctcaacctggggaactgtatttttaaatgaagagctatttatatatattatttttttttaagaaaggaggaaaagaaaccaaaagttttttttaagaaaaaaaatccttcaagggagctgcttggaagtggcctccccaggtgcctttggagagaactgttgcgtgcttgagtctgtgagccagtgtctgcctataggagggggagctgttagggggtagacctagccaaggagaagtgggagacgtttggctagcaccccaggaagatgtgagagggagcaagcaaggttagcaactgtgaacagagaggtcgggatttgccctgggggaggaagagaggccaagttcagagctctctgtctcccccagccagacacctgcatccctggctcctctattactcaggggcattcatgcctggacttaaacaatactatgttatcttttcttttatttttctaatgaggtcctgggcagagagtgaaaaggcctctcctgattcctactgtcctaagctgcttttcttgaaatcatgacttgtttctaattctaccctcaggggcctgtagatgttgctttccagccaggaatctaaagctttgggttttctgaggggggggaggagggaactggaggttattggggttaggatggaagggaactctgcacaaaacctttgctttgctagtgctgctttgtgtgtatgtgtggcaaataatttgggggtgatttgcaatgaaattttgggacccaaagagtatccactggggatgttttttggccaaaactcttccttttggaaccacatgaaagtcttgatgctgctgccatgatccctttgagaggtggctcaaaagctacagggaactccaggtcctttattactgccttcttttcaaaagcacaactctcctctaaccctcccctcccccttcccttctggtcgggtcatagagctaccgtattttctaggacaagagttctcagtcactgtgcaatatgccccctgggtcccaggagggtctggaggaaaactggctatcagaacctcctgatgccctggtgggcttagggaaccatctctcctgctctccttgggatgatggctggctagtcagccttgcatgtattccttggctgaatgggagagtgccccatgttctgcaagactacttggtattcttgtagggccgacactaaataaaagccaaaccttgggcactgtttttt

SEQ ID NO: 57964 - DNA, 1047 bp, Homo sapiens
tcaccccacttcctctacccccaggttctcctccccacagccagtcccctttcctggatttctaaactgctcaattttgactcaaaggtgctatttaccaaacactctccctacccattcctgccagctctgcctccttttcaactctccacattttgtattgccttcccagacctgcttccagtctttattgctttaaagttcactttgggcccacagacccaagagctaattttctggtttgtgggttgaaacaaagctgtgaatcactgcaggctgtgttcttgcatcttgtctgcaaacaggtccctgcctttttagaagcagcctcatggtctcatgcttaatcttgtctctcttctcttctttatgatgttcactttaaaaacaacaaaacccctgagctggactgttgagcaggcctgtctctcctattaagtaaaaataaatagtagtagtatgtttgtaagctattctgacagaaaagacaaaggttactaattgtatgatagtgtttttatatggaagaatgtacagcttatggacaaatgtacacctttttgttactttaataaaaatgtagtaggataaacttgtgtggtgtagagaagttaaaatcctcacgttgtacatttgtgtttccctttcagatccaaatcctttctttgtgtttaatagtatttctcctcacttgcactcagacaatctatagcatgtgggtggtataaaagaaaaatctggttgtatggctgggccatttccaagcatcccctctttcctggaaagtagctccttacttccctccgttttgtttgtttgtttgtttgttttgagacagttttgtcactcaggctggagtgcagtggtgcaatctcagctcattgcaacctctgcctcctgggctcaaataattctcccacctctgcctcttgagtagctgagattgcaggcatgtgccatcaggcccagctgatttttgtattttttgtagggacggggttttgccatgttgtccaggctggtctcaaactcctaagttcaagtgat

SEQ ID NO: 57965 - DNA, 1070 bp, Homo sapiens
cacacctggctaatttatgtattttttagcagagacagggtttcgtcatactggacaggctggtctggaactcctgacctcatggtccgcctgcctcggcctcccacagtgctgggattatagcatgagccactgcacccggcccattgtaggtttttaaaagtttcataattaacaaagtaaggaaagatacagactcaagaataaaagtgagctgggcgtggtggctcacacctgtaatcccagcaccttgggaggtcaagatgggaggaaggcttgaggccaggagttcgagaccagcctggtcagcatggcaagaccccatctctattagaaaagaaaagaaagaaaaggaaaagaaaagaaaagaaaagaaaaggataaatgtgagttgtcatctgtatacaccaacccaggatgtccccttttctttttctctgctgtttagtttggtgaatagacgatgccttccttgggctgtttttgctgttgtcagggtatcatacaccaaggcctgggtttcaggtgcctgggacttagtgcttggctggtattccattcccaaggccctggaaacatctgtctgacatcctagatgaagctcttttgtctgccttatggaagtccctgttagatggcacagtgcattgaatagtgtccccccaggatccatgtccacccggaaccttacaatatgacttatttggaaacaaggtctttgcagttataattaattaggggtcaagatgagatcgtaagataaatatgtacaaatattacgtgtccgtaataaataaaaataaaaataatttaaaagatgagatcctaatgaattagggcgggcctgaaatctgatgactggtgtcttttttttttgtttttgagacagagtttcactcttattgcccaggctggagtacaatggcgcaatctcagctcactgcaacctccacctcctgggttcaagcaattctcctgcctcagcctcccgagtagctgggattacaagcacctgccatgacagctggctaattttgtatttttagtagagatggggtttcactatgttg

SEQ ID NO: 57966 - DNA, 1053 bp, Homo sapiens
caggagccgcctcccgagggtggaaatggctgggccgcgcacactgatggagaacagatggcgggggcggggctgcctcttccttcccccgcccccacaaaaacactgtgaaccctcctccctaaacccgaggttgggcaagggggccgcaggacccatcgacgtcacgcgggcccatcccgggcttgaacccttcccctctcccatggctgcttcctagttccttgggccattcttctccttggctgttcctcctgaggcccagccaggagggcgtgtgctatgttcaccctggaacagaagggggcgccctgcgcatccctgtgtcctgctggccagatgcaggcccctgcgggagccctgaccctgcaccctacctccgtcattccctcgctcctccttcccgatacccgggccagcagggccagggcgatgtctggtgccggggaaccaagcggcggagcagcagctttgccagaagggatccttggcccaggagaactgggtttctcggcctctttgagccagagctgccgaagatggaggagtccccagggggactttctgaaccttacctccgggctgtttgctcggccaggaccaagatcagatagtccacggcccagatgtacccaggagtggcgggtgggggaggagagagaaggggacaccaagtctttagacacatctgtgtttctggagcaaagggaaaccacagaaggccaggagtttgggtgtgcactgggtgtctttcaactgggtggaaccaaactgagtccttgaagtctcgctcctgaggctgcagaagaatagatggcttttccctgcctcgagggtgggataagggaggcaaagctgggagaaagaaagggagagagagaaaacgaatggccggcacaggtgcctgggccccagccttcaagtgcggtcagagcagatccggtggcggagtagggcctagatgaccacggactgcaggaggcggaagcacatcatgaggtccagcgggatgggcggcttcaagtagtttccatccagccgcaggtagcgcag

SEQ ID NO: 57967 - DNA, 1017 bp, Homo sapiens
acatagcacacgccctcctggctgggcctcaggaggaacagccaaggagaagaatggcccaaggaactaggaagcagccatgggagaggggaagggttcaagcccgggatgggcccgcgtgacgtcgatgggtcctgcggcccccttgcccaacctcgggtttagggaggagggttcacagtgtttttgtgggggcgggggaaggaagaggcagccccgcccccgccatctgttctccatcagtgtgcgcggcccagccatttccaccctcgggaggcggctcctgagaaacagggaggaaggggcggagcacctggacgtctcccagaagcccctccacgtttgaaaatgcgcctcctcctcggagacagacgcatcggtgccacctagtggctggtgggagtaacagctggtcccagtcttgcgcctggccctcttcctggggtgattttcctcggtggaggaggcccgtggggtcccaacacggaagagccatgggccgtgtgcatggtgtcgctctcctctagggtctagcgggcacaaacgtccccaggctgggctcattcccatcgtgagtgagcccaggtgaggacatagtcggctcccgtttgttgtaggcccttcccaggtgccttctcagctccctcatctgtaaaccgaggaggtggataagatgctcccggccgggcgcggtggctcacgcctgtaatcccagcactttgggaggccgaggcgggcagattattgcctgagctcaggagttcgaaaccaccctgggcaacatggtgaaacccccgtctctactaaaatacaaaaaaattagccaggcatagtggcgcgcgcctataatcccagctactgggaggctgaggcgggagaatcgcttgagccggggaggcggaggttgcagtgaggcgagattgtgccactgcactccagcttgggcgacagagtgagactccgtctcaaaaaagaaaaaaaaaagatgctcctctgaggtccctccggcgctcatgt

SEQ ID NO: 57968 - DNA, 1033 bp, Homo sapiens
cattttaaaccaccgatatgatgtcactgaatgaggagctggaagagatgcccagtagcacaccattatctagagtttcccccatacagacaccatggacagaaataacttcaagggcacgattaatagtgaaatatagtaaactaattgaaaatgatgatttttgaataattattacatttgttttcaatataatatatttaattgtgagtttatataatttaatttttcataatggctgtgtttaacaactgacttgcaaaattctggaaaatttagtaatcggttcctgcaagtagtaagagctggctccagcacatcactgctctcctcttccccacttcttccttctcttcctcctccccctcttcctctcccacagctttcttggcattctgtgtgggtgcaagagatggggaatatggaaaagagctccactgcagacactgctattttctgagccaggagccataagtgtcaaggaaagaagatggagaaatgcaaatttggctactgaaaaacatttcagtacatgagtgtgtgtgtgtatgcatgcgtgtgcatgtgtgtgatatttgcaagggatcgagaggttgattaatgcctgggctaaagatcaccgtttaaagataaggaattgggctttatggctggaggcccatgcctgcatggtccttggagggttcttacctgggaggagtggaagggctccgagctacgtgaagcggccgatggggagccgaggcaggcagaagtaggcgctggggaagaggctgaggttgatggggttgccatccaggcggatgtcttccagctgcctgcgggtgtgtttgtgctcctcggggtcacagaagacgtctctctgcatggtctctatcaggttattctgggaagaacacataccagctgagcctcaccaagaggctctgccccttaagcagcaccaaaggctcacatcagctgtccctaccagctctgcctgctctggtgcaactggagaaactgaagcatctagggccaaagccacacaaca

SEQ ID NO: 57969 - DNA, 1022 bp, Homo sapiens
agactgggtacctcttgcccttgcagatgctggatacttatggctgctctaatggtttctttttgtctatctttgaacctttattccagagatccagttgtcatcggtatccaggaagctctcctcttcctcctcctgacgtctactactacagttgctggttgttgctaaggttgctgccatggtaacatgcacatcctgtttacaccttcatctgggcaagttggtctaagctaggaacctacctaccctggacaactactatcatcaccacctggggacaccaatcatcgtgacacggagtccaccttccactcagttcccccatcctcttcctcctctcgctgccagacttcatacggaagaaaggatctagacttcggacggctactcgggagcttattgcacaagatatattcaatctattccctcactgggcccccagagaagcaagaagtaggaagaagttgagacagggaggcaggagacactggtcagttgaagggaaacgctacatcttctctggttgaggggcttggtaacagcaggcaaaatgacgaacccatcagaccgtgtcttgcctgccaactcgatggccgagagccgtgaaggggactttggctgcacagtaatggaactgaggaagctcatggagctgcgttcaagggatgcactgacccagattaatgtccactatggaggtgtacagaatctctgcagtagactgaaaacctcccctgtggaaggtaaaggccatatcaggggtggggagttggaggaaggtggctagtgtttcaaaatattgttttcccagcttctagagaaggcacatttctggaggcccagctggtatatttttgtctggtgggaaaggtatggcatctgaagcactgaaaggagggcaggccatgaagaactgtatctttcccagagatgatgtttagaaagtgtgctattctctaaagattattcttttctcctttttcttttctttctttcttcttcttttgtttctttttttt

SEQ ID NO: 57970 - DNA, 1032 bp, Homo sapiens
tcctttttaggaggaagaatggtgttttctgaggaagagttaggccagcccttggaggcaaggtctgggcccagaacagaatgggaaacaaggggagccttgaataaacagcaaattattaactgtaggccttctttcaaaaggctgaaggctattttggttgaatttggatctaaaagattgttggtggaactttctgttttatgttccttctgtacccttctacttcttttctcctctgcagagttgaaggcgtgacagtgagatattgagggcctccaattctttttcaacaacattcaactaatacttaaaaactgctaggtgctagggacacaagggtgaacatgacaggtgcagtgcctccttccatagagcttacaggctaaaagaagatgcatatgaatgaaggcaatttcagaaatcttgccatagggcttcgatgaggaagagcagcgtctatgggaacacagtgtagggacctaagctgaaggcattgcaggggaggggaagggggcttagagctggagacagcacacctgtatcatttagggattacccagtgaagctctagcatggccacgctctatgatcattgctaccacctgctgaatattcctggcataagatgccagcatttttgccttccttaattactgggtagttactaggtttagggagctgagattccttggggagtaagtggcaggcgggaaaaaaaatgtgttttaagacggccaacccaaattacaattttgttttattagcttgaggatttagatgaacgtctatcaccttaagatctctggggcttaactgtgttcccgtcactgtgccttttgagggcagtggcatgttttaccaggaattgtccattttgctacaagctgagatgtactgggattgggctcttcctcggtgtagcagattgaaatttctagtagtattgtcaatctggaaaaaattgagtacatatcccaagtaaatgttcacctacaagactattgccttactattaatacatctaacact

SEQ ID NO: 57971 - DNA, 1050 bp, Homo sapiens
atacttgagcaaatcaggaaggaaagggtcttttttatttattttattttagagacaaggtctcattttgttgcccaggctggagtgcaatgacgtgatcactgctgctcactgcagcctcaaactcctgaggtcaaaacaatcttcccacttcggcttcctgagtagctgtgactacaggtgcaccacatcatgcctggctaatttttgtcttttttgtggagacaaggtttcaccatgttgcccaggctggtctcgaactcctaaacataagcaattcacccaccttggcctcccaaagtgctaggattacagacgtgagataccatgcctggcctctttattttatttatttttgagacagcgtctctctctgttgcccaggctagagtgtaatgacatgatcatggctcactgccacttcaaaactgccttttatcattttccttttttcctacattcattcatccactcctatctccttttcaggtctgtctgggaaccctgcagatctggagaaacgtaggcaggtgtttggacacaacgtgatcccccccaaaaagcccaagactttcttagaattagtgtgggaagctcttcaagatgtcacgcttatcatcctggagattgcagccatcatctccctggtcctgtccttttatcgccctgctggtgaagaaaatgaacgtgagtgtcctaaacagctcagcgtgactcttatctgggttctttccaccaccaccaccaagcgcttagtattggtggctgacaggttatagcttaaaacatttcccccattatccagagtgggctttccaaaggaaaccaagcagtagctactaagctattcttccaactcatccttattccaagggttcctccccaccccaccctcaccctctgtcttctattaaatcctttttcggaatgtcaggaatcctctacccttttaagacattttatttatttattaattattattattattattattttaatggaatcttgctctgtcacccaggctgggtgcagcagcttaatctgggctca

SEQ ID NO: 57972 - DNA, 1050 bp, Homo sapiens
ctccttcagcccctttctgcagtaaagattcactattttaagcactgagttccaggaaggatggttgttttaatagtgcttagtgacatgattaatccccttgctggaataaacctagcttgggactctgaggtagtaccaggaagctgccactgaagaagaaatccataccctaaaagcaccccagtttcatctaaactcattagaatattattccaaaggccctaatagagtgttgaaggcaagttccatgtctagcatgggttggaagtggtcggaactgatgtcagggtccaaggtatattccgggaaagagacaggaaggttttctggtttccacctgcctgccactcagtgctaccaccttgcctgctcacctgtcctatttgtgtgtacactccagcaaagacccaagacggagtggccctggaaatccagccactcaacagccaggagggaatcgacaatgaggaaaaggacaagaaggcagtcaaggtgcctaaaaaggagaagtcagtgctgcagggcaagctgactcgcctggctgttcagattgggaaagccggtgagtagggtagagcctcgttgtggtttatcaatgttgtcttggatcctcatcacttttatccccttctttctgcaccgaccgagactggcagaaagaagctgaaacttcagggtggctagttggggctaggcggctgtttccctatctccgccactgtttggtcgctccctaggctttttcagagagaaatgttttcctgtgtgtaagggttaatggccctgagatctcttaatccaaatgaatgagaaacaaagagcatatattacagcaggggagatttacattagcaagaaggaagactttaataactgcttacctgtctcttgctttgggttgtaaattccttaaagatagagaaggctgcagcttgctacaggcaattctctagcataggagtaggatctggctaagcacagagcaataaataccaagtaaggactggaggaagaaggaaggctgtggttacagaggctctctccaga

SEQ ID NO: 57973 - DNA, 1011 bp, Homo sapiens
gctgtggctcatgcctgtaatcccaacattttgggaggttgaggtgggcagatcacctgaggtcaggagttcaagaccagcctggccaacatggtgaaacccggtctctactaaaaatacaaaaattagctaggcatggtggcaggtacctgtagtccctgctactcaggaggctgaggcagaagaatcacttgaacctgggaggtggaggttgcagtgagccaaggtcgtgccactgcactccaggctgggcaacagagcgagactccatctccaaaaaagaaaaaaaaaaatgttatttcccctatgagctccaggtatataatgtgaaggctttgtaaatgagttctttctccctaagttctctgccttgtcaaggcatcttactcaatagtgctgtgtatatttcttctcccagcctccagagaaggagggaggcctgcctcggcaggtgggcaacaagaccgagtgtgctctgctaggctttgtcacagatctgaagcaggattatcaggctgtgcgtaatgaagtgcccgaggagaagctctacaaggtgtacacctttaactcagtgcgcaagtcaatgagcaccgtcatcaggaatcccaacggtggcttccgtatgtacagcaagggcgcctctgagatcatcttgcgcaagtgagcacccccgaccactctgcttcccttcaagatcctctcctcaggaaggcatgggtgcacaccccacactgaacccatgtgaatgagggagccctccagccaggtggtgacataataactaatatccaagcgtctactcaggccacgcatgttttttaagtgcttaaggtggcttgttgtatttaatcctcacaactcagtaaggtgggtactatgattatccctgttttacagatgagaaaacagagatataaggaagttaagtatctcactcaaggtgatacagctaatagtggcacagccaggattcagacctggacgatcctaagtttccatttcctaatctga

SEQ ID NO: 57974 - DNA, 1078 bp, Homo sapiens
actacatgagagcaagtatcaatgcagcaaactgagagagaaggtaaaataagtcaagaccagaactaacatttaaaatgtttaataactagtacaacaaaaaattagccaggcatggtggtgcacgcctgtagtcccagctatttgggaggctgagatggaaggatcacttgagcaggaaggtccaggctgcagtgagccatgatcatgccactgcgctccagcctgggtgacagagtgagaccctgtgtcaaaaaaataaataactagtgcagctcagatattgattaattagaatggacaccagccataagcaagcagtatatctgtaccaacacattcttactcttagttcagaccacacttaacctccagtgcttctcctctccccactaggtgagaaattctttgatattgatagtgggaggaaggcacctctacattcaccacccagccagcactataccattgtttttaacaccttcgtgctgatgcagctcttcaatgaaatcaactcccgaaagatccatggagagaagaacgtcttttcaggcatctaccgcaacattatcttctgctctgtagtcttgggcacattcatctgccaggtgagattctatctgcagttggggcaggagatctggaatgataaagggcagaagctgggagccagggttccctacatacctaggaaaaggaatgaaggaattacggggactggagctgtaagttgaacactttgggattcccaatctgctttcttttgcatattgctctagaattggagcccattgtgtcaagagctccagtgcagggcagcatgttgactggaaataaaataatacttctaaaatcctttcatgatctttctaaatacacagaaatttcacagaatgaccaaaagaagtattctcttctagtccctttctatggctcctgtcagcctatatgaaatgtgcatgcacatctagtatagactctccctgtccctgccctttgttctgaagggcttatgataaaaagtgttgtgcaactcaaagaaagagaagtaatgggatttgtacatgtatattacata

SEQ ID NO: 57975 - DNA, 1075 bp, Homo sapiens
acagatatctctctctctctctctctctctctctctctctctctctccctctgcctctctctctctctctcttttcccccctcccccagggggagtgcagcctcagtctcccaggttcaggcaatcctcccacctcatcctcagttcctaactccatcactgtaccttctccttgtcactaactggctttagtcacaagaagccaccagctcccctaactcctccagattgtctgttaatcatagtcacagtaactatgtctgtctccccatcagagtgctcttaaaggctgtttttgtctgtctcccctttgagatttcttcttttcccttcccctgcaagcaaatcgggacttgtacccaaggatcctgaggagtgggatgatgtggctttgggggccttggctggagggccagctgcctgttagtcatttccttgatggtgggctgcccctttctctgttctagattttcatcgtggaatttgggggtaaacccttcagttgtacaagcctcagcctgtctcagtggctgtggtgtctcttcattgggattggagaacttctgtggggccaggtgagtaccggcacaccctcctggtgcattctcacagcctgcagaactcccctcctctacatgagatggaacaagcaacggtggagaccccccagctcctcatcttcatcttctcctcttccctccccacccccactcaagttttcaagttcttgccatctcataggatctcaaggtggaatgatcacttcagaggtttcagaattcttctctaactaagcctggaggtagaaaaatcccttagcttggctgggcgcagtggctcacacctgtaatcccagcactttgggaggccgaggcaggcagatcacgaggtcaggaaatcaagaccgtcctggctaacatggtgaaaccccgtctctactaaaaatacaaaaaattagctgggcatggtggcaggtgcctgtagtcccagctactcgggaggctgaggcaggagaatggcgtgaacctgggaggtggagcttgcagtgagccgagattgcgccactgcactccag

SEQ ID NO: 57976 - DNA, 1014 bp, Homo sapiens
actactttgcatgtggcaactaagaaaggggtcattcatttccaatacccttctcaaccccttgcctatacataggcaatatcaccatcttctccccaaactcttttcccccaggtcctggtctctgtttcttcctactgcgtaccatgctgtatagttctgttaaccttaaaagacagattgcaaaatggaacagaagaaatgagacagaaagaggaaaatgaagtatatgaccaggcagatggctggtcaattactagaatagaagctctcttttgtgtgtgtccataaatacagaaaaccttcctaaaagcctgaccgctggtgggcacttggagaatgcttgcctggatggattggtgcttctgcccactgctcttccagtgggaagggtggtagggcaaagagtaacctgcccaagggcctggctcatgtaagttgactgacagctcttctcacgctgattctgacgtcttcctcttcgctgcgcttgttttcagttcatctccgcaatacctacccgatccctgaagttcctgaaggaggctgggcatggcaccaccaaagaggagatcaccaaggatgccgagggactggatgagattgaccatgctgagatggagctgcgccgaggccagatcctctggttccggggcctgaaccgtatccagactcaggtactctgatagtggtctgtccttcccttgggagaagcagcttcccatcttggaaggtgttgggagggtagcagttcttgtcggccagcatctcttcccttccaaaggctcactactgatgggcagccctagatcctcagcttcaggacagacacgcaaaaggatctgtgtggggtcctctgagaggagaggagtcaaatgacctagaccatgggacactattagcatagtcctttagctctgggttgaccctaaagcccagcctgccaccctctatcaaatgggcaagcttcagcataaggtctcttgcaagcactagacctgaccccagggtggg

SEQ ID NO: 57977 - DNA, 2334 bp, Homo sapiens
atgaaagaggtaccctacccccaccttcatcactcctacccctccaacctcaacagtttcccccacattactcccatttcttttctgagtgaagattttttggacaagactaggatcagccaccttccaacaactagaaccgtcctacaaccatttacctttcccctggcccctctctccaacttctcggagctccaaccctctccccctaccccaattctaccatccctgattctaagccacgcctcagagagacctgcagttcagaaaagcagagctgccaaaattgctggtgcctgtggacaagcaaaagctgttcacaggcatcaattattgtcagttttttcttgatgactctgaactgaccgaatcccttcctttttgcgcagtaagacagagactatgacactgggcaatgcatctccttttgcccagtaaaaccgcacgtggtttcctttccttcatcctcttcatccaccccatcagaaaggccacttgtttgtagcactgcctcctggattaggtttctctccctggtccctttcattcccttctccacataagactatgctcctcttcacaatttggaaacagctagagaaagcagcatgattgggcacagttgctgtgtatcagagacatgaacgtgcatttgaattatgagagccaggtcttttctcaataggcaggaggaaggcatcttttgacacctgtattttatctgctgcttctagggaaggggctgaaggagtgaagttctgtgttatttgcggggaggggacacagtggtggttgtgggatataaaaatatgcatgtttcctggctgaaagggcaaattattattagagagttttaagttcctgcatgctgctgacacaaatgaagattggtttgtctgcctggctgcacagttttcatggtcactcgtcacccaacctgtattatgtgcagattggtgtatgctggctctttgaggtctttaaacagataactaaacctcaatgcataatttttccattccacattcacaaaatgtttggcctcagcacagaaatccacatatctcaatcatctttttaagtttggctatgaatttgcatctagttcccatgtccttgccctccatctaaaagaactaatgaaacttcttgttttctgtttcattttaaaagtagattgtttgggaatgctaacgttgctttgggttttctactttttttaatgcagctttcaaaacgtcctagttgccgtcactcaccccagcccaccccactgcttgaaagttgagccatgtgatgtttctagtgccccatgatctcttctgatgtgtgtttggttttgatgctgagcagtcatgttttatagtctgggttttgtttctctcctaaatccaccatctccttgttctgccggccaattctcacctctctattttctcatcctccttttccttcccctggtatagatcaaagtggtcaaagcgttccatagttccctccacgaaagcattcagaaaccctacaaccaaaagtccatccacagcttcatgacccaccctgaattcgccatagaggaggagttgccacgaacaccactcctggatgaggaagaggaggaaaatcctgacaaggcttctaagtttgggactagggtgctcctgttggatggtgaggtcactccatatgccaatacaaacaacaatgcggtggattgcaaccaagtgcagctcccccagtcggacagctctctacagagcctagagacatcagtttgaattttctttctctgactctcatccctattttacctatttccattttcgtctatcccatctatgaggtgatgatgggacttttcattgtcacgtcagctgctgtgttaacagcagtgtgtgtgaagtgaacctctacctgaccatgaagaggcaagagcacagacttacaaggatttcaacttaagcttgacttggggtttgtagcgggacccagtcaaaccccattcaggtcatggtagaatctactccttggtagtcacttgtcatttttaaagaaatgatgacaatcctcttggcatcaccccaccccacattctccccgatgttcctctcctgaattctggattttgtcctacaagtctgtgccatttataagctaagttgagggttcagagggagacaaatatccccaagtgaaatatgttgcggtagagatggaatgtataaaatccgccagtagtgtgattgtttttcaatttttcccactttgaaaacttacacctaaaggcctgtaggcctctaactctttctgccctttcattcaaacctctccaaagtt

SEQ ID NO: 57978 - DNA, 1035 bp, Homo sapiens
ctggttttgaactcctgagctcaggcaatctgcctgccttggcctcccaaagtgctgggattacaggcatgagccactgcgcccagcaggaattttttatttttatttttattatttatttatttatttatttattgagacaggatctatctttgtaacccaggctggagtgcagttgtgcaatctcagctcactgcaacctccgcctcctgggttcaagtgatcctctcacctcagccttcagagaagctgggattacaggcatgagccaccatgcccagctaatttttgtaagtttagtagagatgaggtttcaccatgttggccaggctggtcagatgcaggaattcttgacttaaataaagggttttggatgatcatggatatatttgttcttctcttaagcatggttaaaggcaatctgtaggtaccagtccagctcttcccagccttactccctctttcaaatgagttatcatatatacttgctttaaataggtgaagacatgaagatctggagttataaaacacaaatcagtctttcaatgcagtcttcctgggtctagcatagcaagaaagcttaaatcaattgtgctgtgtttggaaaaagaatgtgctaaaaggagatggtctatatgtcctctgttataggagacaccagagaaatcaagtgatgcttaagcttgaacacagggcccagttctattctaaagtagagacaggccaggcatggtggctcatgcctgtaatcccaacatttgggaggctgaggtgggaggatagtttggggccaggtgattgactccagcttgaacaacatagtaagactccatctcttaaaaaaaattacaggcatggtggtgcatgcctgtagtctcagctacttggaaggctaagatggaaggataacttgagccgagtctaaggctgcagtaagccttggtcatgccactgctctccagcctgggtgacagagcaagaccctgtctcaaaaacaaaaaaaggagtagggacagatatatgccctgtgagtgt

SEQ ID NO: 57979 - DNA, 1325 bp, Homo sapiens
cctttcagaccatagagggtaacttctagacattgctatggcatttgtaaactgtcatggtgccggtaggagtgtcttttagcatgctaatgcattctaatgagcatataatgagcagtgaggatgactaggggtcactctcgtcgccatcttggtttcgatgggttttggctggcttctttatcgcagcctgttttatcagtaaggtctttgtgacctgtatcttgtgccgaccacctatctcattctgtgactaagaatgcctaaccttctgggaatgcagcccagcaggtctcagcctcattttacccagctgccatttaagatggagtcgctctggttccagtgcctctgacttacccactctgaatcatgctgaacttccatgaaatgtgggtctgccagaattctttactcataaggcactgcaaaaactatatataaatgggaggcaatggatgatggacatgcatattatgagtatcttctcttcccatgtgcattctccattgtcccaacagacttcatttacaaaacacgagttcaaagataagaatttctttcaaaggtaagaatttcaagatggcaacatcacaatattaaaccaagtgcagggcccttctgagtgccaggccccatgcaactgcttaggcagcacgtccaggaagctggccctgcatgggaaattgcgctcttgtgaagggcttcaggttcctttcatttcccctggagagtcaaagaagcatcggagataaaagaaaaagttagagttttctggctatgttgtcatattcttctgaaatgatcctaactcttcagggtagaaacagacatctaccttcccagtctggagctgggaatgctgaaggaaacgattggtaagaggaaagggaggcctgtttacttccatttctctctaacttcaggggagcaggacaccggcttattgactgagagtttctggaaatatttgcaagtcagtataggccctcagcccacaggaaacccagaattgacgataaagcctgtcatagtaagggggtgctgaaggagaacagatgccagagggacagcaagacctcatcttccattcaccattagagggtgggtgcttctagagggaaggagggaacttagcaaacctctgtattttgtactaaacagtatcctgaatgaagacacaatcaatataatgtaggtttgggtaattaattcattttatttaactaattaaggaatcaaaatgggttagttatctttgtttgtttgaggcagagtcttgctatcacccaggctggaatgcagaggcaagaatatggctcact

SEQ ID NO: 57980 - DNA, 8129 bp, Homo sapiens
gtaaaaaataaactaacaaatcattctacattgcatgcttaggaaaagtacagtttatttctaaattaaatgtatacatggtttgggagatttactcattaagcaaacactttggtaagaataaattgagcgcttactgaatggcagtctcagttcctgcggccctcccgcttattacctcatttgatttaaaaacaaaaacaaaacgttatgaaagccggcttcgaggcattcctctgaagggaagggactccccgacccagcgcctcccccgtcacgtgaccctgtgacccggagcagccatcttaggcatcgcctcatagaggaactacatcttccagaatcctcgcgccctgcgtcgtgctggcacttttaccggccgggccttagagcggagcctgtagccaggcgccatctttgacgctggcagtcttggttttctgctagtgctgctgctgctgggaggacgacggacggcagcggccaagcaagaagaaagacgtggcagcaagcgggagtcggggatagtgtcatcggttcggtaaagtttctgttctctggtaactagacccgtttttttgattcccgggtggcttggggccggggaggtgggggagagggcgaggggagtggcagcggcctcccctcgcccctgggtcgcggcctatcccgggaagtcagagcggatccttcagcttcgccgtaacgacccctcccccccacctcccggtcgcggccctcgccggggctggctgggagccccaggctcccgctcacttttcccatcctccccacccccaccccgttcaccccacccccacggcgcctgctcctttcccagccaaccttcctcccctcccccacatccggtgttcgctaatctcgaggagcccggagcagccccgaaaaccgactgttcccccgaatcccgaagagagaactgacactagattgctttcttcggggcaacagtttctctagttgagcggaccctcactgcctaaatcaatcagactgagtgccgggcgctgaatttacctactctcattcctctccagggtcccggtactttggagcttgtctcaaactccacatacagaaagccaccgaccttattccggtatcctacacccattccccactctcattacactcccacccctggccctcagcgtcggagtcaagagcaacagggacacttccgttctccttgtaggactggtgaaaccgtaatgaagaacacccctaaactcccataatcggtgcggattcctatggggaaggcctatattgttgacatcttccaggccttggttctggaccttgagaaagaggctgtggaactagagatagcgatgctttttagggtaaatgtatgtaggtattgggggaaggggagggatcaatcgaaaaatggaagtggtttaaagttcatatttcactttttgctatctctatagcgtacaacttgtgagttacttacaggctgtaaaagcttctcaagtctaaaaatatctgaaaactaaacttgaattaactcttaatacaaacagtactttgaaaatgcagcatttaaccttgttttaaaatttttttctcaaagcatttttttccagccactcacattttaaaaggttgtattacttttagttagaactgaaagggctcaactagcatttgctgtgaccagtatgcggagtctgtgttggctttccagaattgactttttgggttgtattggcaaatcacagtcctaaatgatgaatgttgaatgatgcactatgtttttgtttaaatgagatttcctgaaaatagttaatttcagaattaagggaaattgatgtcgctatcatgaggcatcataaaaatatgtattttacaaggtgaaggcatttcaagtagatatagttcttgatgaagcaggaagaacatggatctgggatttggaagacctggcttctagctgctactaaccaactctgtgactctgggaaagggggactcagttcttacttctgtaacatgaggacactggactatttgaattcagaacttagaaaattggaagggaccttaaagccctctaagaaagagttcgggaatgttctccattgctgtcagttttcctccaaaaataacctggcttggaagttattggtccagtgggaatttgattccccatagaaactggagaaaaggtaatgcaagtagagaggaacagctgtatttctgcttgagtaataaacccactaacagattctggtacgaattgtggagacataaagagaatgagtgtatgtactctaagtgtaccagtttcttcactctctcctggcagaagatgcaacacttttagtgattctgggattctgggatgtgttcctattaattctaatacagatgaagaagatgtggtagaggaaaagatggtagcagaaggagtgaataaagaggcaaaacagcctgctaaaaagaaaagaaagaagggtttgcgaattaaggggaaaaggcgtcgaaaaaaattgattcttgccaaaaagtttagtaaggatttgggatctgggaggcctgttgcagatgcccctgctttgttagcttccaatgaccctgagcaggatgaagaaagtctttttgagagcaatatagaaaaacagatctatctacctagtactagagccaagacctccattgtgtggcacttctttcatgttgacccccagtacacctggcgggccatttgtaacctctgtgagaaaagcgtcagcaggggtaaaccaggtagccatcttggtacatctactcttcaacgacatctgcaagcaaggcattcacctcattggaccagggccaacaagtttggagttgctagtggagaggaggactttaccttggatgtgtctttatctccctcttctggaagcaatggaagctttgaatatattcctactgatccattagatgataatagaatgggcaagaagcatgataaatcagcatctgatgccctaagggcagaaagagggagatttctcatcaaaagtaacattgtcaagcatgctttaattcctggaactagagccaagacatctgccgtttggaattttttttacactgatcctcagcacatctcaagagctgtgtgtaatatatgtaaaagaagtgtgagccggggtaggccagggtcccacttagggacttcaacacttcaacgacacctgcaagccacacatcctatccattgggctgttgccaacaaagacagtggtgctgttgcaaatggattagatgaagctgagactgagagaagtgatctcttgagtgataccttgcatggagaaaagtctacaggcagccaagatttaacagctgaggaccttagtgactctgattcagatgaacctatgttagaggttgaaaacagatctgaaagtcctattcccgttgcagagcaaggcactctgatgcgtgcgcaggagagagaaacaacatgttgtggaaatccagtctcaagtcacataagtcaggcaattatccaaatgattgtggaggatatgcatccttacaactatttctcaaccccagcctttcagaggttcatgcagattgtggcccctgattataggttgccatcagagacttactttttcactaaggctgtacctcagttatatgattgtgtcagagaaaaaattttcttaactttagagaatgttcaaagccaaaagatacacctgactgttgacatatggacccatgacccatccactgactattttattgtgactgtacactgggtttctttggaaactgcgtcttttctcaataatggcaggatccccgattttagaaagtgggcagtgctttgtgttacaggtttggctaaagactgtttgataaccaatattttacaagaattaaatgaccagattggtctgtggctttctccaaatttccttatccctagcttcattgtttctgacaattcctctaatgtggtacatgcaatcaaagatggtggttttacccatgtgccatgcttcctgcattgtttaaatatggtcattcaggactttttctgcgagcacaaaagcattgagaatatgttagtggctgccaggaaaacttgtcatcattttagtcattcggtcaaggcccgtcagatactgcaagagttccaaaatgatcaccaacttccatggaagaatttgaagcaggacgaaactggccattggatttctactttttatatgttaaaatggctcttggagcattgctactcagttcaccatagtcttggtagagccagtggagttgtgctcacctcccttcagtggactctaatgacttatgtttgtgatattcttaagccatttgaggaggctacccagaaagtgagcgtgaagaccgcaggattgaatcaggtgctacccctaatccatcatctactcctttccctgcagaaactcagagaagattttcaagtcagaggtattactcaggccctcaatctggtggatagtttatctctgaaacttgaaacagataccctactaagtgccatgcttaaatccaagccctgtatcttggctactttgttagatccttgctttaaaaacagtttggaagacttttttcctcaaggtgctgatttagaaacttataagcagttccttgcagaagaggtctgtaattatatggaatcttcaccagagatctgccaaattccaacttcagaagcttcttgtccctcagttacagtgggagctgattcatttacctcatctctaaaagaaggcacctccagttcaggttctgttgatagctcagctgtagacaatgttgcccttggaagcaaaagcttcatgttcccttctgctgtagcagttgtggatgagtacttcaaagagaagtattcagagttctcaggaggtgatgaccctttaatttactggcagaggaagataagcatatggccggctttgacccaggttgccatccagtatctaagttgccccatgtgtagttggcaatctgaatgtatctttactaaaaatagccactttcatccaaaacagatcatgagcctggactttgacaatatagaacaactgatgtttctgaaaatgaacttgaaaaatgttaactacgattattctacgttggttctgagctgggatcctgagcagaatgaagttgttcaaagcagtgaaaaagaaatactgccttaatttctttttctccatttaaaatgggcaactttttgctgtgttactgtatcttaatagctgtagttgttaaatataatcattatctttataaacacatctggggaaacctgaaatcacacaagggctgaaaattcctcagaggcaatataattttgataaaatgaagattaaagatttcatagctataactgtggcgctagcacttgaaaattttgcttataccaatgagagagaagatatttttaattaaaaaaaatatagtgcagcattgaaaggccttaggctttcttcctggtagattgaactagtaattggttttaagtaaaacttcccccaccatgggaaattttattgctctgaaatcaacgaaatgagaaaaaagtacactggctggcattcctcctgcccctgtttttctgtttccttaaaaaccctgatgcttaattacaacttggcaaaaagaaaacccgtgaaattgttttatatttggaaatttctaattgcctcctcatactggtcagctttataatttcaaattgttgagtgtgatagtgttaccctttagaattggatcttatataaaagggaaatattagaaaacaattaggaaaatatacttttagtctttgaaatgcctgttttaacctttataaaatattataaaaatagattgtgtaggtactttcaaataatttatgggtaaaaacagactaaaatgtttgcaagaattggaaaaggttgaatgggaattgtaatgagagccctttgaacatgcttggaaaaacccagtagacatttcccaaagattgtttctgtaattttaggtaatctttttaaaaacatacttaatgacccattatactgtattaactgtgcggttgttttggccactgaattcttaatgaaaactaagcagtcggtatttttatgtgttaggaatcattggtgaaatgagtgaattgatctcattttaagatccctttctactctgaaagtatgtttctgagattgagtaggaggccagaaaatgatgacttttagtaaaagtctattaaaagtttcagactgaataactaatgtgagatcccaatttttcctttttttcattttagatttggggatattccctgcccaaaaaattcctggaaaattgactagtattaagtgtgagtaaaaggtgtccacttttttttaagttttgattttagttttgtcttggatagtatttggcaagatttagcctagaaattatgtagtatttattacataagaatcaaaattgctttgttactgggctggtttcaaagtttagaactcatttctatgtatcaaaatcgggttttttttggttttgattttttttttttttaaattcttaaatggtaaatatgccattgtgaaatgaaatctcaactccaaaagtttacccttttactaactggagtaaatgtatacttacaaagtctttagctgtagccattagtagtaaagaatttggacctaggctgcgtaagcaagcctttccagggccactatttaatggcaaaccagtgatactggtgttgatacaaaataagaaataaattttcccttagataaagctttctgtgttttgacagtgccagtttagaatggctataatgctgctctgccttctacagcttgctgcaccactctgtagttactctattaccatacgtttctatcttttttggttaaacactccctgatgacgatgatggatatatatacatacatccatattatacataatgatatatgtgtaaggatttaccttcgtctttattttgtgggctgggcaaaatttagtgtaacaataacttcatgatactttggtataagagtaagttctttatttttataatgaacccaaatctaaagtcttttatagtgcattttaaaaggggaaacttatccaaatgttatatttctatacatttttgtgtatatgtgtgtgtgtataagccagttagtatatatctgtatgtatattatatacataaaacactatatttttacatacaagtatgcttttattatacagataataaagatgggggaaggtttctgtttttttcttaataggtgaagaaatcttgaagaccagaaattggatcttactgaaaaactgatgtttttttgttttttttttaaattatattgttcagctatggaagatggagttttttttcatgatcctttaactctcaagttcatctttaaatgaactctttttttttgttttttttttgttttgttttgttttgtttttgaggagataactaaccctagctgtctccagtctgacaaaggttatttgaatggacttaatctcccagtagttgggagatgttttaaaaacacatgctgtgtttgaattgtggctgagaggttttcttggcaatgtgaggaggaaatttttttctgcctcattattattaattcatggattgagtgttggttcgacctacaggcgtaatagattggaactcagtgaagacacagatgttcctgttcagagcaaccagctaatgtaagtggggaagcaggcatttttcgcatgaaaggagtgaacattcttgtcatttaaggcataattttcatggatcagtaagaaattaaaaggccattgttcagacatttttgcttgtacataattgtttacaaatttttagttttgggatggaaacatatttttttctttcttttctttttttcttttttggagacggagttttactcttgtcccctaggctggagtgcaatggtgccatcttggctcactgcaacctcctcctcccaggttcaagcagttctcctgcctcagcctcctgggtagctgggattacagatgtgcaccactacaccggataatttttg

SEQ ID NO: 57981 - DNA, 1070 bp, Homo sapiens
ttttttaagagatggggttttgccatgttgtccaggctggtctcgaactcctggactcaagcgatctgcccaccttggcctcccagagtgctgggattataggtatgagccactgcacccggcctatttcattattaaaacaagattgtgataacatttattgtgcattgttacctttaatacttttacatattataatacattctagaaatggaattgtcgaagggtatgtaaactttaaacatttgggtacatgtttagtacccatgttcagtgtcagactcttaatccaggttgttaacatcaaggtgacttttcatcatggcataccattcttgcattaggaattattagtgggagatatgactgaatttgatttaattgatttcaagttgtagatcactatttctgaaacctgatcttctggtatgtacgtttgtggaaaccctttccatattctcgtatgtgcttttgttatatgcttttgtagaagcttgcttggacgttttagtgtggagatcagggtatgccatggactaggggagaaaatatttgttgttttgtggaatcactattatggaaagccccaaagactacttttgcgtcttgtttgtaattggtgtacacctctagtcgtcttcattaacgtaagctagatcgatagaccttttcagaagtaattgttttcatcagttattctagctaaacagggttttctcacctagttatgattatatacttttggaataaaaatgcttgtgaaaatatttgaagtttttcatttagatgaaacattctactttatcatattttgttagcaagtattttgtgttagtaacctaagtcccattaataatctaaaatgtatgtagtcttttgagactttcaaattagtaggcaaaaatacatatatacatacatatatacatatatgtataatgtagatcaggctgggcgggatggctcacacctataatcccagcattttgggaggccaagtgaggaggattgcttgaggcaggagttcaagaccagactgaacaacatagcaagatcctgtctttacaaaa

SEQ ID NO: 57982 - DNA, 1050 bp, Homo sapiens
ttgcacaacagtagcgttttatttcagatattaccgttgcataaagtatgcagtggagcacagttatattgtatatatgttaattatatttaaattctatttactttctgattttccatcaaaagctagagttacacaaggcgagatgtcagttttgaagatgaactgtaaaatacatttttaaagaggacctaacactcctacttgtctttttcaactctttttttcagcttgtgtcactcatgccagatcaaacgaagggtactgtcaagaaataggttataggaaataatttgttgctctcggtttgttcctgtcattccatgtccattgttttttaccttaccagtcctttcttactcatttgtgcttgtctaaattccaggagctcttgttatggatattttacctaggatgtatttcaatgctacaaatagagtgttctctatttgtttacagggtgacagctgcccattccgtcactgtgaagctgcaataggaaatgaaactgtttgcacattatggcaagaagggcgctgttttcgacaggtgtgcaggtttcggcacatggagattgatgtaagttttttatttccgttatcataataagtagtctggagacctggtgggccaataaaaaatatagggacaaaagtgacttttaaaaaatatattaaggctgagtgcagtggctcatgcctgtagttccagcactttgggaggctgaggcgggtagatcatgaggtcaggagattgagaccatcctagccaacgtggtgaaaccccatctctactaaaaatacaaaaaattagctcagtgtggtggcatgtgcctgtaattccagctactcgggaggctgaggcaggaaaatcgctcgaaccagggagttggaggttgcagtgagctgagatcgcaccactgcactccagcctggtgacagagcaacactccgtctcaaaaaaaaaaatatatatatatacacacacacacacacacacacacacacacgtgtatatatacatatgtatatgtgtgtatatacacacacg

SEQ ID NO: 57983 - DNA, 1061 bp, Homo sapiens
ttaataatagatacatagtattacaaattatgagttcatatagatgcttccagttcatcaatgccacaggacttagtctagacttctccttttccatacctgtaactcttctccagaagtgagaaacttggttttcattgttcataatacttttatttatttgatcagtctactagtataaaaaccaatattgtgtcacagctttttccttcctctcaggctctgacatgacacacacagcttctccacaaggacacctttctcaccatgtttcaactctagtactctgtgctaagcctccctgcttgctttaccatagggacctctttctcaccctgcttggaccccaacatcctacttttgacccccaacacgatccctataatggatactgttttcacacctttgggctgtgatactttgtgctgagcggccctcacatgtgagatgctgtcctgaccctgcgcacatactccaactctgtaccaggttcccttgggaataccctgccttcctaaccccacttggtctttgatgccattctagactgaccctacatgagtatatattcttcatcctacattgtgatctcttctgcacagagacattgctaaccctgctcaggctcaacacttgtcagggtaccctttcatgcacatgtcctcttaaccctccaaccctccgtgggttccaacaccctatgccagttccacatggtcatgtggataccttcctattctcagtcagactccaataccctgctctgggccaccatgtccttcccttctcccatctgaatgcctgtctccctcaaccccatctaatgactttggactgaattgttagagtgagactaaatatgcagttcatgtgcctggggtcagctactccagtctggttttgtatttcttgtctcttaactacattctaagctacctatcttgcaaatagcagcagatatcaaataaattgataaaggagtactctgcaacttttatattttatgttataacatgaaaagtcaatgttgtaacatttttagtggagtgtatattggcaca

SEQ ID NO: 57984 - DNA, 1077 bp, Homo sapiens
tattaaaattaaaggtctagaatttgtgaacaggtactatgcttcttctagtcttctgttgattctgttttgagtgcccactttgtgtttatgtacagtggagagttagtggagagttaattaggtaaaagcacatcttttccctccctgggactttagaacttaaatgaggaaatttagtataaatgctcataagacaaatacactatagttttcataggtggtcaggaatttttggtaagttggggttgtatcttctgtttttaatttatgactgattttgtgcgtttagctgtgttgcccactgtgcctgagtcaccagaagaggaagtgaaggctagccaactttcagttcagcagaacaaattgtctgtccagtccaatccttcccctcagctgcggagcgttatgaaagtagaaagttccgaaaatgttcctagccccacgcatccaccagttgtaattaatgctgcagatgatgatgaagatgatgatggtaagttctgtctggctccttctttaaggcaaataaatagggtctcatagtgaattgggcagaatcaggattaaagctataggcgtatttttaattgtgaatttgccttaaatgttgatatatagatcagttttctgaggaaggtgatgaaaccaaaacacctaccctgcaaccaactcctgaagttcacaatggattacgagtgacttctgtccggaaacctgcagtcaatataaagcaaggtaagaagaggctagattggtgcctcttatagcactgttgaaactacctttgaaatttagttcacaatcattgacctccctcttctttttcccatgctacacgcatacttacctatacttagtttctgttgatcatttattcaaaaataaatgcctgctatgtacagataaaatacaaagatgaaaaggctcccgttcctcataaaatttctatttgaattttcaggtgaatgtttgaattttggaataaaaactcttgaggaaattaagtcaaagaaaatgaaggaaaaatctaagaagcaaggtggtaagtcatcacgttttggcatggatagttgt

SEQ ID NO: 57985 - DNA, 1067 bp, Homo sapiens
gatcgggccactgcactctagcctgggcgacagagtgagactctgtctcaaaaaaaaaaaaaaaaaaaacaccaggtgtggtagtgtgcgcagtagtcccagctacttgggaggctgagacaggagaattgcttgaacccaggaggtggaagttgcaatgagccaagatggcaccactgcactccagcctgagtgacagagcaagagtctattattattatcaaaataataataataattagtactatgctattgcttctgtttaggctgtatgtttggctgtttattattaataggtttgggttttttttttttttttttgatataatggccttccttaagactgagacctgattttcaagagactttctgggtggatttacactaatatcagaacatactttgtacccattagtagttactgaatacagaaaaattgactaaggatagagaaattctgcttttgccatttcaggagaagaacccttggttagattgagtcttactgagagactggggaaacgaaaattttcagcaggtaagataagttttgtgtatatcttttcttttctacttgtttgtgcattaacatgatagcttctccaaactctttttatacagatctttgttattggtgcccctgtattggctgaaagcacttataaattcctcatgttttcatgagtgcattataccttttattgaagatacagagatttaaagtgttacaattgaactagattatgaccatgaccagcgttttggaaggaactagattttaaaaatggtaaagaacacctctatttctctgaacaaatttaaatgtgagtttttagaggcgagaaaaatgattggttaatataatgtgtgtctcttagaatacaggaatccctaagaagaaagaagaaagtatgtatatataaaatttgagtccttgagtctattggtgcttgcttatttatttatttatttagagacaagagtcttgttttgttacccaggctggagtgcagtggtgcaatctcagctcactgcaacctccacctcctggactcaagtgatcctcc

SEQ ID NO: 57986 - DNA, 1050 bp, Homo sapiens
acatttcaaagtttcagacagtgagagatgggaatgtattgttgaatcagttatgcactttacgctctaagtaataaaaaactttcagcgatgagataatgcccatgaatgaaattaatatttgctgtggctttgctgtatatcaaagaacattatgtaaattctcatcgaatccttggcaaccatgagtaaaccatgcacaatgcttggcacttgatatcagtaaatattttctgcactgagctcaaactcaggaagggttaaataacttgcctaaggttatagtcagatgaatacattacacgttatacagtcatttacgaaaaaagcttagaagagacagaaatgaggcagtctttagaaatctcttctagctgtaaatcaagaaacaataacagttctagattttaagagcagtattttatttttgtttatttatttatttacaatagcgcaaatccacttttactgacttttcattagcttaaacccttgtggtgtacagcgtcactcagattctgtgtccaatagcattagcaggaagattgctttggaatttggcatgaaccacaccactgtttccatgggcttgagttacctttccccagatgactctggttttgtttggtttgccaccaggagtcactgtgttgtcctttgctttgtatacataagcacatctcttgcccaaatagaattttgtttcatctggggcataaacaccttcaattttaagaaaagctatgtgctccctttttttccggagaccccacttatagccagcaaaaatgcccttggaccacagccttccagacatacttcctttaagaagtcctgttcccaggaggcctccacaggatccaagatggtggggagagctaagagcagtattttaatatctcagcatgtatttagagtacaaaccaaaccagggttccaaattaataggactttcagcttggataaagctgatctagaaattttaggtagaaaaaaataatactaagccaggtatggtggtgcatgcctgtcatcccagctgcgtgggca

SEQ ID NO: 57987 - DNA, 1043 bp, Homo sapiens
gactcattattgaatgtgaaatgtgcagcacagaccttggaaaaaaggggtaaaggcaagtatttctatactgtgtattgctttaggttatcaaaattaccaaattcaacccaattgttgccagtaacttcctggcaacaattgggttgaatttcatttgccttctatccacaggtagatagtaatatttctgatatttttatacagaggcaaaacgagatgaattcttttctcagaatttaaaattgctatttaaaaagctttgtgtaaaactttctatggtgcatctttcctctggtattgaataaaaacaaggaatagaggaatggtaacaaatttaagtggtattgtatctacatggtgaccacctgtagtgaccaccatgtgaccacaaattgcctttgaatcgttttcagtctctttttaaatgaattatttgtggtatttctagtactgaaggagttttgatattttattctgaattattccccatttaaaagagtctattctcactgcttatcagatattttctgccctttgtagctaaacccaaagtgaacgtgaagccatctgtggttaaagttgtgtcatcccccaaattggccccaaaacgtaaggcagtggagatgcacgctgctgtcattgccgctgtgaagccactcagctccagcagtgtcctacaggaacccccagccaaaaaggcagctgtggtaagaagtatattcactttgtggtgctttattctgtgtggtaggaaagcaggaaagactaactctccactagcattctatcttgagtatatcacttcctggcatttcctagcattttagtaatttgggttactactgtattttatacttacagtttgatatttgtgaagtagcaggacaggattttttaaaagctaatttttaggtggcaagatattttgcttatttatatactcaacctttagattatcgattcttagattcacaggcttaaagaatcatagccacaattctaagaaggcagcaaaagaaaatgaatatgctcaaattaaa

SEQ ID NO: 57988 - DNA, 1467 bp, Homo sapiens
ggaggtgtctggcccttcctcatcccaaatgagcatgaaaactcgccgactcagctctgcctcaacaggaaagcccccactctctgtggaggatgattttgagaaactaatatgggagatttcaggaggcaaattggaagctgagattgacctggatcctgggaaagatgaagatgaccttctgcttgagctatcagaaatgattgatagctgaaggtggtagtgaggacactttaaaaaaaaaatcgccaaaaaactggacttagtttcatctattgtaacatttacctgagatgatcatttctttagtctagaatttgccccaaatcagaagtatacctctgaattatctgtatgtgtcctggattccttggggtcagatttttaaagttactttataaccattttgtccatttgatgccattgtttatcatcttttgagaaaaaagttctgtcatacccttctctccacaaaaaagagactgagagggagatcaagtgaaagggtgcaagcgaacttagtgactccttgaggtgtttgtcagttttggcttttttcttctttgttgtattctttatgtattgtcttgatgtacttaatattacctgagtttgaaatggatgaagacagctgctaccattaaggaccaaattttatgctaccactaaacaaaaatacccactcagtctgtgttaaattgtatgtctttttaaaggtatttaaagattcaactaagctttaaagagggctgagcagctcaggaagcctgtaatgtgggcataactctttggacctgatcttgatgcttctgctgctctgttagcctctgaagagcaatatctaatttattattactgtaattttttaaaaggctttaaagtgcctcaggggtcccctgaaactaattttctatttctgggattccctggattcattatatgagatggtgacatgattagaggaattcttttttagtatgaaaattgtcctttttcttcttcagtacttgcctccttgctggcattgaattaacacagggacaaaatttggttaattttttatttctaactctcccaacaaacccctgttgcccagtatttgtttggtggcctttaaccacctgagggaaaaaatgagcttattcaagctgccaatatttatctatgggctgtagcagtacactgaattgtactgtgccagggatattgagatgctctgggggtgtattgtatacctgccagttttcttcatttctgaattgagttttcttttcttgatgttggtttccttcatatcacctcaaggtttagatttgtgaaggaataagcatgatggaaataatagtcttgaaaggagatatgttgtatataatcaggaggaagaggaaggaaggacttacccattttgatattttgctgtaggtggccagttttgtttctcatagggaaatctgacccacctgtcat

SEQ ID NO: 57989 - DNA, 1136 bp, Homo sapiens
gtggccagggtcagaaagtgcagaaggttatggtgcagcccatcgtatcctacgcaggatgtcaggactaggaggttcgggtcagaatacggggtgcgaaggcgcaggctgagggcaggcctgggatagtggagtacggatccacatcccatgagcccccggggctaccaagactggaagaaagcgcgggtagttgaaccgtgatggtggggaggtggtcttggggggacccctgccgtggggaatgcaggaatggacgcggcaaaaggagggaagagaacttcaggtgcggagtgaaaacgggagttaacggttttgggaaactccagggggatgaaagtggaatggatgttctttagtctttagaagacccgtaacgaatgcccagctgggcacttgttgtttgcgtaagcaccagacctcgcgtttagtaaacaaaggtgagacgggaatagcgtcgtccggttgtttcaggaagcagagtctatgctgcttttgtattttttccttagccactgtggtgcagaacctcatcttcagatacttacaaaatgtacgtaagttgcttgtttcgtaactactttttaaataagaggtgaactgatttagttttttgtgttaacctgagcgatcgctgtgttctagaatttaaaaatagatgtaactggagattggagggtaattgaggggaaggagtacttagaaagcactaatgtgatgaagtggtgtgtatccatgccacttcccaacatgcaaagaattgtatccattactttgcaagatcaaaaatactttttaattccaaaaagtattattagcagacttgaccatggtatttgggcatcagtagttttgttagtagtgattatggctagaacattggaacctctcccctttaggatgaaacattggaagaaaaacccagccaacttaaaccatgtcaagaggtggtgtgtttaatacctgtgggaaaacttaaagacgaaaaaaggaagagagaaggggtagcttcagaggagtttagtggcagctgctttcctttgagggaaattttagcaacttaaattttatagtgtgataacacaactgaaaaacattaatttcaggtgataataattcttaaccacctgaattga

SEQ ID NO: 57990 - DNA, 1035 bp, Homo sapiens
catgatgaaaccctgtttctaccaaaaatacaaaaagtagccaggcatggtggtgcgccctgtagttccagctacttggggggagctgaggcagaagaattgcttgaacccaggaggtccagctgcagtaagccgaggttgcaccactgcactctagcctggaagacaaagtgagatcctttctcaaaaaaaaaaaaaaaaaaaaaaaaactttgggtggaaggtggggtggggcttgagaagagtgaatctttgaagttagttggagtttttatctgcataggtatactcatttaaaatggtttgaatgtgattttctttgaagataacagtttgtttatttttctagggttttgatgagtatatgaaccttgtattagatgatgcagaagagattcattctaaaacaaagtcaagaaaacaactgggtaaggatagaagtggtcttacagaattctagaaatattttattcacttgcagaattcagtgacctgcaactcagttcatgtttgaatttattttgcatttgagaagttattattcagagtagtagtacacttttgaaatcatcctctactactcactcctcaccacactccattttggcttctccacccagagagctctcaccaagggaaccaaagactagtggtattaaatctaatgatcagtactaatcctcattttattaaactctcaacagcatttggcactgttggctgctccctccttaaagcgctttgttcccgtgtctgagtggcaggaaaaacccaagtagatttttctgtttcctcagttgacaataattaacacagaagacttctgtgaccagatgtatgggcatatttccccacacaccaagcaagcaatcagttcggcagtggacatcagctcagagtcgtcaagttcagttcagttctaacactatctacctgagatagcgtcagttcccagaggttgagggctcaatccccaagattgccttccatgcccctcagtcctccaccagatgctaattgtcagctccagattgt

SEQ ID NO: 57991 - DNA, 1140 bp, Homo sapiens
tgcttcaccgtaagtgtatgagtcatgccttttttgatcccagtgtgctcagtacctaactcaatgcctggcacataatagaaactaaaaaatatttgaacaatgaatggtatttctttcttttgtttttggagacagagtctctgtcgctcaggctggagtgtaatgacgtgattttggctcactgcaacctctgcctcccaggttcaagcaattctcctgccttagactcccaagtagctgggactacaggcgtgtaccaccacgcctggctgattttttgtgttttagtagagacggggtttcactgtgttgcccaggctggtctctaacttctgagctcaggcaatccacctgcctcggcctcccaaatgctgggattacatgtgtgagccactaagcctggcaatgaatggtatttcttaacccagttaatgaatggtcttaggattcacggtttcatcaagacacactgaatcatttctgttaacatcccattcacttgaggtttatttaggcattttgtctttatttgttaaatgctcactaatacttttatcagtggtgggtttcaggtgtctctctttcagaccctcaggattctcttcaacctgaactagatatatggaaagtagattctgagaagcagtatggtgtttcgctggctgcttcctgcttagactatttttatgaaagcctgggttttttagatttattgttatttatttatttatttttttggagacggagtctcactctgtctcccaggcttgagtgccatggcacaatctcagctcactgcaacctccacctcctgggttcaagcgattctcctgcctcagcctcccaagtaactgggattacagggcatgccaccacacctggctaattttttgtattttagtagaagacggggtgtcaccgtgttgtccaggctggtctcgaatcctaagctcaggcattccacccaccttggcctcccaaagtgctgggattataggtgtgagccaccatacccagccgggttttttagatttaaagatgtcttgccaggacgggcaagcttagccttactgaggtcatattattcataaattatttaccaactgttgaattcccatggtagtatttatcctgtag

SEQ ID NO: 57992 - DNA, 1788 bp, Homo sapiens
catcttggctcactgcaacctccgcctcccggattcaagcaattctcctgcctcagcctcccaagtagctgggattacaggcacgcgccaccaggctctgctaattttgtatttttagtagagatagggtggagtctttaatatactaacagctttaagaatggagttataatatgctgtatttcccaaacttgacatacgactcatttccaaacttttattacaaattcagcattgggaaatgttgtatgaggcctattgagttgacttagtccatagaaatgatatttgtcatgaaatgtcatctacctatgttagtctcttgaaaagataaatgtattctaatggagccagaaagcctttcactatatggacacttgaaaatgttcacatatttttataagaaagcattttcaaaatattgttcaaaaactggatacaaaattctgagagtaaaacatctgagtgtgtggctattaatagctttttgttgtttttgtgttgcaggtcggatcatgctaaaaggagataatattactctgctacaaagtgtctccaactagaaatgatcaatgaagtgagaaattgttgagaaggatacagtttgtttttagatgtcctttgtccaatgtgaacatttattcatattgttttgattaccctcgtgttactacaagatggcaataaatactatgggattgtttgtattaaaaaatttacattgcttcttactattcagcagtagaaactttttacacagtaacaccattcgttgctggtatttagttttctgaagggtcgcagttgccttgagcacttggtattcgcagagcttggacctgtagattttgaggcagattaggaattctgcctgatgggtaagcttccagtattgggaggtggagaaggggagggttcagaaaaataaataagagttattgcactaacaaaagtcttcatcacttgtagttctggatgctggaataccagagtttctaacctaaatatgttgggtacattatttaatggggtcagtattgctcaacactctcattgagtcactgtgaggtctttgtgaattttatcgctaagatcagaatgtgagaagtatttggatatagggaaagaatgaagtgcctttcaagtacattaaaaatcagttaagagtttacaggaaagagactgagattggtaatctgaaaaggaccacaagcatagctggtaggcaaattgttaggcagaataatggtatgttggagaaatacacctgtctcttattcttatctcttaagaattttggttcttcccccagtgattgctggttgaattcttatatggacaggtttcccttcccccagtatcgcacatggttctagttagaatcctgttagatagtgagcatctgctgttagctagacactgttgaatcaatacagtgaaacagacaggtaagcaggtggttttaatgcctcattctaagtgctatttaaattggatcttgaaagatgaataaggcctgccttaagttctgctaaaggccatgttgttattaaggacgggtgaggaaggaccaagaagtctggctcctgcttttctacatgcctgtgaaggagacttttcatgaaactgaataaaagaaatcctttccgagatagaggagatttgtaggtgaatgcagaagtgtatccagctttgaaccatgcattccatctatattcctcctgtctgaactcatgctcttttgattatgttttgaaataaagggctgcattagttcttttaacattt

SEQ ID NO: 57993 - DNA, 1051 bp, Homo sapiens
ctcactcctggcaagagcacattgtggtgctgtcagggaggacctccatggtctcagatggaacagcagcagtggtcagacctcctagaggctgtgaggtgaggaggaagtggctgaggtttcccctgcctcctcctaaggtcatccatgggcaaaccaaagctgcaggatgtgctgtgtgtgtggcctggtatctcagagtcctgggtgtgcacagggtgtgcacagctaggagacgtcccgagatctgtacccacatgttgagggcttcagccaggggtgttttttgggggagcggaatttgtgtggcatagtagaggaaaagaaggaagaagtggggacagtatctccagctgccacctttcttcccaaatagctttggatacccaggcccttttggtcacaggaagtctgacactgggaagtcatcaaatttggaattcagttccctccactctccccccagcggtggccttagcatttaaatagccttggcatgaagccctataaactgcccaagggattggggcagggttagggggaggggtattggtgttacccccaacattgtccccctgtgtcttctggggacatgtccaagctagggtgtcagtgttttggcttgagaggagagaggggaaggggccacagactgggcaggagccctcctggctcccctcccgctctggtggttttgatcgtaatccctgcctgccaagcctggagctccctgggggatccgccccagaggaggcccgactgttctcctcccctctgccttacctcccccagtccccgccccctgcttgactcagaatggaatgtgcagcctgtggaacaagatggggtgagaactagttcccagagggccttggtcccgcccctcccatcccccaacaaagggggtgaggaacctggaggcagggcctgctcccaggtatggctggtgtttccctgatgcagactcaggtcctgtgctgagttggtgcagaggcaggcaggtgctgtgggggtccaggactagccatttgaaggttttcatataagtcca

SEQ ID NO: 57994 - DNA, 1093 bp, Homo sapiens
caggtgtctcaggagctctgtagacacaaagggcctcttgtctcctcctccctggcctcagggagccagccccttcctccctcctctcaggccccgcccagagatcagtgaccaggtcagccaggggatgctgtcttccagattcacccccttgcctctcagggtttgttgttgcttgagacagaggtgagactagaccatgtgggggtgaggtgcattagcctgagaggtaggaaatctgcctctgagcgaatccaccagccctgaggtctctgtgtgtttcagtttccctgctggaaagacagcaagatctctcccactgggacacccaaacatgaaatggatgggagatgggaaaagcatctggagatttggggaagaaagacgtggtgaatgtcaggagtgatggaagctaagatgagacttaagggattccaggtgggatttagggcaggaggtggccagggtgtggcaaccctccttcctccttacctatttctaaagcagacctttacagagcacctactgtgtgccagccactgcactagggactggggaggacatggagaataatatagtaccagcacagacagacaggcagcttctggagccagactgtctgtgtgatcttgggtaagtaatctagcctaaccatagagatgataacaattgtacctgccacaggctcatggggctattgtgatggtgaaatgtaaagatgtaaagtatagagaaaggatgtaaaactgcccgacatatagtaagggccatttaaaagatgcctgttattgtccctcttcttgagagcatattaagggctcaaatctagccagagtctggcgggtacagaggtaaacaaataatggcaggttggttaagtactggacaccagtgatgtccaaggtctctaggatgccctggagaaataatgaactcttctaagattgtttggaagggatttataaaggacatctaggctgggttttgagtgaggtatgggagttcgctggtcaagaatgtaggaattacaaaagcagaaagtgcatatttaaaaaaaaaaaaaagatccaggcctggtggctcacccctgtaa

SEQ ID NO: 57995 - DNA, 1024 bp, Homo sapiens
gtccagagggtgggaggaatcaatttccctctcagcgattgtgaccagggaggcatttctttctctgcttggccttgcaggaaacagtgttgagaatgagaggagcagaaaggaagagctaggccttgtattaatttgtttttcagattgagtctctgttactagcaatttattacatccgggtctccagccaagcacattctgttctccagtgttgggggaagatgcatgggggggtggggaagaggctggacaggaaagaggagcagatcaacaattttatgactgagtgtgtggtgtcttggcgtgcgctagaggacggttttagcacagggcattttgagcccagccccgtgtggggaggcactcctctggacagcatggcattcccatgcgagcccagacagccctggggagcaggatgaatgggcttccctcccactctcatgcccgccggcctcagggtccagatttctctctgtgaaatgaggtcaggacagtgatgcctggaacaaaatcatagtttcttgaggcagcggggcctggggagatccctccgaggaacaggggagcagctgtgtgaggggaccccggaagaggggtagcaggcaaggcggccaccctgtggaaagaatggtgcacaagcaaaacaaccccctctctgcaaaagtgctgagctggtggaatttcacttggcggctgtgagatcagggcagtagatagagccctgcgggcaccagggctgtgtgggtgcagggggtcccggaagagagggcaggggcagcacctgtggcaccctctcccctgagctggcctccacattgcccagggctcatcactggtccccattcctggaggtgcgtcccttatctctatccacctgtcacgtaagttggtctcattcttcccattttccctcattctcttcccaactgtggctttgactagaagtagctacatcatctagtcttcaaggggccagcattgcgtagagggccatggtgccagagggcagggaactctg

SEQ ID NO: 57996 - DNA, 1038 bp, Homo sapiens
tctccaggcggggagggcatcaggagtaaacctccttccacggccctgagccgtacagtaagtctcccagggttgtacggcaaggcaggggcagagctgttctgtaaacaggcgtcagttcagttgccttgaaaccgccaactctaagatggacatccgaggggaaaggatttccaggaaagtcgaggaactgattttaggggaagactaaatctctttctctatccccatcttcttgtcgtctgggtcccttgaactccctgctgagaaatcctaaatacaccttgtctctgggttgcgcatggaagcctttaattgtttctagaggcagtgagggaaggccttctagttggtcgggcaggtctggcactgtctgggtcttgctgcttctagacacttcaattagggatgttaattatggccttgtgaacacaggctctcccaaggcagccgctctccagccctgctgcccccatgttgtcccctcaccagtcagtgaggctatgtttatggtctcgcctctgtccatctgcagattaaagatgccctgaaagcataacttattagcagttttttgttctctccatcttttaaaaaattggattaaagtagacataatgtaaaatttacaatttgtaaatgtgtagttcagaggcattaagtccattcacattgttttgcaaccatcaccaccatctgtccatggaactttttcatcttcccaaactgaaactctgttcccattaagcaatagcgtccccttcctctctcactccagccctgtaactctattctactttctgtctctatgaatttagctgttctaagtacctcacataagtagacacatacaatatttgaccttttatgcctggcttatttcagttaacataatgtcttcaatatttgtctacatcgtagatgtgtcaagattgccttccagcttagggctgatgatattccattgcatgtatatatcatactttgttgattcattcatccattgatggacacttgagttgtttcccattttggttg

SEQ ID NO: 57997 - DNA, 1071 bp, Homo sapiens
gccacacatctagtggtatataatagagccagtcttcagacacaggtccatgtgacaaagtcctttttccattagccacaccaggatgcctcccagcaatgctgggtcatcacacccacccacctgcctccggaagagctgggctggctggggaggagaatagggtgtgagtccttctcccccttgccctgggggcagggagggagagggactccttcctgctttagggctctttctccttacctccttccctgaacatatattctgtaccagattctgtaattataccttatctcttactcacaaaatagttcttggaatctctattttacacatgaagaaatgggggttttgagaggtgaagtctttcccccaacttgccagagctgcctgggtttcttttgactaagttttccttggctatgactcaagtcagaaacaactgcaatcctgtaagaggtgaagacagtggccattctatctctgctggaccagagcctgttattttgcaccgaggagagtggccagggcatcagctgataaatgaaaggatgtggatttagacatcagcgaggcctgagttcaaatgctacttctgctgggccctcagtaggacgttctagcccccgagccttagtctttgtagtgttcttgtgaggattaagcaggaatgtgaatgaagagcctttcacttagtgcttgcagccaagtaagtgctgtagcattgcatgcttgctttttgcctcccattcctttggtcagtattcagggctatcccccaaggggcctttgacatggccagtcagcctcagctgcacaatttctgcatctcccagccctaggctgggcactgtccctgcaggaagccagatgtgctcacctgtccaggacacaggcttggccttgccattgggaaacaaggatgaggcctacccctgccttctagcactgttggggtgcaggagaacctggagacaggcttgggttctagaggcaggaaggcctccagagaagggcctcctagagacactgttgacctcttctcggtttgggaccttctggaggcacaca

SEQ ID NO: 57998 - DNA, 1096 bp, Homo sapiens
tgggagcctcaatggcgctttcaagcagtcccatctgtctctttctcgacccactcactgggttgggagaagactcaggtgcctctgaggcctgaggaccaggtgggaacatcacagctacagtctctccctggccactgttttcctttgtgcccttgggccagggtcagctgagtcccggcagccacagaagctcaggctggactgtgattctgtacctgaggtgctgtggggaagtgcctcttctcccatgcttgggagttgacccagcctctgtctgatgttggccactctaccaggtgaatgccaccctgaccagcctggaaacagccgagggagtgttggctgtggcccccctgagctgggctagaccagaccggccgtgccctggatctgataccccccagggctcacagaggctggaaagggtgagagggactcgcaggaaagctttgtcccaagcctgcagccagtccagctcccagctctgagtaaacattagagataggatcgggtgtagccaggaagggtggcagggtgtggtctgtgagaagaatggcaggatgtggcaccggggcactgttctgggcacccacgccttggcctattgtttagggcagcctgaggttctcagctctctgggggctttcagaggaagtggcattcccctgggactcaagccctgccccacccctgctgcatggatctctttccctggtgatgccccttggcaccacccactcagagcaagcttgggagtgggagccagcagtggagggggattagtgtgtgcccagcggggaagtgtagccattggccctctcagagggtctgcctgtctgttcaggcttcctgtaccccagggtctgagtcacccgtcatgctacgatgactggaatttatctctatctttatcttcatctagatattttttgtagggtgggggaaggctgtcgttgtggagggaggaaggactgacagtaaaaactcctttgattccaatccaacagggtcagttgttgactggttagaagaggaagtggctggtgatttgttttgggcagaaaggggctaggtttgtgtgcgcctgtgggtt

SEQ ID NO: 57999 - DNA, 1061 bp, Homo sapiens
ccatcttgtggtgctgggacctcgtcaagcagggtgtctgctgttctgtgctcatccaggacttttctccttgctgccttttccatagtggagtatccgctgcagctgctgcacagcccccctgccccagtggtgaagaggcctggggccatggccacccaccaccccctgcaggtaccgccctctacccactggcctggggctccctctcgagcttatgacggccggctgccgtgttagggaactgcggggtgtggactggtgagccctggcatcctgtgttcttgttcacccgctccttctgcgtccacttttctgtctgtctccttgtgtgttctgggtatgctcacctcacttcctctctgtcctgctgtgggagtgtcctttggtgtctgtcatcctctgacctgctgggtctccctcaggagccctcccagcccctgaacctcacagccaagcccaaggcccccgagctgcccaacacctccagctccccaagcctgaagatgagcagctgtgtgccccgcccccccagccatggaggccccacgcgggacctgcagtccagccccccgagcctgcctctgggtaagcctcctgctgcctgcacttgtccctcagccctcttaggggagagccggcggcatgatgcgaccttgagcaggtcccttctcctccctgggttccagattttatcaaatgaggggttagacttgctcttagcagaagatccccttcttcctctccctcatcatatctgtctgggcattccaagcatcagggattcaggccagagtcacatagttccagggggtactgttgtcatttctagtctattgacatgcacaataactagccagtgtaagtggcatatccctgaggacatgcaatgcagccgccctgtggaagaacaggagggaacactaactcaggtgcctcatgggagtggcatggcgggaagctgatggagtttgggctcatgctgggctgatgccctcagcttctctcgcttctcttccctctcttctgccctctcccacaggcttccttggtgaagggga

SEQ ID NO: 58000 - DNA, 1039 bp, Homo sapiens
cctggggatcaaggtcttctcaggtcctgcatggggctgggggtggtcagcagagcccagcactgactgcctgcccctggggggttgggtcaggatctcgctggaagtccatgaccaaccaggagaagcagccctactatgaggaacaggcgcggctgagccggcagcacctggagaagtatcctgactacaagtacaagccgcggcccaagcgcacctgcatcgtggagggcaagcggctgcgcgtgggagagtacaaggccctgatgaggacccggcgtcaggatgcccgccagagctacgtgatcccgtgagcaggcccccccgcaggcagccaggagactgtgtgtacatgtgtagctctcatgagtggctgggtgtcagtgtgtggcctgcctttgtgtgtgaccccaggggtgctgtgtgtatgcgtacgtgtgtgtgttatctgtgtatagctgagcctgcacgtgcgacccgactgtgtatggctatgtatgtgactgtggtgagcactcagtggctgaggatgtaggaatgtgactggaggactggccacgtggacctggagaaagtgcctgtagatcccacggccgataaactcaatagaaattcagaggtgctagaaatcaaagtattcatcacacagaaaggttcctgacttgactaaagcaagcaccctagtctattcctttaaacaggacatctcccagggcatttaaaatatacaatttctgcctggtatagtgacacacgcctgtaatgccaacactttgggaggctgaggcaggaggatcccttgagctcaggagtttgagaccagcctgggcaacatagtgaaacctcatctttaaataaaattagccaggtgtggtggttcacacctgtagtcccagctactcaggaggctgaggcaggctcaggaggatcacttgagcctgggaggctgacgctgcagtcagctgtgattgtaccactgttctccagcatgggtgacagagcatgaccctgtctctaaatataagtaaacaaaacataa

SEQ ID NO: 58001 - DNA, 1062 bp, Homo sapiens
gctgtgcacttgcagatacattcatgaggggagaggcgccctcccttcctgaggagctgttggcctgggtgggcaggaactgcagtatggccatgggctgagcaggctgagcacctcagcctttagggcttatggccaggggacactgtatgactctcctctcctgcaggtgtctatccacctggggtatggcatctaccgacctgtctccctggggtcacatgctttgtttccattcttgtcctggctggaccagccactgtgggaccaacacccctcccacactcccccagactgctcgtctatcaccaggatcgctttgtactttgtgcaaaagggtctggctgtcccttgctgttttcatctctgccaagcctattgtgcctctggctgctgtatgtgtgcgcgtgcacgtgtgtgtgtttcatctgttcattcactgcacaagatatttattgagtgcccactacgtgccaggcactgttgctgagttcctgtgggtgtgtctctcgatgccactcctgcttctctgggggcctctttctgtgcttctctttgtccccaaattgctacctctttgtcagtctgggtgtctcaggttctgtgtgtccttgtgtgcatttctgtctctctctgtcctcgtctctctgcaaggccctctatttctctctttcttggtgtctgtcctttgccccctgtgccctctggattctctgggtctatgtaggcccctggtctgccctgggctcatcagccttcctgacctcctcctgccctccccttcactccctccctggctctgccagtcggttcccacggagccatttttagctctgatcagcatgggaatgtgcctcggcctccaaggggctttgtcctggtgcccccgcccctggtcccaacctgatcccacgagggagttgggacaggaggattgatggtgctccccttcctgccagcgtcagaggccctggagaggggctgtccatggcagctggtctttattcctccctcatgagcacagggtcgggggggtccccattcttggaagaggttgagaag

SEQ ID NO: 58002 - DNA, 1060 bp, Homo sapiens
gccacaaagcaagcatgctcttcattgaaggctttaatgttcctttgacagtgtaggagtgagctaaagaagctcttagtttgctttctcatgtgagccgatggtctgtttgtgagatgagaggttagaccagaccgtctctctgatcccttctacctgtgacatggtcagctgctggggtgagaggggggtgcataccaggacatacctctgcctcctcaagagagctccattgctccagctccctgccagggcactactcttcctcctggggaggatctttgtgggagtcagctcgacttagggagctgcaccgcctcctggggagttttcccagcatcctaagatcaggtctgttttgcatctctccccactgctcctgttgcccttgttcttagtctggaatccccaggtctggacactcgttctcacctgccttgtcctttccctgtgtctccttccttaccctcctgttcctttcacaaagtagcagggatgccctcagtcagtgacttttatgctctgcctcatgctttgacgcccatgtctttatcagcttcctagcataaccagaggagtcagaaggacaggacgcctcagtgccattttacagatgataaaagtgagggtctaagagattggccatttttccaaggccccctgcagtaagacagagggagtgatgaggctcagattcagggctcttgaggccaagcacctgtctatcagccctcctttcactggctaccttttttgccactgcccagcctttctgcagatgtccctaaggtagaggtgttggaacgggagctggcctggctgaaggagcatctgtcccagctggagtcccctgtggtgttttgtcacaatgacctgctctgcaagaatatcatctatgacagcatcaaaggtatggcttctctggccctggggcagcagcagggttttggttggttggttagctggcttcacggagctgttcttccggctggcacttggacaagcaaaagttagaccttgatttaggtcttaagttaatttgtaggagggaagggggaaa

SEQ ID NO: 58003 - DNA, 1095 bp, Homo sapiens
ccaagctaccatttttttcttgaactctatagagactggagactcccaaggttggggacagagaggagcatgagtgactgggctaaagcactgggggcttggggtggttgtgctcggcattcaaatgagcacctcctgctggagctacagagcccaggagagagaccagagagatcctgccccacccacccacccacgcactgtcctctccccatgctagcgcttcacggatggcatcaccaacaagctggtggcctgctatgtggaggaggacatgcaggactgcgtgctggtccgggtgtatggggagcggacggagctgctggtggaccgggagaatgaggtcagaaacttccagctgctgcgagcacacagctgtgcccccaaactctactgcaccttccagaatgggctgtgctatgagtacatgcagggtgtggccctggagcctgagcacatccgtgagccccggcttttcaggtgaggagggtgccagggcctctgtctctactattcttcaggccttgggcttggaaatccttggcatgtggggtccatggtggagagttgtaagatctgtgagttccctgaaattgcatgaaaaatgcatgtttatatgcattgctctgcagagaggggctatcgctttctgtagattttaagggtgagttctgggggaggaaaggaagaattgtgatgaacatgggagcagaggacctggttccctaagtgcggcagagatctgcttcctggcatcatgcctcaaacctctgcccactccaagtctgacctggaaacatctcagagccttagaaatgaaatctgagccagatccccagggcactcagggttttctacctctgtctctgtttgtcaaggaaaatgggccctatccagggtaagcatggttttaccagcccagggagatgctatctcttctgccagtctgaactccttcctggctccttgacgaagtgggaacccaggtttggggaactgtcaaggcctcctttcaaaggctcacaagaacctgtggctcctggggagcccctcccagtaaatgcttggatgtgtagggcccaggaactggacttt

SEQ ID NO: 58004 - DNA, 1051 bp, Homo sapiens
tatatatatatatatatatatatataaaaaatgaactactactcagtcacaaaaaggaatgaaataatggcattcgcagcaacctggatggaattggagatcattattctaagtgaagtgactccggaatggaaaagcaaacatcatatgttttcactcacaagtgggagctaagcaatgaggatgcaaaggcataagaatgatacaatagactttggggactcatgggaaagggtaggaggggctgaaggatacaagactacacattgggtacaatgtacactgctcgggtgatgggtgcaccaaaatctcagaaatcacactaaagaacttattcatgtaaccaaccacctgttccccaaaaacctattgaaataaacaagcaaacaaaaaattctcctaaacagccaacatacagccatcaaaattgggacactaacattgatatgtgactatcctccaaccctcagactccatttaagtttcatcagttactccagtagcatcatttatagcaaaataatccagttcatcattctgtgtggtatttaatgatcatgtctctttaaactcttctgtctggaacagctccttggtctttccttggcatgaccttgacacttttgaagattcaggccacttattctgtagccatccctccatttgggtttgtcggatgtttcctcacgactagcttcaggttatgcatcttaggcagaaatagcacaagatgtgatgctgtatttttctcactgcatcctggtaggtggtgcaagatgtcaatttgccccatagctgataatgtttctttattcttaaggcagtatctgccaggcccctcaccaccccatccctgaccctgcaggggatgctttgcctatgatactttgtaccaggccacccctagtgtgaacacccttctcaccctgctggggttctaacaccccactctgggcaccgccttctctgtgttaaacctaatggctttaagactgaattgttcaggaagaggaaggagggaaataaggagagaaagagcctcattcacttt

SEQ ID NO: 58005 - DNA, 1099 bp, Homo sapiens
tttgcaggatgaggcttctttttcctgggaaggttggctggagtccttgctcctctgtgcagcactcttctcactccatttcttttttctccagtgcaagccctggctgaggccaatgctgtgaagctccacagagccacattctgaagccgtcctctgcccacctgaggtcctggctccccaccctggccccctgcccctgcactcccatgggaatgccgcagggagccaggctggggccatgggctgctgccagaggaccgtggatacctcagtgtccacacacccaccatgcccagccctggagccatcactactcacaccgtggtcctgggccagggcctgagatgacagtggggagcaccatcctcattaatgtccaagtcacagggagcctcagccttgccctggctggggttgtggtgactccagtggaacattccctgatgggggacatgccgtggtggagaacacacctgtggctatcttatgtgaggactagaggtgaagaggagatggacactgcctctggagccagcctgacaccaaggacagcacttgtcatcatccctatcctcgtcagccccaccctactgcctcagctggacccagggctttgacacaaacccagtgctttgcttatgggtgctcgctggggtccggtggagactgaccaccctgcttgagccaaagacaaggtgatgagagatggggagaggccattggctcccagagggaacagtgctggctgtggctagagaacagcaggtctgtgcagtgtctgagggcaggttgggaagggtagcagagagagagagacagaaagagagagagagagagagagagagagagatcctcagagtggaaggagggggaagcagcaggacacattggcaagtcaagcaggaaggagggagatggaaaggggatatcagattggtttcccccggtggagccttaggttagtgcccagtgcagtgccagactgtctcctctgctcctcccacctcatccctaggaggacccaccagtggagcacatgcagcctcagtggagatgcttggtgtggggatctgggtgaagggggttgagtagcgac

SEQ ID NO: 58006 - DNA, 1051 bp, Homo sapiens
ccaccattccagtagcccaggcaagaaccaggccatgagcaggttagaaccgtggctcagaacatagtggaagggatggcgtttcatgttggtgattgaggaggttcaaattctggtgctctgaggctccatttcctcatctgtgaaattcaaatcaaaattcctgcctccagtgctggtggtatgaggattggaaacaatgtgtgccaaacacctagcacagtgcctggcattcagtaagtgctcaatacatgctcgcgtgccgtagtagtggtgacagtagcagtagcgctgtgttgctggtagtagtagttgaaatagcaatagatgaagtagaaatagaaaccatttgtcattttgctaattattttaaatatggatattttcagaaaccagattttagctacagaaaagaggatttaagtaagccttaatgaagaaccttctgccagttagggtgtaatggactttagaatgggtgtccagggagagccttggaggtatttcagggagaggctgtctttaggctggagttgagggtaagagaagggatagcttcagagagccccatcctgcagccaaaaggcagcaaaaccagtctggccacaaggaagcaggcctctgttgaacctccctgtagtttagctgcaaaatgaacttgaaccttccaaagatcagattccacatgctctgggcaaaaggcaacttcctgtttcaaggggttagagagacaaggctggtttaaaaaccttgctcagccccagccccagcccctggcgctctctactatagttcctcagccaaaggtcccatgaaaacaaaacccacccggcctatccgatttccgtcttgatacacatgggcttacatgtcagggtctgtgtgctgaaaccaaacggtcaccttgcttttgccaaaaccccaactatttaaaaaagggctgtggcagggccagacctcagactcagcccactgttcccaccgcccctggcctgtggcccagctccccagagctacagctctgccaggcacagcaagactggtcctgggc

SEQ ID NO: 58007 - DNA, 1011 bp, Homo sapiens
attcttcaactgtaccatgggagcagtggctcagatgatggctgaggtctcttctagtctcatgtttttgtgagcccacacactaagtgcccttttcatttccctagaatcctggtaccaaggcccgcctggttctgtttgctcatgtcttgggtaggattccctacaggatcctcagagaccccccaccggccattccttgaatctggctcacagcaagtctgtggttcttagtgccagccaagacaaatggtcaggttgaggggcctcctaggggccatgagcaatcattcctcaagatggcccatcattgaccagtcttaaagtgcacgaatgggaggctccagtgcattcctgtccgcctcccaggcggcacacatagaatttccttgttccttgtatctgcaagggtttgagcttcaaccattaaaaaacaaagaaacatcactgggggccaagttcctgacagccatactaacatcaaccatcttctcaccctttctccccagcccaaggcaaactatgaacaaagcaagaaagacccccaccagacattgcccctggacacccccagagacatcagccttgtgcccaccaggcaagaggtagaggcagagaagcaggcagctctcaacaaaggtactttctgtcccatcttcccctagaagtaaggcaaggatgctcagggaggagccctgggtgctcattcacacccaaaacctggtgccacaccctgggctttttaatctcggtggagagtggggctgagattgtctctgagaaggaggcttcctgccttcctgctctccatgaggcccactggctactctgtctttctgcagttggcgttgtgccccctcggacaaaatcgcccactgatgatgaggtgaccccatcagcagtggtaagaaggaatgccagtgggctcaccaatggactctcctcccaggtgggtacctctgcaagctcatgcaggcctgagctgggctgcgagcccaggggcctgtgtgt

SEQ ID NO: 58008 - DNA, 1368 bp, Homo sapiens
gagggagactccatctcaaaaaataataataaaaaataaaagaaagaggctgggcgtggtggctcacgcctgtaatcccagaactttgggtggctgaggtgggtggatcacgaggtcaggagatcaagaccatcctggctaacacagtgaaaccctgtctctactaaaaaatacaaaaaattagccgggcgtggtggctggtgcctgtagtcccagctactccggaggctgagccaggagaatggcgtgaacccatgaggcggagcttgcagtgagccgagattgcgccactgcacttcagcctgggtgacagagccagactccatctcaaaaaaataataataataaaagaaaaaagaaaaataaaataaagatacgcacatgtgctcaaaggcttcactcagggagcccagcatcctatggaccaagaccaattcataggaacatgacggcatatgtctcaacattaagccacatggttcagactgtaaacgccctgatgttccaacagacagtggggcctaaaccaggccacagagcagcaagacagggagaggaacaagggaaaggcattctaggcaggagagtgggtggaagcaaaagggtgggagaggagctgcctggcatgggggcgaggcaatgagagagctttggggaaaacttggggagcagtggggagtggtggacaggtagaggctgggtcaaggaaggccttgaaggtcaggcagagagttggcttcagagctggcactctcttcaggccacgggtgggagtgcagtggtcccaggggcccacccaggtctccagcaatgttgttgtctgcctcctgctaacgctcttttctcctgctctcacagtggctgctcttgttcctcctaatgctctggcttctgtctgcctcaggaacctggcccgcctcggcctcccctccccaaagcctacgtccccctggagtctcctccagccgtccctccactccctagcgagagccgcttctggccctaccccagctccccttcctggcaccgcagtggcgagacagccagggggcaggtacccatcacccttgggtcctggagggtggggcaggggacaatgggcaaagggccaggccaaggggcaaggcagggccctggagtcattttccccattaattttcccaaaggtcggtttctacggcacccctgcccagctggactctgggataaggaaaggatagttgaagccatcatacaggccatctttctgtgcctttttgctttctgtaggtgatggggacatgagttactgctccaaccccaggctcatgggcagccagtgtttgtgggtgctggtattaagccccactccctaccaacatgaccagc

SEQ ID NO: 58009 - DNA, 2010 bp, Homo sapiens
gcagaatccttttccagaaagcctgttgctgactcatttccataacagtaccaggaggccagagtggaggagggctgggcaggctggaggctaggcggctgctccttcccctctctgtctgattctcactctgccagtgtccacagcatataagctttgcccacagcaaacacacgcacccagaaacaaccgatttttccagaaaactcagaaacagctgctaacaagtgctgcctaaattgctctgatgacactcacctctcccagggaggcctaggcagacctaggagagatggcactggggtctgcgtgtgcccctcctctcctggagtgtccagtagagaactactttgcctgcccacatcctcaacccctcccttcctgagaactcctcaagggcagagggagaagcctctccttgtccttgtcgctaactcttaactgctttgcttctttttttattgttttcttttgtgtgttcctgtttgtttgtgttgctgtttggcctctgggcctcgggctccgggtaggatgaacttttagatcttcagttgcaaagaaacctagagtatttggatcagcaggtaggcagagctggtgccccccttatcatcccactgccttcctgtcgcatctctccactcctccccacctcctcatcttccagccatttgacaacctttgttggtgcaagcaggacacaacaaagtggcttatgttttggtttgcgcctacacaccccttctcttcaaagccctttaggacagctgggagtttcctggggaaagaagcataataagtaggcacatgaataattaatgccacctcttatttctccagtgctcagctcagatggaactgcccccagggggcaggtgggaatttgcattttttctggcgagaggagggagtcgcagagtcgagggagctctaggctgggcctaaaatgctagggatttagttcagcctgaatctgggaaatcatcttatcatattttacaggttgttgttaaactccataattggtaaactgaggcctgcagaccctccctaggatgatttttaaagtaatattcactcagtgtattcattagttcctccaaaagcccttttgcataaacagctcgtgcattcctgagaattcagtgcaaacagagggagtattatcaacccagttttacaggtgagcaagctgaagaggcagtgaatgttccatgagctgcaagcagtggctgcctggtctctgctccggggttctaaccctttcttgtcttttaagctaagggagctgtgagactgagtttagacaggctgggggtcaatatgctgggtatttatataagcacatactcttaagtttagatctgtgctacaaaccacgacctagaagtacacaacactgtcctgtggaggcagcctggaggggtggaaataataataataataacaacagctacaataattggatgcctcctccatgccccatactattctaagcatttttcagatcttaactcatttaatcttcactataaccctgtaagatggatgctattattacccccattttacagctgaggaaactaaagcacagagaggttgaataacatgccaagaacacacagccagtgaacagccgagcttggacagtgactccaagcttctgacccagtttacagctgaggaaacatctaatgtgtgacaaagctgctgtcaaacctcattaggatgagttcatgctcttaaagttacagaaaaaaaaaattttaaatgagatgctatagctgcaactgttggttcttctagtcacaagccatgtgacccatctcaccagggcttcatgtcggtgtcgcaattcgattttgtaataggcctcaggcactaggaagcaccaatgtccacagttcaataaacagggatggctcctggccctggaggccgtggcattccagctccagaagcagctcattgtgtccacaccatgagcattctgggccatgtgggaacaga

SEQ ID NO: 58010 - DNA, 1030 bp, Homo sapiens
ctaccaccacccaaggagagtgccctcctggttctccagagccagagccaggaggagggagaactgctagagactctgccaccaatcactctgcatctctgccacagccttacgagttggaccagaggacttacttctcagaggcatggtaggatcagggtggccggcgggtcctctgaggctgccaaactggggacggagctgccaaaaagatgttgaagtttcgggctgatcgacgggtcaggtagggatgtcttccacggatcatgagccaagtcaagtcagagcaagctgagttggcagctcatcctgcttggatccgggggcttcagagtgaggggtctgcttgagatgacctggagaaggaagcatagttaggtcaatggttgctgcattgcagtgcttgtgaaggggaagctattttgaaattggtagtgccgggatagaatgaggacgtcatttgtaggggttgctgggtaggaaagtctggggctgggagagatgtgccattccctagaagtcttgtgatggttggcagcagactgtgtgtgtatgcttctgtgtgtgtgtgtgtgtgtgtgtgtgtgtgtgtgtgtgtgtgtctgtgccagtgcctgcagggaagattccagcagttaccattgggaacacacagagcagaaggagactggagggtcagggcagggggcgggtgccctgcaccactgagaaaaagcagacaacttgacacctcaaaggacaccgtagttgccacagactgcttgccccccagaccaccagatgggacagatttaggggcagacaagagtaacgggaaacagttgcccttccttgcaaagatcccctgtgattaaattgaggagtgtgtccttgttggacctgggagggaggtgggaataaagtttgggaagtggggagtggattatcaacgtgctagactcagaacccaggcctggtggacacgcgcctggtttttgggtcctggctggcaagcctgggctgcgaagcccagatttccacatagactgta

SEQ ID NO: 58011 - DNA, 1006 bp, Homo sapiens
cacccacccccgccaggttctgtcttaccctacatctcaccacacctgactctgctaagtaaaaggataaaaccaggagcacagccatgccagtctcctgtggctctgtcccctccaccttcctcccgtggccccatccaggaaatcggcccacaagagaggccgacgctgcttctgaccagagctaccgagcgcctctctggagacaatggctcagagagaaggaggaagactagcagctccagctttgtgctcagggtggccacacaaaaccattgtcttgacatcaggacagacaatggtttgtatctctggcttctgcgctgagcagttcactcccttggactaagataattttaaagatttccttctaataaatagtaatgatactggaatctggcctcaagctgagaatttgtatctggttgtaacaaaagcccactctggctgatagaatgggtatatctaggcttccttttctgttccagagccacccagacaaacatagaccagacagataaccacttactcaccggctcttctttgctgttccctctgctgcctctagccctgactcctttcacactgaggagtagggagaaggttttcctttaatactcaccaggtccctggtgggtagcaatcattaacagccacacatgctggctggccttaaccccttcagtgctgggttgcctcagccagccggagctggctgatggacagccctgtcccttctactctgccctgagaaagtagcaactcccaccttgatgccatccacctgagtaatgctgccgcctcccatgtggagaaggagagccctctagtcccacccaggccgccccgcctgattggagcacacttgcaacctgaggcgtttggctctggcacgatgcccaattggatgagcccacattatgaaatatttgcctggcgggccaatagaggaactgggatctgggggagggatgatattgttatttattcctggaggaaggagagc

SEQ ID NO: 58012 - DNA, 1051 bp, Homo sapiens
atctctactgaaaatacaaaaattaactgggtgtggtggcacatgcctgtagtcccagctacttgggaggctgaggcaggataatcgcttgaacttgggaggcagaggttgcaatgagccaagatcgcgccactgcactgcagcctgggtgacagagcaagactccatctcaaagaaaaaaaaaaagtctgattactgagtttttggatgccccttaaactttgtgctccctcccccactcccacagtgtgggcttgctccctctcccagtcatcccaccctcagaacaagttgggggagagaggtggggctccatgccaggaggaggaaggttagggtacagagaagaggcgggaggggaggggtacagaggcctggaacgcagccgtgtgtctggccgggagctctctaacactaacagcttccagctgcttccacaacctccagacttccgccttgggagtggcatttggttgttttttattccccctcttcacatcaaatgtgtgatctaattagactttgcatccctcatttctatcagtcttccctgtcttgcagtgctccccttagttgacctgtcctgaccctgtttccatccatcccaggagcctctcaggtgctgccactggcatgctccaggagcatccacccagtgctgggtgagcaccacaaagaccaagccagggcaagagacacaggtaggcgtcagccagggtgagggaaatggggggcatcagccagggcgagggacacaggtgggcatcagccagggtgagggacataggtgggcgtcagccagggtgagggacacaggtgggtatcagccagggtgagggacatagtgcccgggtgagggacataggtgggcatcagccaggtcggggcagctccttgtggccctgaggaaagagcttcggactgaggttaacagaccccgaggttagccttgcctcaggtatatgaggtgggttatctcagccaacacttccagcttcagggattttgttttgtaaaatgagggtggtactaacacttttctgcccacctc

SEQ ID NO: 58013 - DNA, 1040 bp, Homo sapiens
ttttggaaatgagggaggtcgtcttctatctttggaaaagagcaaggagatctgtggattggattttgggaatagtgtgagaaacatgttgttaactgggtggttgaagtcaagaacatttaaaaatcttgatatcaatttttgaaatggtgggtcttcttgaactctcaagaatataggctaagcctggcacagtggctcacacctgtaatcctggcactttgggaggctgaggcgggcagatcgcttgagctcaggagttcaagacaagcctgggcaacacggtgaaatcccgtctctacaaaaaaatacaaaaattaaccagacatggtgacacacgcctacagtcccagctactcaggaggctaaggcaggaggatcgcttgagccaaggaggcagaggttgcagttagccgtgattgcgcctctgtactccagcctgggcaatagagtgagactcttgtctcaccaccacccccgtaccccaaaataatatagattggagcttttgtaaatttggaggctcctgggggtattagagtgtctgagtcttctaccttttgaggattcagacctggaattacaacaaatatgtgggaaaccccagacaggtgcccagctgccagaatctgagacacatggttggtgtgcacatatatgcagacttgtatgagcaaaagcttttaggaaaaactcagtttgaaaccaccctaggacttgaactagatgctcttttttgaggttcattctaggacacttttcctaaaagcagatacccaggacttctttatataagaaaactttctgattttttcatcccattttcatgtcctgaaataagagccctcctagcctaggaaagtggttaagattcctaaattaggaaggttgttcaactgtggggagagggtgagagggtggcagattctcgagctttctcagggcaaagaggcatagggaaaatgactaaagggaagattggctccgatctggaagaccaggccaaggtgtgtgagattttcttttccagacagtttcta

SEQ ID NO: 58014 - DNA, 1053 bp, Homo sapiens
agggctgtcattctcccatttctgccagagtgaacccacatatcttggtgtggtgcaggagtgtgtgccagcgttccgagccaagctggcagagctctggatcacatgagggcaccgaggcctacattgatacctctaggggttggatttggagtcactgaagcccctgtggaattagaagacctagatccatccctgagtactattccctactccccaaataccagcatacatgctgtccctgtgaaaagcttgtgggcatccataccagcatctctaccgcccctgcgccattgtggaggtaagagatgaagtggataaaggtctctgaggcagggagataagggcctagaagaaagacaagcttgactcagggaagggcacaggagaagaagttaaggaggattctgctatttctcgccccagcttggttgggatactcatctgacacctgagagtgaggtccgccaggagctacagaggcagcaggtgtctgtctattcccctccagtctccttggttagaccatccccaggccagggggagtggtggccagttaggatcagtcttgtcgttccaggatccttctctgcacttactgttggcccagtcactccattgtcgtctgcaggagtattagatgaaattccagagacttcagtctctaaagaagaaagcttttctagaacagggaatttatttctctccccgggctcacaggggaagtggaacattccatttgaagggtgaaacaggaacaggtgagctacagttcagacaacaggactctgagacacaggttgagggagtggctgagccactcatgctgtccacctctgtctctgccatcttattatcaatctgtttgagggcaccttgcttcctgtgccctgatctcaagatgctaggatggcaggatatggctctgggacccctaaggaagacaggtaagaggacatccctcagaagatcctgtccctccccatctggggaccctcactttcccacccaccagtgctgctgtgtcccacaattctgagggcaccgttcaca

SEQ ID NO: 58015 - DNA, 1023 bp, Homo sapiens
ccaacacccactctccacatcctgtatcgagaaagtcaggttcttacccaaccagggcctctcctccccttgtcagtcccgatgtttcttttaatagtttaaaaagttagaaaaatatttttcagagctttagttgctcctgagaaattctagcttcctcccactgggagtgagccttcaaagatcatttatccattgatcaacgagaaaatatttattgagcgggagccacctcgcgcattgcattacatgcatcgtgggactccacagtctggcccccaaatacccgtccagcttcatttagttatgaggaataagcaagcttataaataggaagcattcccacagtgtccatagtaaacacacagtaaatgtttatagaattatcgttacttcccaacacgaacctttacctagtccaggtaccccagtaatctcccgtctccttaatgtgactccctctaaaacgcccagcctcctcctctcatgctgtcgtctccatgctgtggcctcccctgggcatctccccggctccccactcacgctgccctcatcccaggctgcctgtcacgggaggatggttttgttggtttgcttttatctgtatccactctctagattagggtttccttgaaggtggggaccacatctctgctcagtctctagcactgtcatgctcaggacatttctagggaatgactggctaacatatgcctacaacttcacggcggagggggttttctgtgggctgggggtgtttaactgaagctttctggaagaggtggcatttgagctcagccctaacacggtgtccacctgccttcccctgggagatttggatttaacaggcatctgggggagagggaaggggaatgacgctgccagagcaggaatgcctaaggcctttcggggaaatgttgcaaagttcagtcaggttgaactagaaaacttacacatggagccatagaatatgacgtttgaaagatgagtggggacgtgccgcagtgggccttggatgccaaa

SEQ ID NO: 58016 - DNA, 1029 bp, Homo sapiens
gagaaaattaagtggtctcaagccaggggaagcatggctccctgtgctggatgcattagggagacggctgggcagggtgaggaatggggcttgctgtgggcagagggactctgccccttttgtgttcagcccagtctatatgttaatggcagcccagcggtgcttggctttggcagcctggaaatggcagctactacttctccccatgctgcccttccaccccttgttcgcctgggccctgagatctctgcaggactaagtgaccttagggacaggcagagtagagtcttgcgccaaggcctcctgggtttgttcacaggctactctaagaagccaccaataaggaactttctcagggctcagggtcctgagcacctttagaagtttctaataggattttgtcttccagataggaaggaaaacccatccagatcttatagaggaaccaaagcccagcgaggcaggtacttgcccacagtaacgtgtgtgctgagggctcaccaagcaggcagctgggcattcgggctcctagtcctgggacctgagctctcaatatttctgagcatgaagatctcatgtggtgcccattggttctttgtcaaaccagatatttatttacgtgagttctttggtaggacaaccaatttttctcagtgtgcctgagactgtcccggtttgagcactgaaagtcctgggcaaactgggacagttgaccaccatgtccctaaggattctccccctggcagccctctaaacccagtttgcatttctctttattgctttaattgcaggaaacatttcttcctggcattcgttttctatgggctgaccccagagagctgaacttgtagataactgggaagtaacgttgcctacccaaggtgcctgacactagactttcctatctctcaggagctctaagacaatcaaaatagttgcatctctctaaatgcaattggggtaactgaagtacagtgtggaggtggctcctgcctctcccttgctgaaagctctgatcaaattctgtat

SEQ ID NO: 58017 - DNA, 3901 bp, Homo sapiens
attttatccaaatgccatctaatctgaacttttttttttttgagacagagttttgctcttgttgcacaggctagagtgtagtggcgcgatattggctcactgcaacctccacctcccaggttcaaactgttctcctacctcagcctcctgcgtagctgggattacaggcatgtgccaccacgcctggctaattttttcgtatttttactagagacagggtttcactgtgttggtcaggctggtcttgaactcctgacctcaggtgatccgcctgcttccgcctcccaaaatgctgggattacaggcgtgacagaactttttttttaacttcaaatatagctgggaccaaatattcctaataataatatgttattcttagttgggaatattctgaaagaattggtagcataaagggttattgacctcaatgctgattgtaagatcctagacagttattaaaattagtctttgtttttgtaggtaaccttccttgaagaagttactgagtattatataagtggtgatgaggatcgcaaaggaccatgggaagaatttgcaagggatggatgcaggttccagaaacgaattcaagaaacagaagatgctattggatattgcttgacatttgaacacagagaaagaatgtttaatagactccagggaacatgcttcaaaggacttaatgttctcaagcaatgttgagttggcagcctgtagtcctagctagcatacactacctcttacctgagaggtgtcttttaaaaacaaatcttggcagctgtcctttgacatttttttttttagaggaaatgtaacttggatctagtttaatttttttttttgcaacatatcccactcagaaacattcaggtttgaagccagccctgataatgaaggatgaactagtgtgatttctaatcctcccttttttgatttagttggatgtgcttttaaatgtcctttgcctgcatgaggtggaaaggggacctttttgagttgtcattttgcactttcaaaacttattttcttggaaaacaatatttatagggcttaaagcccattttcatttctaatctaaattatgtgtgcctatctgaaaactttgggctctttcttgtttctttcccaaaattcagaagttaatgggcttttatgtttttctatattttttttatttcaatgatttggcctgtctatgttaggctaaaaaataaccttgtgtatgctaccaacttaaagtgcattattttgtgtcacttttttttttcttgtaaaaatgacttggattgaaaatatgtggtagcctttttatttctacattaagttctacctaggatatttccaaggactgccacaaaacccatatgtgcagtactttactactttgggaaagctgcatctttctaccacattttaacatctaatatatttaatttctttgaagagggttctgtgtacgttattgtagttcccagtttaatatagttctttgtatctcttaacaggttgaagttattgcaaaacactctggaaagtaataattacatcataatcatttattttttaaacttaaaagcctagaaatttcctagaaagaaaataggagacatctcagagcaatttggttttggtgtatatgttctcaacagaaaaccagtgttaatgaatatcatgcctcagcactgtcacttttaaaacctgtcaggatcccactgtaaaattggaaatgggcagttctgaattttcacgtttgaaatgtaaaatataaacttcagtcaatatccaggtttattgtgtcctactatttaataatgagagaagtaatggcaaggcctttactttcaggaaaggatagaagtatagattaatgactggaaagttttaatatatttagcccaaaggttactttgaattgaagtctttgcattgactgtttgtgtttggtttatttgtttagctttacaaggtacacataagttaggttgaggggttgttaacccttccgtggtctgctttcattccgtgtgcttcctgtcacaggtaatggaaaacataagtagaataggtgacctcttagttttgaacttatttaagtgtggggatgaatttttcatcagaagtgcttacagggttactacctcagtttacaatctacctggtcattattttatttctatccagttctaagaactgcctccactgtttatatattcataattaaacacattgagaatgcaacactataaaagctggtcaaatttttgcagagcccttattctgtgtgttttttgtttttttcttttttttttgagacagagtctcgttcggtcccccagcttggagtgcagtggcgcgatctcggctcactgcaacctccgcctcctgggttcacgcgattctcctgcctcagcctcccgagtagctgggattacaggcacacaccaccacgcccggctaattttttgtgtctttttagtagagacggggtttcgctatgttggccagactggtcttgaactgctgacctcgtgatccgcccgcctcggcctctcaaagtgctgggattctgtgtgttttgtgcacctccactttaggtaatcatagggagcacatttacaggatggtctaataacatgaaaacaggctagtttcaagcaacagcaatgtcggttggaaagcaggcgtcatttgccttgaaaaaagccttttgacaacatacaggcattcttttaaaaccaggctgaaacattttatttccgagacttaacgttgtgtttcctgtttcttaaacctagcacctctgtgtatttgaaaataatgagacatctttcattggattttggaaaattgttccccatgggattctaacctcactaccaaatgagtgaaagcttgattaagagttcttccatatactagcctccttggaagaagtgatcagaaggtgataagaaggacagaaaggactattttaaagttggactgaaggagaaaaaagcaaaattcttgtttcatcccaattctagttagaacaaagttaaacccccgtaatcttaaagagaaaatctttggaggttttaattaaacattttatacatttaaagtcttgttaatggtgctttaagtgtcaatgtagcatgtaaaaggctttgtacagacaggtaaaagttccatttctgagtgatgaaatgtaacacttcttcatctttaacttgaaatcaaaactatcagattttatttttgtataatttaaggaaggtaaagttaggggactagaagactctaaattggcttctacagatcaataatttaaatgtaactagttgggattttatagttaaaattatatttgtgtatataacataactaatctgtaaattgtaataaatatatttgcaattattaaatgttaagtgatattttggttcaactttatattatatgtatcatagtattttacaatggttttggaattactaagcaggattagtataattgcaaacaacattttagtaatagaagaacttggttcttgcagtattatgagaggcccttctaagaaactgaagatttgattctgaaattggccctagcttttcagttttgctgcaaagaaaattaaactgggtattcacagaagcaataacattcagatgctgggcttagcctagtgcttaagtagcagggaaatctctgttttgtgcattattattattattattttttgagacggagcctctgtcacccaggctgcattgaagtggcacgatctcagctcactgcaacctccaccttccggtttcaagcgattctcctgcctcagcctcccgagtagctgggatcacaggcacctgccaccatgcccggctaaattttgtatttttagtagagatggggtttc

SEQ ID NO: 58018 - DNA, 3516 bp, Homo sapiens
tcctaggagaccacacagaaacgactgcgcatgcgtgcattcccccccccccccccccccccccccccgccccggctgatgcaacctcacgctgccgtgcggctctacctcgagtaaggaagccgacagggaaatctggcaaaaccaatcggcggccacacggaagtgggcggaaaggcccgccccccggggattttgcgagtgacgttgggcggcgcggcgctagggacgtagacgcccaacagtcctgcgtctcttccggcgtctaggggggtgtcctgccggcgcgcgggccctgcggccattttgggcttcgcttccaccgcaccagccggcctacccagtccttccggtatcgcgttgctcaggggcttttcaaccctctgtcagtcggaaaaccatcgccgaggccgtggggggactcctatccatggtgttgaagcgtcgagccgactagggaacctccttccccgccaggatggaagtcgcatcagtcgccgcctattgcgcgggctgttcttccctgtgttctgccgcccgctgccgcattcgctgccctctgtggcttttctgctggctcgaagatcggcctggagcagcgacgccaccgctgggcaaggccgagactctgtaggcttcctccgaatcccgtcgacctccagccgctgagcgccgcggccctacctgagagactgtcaagaaaaaggagatggagccggggacaggcggatcgcggaaacggcttggccctcgggcgggcttccggttctggccaccctttttccctcggcgatcgcaagcaggctcttctaagttcccgacgcctcttggcccggaaaactccgggaaccccacactgctttcctctgcccagcccgagactcgggtcagttactggacgaaactgctctcccagctccttgcgccgctccccggattgcttcagaaggtgctaatttggagccaacttttcggtggaatgtttccgaccagatggctagattttgctggagtctacagcgccctgagagccctgaagggacgggagaaaccagccgcccccacagcgcagaaatctttgagttcgctgcagctcgactcctcagacccctcggtcaccagtccccttgattggctagaggaggggatccactggcaatactcgcccccagacctaaaattggagcttaaggccaagggaagtgctttggaccctgcagcacaggcttttctcttagagcagcagctgtggggagtggagctgttgcccagtagccttcaatcccgtctgtactctaaccgggaacttggctcttcgccctctgggcctctaaacattcaacgcatagacaatttcagtgtggtatcctatttgctgaacccttcctacctggactgctttcctaggctagaagtcagctatcagaacagtgatggaaatagcgaggtagtcggcttccagacactaaccccagagagcagctgcctgagagaggaccattgtcatccccagccgctgagtgcagaactcattccggcctcgtggcagggatgtccacctctttctacggaaggcctaccagaaattcaccatcttcgcatgaaacggctggaattccttcaacaggctaacaaggggcaagatttacccacccctgaccaggataatggctaccacagcctggaggaggaacacagccttctccggatggatccaaaacactgcagagataacccaacacagtttgttcctgctgctggagacattcctggaaacacccaggaatccactgaagaaaaaatagaattattaactacagaggttccacttgctttggaagaagagagcccttctgagggctgtccatctagtgagatacctatggaaaaggagcctggagagggccgaataagtgtagttgattactcatacctagaaggtgaccttcccatttctgccagaccagcttgtagtaacaaactgatagattatattttgggaggtgcatccagtgacctggaaacaagttctgatccagaaggtgaggattgggatgaggaagctgaggatgatggttttgatagtgatagctcactgtcagactcagaccttgaacaagaccctgaagggcttcacctttggaactctttctgcagtgtagatccttataatccccagaactttacagcaacaattcagactgctgccagaattgttcctgaagagccttctgattcagagaaggatttgtctggcaagtctgatctagagaattcctcccagtctggaagccttcctgagacccctgagcatagttctggggaggaagatgactgggaatctagtgcagatgaagcagagagtctcaaactgtggaactcattctgtaattctgatgacccctacaaccctttaaattttaaggctccttttcaaacatcaggggaaaatgagaaaggctgtcgtgactcaaagaccccatctgagtccattgtggccatttctgagtgtcacaccttactttcttgtaaggtgcagctgttggggagccaagaaagtgaatgtccagactcggtacagcgtgacgttctttctggaggaagacacacacatgtcaaaagaaaaaaggtttgtttcttgtcttttaacatgcctgatatgttctgactgtttttatatgcttaaatatagcagcatgactttggaggcttaggagtgcatgtatttttgaggaaggcctctaaattcatatacttggattgagaaatatgtaaatgacccttctcctcctgtccctcaccccccaccccaatgcacattgttgctgtccaaaacgaacataccagtgtgtagatgttagcaggaaagtgccatttttatttgggttggtagttctggactgtttccttacaagcttcaatttttcacactttttaacggactattaaactttgtgtgtacacgatttaatttttctagagattgaaaaggtcctgttacagccatagagttttaaaatgattttaaatgtatgttgtctgcaaatacttaatattttttttgcatataacaagagtgtcttcattcctgtccattacaacccaaagggatgatgatatcaagtagcaagtcagatttatctggtccaattggccatgaaattaaatagtaatttcactggttttgacattacatggttttaattgaaagtcaaagccagtacaggaagtggtattgccttttcttaggaatgcaatgctagttatcagtggtcagctacaggttaatattaataataaacagtgatggccacttacttggtttatcttgactagttgcttccttttcccaggctagtcttaaaacttcatgcagcattttacgctttaattacattgtcaggttaaccttattttgggagtctttagagttggtttgtttttctttatagttgattcaactaaagttattaattgaactcttctccaaactcaaaggtgtctattattgtagag

SEQ ID NO: 58019 - DNA, 1036 bp, Homo sapiens
gaagttcactaccagggccaggcacggtggctcacgcctgtaatcccagcactttgggaggccgaggcaggcagatcacgaagtcaggagatcgagaccatcctggctaacacagtgaaaccccatctctactaaaaatacaaaaaattagctgggtgtggtggcgggcacctgtaatcccacctacttgggaggctgaggcaggagaatcgcttgaacccgggaggcggaggttgcagtgagctgagattgcgccattgcactccatcctgggcaaaaagagcgaaactgtcttaaaaaaaaaaaaaaaagaagtttactacctagaaatatttgaccaactccattttataggagaaaaaactgaaacttgagatgcctcaaaactatcaagccactacagcataaccatagcccagaagggaatcccccaagtgcaggatggaagtgaagtgacccttgttcaagcattgtacccagaagtcttcagaactctccagtggggagtcatgtttcatactggggaattctgtgggggcttccagggatttttcagtagtaaacagtaggaagtgttactgctttatttctaagtggtcttgaggtgtcactgcagttctgggcaagtccctatggactttttaaaggttagtacttgaatctgccaagagtcttagtgaaggaaatttcgtggccaaatgaggtagaaatctgaaccctcctgagggaatgggaatgagagaggtggggaatgagagagagaggttgcccaaggagaaaagaaacaaaggcagcccagggggcccagatttctgagttcaaagagaggtgacaaaaatgaagcagcccagcttgccgagatttggggagcaaagattagactggatttgaaaggtgaaaaaatgaggcagcattttaaattgggagagaattttctggtggctgggacttgtctaaagtgtcaacaaacaacactaatggcttactctgggtgaggcgaggtgtccggtactgtggctactcagataacaaaggt

SEQ ID NO: 58020 - DNA, 1072 bp, Homo sapiens
cttggtttggggagtgtgtggggtgggctgtatgaagtagcattttgggggtgggtgggtggatatcttaatttttatttttaaaaaatgaaatagtgatgttgtcctaactgggacaggaagccttgcgagaagggacgtacctatgccccagaaggcaagagaggaagactatttggactttttgtatgattaaggttcttattggacttttccctaggttttttttttttgttattgttgttgttgtttcgttttctagctataggaactatctggggaggggcccagtgggtcctcggccagagccctctctaaggacaggttggggagggttggggagggctgcctgtgctggactgaggcttgtgccactgggcctttctgattttgcctccaaaggagagcgctgtgatacctacatgtgtaaggaagggccttccgtattggggttctgccaaggacccgtattcagggacccatgctcttttggggggacttttcctcttgtcttccctactttattaggacttgccctgaataccattttctaccccttgcccctccattctcctggcccttctgggggtcagctggtctctatgaatatgctgggggtgcttccccataggtctctcccttcatttgtctctggtgggacaaaatactgactcagtccttagatgtagtttcacccaagagcatcttggccctgggaagaggtccctaggctgcagatgctactgactgcttgctaggtagcctctggaaagcattccccatccatcactccccacttctttctgctgtgctgcttccctcccaaactccatttctgtcaccctttttataagacttttcctcattctgtggggccataaacctatttagtctggagccaaagggatgccctatctgaaggaaaggggcatggggtgggggattccatcaaaactgttgttttttgccccatgatttttctttggtcagtaggaggctggattggagtggtgattattcccctggagctaagctcaggagcccgaagggagagactgagactgactccctt

SEQ ID NO: 58021 - DNA, 1051 bp, Homo sapiens
agtgaaaacagggctggctggttcctgatgaaagaagattagattagaagtggagctttcctgggtggtagggccctggtagcctgctagggtccgtggcctgttcccagcatcacaactctagtctctgggttaattaggttgaggaaagtagggacactgggaaggaacaaatcacaataaccaaactcacaagagactggctataggccagaatgctaattcgtataattttaacttcaagggacccaaatactgatttatattgatcaatgtactttatcctggagggaaaaccagcatgggcagccaaggtataatcagaacattgtttagtgaatgtgtaattagatgatcttaaatggctttcagtgtttgtgttccccggggcttaattcctggcctgctgggccctctttgcactcttcttgtgccagctcatcctcttattacttcaactaccacctgtatcttgatgacctccgaagccattcctctagccctcttcccttcctccaggtggttctatagccaccttcttgctggacttttccacctacgtttcacccacgtctcaaactcggtgtaggcaaaactgagcctgctgtctctcctttgcctcttgaaacctgctttttgtgtttgctatcagtcaatggtgtgactctttctgtgcatttacccaagccaaagccacggtcttcctgatgcttccctctatctcacttctgtaccatgctctgtttattcttcttcccagctatctctcaaatctgtcctcttcttcctattttgttaccattgattttgttcagctctttgctgtcggtcccctgaaccactggaatgcctctcctccatctagagccagcctctgcttgatttcagaggtgttttgttgttgttgttgttgttttgagacagagttttgctcttgttgcccaggccggagtgcaatggcacgagcttggctcactgcaacctccacctcctggattcaagcgattctcctgcctcagcctcccaagtagctgggattataggcgtgcac

SEQ ID NO: 58022 - DNA, 1226 bp, Homo sapiens
tgtaaccaagagccactgagcggttctggtggcacaggaccatgttaaggatacatggaaaagcaatgcttgggtaatagatcatctggtcttgtcattggaagaaccttagaggtcatctagcccagcctccccacctcatgaaggcatccctgccaccaggtcatccagaccagggtgtggttagctcacaagtcctcttggagggcgtaagcttttacaggacttgggagaaggaagaggctatggtccacggtgagaatgagaggggagttggatgatggcttcaaacagaaaaggcagatttttggattgggggagcagtagaaatattctctgcttagccactttagcagctcttcccactctccctccttcttagggtcctgacctgtggccggaagcttctgggtttgtggccagcaacacaggaaaatcccagcgcccgttggagtgcacctaatttccaccagccagacagtgtcatcctgcaggtgaggctttagcccttccctcccagtcaccagcaagaccattccagtcaactctacatttttctcctggagatttgggctgggacagcaggagagagtgctagaacttcaagcatgggaggatgatgtgactgaagcaactgagggaatatggttagatgtggattgtgaggtgagctctggggtatccatctcccatctcctggaggttaaattgatttcgtggagcctgaagatggggtctgagaccctctgcattcagggctcagcttctgagtcccttgtattgaatcttcatacgtctaagtctgatcaaacctgacctgggtcctcttggggcctgaggggacacctttgcccctgccagtgactcagtgctttggcaggatggacctattctccagggagaagaggaggagctggtcacgcccaaggtgcacttctcagttcccagcttccccttcttgtggttatgagatactttggtatggagtatgaatgttgacatagaatgaaagctccctgaggcaggtttttttttttttttttttgagacaggatctctgtcacccaggctggaatgcaatggcacaatcttggctcactgcaacctctgcctcccaggcacaaatcatcctcccacttcagcctcccgagtagatgagactacaggcgcacaccaccacgcccggctaatttttgtctgtcttatttgctgctttatgcccagac

SEQ ID NO: 58023 - DNA, 1013 bp, Homo sapiens
accatgttggccaggctggtctcgaactcctgacctcgggtgatctgcccgccttggcctcccaaagtgctgggattacaggtgtgagccactgtgcccagctatctgggcttatttcaaatttaaggatattgtggggtcctttctggcctctgcctcctcatctcgaagctaagggaaaggaaagaggcagggttctgtatggtacaactccagggtacccttcaaatgtgccccacctttaaactcacttatgtacacacttttcccctagaggaacaggaggggtcctagactcagggttgcctggcagagagagtgccaggtggcctgccactgttagaagggaaaaaggggacatagtggataagttggagctcctgctgacgccattacacaggtttgaattcggacttgccacttactagttgtgaaggctgattgatgctcagggccctctgtaagctgcagtgagggtgaaatgtgagaatgacctgtgagcaatcagtaaataccagcagggaaggagcagcccacggagagaagtcctagggctctgggctgcacagatactgccatttcccttgcagcaccccaaatcctggagcccctgggtccggaggtagtgggagctgtcaagttctaccttcctgctaagactcaggtgaaatattcttagtgaggtgggacagggtcagcggtcctcagatcacacccctcatactctcacttgaatgcacagagaggaaggccttccacagagaagatcaagcaagtccccaggggacctgtgtgcatgactcctggcctaggagccccactcccacccaacagaaaagcacaatgctgtctcctggcccagcccccagacccccaacacatgacaactgcctgggatgggggtggaaaggacgctccgggggttccagaaatctgctagttcccaaggaagccctgagattttctacccctgcctggcaggaggggctgatactgagggggtgagtgggttc

SEQ ID NO: 58024 - DNA, 1432 bp, Homo sapiens
gaagagaaagaccttatggatgcatgtgattctgtaatagacctgccatcaaaaaagcttatagagctgtatacaacctgtgggttttccataaggaagcagggatcagatgcacatctgttggaggctgggggagccggcttgcttgaccttaatacacctccctgctgtaggagtcggattcctggcagtgtgttgatgttccctgttagagccgggctgtgggaggggcagttggagccagcggcatgtgtgtggagtgagatgcgaggcagggtccctggctgcaaaggaggtgggattgggggtatgggtgagtgtgggtgctgggggatggacagaagtggaggtcctctctgaagagaaaaacctggacaccaaagggtttaagtcctaatggcctctgactccctgaccctgcctgtccttaggggaagtgctgagggtcccttcctggggaagtcctagagctgagtctcttcccttagtaaaatctactgaaaatcaggatgcccaagactgggggcttgaaaccctgcatattcttcaccgccttgcttgagagctttccattttccctgcccactgaagatggtccaagacatgcagtaccttcttgcttcctgctttacaccccaagaggggattgaattctttatgtatgtgtctgccacctttgctagattgtaagctccctggaattgtgccatagtcatctgaatacttgtagtctttagatatgtatgtgcctggcctggcatgtagctggtactcaacaccctttgggatccaatctgtggctcagggtatggggaagagatgacccagacccctctagattctcccagtcccaaggagaacaattctgttagggtgccttccagcaagacagcaggaaccctcaccacccactggctccagtggtggcccctgggctcctccctctctggcacagggactaaacagagccagctccactggagggagtgccctctcctttctttccatcctttgactctgaaccattgtgtcactctgtcctgaccccatttcctccccggctagccctcagccatctgtgggcagctgtgagactgagtttggtgcctggtgcagctcagaccctggcaccgacctgcttggccataggcatgtcctcttgtttcttcagctgactggtgctttttggggtgcctctacccaggtcttcttgtcttcctgagagttctgaaaccctcttctgtggggtcaaacctggctgcacatttgaatcactttaggggctactgaagcatccagcatccagggactcaccctactgagtcagaacttccagaggagaggtcgggaatgtgtatatttttaaagcttcgcagatgacaattgcggtcactcaaatgtggagtgtgcattagataatattattgttgtc

SEQ ID NO: 58025 - DNA, 1159 bp, Homo sapiens
tggctcccagctgcagggcgatctgaaccagtcaatggctttggggtttgtttatttaagataagaaataaaaaaagcaaaacctgtcctgtgatggggttagtgccttctgtggactgggtgagaagtcggcatctagcctggggaatgtgtacgtttcttagtcgggcggagggtagaattggattctcccttataaggatactgcagcaaaaggagactgaaagcttgaaagagggagagggaccctcaggcctgagttcgccggtgctgggagaaggcgctgctctcctggcctatacttgtccctcattttcagctcccgacagcggtgactttgatgttggaggagcaatcgcagcaggaagcacaagcaaggctgccaagctggtgtggggtggagtagggtggggagcccaggggcttggcaggcttctggattgtgggaagaggttaccaaatgtatgaggttagtgcacacaccctagttggctgatgttgaagtgtgtgtgtgtgtgtgtgtgtgtgtgtgttttctgccattgctcttgctccttcaggcctgccttttctcctctccacccgcttctggggtcttcgtagcttccctgccccagcccttccaatcatgcctgggatggaatcgctgtattgtctctggcagctctcttgggctgttttttctcaactctgttggagagttttgtaccctgggctggctggtcccagcatggcaccagattctttagcaggcggctacccgggctccaagaagtgggccaatgctgcccctcctccttgctctaaactacctatttgggatatggccaggcagatgtaagcaatttgtactaaattccaaccctgaatcagtgctgaatgaaaacttactctgttgctgcatcaggctttgggaagatattaggaagagaaatggcccaggaggtggcaatgccgacccccaaatacttccctctccccaactccagctgccgatcccagagcagacaggcagtgagactttggaatcccagctcctccagagtctggctggcccatcttgaggttgtgtccatggaaaaattaagtcgaggcacattttatagctctgcttggcagccagcatctgaagagatggtggctctgagctggagcccta

SEQ ID NO: 58026 - DNA, 1021 bp, Homo sapiens
tgcggcttcattactcgccatttcaaaatgctgccgaggccctaggatctgtgactgccacccctccccccacccgggctcggcgggggagcgactcatggagctgccgtaaggtgtggctcttggccttcgtcggcggggtgccgggagcgggagctggagagtgaggagcaggcggccgtaccgccagttgtgcgggtagcgggcgggaggagcttgagaggtgggtcgggcggcgtggggaaggccgcgccaggcggaagaagggctcggggggaggggaagagttgtgggatgagggctcgcggaagataaaagtggaggtggggtgacgtgaagtaactttggccaacaggtgacaaacctaaagtcgacgtagttggattgagtttaactggacacaacatttgaggactgttgaggcaatttggagaaaggaggtgggagagagggaaccgggtagaatgacattgacgtgtcttaagtttttaagttagtttttaggtctgcggacagtctaccttagaggcacttgagtgcttgtttgaaaatgcttgttttggcttggcgcggtggctcacgcctgtaatcccagcacttcaggaggccgaggtgggtggatctacctgaggacaggagttcgagaccaacctggccaacctggtgaaaccccgtctctagtaaaaatacaaaaatattagatgtgtgtggtggcgcatgcctgtaatcctagctactcgggaggctgaggcaggagaatcacttgaatccgtgggcgggggttgcagtgagtcgagatcgcgccactgcactccagcttgggctacagagggagattccgtctcaaaaaaaaaaaaagaaaaaatgttcgttttggggccacactgaaacctacagacagtatcgagatggggctcagagaaatatattttaatgagcacacctcccagtgatttttgtataccttaaagcttgaaaaccacaggtttttttggttgtgtttttgttttgtttttgtttt

SEQ ID NO: 58027 - DNA, 1052 bp, Homo sapiens
gtcctttgtcaagacatgttccaacatgttgtagaggttttcctagaagtcctgttggaatcttaaaacctgtgacttaccttggtaaatccccagtcttgcatctagagagtgctctacctgataaccattggggagataatgatttgactttcagctaaaacagtttactgattaacatcagttggaggttggagcgtgcctgaaactgttactgtttcagccttcacctgagagaagcttggacgattcttactcttaattaaatcagaactagaaagtagtcagaagatatgcagaacctcagcaagggtatacagcatttgtgtacggtgctccattatatgtgtcatatgtgtcttttacttctgctggttgcctttgtgtgaatgctaaatagggaattttctgcattagaatagatgttataaatttttttttctatttagttttaccaacagactgcagtttcttcactaccaaaatgacatcattttccacctctgctcagtgttcaacatctgacagtgcttgcaggatctctcctggacaaatcaatcaggtaaatcattttcggtatttctagttttttggttttttttttttttaatttttaaaaagtttagctgtctcatgactgtaatcccagcactttgagaagtcaaggcaggaagcttacttgaagccaggtgtttgagaccagccttggcaacatagtgagacctgtatctctacaaaacatttctaaaagaaaaaattagctagatgcagtggggtgtgcctttagttctagctacttgggagcctgaggcgggatatcacttgagcccaggagttcaaagctgcagtgaattatgatcacaaccagtgcaccccaggctgggcaagagagtgagaccttgtctcttttttaaaaaaagtaggggaggtgggggttgtgctgggcgaggtgggtcatgcctataatcccagcacttcgggaggcggaggtaggcaggtctcttgagcccaggggtttgagaacagccagggaaacatggtgaaaccccctc

SEQ ID NO: 58028 - DNA, 2968 bp, Homo sapiens
aaaaagaattattatgtgaacacatatcaaaagcctaaagtcgtttatgtgccctggactgggaaaatatttttataatccaggcaaattacttctagtaatagaatagacttctttatttggacgtctgagaaaatttttaagaggatactaggtaaattcactgctttttctcattgtcagatcagttcatttctgtgctgaaaagtctgggtctgttaattgtcagaaagacaatgagtagatggacctagtagttgggagcggctttcctgttgtaggaccccttacacaaactttgacagtcttgtaaatatgttatttctttctttagcaaactaacttaccttacctcctctaatgaatttgtgtttttggtagcagctggacagatcacaacatggtattttattccatgcaggtcatgcactatttaggtcagtacataatggtgaagcaactttatgatcagcaggagcagcatatggtatattgtggtggagatcttttgggagaactactgggacgtcagagcttctccgtgaaagacccaaggtaaaaacagtgagggcttgcgtatctttttgggtgcttatacctagccacttaatttctatgggttattaatatttattacttcactcaacaaatatgtaagagcctacatatgttaggtagcctatgaggcactgagaatatggtaatgagcgacacacagtctgattttatggagtatacagagtagtgagtcagtagatgctcttgcccatcttagtcaaataatcacactaattcatggtaaacctacactatggcaagtgctacagaaaagagatacatgaagcagggagtgggtgggatttagagtgttagaggtcaagaaaatgttcttttgaggaagtgaaatttcagccaaaagctgaaagatagataattaagtagtcaatcagagagtttgaggttgattgaacaccatgtgtaaaggcctgggtaggaggaagcttgatgtgactaggttagaattttgtgaaataattgttggagagggaggaagagtgagcagatgagagaaatgtagaattgctgggcagttagaggttgatgatgagcctggtaagaatcacagtagggctaacctgacctgttacttttctccagctgcatggggtgtaagttattagcttatatagtcaaaagctaattagtaatttagaagctctctttctctatagctttgatgactgctgcttctgagctcattctgtcttacactaagacttcccttagctgggtgtggtggctcaagcctgtaattccagcactttgggaggctgaggtgggtggatcacctgacttcaggagttcaagaccagcctggccaacataagtgaaacgccgtctctactaaaaatacaaaaaattagctgggcgtggtggcgggcgcctataatcctagctagtagggaggctgaggcaggagaattgcctgagtccgggaggcagagattgcagtgagctgagattgtgccatggcactccagcctgggcaataatagcaaaactccgtctccaaaaaaaaaagactcccctccacccccactttccaattacaatgtgaaacttcagtcctggaaggaaggaatagtttccaaaagagatttccccacttggattactgttcgctaatgaaataaaatgtaaattaatcagttttttaatgggggcagagtaacacaggggcctgggcattaacatcttaatatttaaataattaaaaactgttctgggaaaaagattctgcctttgtatgccttacagagagacttgggagataacatcagaaatacatttaatatttaacggcaaaccactgatatcttcatagtggcatttggggttgttaattttttatcttctctctttaacagccctctctatgatatgctaagaaagaatcttgtcactttagccactgctactacaggtatgtcacatcatatttcttcagtctgtatcacagctttgagttcaagggggcaaatgatgggaaaacaaagaagatgaaggtggaaatggaatgctatctttggcatgactgggagaaatacatactacctgtcacacagaatgttatgttattaactttttactgaaaaatcaaacatagagtagaaggatttccactttctagacgtactgttaacgttttgtcatattgcttcatctagacacacttttaaaaatctctagcagataaggacttttttctccaaacattcaatatcattattacacataacaaatttaacatgtaattccataatcctatttcatagccagtttatgtatcatttcccccagttatctcaaaaataccttgtatttttgtcttacttgaattaggatccaaagtccacacattgcctttggttgatatgtctcataagtgtctttaatctataaaacttaactttccttttgttttcatgtcatttacgtgttgaagaaatgggtcatttgttctgtagaatttcccacgctctagagttggcagattgtatccttgtgattttgtttaatgtgtttctttaccctctctatttttggtaaactggtagtgcttgaataaattcaagtttaaattttttgccaagaaagctttataggtaatgctttgtacttctgtttaatcacatcagagtcatgtaaggtctgcctgtctattttagtcagtcatgttaataatctgtgggctcaggtggtatcagtctgatccatctgttacacaggtcactcaagaaccttttacctaatggctttagccatctcttatctgaatgccaatttgtctaaccctttgcttgattctagaccttctaaatactgctctttaactattaggtatgtataggaaactggctgtactggagtctggagtctccaaaatggtggtctgtaagagataggt

SEQ ID NO: 58029 - DNA, 1119 bp, Homo sapiens
cactaaaggtttgagatacatggaggattttataattgctgatctactttttcattaaaatttgtttttggattgatctgttttctgaatatctataattctccttttttctctcattttctttcttgtactttctctgcagaatttaacatgccatataaagaatattttgttggttttgttttgttttgtttgagacaggatctctctgttgctcaggctagagtgcagtggcaagatctcggctcactgcaacctccgcctccgtggcacaagcagtcctcccacctcagcctcctcagtagctgggactacaggagtatgccaccacacctggctagttttttgtatatttttttgtaggtacaggttttctgcttgttgcttaggctggtcttgaactccaggactcaagcgatcccccttcttcggcctcccaaagtgttgggatgacaggcgtgagccaccatgcgtggcccatttttattttttaacttgtcgttttgaaaaaatttcagacttaataaagttgcaaaagtattgcatagagtttctctataccctttatccagagtccccaaatggtaacatcttacataataatagtatgatgatcaaaaccagaaaattgccccaagtaattctgattggttatctgttctgacttgcaattgcattggtgcttgtggatggccatctctgttgatttttgtgatttgggttgcttgtgttttatttgaaaggacaaatgagagaagtgcttttcatataattttatacctttgcaaatgggttaaacttttcattttggtcaagaagatgccattgtttaaaatggtagttcttttttttttttttttttgagatggagtctcgctctgtcgcctaggctggagtgcagtggcatgattttggctcactgcagcctccacctcccgggttcacgcagttctcctgcctcagcctcctgagtagctgggactacaggcgcccgccatcatgcctggctaattttttatatttttagtagagacggggtttcaccgtgttagccaggatggtctcgatctcctgacctcgtgatctgcccgccttggcctcctaaagtactgggattac

SEQ ID NO: 58030 - DNA, 3347 bp, Homo sapiens
tggtagttctttctaaattgtctctccaaattttcccatgtatacaaatgaaataaatatgactaactttgtgtgtgtttattaatttttgagactgagtctcgctttgtcgactaggctggagtgcagtggtgcgatctcggctcactgcaacctctgcctcctgggttcaggtgatctcctgcctcagcctcccgagtagctgggattacaggtgcgcaccaccaagcccggctaatttttgtgattttagtagagatgaggtttcaccaggctggtgggttgcccaggctggtctcaaactcctggactcaagtgatccacacacctcgacctcccaaagttctgggattacaggcgtgagccaccacacccggctaattttaaaacttcttttttacattgtggtttcaccagataatttatttttgcttgtaactgttttaacctaagtaaggtagtaaggctttggaaatataaatgacagtaataggattgctttattaaagaattgctcctggcctgtgcggtggctcatgcctgtaatcccagcactttgggaggccgaggcgggtggatcacaaagtcaggagtttgagaccagcctggccaagatgataaaatcctgtctctactaaaaatacaaaaattagtcaggcgtgcgcctataatcctagctacttgggaggctgaggcaggagaatcacttgagccagggaggtagaggttttagtgagccgagattgcgccactgctctccagccagggtgacagagcaagactccgtctcaaacaaacaaaaaaattgctccatctgcattatatgttagtccaacttcgctttgaagaccactgtggtcagaaaatgctgtctctcaaactttttgttgtctccgtttgtccacaaaaatgtttctggaaataatgttttttataattagaattttgaaaatgtttgcttttttcaatagaaccgcattgacagatcagttgtaggatctgtatccttcctctagcagcctttatcagatggtgatgatattttccatattttatctctgaacctggtagtggttggtgaacctgacccacagtagacttattttgggtctatctcattcacatagcctcaaataatgaatagtccagattattaaattgtttgcagcttgatcttttcgtgtagccaagtttttgtcttttgttctacttgaaaaatttctttgtaagtccttggaatgcatttctcttttagattaatgtaatatctaagaatttctctgtactgtgttgttttccttggttctttttattggccttgagaaaaactttatttgctgctgcttcttaggaaatgtttatagtaactgggaaaaataagacaatgaaaaaaattaatttatatacaggtgatggtaatgggaatttaaaccataaaattatccttgacacttagaatgtcgctttagatgaagatgctattgttttatgaagcaaacggggaaaaatccagatttcaagatcccataaccctgtatgacttaacacttgaaagttgaaattaaatgtaaaaagccatacactcttttccttttgtttgtgagttaggcgaatttggtaatatataggaagagatgacaaaaatagactccattatgtcctgcttggaaccagttttcatataaaaatttaaaagcttgatatggaagaacatttttagctatttttcactgttttttttcccgattatattttggtaatatattttggatatggcctgtcttggtctttgtcatttttatcaattttgatttttcccttgcaaatgagagctttgtccagccaacatggagaagtacatttctagggactaaacctggctcccgggttgtttgctgaggtcctttttgtgtggaaagaatggttattaccagggaaggttttccttttgttttacttgctatccagatgctgctcagactctcgctctcgcacaggatcacagtatggatattccaagtcaagaccaactgaaggtaaaatcaccacacggtgacttcttttgttgtacagagtggccccttctctgtacctatggatcttggactcccaagacctttccctgaatgtggtaagaatttaataagaaaggttcttgggagttcacagaccagggacagagtgaaccttctctgttctgcccataacagagttccagtctctgaacctttctttgggatgtagcacttctgatcttcagttcttccagttgcatttttctttgggtttgtgtgtacctgtgtgtgtgtgtttgaggatattgctttattagattttaataggcgtgttgcagttaagttcatgtcaggccatttcctaaagcttccccaaacctggggaaactttatagtcatcttggtacgtggcgagggtttcatatgttttctgaattatgcctaattttgtagtagactggagggtttatacagatagcctgtttttaacagtagattttggcctttgtgcagaggttttttttccccccaggtttgggattcttctagctttgctcacagtgggttgaggagaggtgttgcctttatttgatgactgttgtgaacttgagttctctttcttgtgtgtaacccattgtgttgcacactaactggtgagccagaatggaactgctacatcccctggtctcagttatttctactgcactgatggacacctttcccttctttcagcaaagtgcagaggaaagttccacttccagaaaaagaactacagaagacgatatccccacactgcctacctcagagcataaatgcatacattctagagaaggtatgttttggattaaggctatatagacttttgttctcttcctcttccaacctttttatttttaatctctccgtatgtgaagtaggagagggatatgtcacaatttctcatccttttctgaaaacctttttatcagcctagttactaccattgttagctttgaagaggtagtgctattttagcaacccgtgagtactaggatggtgcaagacccttccatgagctagcatgctactagaaaatagctacacatttattgatttgctaccaggtgaattttctacatacatgaattcagctgccttagacttttcaatcttagtattcttgtatgtatatgatttggttagaatttttattttgatttatctacttgaggcaaaggccaattttcatacttttttttttttttttggagtcagagtttccctgggtcacccaggttggagtgcagcagtgcgatctcagctcactgcgacctccacctccttggttcaagt

SEQ ID NO: 58031 - DNA, 7334 bp, Homo sapiens
ctaaaaaacactttctaggctgggcatggtggctcatgcttgtaatcctagcactttgggaggctgaggcaggcggatcacctgaggtcaggagttcgagaccagcctggtcaacatggtgaaacactgtctatattaaaaatacaaaaattagccggacatggtggcaggcgcctgtaatcccagctactcgggaggctgaggcaggataattgcttgaacccgggaggcagaggttgcagtgagccgagatcgcgccattgccctccagcctgggggacaagagcaagactttgtctcaaaaaacaaacaaaaaaaacactttctaaaattagttttttgtttctgtttttgtgttggcgaagatgtgtaaaatcataaattccccaaagtcattttatggcatgatggcttctagtctaggcatgtggaccaatggcaggttaagcctctagttatgtctgagaaactttggctgctgaagttattttaaaagcttaaatttgaataagtttatcatgctggattgttttctttacattgcatttgagcataaactgaattttggtctacctagttactttgtaactattccagtctatatgatattaaatgtgtaattttattccttaatgcaaatccttgcttattttgtactcaaaaggcaattttaagatatataagaacatggctgggcactgttagaaaatcaaggctgggcatggtagctcgtgcctgtaatcccagcactttgggaggctgaggcaggggcattacttgagctcaagagttcgagaccagcttgggtaacatagcgagacctcgtctctacaaaaaatcagcccagtagaaaattagctgggcatgatggtgcgcaccagtcgtcccagctactcaggaggctgagatggaaggatcacttgagcccaagaggtggagattgcagtgagcggaggttgcagtgaatcaatatcatgtcactgcactccagcctgggcaacaaagtggtgccctgtctcaaaaaaaagttgggggcaagggcaggtatttaagaatagccaactcaaggggggatatgtagtttgtgatgaaaatttgggaataaataatagtattttcaggaagacctataggtagaagggacagaatttttatttgtggaaagaatgacctattttcatttccttcataagttgtagagctcgagtagggaagaataactttaatatggcaccatttcaagaatttggcttctgatagtttcaataatgaataagtggaaacataattgaagtttccctggccacagataagccttttagtcagcaatattgacataatttataagtaaatagggtaaccttatgttctggcaaggacccatgtattgcagaaattctttcaccatatgtacttcagcacacgttaaccccatggttgctatgggcaggcctaatgtattgggaggaggtagaagagaatgagaaagtaagaaaggagcagtagagcccaacaaaagactggagtatgggaaagaaaagagtatcatgtgataacaacagacttatgttaattagctgccctcagtgtcattcaaatgtacaatgtgagatcttttacttgaaataacgtggggtcttagtatttgtggtatgtctagatacttaactctaagagcccattgatccagcgagggcatatgtatgtatttggacaacctagagtttagtgttttatagtggttgttacctactaaaacatacgaattattgagaattgacccagaatatgtggtaccagtgagattgcctggacaaccttgtgatcacctattatggtttgtattgccttgctttgatcttaagggttagaccactatgttaccatcatttgcaatgctgttaatcaaactattatcaggcactatgtactagagcaagtaattctatagtttatacatggtaggagtgtttaaaataccagtaaatgcccatttagaaattcttttagcacaaggtcattgttcagatgcttttagagtcttttttttttcctgtcttctcatagaagacaatgcttttagagtttaaacttgataaacgatgatctgtttgtagtgtcattacttgctaatgaagtctaaacaagggaggagatttgagctctgccactaagacagatacttgatttctggttctttctttcttagaacaggaatttctttttacctattttataaagaagttttaagtattctaaagatagtcttagttattacgtattgtgcatagttatcattcttttcatttgacttctatagatgaagacttaattgaaaatttagcccaagatgaaacatctaggctggaccttggatttgaggagtgggatgtagctggcctgccttggtggtttttaggaaacttgagaagcaactatacacctagaagtaatggctcaactgatttacagacaaatcaggtaaatttcacatttgaagggaagtggttttttttcttttgaaagggtaacattcttggttactcttgaccacacattatattctctaagaattcttatttactcctatggcgttaaataccatctgtatgcatgtgatacccaaatctgtatctctagtccttacctcttccctaaatgcccaacttcagtttccagatgcctatttaactaacaactctacttagaggatttgacattgaacaatttcaaaatggagcctttggctgtgcgtagtggctcatgcctgtaatctctgggagtcccagcctataacactgggaggccgagacaggaggattgcttgagcccaggagtttgagaccagcctaggcaacatagacaccatttttacaaaaaattaaaaattagccaggcgtggtggcgtgcgcctgttttactatagtaataactgattcagccccctccttcctcacttcctgtcattcttctttgttcactacatgcgttttggatatactaggctcctttctgacactgtagcccaaaattgctgccttcctcaggcaccttaagtttgttctttactctttctggaacactgttcccccacattctttctttgccttctcatgatttaggactcacctcaaatgtaatttcttcaaagaggtcatccctggccacaaaggctattatgttacacagttccagtaggatccattcgctttttgttttggagctgtgtagctataggtggtggccctgccaaacccatccctagttaaaatagcctcctctctagccactcttctcttttatcctattttattctccatagtacttctcactttgtaaaaatattgctatattttatgtatgtgttgtctgtttaccactgaaatgtaaggccagggcttttgtattattcactactttttccattacctggtacctagaacagtatgtggcacataataggtattcagtgagtatttgtttaataaatggatgagtatttaatagtgtgcaaaataataaattgtctctcatgaatgttgtagaaaagcatgtcatgaaatattcatagatgaatgcagaaggttagttctatatggagttcagaaagtgtcaggacaaaaggtttgggtgaccatcagtatttctcatatttctttaataaacatccttgaccattttaagggaaagaatatgtcagaactaatggaatgttttgtagcttcttagagtgtcacctgtagaagggaatttagggaatagattctatttacttgagcaactacaagtccttaccttttaaactcttcagtactgtttcttaggtgttatacctgatttagtgttaaaagagaaaagtccatgcctgacaccattatatccatccattagtttatccacagtaggtgtcaagtagatatatgttgaatgaatacatgtccactgaataaaggcaagatgttctttggcgatgtagtgtgacgacattgagttttgggttcatttgtgttgtttcaacatctctgataaacctctgaatacagaaactcatgtttgttttttttctgttaggatgtgggtactgccattgtttcagatactacagatgacttgtggtttttgaatgagtcagtatcagagcagttaggtgttggaataaaagttgaagctgctgatactgaacaaacaagtgaagaagtagggaaagtaagtgacaaaaaggtatgttgtggaaaaattccatgttgattctgtttgtgtgctcatagtatcatctgttgagatttctttgtatctgtttttacaacagattgctcacataatcccctttttaactttaattaatttttcaatccaattttaagattcacattaagtaatgttaaccagggctgccttaaaagcccctacttagtcaaaagcagtaagctactcttttttcccctgattatagcaacaagctaccttttctctccctttgctaacaaggtaaggtgctaatcaagcttgtccaacccacagcctgtggaccacatgcggcccagaacaactttgaatcaacacaaattcataaacttttaaaaaacattatgagttttcttgcgattttttttctccttttagctcatcagttatcattagtgttagtgtattttatgtgtggcccaagacaattcttccagtgtgacccagggaagccaaaaggttggacacccctgttgtaaatgaacagcagtctgtaggagaaaacttatttcttggaaatcttgatagcttccataaccatgttgtacctaaatggaaagataagattatttctttgtagctattttagtgttaaaatagtagaaaagaggggagattgaactctgagtacatacatatggtatgtactcatgaagtactcatgtgtatggtatgtactcatgtacagatgaagagtcatacaggcaacttgctcaagactcagaagaaattggggaggagatccagtggccagcatgtagaagagtgttggtaaacatccatcggataaatacagcaaagaaaaaattgggtcatcctttttagttatttaagggattttcataagaattttgagttcctgaaggataccctagtatattcgttgtagtcaaatggtacctgggttctcttagactagttatatgggtagcattagaaggaatgcaggtggcttgaattaagacaaaagtgacatttggaaacttttatttatttatttttgagatgggatctcactgttttgcccaacctggtcttaaacttcttagctcaagtggtccttccacttcagcctcccaagtagctggggtcacaggcatgtgcagccatacctggcctaggaaacgtctatagagagagatgggacttaaaatacttggccatttgtgagaaggttgctgtacagaggttcataattgtttcataattggttttattctttttattggaccacaaaactagggctttaaatttttaaattctaaattttaaaatttagaacactccttacttttgaaacggactttttttgtttgtttctgtttctgtgggcatgtttttataggacagccagagtatcacataactagtttcacttttgaaagtgaaaagtaaatttttaagatactttgtttcattcttcctgtctgcttagataaaaaattgcacgtttaacaatttggagcttttctactctgaaattatttatttatttatttttaaattgttttagagacaagctcttattctgtcacccaggctggagtgcagtggtgagatcatagcttactgcaagccggaactcttgggctcaagcgattctcttgtctcagcccccaagtaactgggactacaggcgtgcaccaccacacctggctaattttttttattttttgcagagacagggtcttgctctgttgcctaggccagtttcaaactcctgggctcaaggtatcctcctgccttggcctcccaaagtgctgaaattataggcacctggctgtaaaatagccaccatgcccagctattttctttaaagtcataaatatgggcatcttctctcttctgaatgcaaaatttatttggtaactcttctgggtgcttttctgtcgtttgtgctactactgaaatgccaactagaagtacagaatcatgtgtttggtcttgcatttaagctgtctccttaagtgctagagatgggagaagaatgtgagttttaaattgaagcagttgtcttttttgctttcagttaattagcctcatctaaaacaagtaaacattactaatgagatgtttttgccttcacaggtgattgaagtgggaaaaaatgatgacctggaggactctaagtccttaagtgatgataccgatgtagaggttacctctgaggtatgaatctttagcaagaactattttgcaccagccccatcttcagatgatgtaatcccagcagttcacttgtgttgaagagtgctgtttacccctcatttctgtctcccttgcctagttgctaagtgatgttggtttctttacatttttttaagagatttttattggaacttaagaagggaaggggataatttgatcttatcctctccctaccttgaaaaggatgagataaatgcctctgtgtgcctttctccctgccatcaaatctctctggagacacaaagttattcaaaatagtcttgcactgctttccctgactcaacacctctctgcaatcccaaagacagacccataggctatctaaaattatttgttgaatataaaaataatattgtcattgttttcttaaaaagaagcaaatggaaaacagcttaatttccacacagattagtattaatggaggactattaaagaagacttgatattccactcttaggttaatagggatggatttgtcactagttgacaactcaagtctagacccaaatgtataccttgcttttttgttgctatttccccatgtttcttttagtcttgccacaggtaacacactatgggaaaaaggttggtggaggaaggataagaaggggattttacattttgctgcttggaaagagaaacatttttaggttgtttctggtgttgatccttcccccattcccaccacaccactgttgagcattatggtagttcattgccaatgatctgtgtgtagcttagtaataaagtaaaatatattggtccagtaagtgttcttgactgtaatacaaataacagagataaatgtttccatctgtttttttgagatggagtttcactcttgttgccaaggttggaatgcaatggcataatctcggctc

SEQ ID NO: 58032 - DNA, 1060 bp, Homo sapiens
agttacacctataattctgggtgcaatgagagtgcatgagtaaatttagtcgttttcaaatctcatttgttttagctttcttttttgccaaactttataacatttgctattagtgtagaaaagaatgacagagtattctcttcattcttcagcctcttgcccgataaaggagtaagttgtgcaaagaaaaataactccaaagaagcccataaggtacagcaaacaatgtaaatttcaccgagatgaggtagaaagccacctttcttaaagccactttcttaaagataactatatcagattttggcttgaaaatagcagttgtggcactatcagtgtaaaccttccaaagactttccttcatgtggctgtagaatttgctcaaatcctaggctagatcactggtgtggaatagcttagtgagaggatgtgaatgaatttgacctcctttcctttttctcagcatcatattaaccccctgagtattaattggcttcacttgtctttgtaggatgagtggcagtgtactgaatgcaagaaatttaactctccaagcaagaggtactgttttcgttgttgggccttgaggaaggattggtattcagattgttcaaagttaacccattctctctccacgtctgatatcactgccatacctgaaaaggaaaatgaaggaaatgatgtccctgattgtcgaagaaccatttcggctcctgtcgttagacctaaagatgcgtatataaagaaagaaaactccaaactttttgatccctgcaactcagtggaattcttggatttggctcacagttctgaaagccaagagaccatctcaagcatgggagaacagttagataacctttctgaacagagaacagatacagaaaacatggaggattgccagaatctcttgaagccatgtagcttatgtgagaaaagaccacgagacgggaacattattcatggaaggacgggccatcttgtcacttgttttcactgtgccagaagactaaagaaggctggggcttcatgccctatttgcaagaaagagattcagctggttatt

SEQ ID NO: 58033 - DNA, 2915 bp, Homo sapiens
ctgagattacaggcatgagccacagcgcccagcttaaactattttcttggtctgtttttgattttcttttttccttgccactgcggtacagattttttttactcactgccactaaactaaagcaaggcatagtttatatgtgaagtgttcagagtttactgctataaggaaacttccaaatactgacatttaccttttagctgtagttattgggaccatgtgctctggttttctggagactgccaaattgctcccatttttctgcatcccacctggtttctttctgcatgtcccctttcactttcaaacctcttcatttggatgttaaattatatggtcacctagttataggtaagccttgttcgagttgatatcttgattgtgaggaaggatctgtgtcattggagcttgtttctgctgcaacgtgctgtagactatgaataatgaaatcacaccacattaccatcagatttcttgttttagttgtcaaattaatatttatgattgttatcttgggcgaaaagttcagagcagagatgacaaatcattagaacaacgatgaatttcagtattacggctaaaaagttcttctgtctgaatattaactcactctccttccagtgtacttcacagtaattggtatgcttttttatttaatgcttaaatcaaactttataaaaatcttagaccagatctttaatatggtatgccatttccccagtctaccaatggaatagtatgggtttctaatcctaggcttgtacaatggattggagttgagccatgccagcctccacactgccactaacttctgtaatgtaagattgagtcactgccaagcatttgaaatatgcagttgtgttttaattataatttatgtatagttagatgtatgtagtgcattgtgtggtattatttggtttgtaagaatttatttttaagggtcaaggtcatttgtaacattttgtgtgtgtcaattcaatgcaatgttggctgccttttgaagtctttgatatattggtgaatattcttctgatctataatacaaagctatgtaatgttacctcttgactcgcttttgaaaggaagacaattgttaactagatatttgagttttttcccctcagaattatgtgaatttctgatatatggctttagatactgtgaatctgttttccatttagtcagttatctgcttaaattgttcagaactatatcctaacgagcaattagttctgatggttctcccagtcatgagtgtgcatgtgtgcaagcatgttttgatcctgatgctacctttgctaaaaatggccatagattaggaactagctatgtttttagaatcaaagatgaaccggtaagctgtctcatgtaccaaacgtgaaatttacagtgtttacaaatgtctggaattttgcactgccatagggaatgttaaggttacttggctggaatttatcagacttgtgagtaaacaagttgaagtttagcagatgagggggaatattgaggcccctaaggctaaacaaaataatcagtatctgagatagtggctaatgtggctccccaggcctaatttgggaacagtttttcctgattgctttgagaagtactttcttttgacagaaattttcattctgcttgccattgctatattctccctttataggagccattggatttctttccttttgtgggaaatgtcccattagcattttcagatcttttgatgtgcactaatgccattattggtaatgccgttattggtgaatacagcatagttaaataaactgttacagtaaatctacacttggatttgctgcacctctaccaatagccttttgaatgactgaaagtgttaacagagaaagaggcatgtctgcagaaagagatagctaatattttttggtactttatctgaaatccaagatgctgcttcccctgcaggttgttttccttcttacgatcctcattgaatcccctctgggagcacaggacagttagtagaactctccatttctttttttttttttttagacggagtctctctctgtcgccccggctggagtgcagtggcgcgatctcggctcactgcaacctccgcctcccgggttcaccccattctcctgcctcagcctccctagtagctgggactataggcgcccgccaccacgcctggctaatttttgtatttttattggagacggggtttcaccgtcttagccaggatggtcttgatctcctgacctcgtgatctgcccacctcagcctcccaaagtactgggattacaggcgtgagccaccgcgcccggccggaactctccatttcttaaggtaaagagggtcaaggatacctaaaaagggtcaaataatgctagaagagcaattcctctttcagagcagttgctgtaatttggcaaatgctttatcgaagattgatattaggctaggggcggtggcttacgcctgtaatcccagcactttgggaggccgaggtgggtggattgcctgagctcaggagttcgagaccagtctgaccagtatggtgaaaccctgtctctactaaaaatacaaaaattagccggtcgtggtggcgtgcacctgtagtcccagctacttggcaggttgagacaggagaatcgcttgaacctgggaggtggaggttgcagtgagccgagactgcaccactgcgctcccacctgggtgacagagactctgtctcaaaaaaaaggacatttatcattataacatcttattagagcccctaatttcttatctgaaggcactgtttttttttttaaacagttaagtactgatgtcaacagacaaatatttctgatcagatagtcccctgtcaacagtagcaaatgtggtttcataaagtgggaagaaaacagcattttaaagtaactttt

SEQ ID NO: 58034 - DNA, 2542 bp, Homo sapiens
ccctgtctctaccaaaaatacaaaaaaaaagctgggcatggtgggtgcatgcttgtcccagctactgaggaggctgaggtgggaggatcgcttgagcctgggaggtggaggttgcagtgagctgagatggcaccactgcaatccaaggtgggtgacagagacgctgtctcaaagaaattgaggtcaggcttccttcttacagaattatttttttctctgtagtttgcctcattttttcactttcttttcaatgagaatcgaagtgtttcttttgggtttttttttcccccttttaaaatcaacaggaaatgtttcaaaggagggatgaaatgcttcttggcttcctcagcacttggcaaggtagacctcatagcaaccttgaatatgactttctttagtctctagctatgcactattaagtgcctcttgggtagaggtagagttaagtattgagtgccagtcttgacgtccgtatgcctcagtttttctcatatataaaaagcagtatacatacctacccttttctacctcatcatttgttgtagggattaaatccgggagagcaattctgaagcctataaatttccttgaagagatctaagaacctattatgctcttggtgtaccaagctctggggtatatattcagaatacctcatgttctggaagctgagcactagctcccctttattgcctgcctggcagagcctgtttgattactgcaggcccttttacccatgcttctagtttaggtattctttctttgatatgaggctcttgaccagaaaagagttctttctctaggtgttctgagagaagtttgtaaatttggatagtacattctatcctgataaaaccaccttgctgtggtcttgatgtacaaaaaaaaattttttttttgagacagagtcttactctgtcacccaggctggaatgcagtggcgcaatcttggttcactgcaacccccgcctcctgggttcaagcgatcctcctgcctcaacctctcaagtagctgggactacaggcgtgcaccaccacacctggctaattttgtatttttagtagagacagggtttcaccatgttggccaggctggtcttgaactcctgacctcaggcgatctgcccgccttggcctcccaaagtactgggattacaggcgtgagcaactgctcctggcccaaaacatctctttctacatacacttgagtaggtggcataaaatgcactgtcaatatatagaaaacatgaaattttccaaatatttccgatcagagaatcacaagagcagcaaatgtggtttcatcaagtgggaagaaagcagcaatttaaaataactttttgggagactgaattgagtaataataaaacttcagtctttcgctaataataataataataataataataacaacaacttattgaatgtggccagctcactagatgaggaaagaggaaggcattttctgcattcttgcctagttttccttataagcaccactaagttaatagctctgtctttttggtgtttgcactatgtaatgcttttaatactttttaattgtgcttttttatgtattaaatgtttttccttttgccattgtgtgttgtcattatttttgaaataggtaattttgtgtgtatacagttaaatctcattgctattggatcttttggtctgatagaccaaagatacaacagaaaattacttctgttacttctttggggaaattaatggacttaaaatcagcagcattggatattttcccccagttaccttttagagcaattgctatattttattttcagggtcccaatcctgaagaaatccatcaaattttacagagtattttctaacattgagctcgttgtggttttgaattggggctagtacgagaggtactgagggtttgtcacaccatatgcattaatcagttggtatgcctagcatctgctagggtctctaatggcggttcttaaactttggggattatagtcctccttgaaaagctaatgaacctcatgaaacctcttcttataagtagcacaatattaaacatcaatttcagggcttcattgaaaccactgatccatgaccctcaggttctgttctttggcaggatgccaaagaagagtgaatggcccacaaagagcctggtagcacatacgcttttcaaaaggtcatgcacttacagctaaagccattaaggtgagtgaaacatctggctagttgtcctgagcttgggtaggggcaggattaccatatagttggtgcagattgctgtgaactgtataactcttggggcactgttcataggctgccatataaatgatcctttagagatgtgtaatatatatctgaggaggccttgggggtggggtggggtgataatggacataccatcgtaacttttttttttgatacagggtcttgttctgtcacccaggctgaagtgcagtggcgagaggttcacggcagccttgacctcctggctgaagcgatccagccatctcagccccccgagtagctgagaccacaggca

SEQ ID NO: 58035 - DNA, 1999 bp, Homo sapiens
catgcggtccaagcatttgcatttctatcaagttcccaggtgatgctgatgtttccggcctagaaaccacattctgagaaccactgctgaagtctaaggctaagggggaaaggtttggggagaggaagaggaacagtgggaaatggttaaggacaagattatgaaagcatcatggggatgagaatggatttttgttttgttttactaggcttaggcagatactccaatatttctgacacatacatacacggaaaaccttgcaagagtggagaaaagaagggagaggtgagtgagcacttattttaagtttagggcaaggggtgcaaaaaaatatcttttatagccttaaggatcactttcttgaacacccttactttacaacaacagatgtgatatcaagtatcacatggccaattcacacctttggtctggtaaccagctcttgccccctctcagtctagggcttgttccccttcatcattaacctctaagagaatcactagtgggaaataagctatgcttttgattcaaggtaaagagactcgaactttccagtgccctaaactgggaaatcttaaactccagcaaagtacaatgctcaaaactgggtaaagctgctaccttcgtaggggatacattttggagaaaattgcatctactttcttctttgtcttttctttttgtgtgagtgtgagtgtgcatgacagtttgtctatgtttgaaaacctgaccatcagcattcctggaattcttggcaatgaattaggattgccagttagctgcctgctgggtgaccttaggtagttcacctcgtgtctctaagcctcagcttcctaatctgtgaaacaggctgatggaccagtgagataacgcctgtgaggtgcttatcacctgatactgcctcttcttgctggcacatcaagctggaggattgcagcatctgaacacgaatgaccaatcaaatctcgggcctataccccacagacgtaacctttatctcccaccagagggcaccagtaacctataaaaatctaagggggcgggcggtccctcttgcccttaacatcgttgaatctgcttgagtataactcccttaagtctattgaaatattcttacccctggtgttttaagaaatcatttgaaaaatacctctcacacccagaaggaaaatatggagtagaagtgtagggtaaatggtgctccaactccccaccagccaccaagagagctctatttccattttgtattttgtccatttttaccattcagtctccatctcctcgagactatctgtaacctagttttacaaattattctctcagtaataacctattgcagttcccttcttcctggtttattcaaatgaactgaactgctgttttttttccctttgatgtacaacctcccgcctcctagcctatcgggccagccttccttccagcaggcagtagggggagggatctatttctgagcctcggtagagcctcagaagctgtttccctgaatccctctgtgatgagagcctagtggtcaacaggtacctatcacaaaaggctgtattccaggagaaaactctttccccatctaaggaagggaaacgactagaagttgaggctacccaccaccacctccctgaaaacattacagacttcagggactcaatgataaccaatgtgtatctgtgtcctgtatacacatagggtttgttctttgtctttgttctttaatttgctggggaaggaaatacagcctcgggctagctttcaccattgcacctgggagtgctggccgagacaagaaaagccaacaagaatattgactagaaaaagggtattggccaggcacagtggctcacgcctgtaattccagcactttgggaggctgaggcaggcggatcacctgaggtcaggagtctgagatcagaccggccaacatggatttgtactaaaaatacaaaaaactagccaagtgtggtggtgtgtgcctatagtcccagct

SEQ ID NO: 58036 - DNA, 1070 bp, Homo sapiens
gttcacgcccactctcctgcttgggccctgataactggggaagattcagggcagagaaagaggagtttacaggtctcaggaactgaggtgggttacacccagtaaatgacttcctaaaggtcaactagccaaagccatgccctcctctgtggcctgggccaggtggggcaggccaggtggatgctgggatggcccagagggcaaataatggacaatgaaccaggccagggcagcatctctgctgggcgggaaaaacaggaagctcaggcacatgcaagccaggtaagtgtgtgtcttgaagatggatgagagttcccagacaagggtgaccttttctttcacctcgtccagctagacagacgtggtggttccaaggccccttgtcatctgctgattgctttgtgattaatgtacaagtcacttattcccatctcctgtccctgctccattctcccccagctcccgggcagactcttctgcccttaggtaatttacttagaaatgattgtccctagaatctctccatgtgctttgtgtacagatagtgaccaggttctgcatgtgatttccctgtggaattccaaccaaggacagacaggtgagtcacagcactatggagagacttaaatatctgcaatgagcaaagcaaggctcagccgggggcagactcagtcctgcaggaattgcccttcttcctgcatggttttggggtcagctggagagcaatgagtttgcacatgctggtcattcaccagagctgcctgtggggtctcaacagagttccacctagaagggacagcctgaccctggtttacctgggaaccagagaaaagcagctggaaggctactctcaagtcaccaataccaagccaggtagaccctatcccctacaaatacaggaagccagtggtctccaatggacattattacttcattttcacacatattttattcactttgacctggggctcaaaacacagactgcatataaaatgggtttgatgctgatttggctacatggacttcataattcatcagagcaggaaagacagaatcataagctgttattc

SEQ ID NO: 58037 - DNA, 1048 bp, Homo sapiens
cgctgcccgggcttgtccccccaagcctgtgcgtgtgcgctgggggttactgctctcctcccatggaaatggccttggatttcctctaattaagacttaacatggctcctgacagacaggaagaatgagggtgagaggtcctggatactttatctgactttcctaagtcccaaaatagggaagggaaggggagtcaaagtgtattcgggggacgacgggacggtgggcgcagaggaaggatgggtggggctctgctcttcctcagccgccaccttgctctgtcacgtccctcttttctgagggacccagagtggccattgcgagagggagtctgaagagctacagtcctcagagaccttcagagactccagctgggcctccccgcctggaggagggaagggaagttctgtgttctttctcatcacaggcatttgtgctcccgaagcatcatagctctgcagcctggtgttttgcctgtaactggagaaatgcttgctgcaaagcaattttatgtgtggtagtagaaagaggctgagattccagtctcagctgtgtgaccgtgggtagatcacctaacctctctgagcctcatatttcccatctgccaactgcagagacaaatactgctctgctcacctcacgggattgtggtgtggatgggaaaagcctctgtgaatggctttccaaatgtgggggctgtagggacgaggatgactacagtggtggtgatgagcatgttagcactgacatgccagtttgccagcgggtggtgggctgggagcttaccttttgttaccacggcttgcattcagagttgtcagttttaatggctattgtgggagacagggtcctttagaaaaggacacgacgatgaggctggcgccaggtcaggagtaattaagagcatgtatatgtgcatacctgcattttttttgaggggagtgggctgggagtaccttcgatgctagataaatctggccagactccagccctggccaggccacctggccacctctagtctaggccctttggcatcagagaaccctga

SEQ ID NO: 58038 - DNA, 1066 bp, Homo sapiens
agggaacattttttagttctcagaagcattttccactcatttttttttttgacactttcttttcccttggcttctctgaccccacattcttggcttctctggtactcctgagtcgtctttgctgactcatccttcccgtcttgatctttaaatgttggtgttccttatggtctggctcaaggtattctcttctgattggatactctgtccctgggccatctcagccacacgaacggcttccgttgtcatccacatgcagatgacacccagcttcctagttggtgtcttttcttctgagccccatatccttatattcacctgcctagctgactaagctggatgtctcaagaaacctcagacttgacatactgaaagccagagtcgtgattctcctgctacatctcccactgccttctcacccgctgcctgatcctcctccagtgctgcctgttttgtgaatggcataacctcaaacctcagttctgcacgccatcaactgggagtcactgtcagctcttcccttttctctaccgccttacatccagcccatcaccaggccctgtctacctcctaaacagcacctgggtccatccactccactcctccccatctccacagcctccacactagttcaggctgactttgccttttcctcaggctgctggaatcaccttctcattggtatggctgtatccactcttgcatctccaattgtcagagaagccaagggaaaagaaagtgtcagaaaaaaacaaacaaacaaaaaaaaaaacgagtggaaatgcttctgagaactaaaaaatgttccctggctttggtaactgggtctctgaattgctgctggactgaccttttaaggacacaaatctgacctagtcacattatgttgtactctcaacactcttaagtgattcccatgctctttaggatggccagtgggatggtcccttgtggtatctgacctgtgcctgcactgaggcatccccactcccctccctcatgctctgcactctgcaccctggcctttttcagctctgactgctgagctccttttggcctcatggcc

SEQ ID NO: 58039 - DNA, 1051 bp, Homo sapiens
gactttgctgcatcccttttgcagaggagcctgggctggtgggcctggcagctgcatttgcctggccctggtgtcccttgaaccctgtcatttactcacctcccccttctactccccacacccttatgtcgtttatttgaaaggaaaaggaaactccatggcttttaaaaaaatgtattcattcaacaactgtttcttgagtgcctactgtgtgcctctcatgattttagaagctgaagatacagcggtaaacaaacctccatgtctcaagctgaccacacttgtatctggacttgccagctgattagctctgttcccaccaggctcgttcaaagacccacagcttgagggggcagaggtgaggaacatgaacaatgctagtgaattatcacactgagtgacctctaacatgccaggtaccgcttaagtcatcctgtccttaggatacttttctgacctgaaaggatggaccaggtcacatctcaccatttatctggcagcccagggcaagtagaaggctggtgcttcagacagagaagggggaaggaatcaaatttattattgaatacctattatgcaccagtctatgtgaggaacattacaaaagttattctgttcagtcgtgctgacaaccttctaatgtctgcattaccatcccctgtttcctagccaaggaaattgaggcctggagaggagaaaccacttgctccgggtcatatagatctccattttgaaatcacttgtatctgcagttgatttggccctatgatatctgtgacatctggtaacttgtacacttatactaaggcttacattctaacctaacttttcatggggccttatctcccagttagactattaatatgtataaggatttgctgaacggttgtgtgaataagctttcttaagtgatcaaggaaggcttcctgaaggaactgggaccctgaatgaggaggcagggagggcaatgacttttcctgtgtcatcctacacaggtatgtgacaacttgtaggcaggaagtccctcatcccacaccccacctgcattcag

SEQ ID NO: 58040 - DNA, 1141 bp, Homo sapiens
cagcgcgccaggcggggctgcgtccggagcatccttccctccgcctctgtcctggtccccgctcagcggccgctaggagcgcgaagggaggggcgcgggggcgcgcacgcagggtgtcgggggcgcgccggccgcccggggacgcgcacgggctggtctctgccctaatgcggcggctggcggcgagaggcgctgcaggggacgcgggggaagtggcggcgccggcagcggacagctcggacagcgcccagggccggagcccgagcccttggaggtaggcgagcgcgaacaccggagagatgggggtagagagtcatggaaacccacctagcgacacccccttgttcccgccctcgtctgtctccatcccctgacctgccccctccccctccgtccacattcccatcccttcccctctccacactgtcacctgccccgaatccatccgattctgttcgtatgcccaccccgtccccgtccagctcccagccccctgcccaccccaacaccctttctatctcgttggccgcgtcccctcccccttcccgcatcctcaaccctttccctttcctctctgtccccgcctcatccgtgagccctgcctgcccttgtacttctgtttacctcgacaccccactttggatgaccccatgcctcctgtatttcctaccgcacacatcagccccttcttgcctcccctattctcttccccatctcatgcccctaccagttggtgtcctgtctctccatttgctccctcagtttctgtcctcccctggttcccccttgcacgccctgtcccagccccttcccagctgcctcttggtgtcctcctgcatcacagtccctctcaagaaccccgccttctcccccctttggctgttagctggcctgacacccgtcaccttccctagctgcccttcctggtgctgtgtggagccatacagcctgtacccagccctccctcagtggcctctggaccccccttccctgggtggggatcttggttgtggaatataacccctttctgcatgttcgatcctatttgtggcttggggaagaatgctgggggttagtaggcctctctcttatgttcctctccagccatgcagccactctactcctctagctgttcaggttt

SEQ ID NO: 58041 - DNA, 1084 bp, Homo sapiens
catggctgaggggtcatagtgagcagtaggatctggagtgattgcaccaaactgtctggacagacccctgccttggcttgagcaagttgatgacaaacctttgggcacttacaatgcccagctaaggcccaggtctagctgcaagggcccaggcctaactgtaagggcagatgttggatgcatatggcctggtccctggactgcagaagagggcctgggagttaatggctgtgcggggtgcttgagtaggcacttccacagctttgctgacccaggacattggttagattgtgccagcttgagaactctcaggccacccttttttcattaggtcttgaggcaagccagaaaaaaataaaagtggcgtaataacaatagtcaccattatcgagttctttctatgtgctaggcaccctactctatgctttatatgcatcatttcatttcatcctcaaagggttaaccctacaaatgagatattgttaagttgctggttttacagaaaatgacagattcagagaagctgttacttgttgaagattacagaacaggtgagttgcagagctagaatctaaacctttatttgtttgacttcaaagcctgtgctcctctcccatatgtcgtactgagccccacctcccaccccctccccgcctccaaccccaggtagaaaaataaaaagctaggatgttttatccacatgcacaaggctttctaggaaaatctgttagaaggattcagttagaaggcatttttgaatgccttactttcttctgaaagatagaaatgtggttcctgctttcaaatagaagaaataagactgagacaggtaaaacaccttgagaacaagacaatacagggtctaattaaatcttcattggtgcctcagacctgggacggtaaaatttcaaagaaaagcatgatttgttagttggattaggttgttggagtcatggaggtgacatggcacagtagaaaccattcagcctttgcaaccagacagatctgcattcagaccctgcttctactacttgctagctgcatagctgcagctcatctgcaaaatggggatattaatatgaac

SEQ ID NO: 58042 - DNA, 1024 bp, Homo sapiens
catcttacttccaggtgtgttgtcaacagaatgtttatatcacctggtgccagtccccccatcctgaggggtcggtgactcctctcctccagtaggtttagcactgagatgaggtctgatgtctgctctcctcctgtccacccctttggcttcagctgtgatgctattgcaagggcacttcctggcagaagtcaccctagctaagctcttcagtaaaaggaaacaggaagggttgatttgcatggtctgaccagttagcgggtggagccccagtccaggtgcttatacatctatacctggagtagatctttatctcaagaccttattaggtatttgctgaggctaactgaacccacactgaaaagagaacaatatatagcttaccagactggaaactcaagcctgactacctaggaactgcagatatgcaatgggcttccaatatacatttctaatgcttctccctgaggtctgactaagcatatctggtccacatttgttctcttgatatcttctaatttggctgattcttctcttatgtatttcctgaaattcttcagggccagttttacaccacccagaactttcttaagctttgcttatgaattgttcaaagtttacttaaagtacagagtgtttaagcactgtattgcttcaatttgttctctgctaagtccccgcttttacattgttgctttctcctccttttttctctttgagtgtccctagagctttctctgtctgaaaactctttgtcccatttttgagtgtacatggtcagtatgttgctcctctggttggaatagaaacttccagttaggcctgggcccaaaacaaatcccctgtcacccagaagcctggcccgttctgtgtaacaccattaaatgctccatctgaccacagaggcctggggttttaatgcttaatctttttattcccactgacctgtggttattccagcacaacctgtccttttattttaggaatcagcatgaagcctagtgggctcctgggacatggatgg

SEQ ID NO: 58043 - DNA, 1005 bp, Homo sapiens
ccttcctcccttcctttctccctttctctctttctctctctttctctctttctttcacggaatttcactcttgttgtccaggctgaagtgcaaaggggtgatctcggctcacctcactgcaacccctgcctcctgggttcaagcgattctcctgccttagcctcccgagtagctgggattacaggcatgcaccactatgcccagctaattttgtatttttacaaaattagtagatacgggggtttttagtacagacggggtttctccacgttggtcgggctggtcttgaactcctgatctcaggtgatccgcttgcttcggcctcccaaagtgctgggattacaggcatgagccactgtgcctggccccaggtttgtttctctaaggctacattgtgcaatgccagagtgcatgcatctggtcttggaaatagaatatggagcaagagccagggcccagaaccacactgcctgggtttccatttggctctctgttcaccagttgtgtgatttcggcaaatgacttacatcttccctaattttcatttgtaaagtggagagttaagtagggcttacccttcatgggttgttaggattaaaataagtaatgcacatgaacccctttgcctagtgcctggtaaagtagaaatgccctatgaaagttagctgttgtattcttgccccactcccttcctgagggtagcttcatgctctgccttattcaagtacacctgatggctttggtgagcaaccataaaatgtttttgagcctcaaataagtgcttaattgtacgctagatactgtgggtattacagtggagacaaagaggcagtttttgcctaaaaagcccttatattccagtagagaaagtatgccaggcatccatgcatggtaaagataactacacaggtactaaaggacaactgcaggctgggcgcggtggctcatgcctgtaatcccagcgctttgggaggctgaggcaagcagatcacttgggctcaatgt

SEQ ID NO: 58044 - DNA, 1368 bp, Homo sapiens
gtcttatctgtgttttactgtccactctttctggctgcttgtagttaaaagagaaatgttttccttgaaatgcatgaggctagaaagggagctggaacttaaagtggcggtgtatgtccgagatgatggtgctcctgctctgtcagtcaggaattcaaaaccagcctggccaacatggtaaaaccctgtctctactaaaatacaaaaaaaaaaaaaatagctgggcgtgatggtgagcacttgtaatcccagctacttgggaggctgaggcaggagaattgcttgaacctgggaggcggaggttgcagtgagctgaaattgtgccactgcactccagcctgggcgacagagtgagactccatctcaaaaaaataataataataataaaataaaggacaactgcaaatggctggttgagaccacagaagctcctggagtgtaggaaagggagaggacattttaatctgtggtacctagaaagacttaaaggaggagatttggggtggaaccttgaaagatgaaactctggccaggcatggtggttcacacctataatcccagcactttgggaggaccagtcaggaggatcccttgaggccaggaatttgagaccaacctgggcagcatagcgaaatgccatttctaaaaaaattttttaaaaatcagctaggcatggtggcacagctatagccctagttacttgggaggctgaggcaggaggatcgcttgagcccagaagtttcaggtcacagcgagctatgattgcaccactgcacaccgcgtgtgtggtaggctgagacctctgactcttgctcccaataagctcatgaggttatggctccacgggggaaggggctggaattcggaagaaatggacaatccagttatcctcaagccctgattgccttcatgctggccacacctacagggacaaaggatggaaggaggaagggatgacttctgatttaaaaatggggcccatggctgggcgccgtggctcacacctgtaatcccagcattttgggaggctgaggtgggaggattgcttgagcccaggagtttgaggccagccagagcaagacagtgagaagtgagatcctgtctatacaaaaaaaaaaaaagagggccagggagggtaaggagactgacacaagaaggttagtcaacaaaacaggtagaagtgaggtgttatgtttcagagtagggaattggaatccatttctcatagtaagccattttcctgtgatctaattgtgtccttatacccttgttccaccaggttaatacactaagccaatatattatttcctccataaagatggggaaactaatgcacagagagcttggtggccatttgggagtgcggca

SEQ ID NO: 58045 - DNA, 2394 bp, Homo sapiens
ttttggactgtttccacctttctgctattatgcatagtgctgctatgaacacataagtacatgtgcttgtttgagtacctgctttcgattctttggggcatttatatacctaggaatggaattgcagggtcatgtggtaattctgtgtttagcttgtggaggaaatgctaagctgttttctagaggctgcaccatgttatgttcccaccagcagtgcatgagggctccagtttcccctcctcttccttgctagtgcttgtcttttgacttgaagatgaccccttacaattttacacactgaactcagcacagcaggtgccaccttttcctcaaagtgggcccaaaatcccacccagcttgggccaggagccttggccacttctcgattctgcttcccatacttgctctggcatcgccaaccttgtcttctcttaggttgggagactggacttgtagaagttggaatatcctgctgtgatggtcatcggagcagaataacccaaaatatatgcagtttcctgcacggcgtgcccctgcctgcctagcaacaggtcaattggctggtttctgggctgggctgtcctgcctgcccctcgagtgccctctgtctcccctgtcgcagcccccagaatcccattgtgtgaccacgtgggatctcaaagtctgctgaccctgctgctgggatgttttcagtcctgcttgggtgccccaaaatgtcagctggcttgaagggatgtacactgctagtagggtggtgtttttgtttgctagggctgacaaaacaaagtaccacaaccctggtggcttcaacaacagaaacttctttccccacaattctggaagctggaagcctgagatcaaattgttgacagggttggtttcttttgcagggtcctctacttggctgcagatggccacttctccctgtgtctccatgtggtcctccctctgcaaatgtctgtgtcctagtctccttcttcttcttctttttttttttttttttgagatggagtttcactcttgtcacccaggctggagtgcaatggcgcgatctcagcttactacggcctccacctccggggttcaagcaattctcctgtctcagcctcccaagtagctaggattacaggcgcctgccgtaacccccagctaatttttgtatttttagtagagatggggtttcaccatgctggccaggctggttttgaactcctaacctcaggtgatccacctgcctcagcctcccaaagtgctgggattataggtgtgagccaccgaggctggcctaatctcctcttcttataaggatgccagtcatattggattaaggcctacccatgtgagctccttttaccttaattacctctttaaaggtcctgtctccaaatactgctcagtcatattctgcacccataccgggatagaacaccaaatgtgcataataataagggagggggaagggcatctgggagaggccttgtggttcctctgggctcctgttttggtctgagtgactcatccaagcaaatacagaacaggtggaggggaagagagtcatgatggcaacgaagagggcactggggacttcggggaggtgggagaagcagtgtccatgatcaataatttattcctggatactaggcaggagggcgttgtcatggcaacaggcagctccagcagggactcctctggagtcccctctcctcactccctccgctccccctcctgccttccctgctttctcttgccgcttcccttcctcatcattttccttgactgtctcaggaggctttttgcggagtggagactgcctgcacctgctccgtgtaggagctctggggctcccaacagccatggcagctccttccccaccggggtcgtaaccctgactcttctttctggaaagaccccagtgaggggccatctcactgattccccaccgccaggcatcttgctttagtggaagcacacggggcactcctttatctcacagccggttttaccacccgtctcttgccctccgctattcagttgaatgcactgactttttttttttttttttgagacagagtcttgctctgtcgcccaggctggagtgcagtgacgcagtctcggctcactgcagcctctgcctcccgggtgccagcgattctcctacctcagtctcttgggtagctggtattacaggcgcatgccaacacgcctggctaatttttataatcttagtagagacggggtttcgccatgttggccaggctggtcttgaactcctgacctcaggtgatccacccacctcggcgaatgcactgacttctaaccatgctctgctcactgtgccaggtgcttctgtcctcagagagatcccccaagccaggcagccgggcagggtcttcc

SEQ ID NO: 58046 - DNA, 1086 bp, Homo sapiens
ggatatgattccagtgtggatggggcttttggagctatgccgagcccttgagaggtcagttcttaggtaaccatgcttccaagaattaagaagctggcagacctgtctcatttgaccttgaaaaggctctttcagctaccgatcctgagtccagaaagggtaaaaggcttttcccagccctacagcaccctggggctggaaactctcaggcctgtgccttatacttgctcagctctaaaggccctgaggcagtgagcactctttccactcacagcttgctgcataggtgaactcaagtttagtaaacattcactgcaagcctgtgtgtgcaatacatcaaactaggcaccttggaagctgcaaaggacataatatgaactccctgactataagtttttcatcatctggtagaggaggaaatatctgcacatatcattacaatgaatctttgcttagtgatggagatacataatgtcctttggaagccagggcaggagagttcatgtcccaccttgagagatttggtgtaccatatccatggttagtgcgtggacatgaagggttggattggcttcctggaggaggtggcattggtactgggccttagaggatgaataggatttgttgggcaaattttactccagagatggagtaaaggaattgtaggcaaagaaacaaaaaaagcagcagtgtagatgttactatcctggacatttggagaaaaacaggtgcagtcggattactgaatgctgacaaggggggacccctagatgtcagcctggaggagctagatttgattttgcagaaacagggagtccctgttggatttgcacatggaagatttatttagtgttgctcctaattggagagcattctggtaacaacagggagaccatgggactgctccacccacacagaaacagaaatacaatacccatatccagataggcatatgtgcccacaaacacacatacaggaactaggacaaacaaacacactgagacctagagacccacatatcaaaacacatagtcatactatcagaactcaccacacacacacacacacacacacacacacactaca

SEQ ID NO: 58047 - DNA, 1247 bp, Homo sapiens
tttctcactgaattctgggagaatgtttaccatgtgcttttctattattttaccagttaaaagacaaaacttctcttttgcaattctaatttgaaattgaaagatgtttttcataaaagtggattttggtttcttaggatagtgtctctcacactggggtatatagacgcccggggttctcaggtatgctcatgggagtctgggaggtattctttcctttggaatacgcctacatatgagtcaagtttgggaaaacccgtgtatagctgctggaggccatggataagggctgaaggtcaagcataagggctagaggtagggtgtgttggagttgtctccagagaactttctagaaagccgatcttaaacagtagttacaaggaaggggtgagcctcaacacaggatagaatggcactggatgactcgcactgggagcccagcttatgtgaatgcagagaagctatatgtggcaagcactataggccataaggggcttggctgaaacacggcagcctgactgaataggagtttcaacttggatagaacaaggtgcagagttgagggcacttcataccccaaaagtcgaaatttgagtgagtgacagctgtgcagggctggggcggcactggagcagcgacccataaactctgctttctagccccttccccatcacttacatcccattgaagtcatgtcagcatgaaggccccaccagggagcatcgaccccgctctgtggcctgtgcagctggggtgtggagtatatgtgctcaggagtcagctggcaggtggaagatgacccagccctccggaggatggtccccagctcaccagcttgcagtcctttgtttaaccaggaacctagcaggccagaggtcagcatttttcttggaagactgtcaaagcatgcctgtagctgaagaggagcagggtcagattcccagggagtgggccagcataaggtcctatcactgcttagttctgcactgtctgcagtctggctggtgccagcagcatgggattggcagggcagcttccatagtctggccatagaaccacaggcctgagccactggaaggccctttacaagccacacagtgacctccatgctgcagggatgagtggtgcctgagtcccagagagttactggaagatctgagacctgaacccggatgtcctgacacctagcgtggtgctccctctgccatctcctgatcaggacagggaacccaggtgggtaacccagt

SEQ ID NO: 58048 - DNA, 1044 bp, Homo sapiens
aggcccagggagacgcaactcccttgcctagtgttatagaactagttactgacaaagttggaactggagcccagggattctgtatgcccattctagtgctctaaaatgatcatttcttggttgaagacttcttagcatgactgtaggttcttaccattttgcaggaccctatcgaattcaaatattccagcctgttatcctttttagcacaactgtgtcatgatttttatttcatcacaggaagagcctgtgtttaatttgcctcattaaaaaaaattgtgataaaatatacataatataaaatgtaccattttaatcatttcagttgtatggttctgtgatattaagtacatgtatgttgctgtgtgcatctacattgccgccatccatctccagaactttctcatcttcccaaaattaaaactctactcattaaacaataactccctattccctcctcccccaagcacctgggaaccgtcattctgctttctgtctctatgaatttgacctctctaggtaggtcatatgagtaaaatcatacagtattcgtccttttgtgagtggcttatttcacttagcatgaatgtcttcaaggttcatccaggttgtagcatgagtcaaaatttccttcttccaaatactgaataatagacctttatttgcatggatataccacattttgtttatccattgtcaatggacatttgggttgtttccaccttttagcttttgcaaatcatgttgctatgaacatgggtgtacaaacagctcttcaagtgcctgcttccaattctttggcatatctgtacctggatatgatgtggaattgctggattatgtggtaattccatgtttaatttttttgaggagcctgattggcttttttttttttttttttttttttttttttgagacagggtcttactctgttgctgtcacccaggctggggtaagatcatggctcactgtagcttcgaactcccaggctcaaacagtcctcccacctcagcctcccaagtagctgggaccacaggtgtgtac

SEQ ID NO: 58049 - DNA, 1025 bp, Homo sapiens
gctttttttgcctggccactttggaatcttcagcttatcaactctttgtacctggatgtatcacctcatagttataagcatcatgtcctaaaatagtcaacttcttggtaggaataagatatcaggcctctgctgtatctttggcagagattaaaaaaatatttgtcaaaagtttccccagctgacttcctcatgcctcattggccaacttggccatatgcccatccttaaaccaactactggcaaaggggaatgttattatcatgcttggcttagccaaatcatgtcttatcccttggagctggggaagaagatgggaatggctgttgggtaggaggaaatgcattttgtcttccatactcatttttaggggatggggttccttgtaatttagtttcaaaaacattcaattcaacatttattgagtgcttactgtgtatcaagaacagttgttttaccattgaggcaaatattaattacaaagagcctagatattagcatgctgagtagatccttctgcctaccacctcttgttggccctctgttattccttggaattctttctagttgggatgctaaaccagtcctctgccctcctggcctccccttcagctcctccctttaaaacattttaccacctattccccttttgatttttaatcagtctccctcagtctcaccttccatcagtcaacctcagtgtcaccttcaagcttgttttcttactgtttttcttcctgcatcatccactgtcttctgagtcatgcctttcattatgccattctcaggagtcatctgctcacctctgctgactattcccgatttggacaccatccctggctccagaagttctagtgattccctattgcctgttacatgaggtctttagcctggcagaaggttatctacctaattactaacagtgttgcctccaaaagagacttgaatgagagaagggagcattgaggggtttattcacttaatctttattctttgaatctttttactgctggaatgtcttctgt

SEQ ID NO: 58050 - DNA, 1049 bp, Homo sapiens
tcctgctttgttccagttctttgaggactaagaaaataatttttaaaacaataaccctccttcctgggctgtcacttgtttgtttgctctggggactgcccagtaactctttggtctctgttatttgtgtttaaactctgtgtttctacccacaagtaggaattggtagaaggaagaaggtagaaggaagaaggttcataggaaaggctggtgatgtattaattgtgccattccatgtgtgttgtacactcaggaagggacacaagccagggtctctcattcatttgttcgtttagtcatccattcatcaaacactttccaggtcttggttttgtgtctaggccattgtgggaactatttgtggcagcaaagaagtaaatatatggtttttgacccaagaaactataatcggcatataaaaaaattattattattaatggcagccgatgccatttattgaattccttgtactctgatcagaaacaaagctagagacattatagatattggtcagtttaatcatcagacatttcttgaatgcttttcatctaggcactgcgctaggggctgggatagggcaagaagcagcccggggctcaagtctggcaggaattacaagagtaatggtaggtatgcaaaggggcctttccattctcaaaggtgctccttctagcagcatcagactacctggagcttgttagaaatactgactgtaggttcccccccttccccccgacccagacatgctgattcagaacctgtgcattttaacaaggtcactgggtgtttcattcatgtgtacattgaagtttgggaagcactggtgagtagcctgggatgtagcttggtctaggctaggatatcaaggaaggcctttctgaggaagtgacttttaagctgagatgtgacaaatgagtagagactagctagacaagacaatgacagatggagggtggggtgagttccaggcaatagaagtgcctgtgggcaggctgggactatgaggtcctgtgtgatagtgatagcagagcagaggaggaaaccccgga

SEQ ID NO: 58051 - DNA, 1032 bp, Homo sapiens
cagtcattaagatatgaatgctgaaagaaagaagtgttggagctggttagcaaccccagacactccctgtcatcagtccgacatgctgcgtcctgcctttgttgctggggagtgtcttccacacctactctccttgcttccagcccagacctcattcagaggaacgaatgaggtgtctgcagcgtggctgcttcatctgaccttctggaatctagggacagcaaccaagtgcctagcaaactgaccatggtctcctccttgctgtgacccagagctgctcttcttgcaaattggaagatatcaggtgccttgttggtctctagtcctccctggagtatcaggtatccttcctggaaccttcctatgcctgagtcagagggacagtctatttcctggattctaagtttcacttttaactaaccctaaagtcctatgactggtgataaaagcactggtggtaattgtgatttcattcatctttaaggattatctgtctgtctatatatctgtccatctatcctcaaatcacagccctcatttgatctctacagcaatcctataggtagatctgatctctcatttttaaatggcagtaaaatatttgtacgaagattttgttttccaagtactttcctctgtgttatctcattgctgtcccctgacactctcatctaggtgaggaaggatttattaacccagatatatcaatgagggtattggagagtcaactgtgtggaatagtgggcctttgagataagaacatgtgggtttgactcacatggattcttttttgttttttttgtttgtttgttttttgtttttttatttttattttttgtagagacaaggttttgccatgttgcccaggctggtctcgaaccgctgggctcaagccatccacctgtctcagccttccagggtgctgggattacaggcgtgagtcactgtgtccagcatcacatggattctttacacctatttcctcaggtgtaaaatggggataataatatctatatcaggctgggcacggtg

SEQ ID NO: 58052 - DNA, 1034 bp, Homo sapiens
agcgctttgcaaccagacttctagacaaatggtgcatcttataactcaggaaaatcctcattctgttggctgcctccccctttttgctcccacctcccctcccccatgcctcctgtattttcacatctcctccagcctgtagaagcctgccaggatagcagttggatccagactgatgtctgtatgggatgtaaatgcagaaggctgcagggagggagagaaggaacaggtgctgctccctcctgctgtcttagttctttcctctctatgctcccgcttatcacatcagacaggaatttaaaaaatgcaaccggggatgtgctgtccttgaaatatcagcagctaaaccaatattggcagctgaattgatgtcaattcagaagacccagctccctctctggggctgactccagctgtttggtggatgtcagagctggtgggacattggtggaagaagctggggtggagtgctttgcttgtagaaaccatggcaaaggcaggagagaggggagcccagaggggatttggctggcctgggattttataggagcctcccttcctctctggtctaaagtagactgcctgtgcagataaccatctgttggctctaagagtaaacaataattccttaggtatagagctagggtatggtgtctgcacaggcatcgtctacactgtagatctacaaagtagatgtgaaaccccatcttgtccaaagccttatcgcaaatcagtataccagctgtaacttgggggagaggagaaagggccaatcgtttattttgtttgctttgttttgttttgttttgagatggagttttgctctgtcacctaggctggagtgcagtggtgcaatctgggctcactgcaatcttcacctcccaggttcaagtgattctccggcctcagcctctcgtgtagctgggattacaggtgcccgccacatggctggctaatttttgtatttttaatagagacagggtttcactgtgttggccaggctggtcttgaactcctgaacctcatgatccacc

SEQ ID NO: 58053 - DNA, 1296 bp, Homo sapiens
acagctttattgagatacaattcatgttataatatttactatataaattatagaattcaggctgggcacagtggctcacacctgtaatcccagcactttgggaggctgaggcgggtggatcacttgaggtcaggtgttcgagaccagcctggtcaacatggtgaaaccccgtctctactaaaaatataaaaattagctggtgcacggcagcgggtgcctgtattcccagctactcgggagactgaggcaggagaatcgcttgaaccctggaggcagaggttgcagtgagccgagatggcgccactgcactctggcctggatgacagagggagactccatctcaaaaatagatagatgatagatagatagatggatggatgatacaattcagtgatttttagtgcccatagacttgagcagccatcatcacaatggattttaggacatttttatcgccactcccagcccccgcaagaatctatgccattgttagtcactcctcttccccacctccacccccagccctaggcaaccactgatctattttctagagatttgcctattctggacatttcatataaatggaatcatacaatatgcggtctttgtgtctggcttcttttccttagcaagatgttttgagagttccccacatcagtaattcatttctttttatggctgaatgatattcctctgtgtagatatactgcattttgcttattcatctgatggaattactgggtcatactgtaggtctgtgtttgaccttttgaagatccctagaccttttaatgctaattccaaggcccctttctggacttctaccttcagctcctgaagtatttttatactctacaaaagtatactctataaaaaatactctctaccacctgggtccctcctccttagccttcccaaatcttgggtccccacccttagggacctgtcacacaagattatcactccccacctcaccatccccctccctctgaccactcttctttaatgacagagcccctggagacagctgctgcctgacaccttgataccccacgccttctccacccacttggagccgggagggggtggggtaacttcacaagcctctccctccagctgtgaagaaggatgtgtgtctaattgctgtgaaaacttcctccctgaggggagcagacagggagccaaggcaagtgagaagctgggttcttgaattgtagagaggtgggggctcttctccgtggtggtgggatcggaattcctccccagaggggggagttcgcttcttgcttttcagca

SEQ ID NO: 58054 - DNA, 1706 bp, Homo sapiens
gccaagccagagcctcaggatgaaagagaaaggaagagactgagaatggaggtgttgttgattctgaggctgctgcctggggtgtctgaatccctcaattctgagagtctgtagagtggagcaaatagggtgacattgagtgtggccctgacaggtcagacagaaagctctgagagtcagcagggggagatttgagaaagaaagatgagcatgtctgcagagccggggcaggctctgctacagggacaggatgctggttagatgttattgttaggttattgcttttgttgttattactcaggcttatactgtacaacagatctatcccgtgttatagcaaccaaggatttattgtactgattcattgatgagctattaaaatatctcccagtaataggaagtatctgataggatgtctgtccactcatcccacgtgtgtttattgtactgtctcaggagagacaagacatggactctgagcttaacatcagagtctgatgcaggagatggatttgggaataaactcatcccatgaggcaggaggaaatgaccagtggaacagagcatggggcatgctaggaagcacaagagaaactgccacccactttcaatgggaaggcagcaaccctgttgtggaggggtggcccacttagggccttggcaaaaagggaatttgcactgtggagaaggaagagaatagcatttctggcgtcagcaaagtgggagcagagatggcaggaggtgcagaaagcacgtggcctatacaggcctggaggctggtgtggggatataggagggcagatgctgggagaggagaagccacacaggggtcaggagctgggtcataccagggcttgagggctgctctgagaaggcagattttatccctcagattcctggatgactttttctggacaaatcctggagttgtcctggatgacaaatgtaatagaggctaggcccaggcaggacacacactggctccttattctttaagaagaagaaaaaaaaaagaatatgaatgagaatgtagttattataatgttaataacctgagctgctctgcaaacattattactttgtattaggaacaaatttcttgacaaatacatatgatcattagttccaactaaaaggagctgctgcctgtccacatggaaccctccatcccaatgagggataaatctgagctcttttcagatctcccgtgtacccacatgcatactccttaattttgtatacttctatttcctcctatttcagctcctctctctcagtcctgaacaagttgtttccaggcagctgtagtgataagccctgctacatttttttatcccaatgcagaatggctgagttttgcattggctctgttgggcttttattatctctttgttccccaacaatttcctgtggcagtgatgtgtgaatgtatttctcccttggttcttgtagtactattctagtcacttgactagtttattctaagaactaattgctggcatgtggccttggtagcagtaatctgttggtgtatccctaggcactaactcatgtgcacaaccttggaatacctgacgaactgtttcattcatggctcttagacatttcaaactgaatatattctgttccatgcttgtgatctccctgcatcccagtgactaccagactcactctcccttctgtgttcttggtgtcaattattagag

SEQ ID NO: 58055 - DNA, 1802 bp, Homo sapiens
agttgatgttagggttcactcttggagttctatgggtttggacaaatgtattatataatgacaagtatctactattagggcatcatacagagaagtttcactgccctaaacaccctcctctgtgctctgtctattcatccctcaacctgcacccccagcaaccacagatctttctagtgtctctatagttttgccttttccagaatgtcatgcggttgtaaccacacagtgtgcagccttttcagactggcttccttcacttggtagtgtgcctttccttcatgtctttccatggcttggtagctcacttcttttgggcactgagtaatattccattggatgtacctccgtttctccatccgctgatgggagaacgtcctggttgcttctgtctgggttttggcaaaattatcaacaaagctgttaaacatccacgtgcaggtcggttgtgttttctccgttgcacttattgctactggatttttggttcaacatatatttactgtcctccctgctgggatggaagctccatgagagtagagggactttgtctcttgtccatgcatgtgttctctagaataatccctgccatccagtcggctatgtgaatgaatccctgcccactgcatgcagcccaaaagtctgagatggctttccctccaggagacgaagagctgccagctgagccatgtctcgacgctgccagtcttctctccttgtcacttcagatgtgttgtgaccaccaggacagcctgcccagaacgtggctgtgggaatgtgaggagctcccgatggcgacagctcgtgggagccacgggatctcatccatctgccagggacagcttgtggaatcaacaccacgggcccccaatgtggggaaagaaaccagggcccagaagaaaaggaaaaacagaaaagcaggctgtgaccatggatgcgtcattattacagccacttactactcatattggtcatgtcgtggaggtggacagaatgcttccctcatccctttgagctcaaacccactcaggggcagcagctgacattttttaagcatttacgctgtgccccatgctttaccaagtgttttacataggaattgtgtgataaatcctcacagcagccttctagaattggtgctattgttatccccatttttcagatgataaatacaaagcttccaagcttcagtgcttgcccaagccccccaccctgccgccggctcccatacttttaagtgggaagtggcctcaaaccaggcagtctaaccatgcagccaatgctctcgaactagacaagacaccaccatgtccagaggtcttctaccaggcagatcattagcaaactcacatgtgacatcttggacattttgaatctgaatcactcacaagccttgcagatttaaaggccttgtgttcaggcaggttgcccatgtgtgtggaccatccctgtgtgagataacaggttctaagagcattaaaaacaatctacaacctgatttggcccctgcctagaagattgagggcccgggaatctgtatgtttgaagagtgtccaggtgactctgaaaagcatccagccttcctcctgtgtgggaatgttgtcagtaacacacctaaccaatgccatttggagtttttatgaaacagtacttaacatggcagaacatgtcaccttcaggtagttctattctcttttcttcctgtatggatggatgtgtgtgtgtgtgtgtgtgtgtgtgtgtgtgtgtgtgtgtgtgtgtgtagggggattgggagacctcagatatacatgagctgaatt

SEQ ID NO: 58056 - DNA, 1012 bp, Homo sapiens
cggggagcatgtgttcagaagccatagatttttgctttccccctggacttttcattcctttgtctcctgcccaggcagccctgggcaaatggcgaagcaaatgtctcttcagtcttctaggggccacacgaaataattattttggatcttttcatgagtcttagtctcaagattttccttcatgcatagcatgtacggcagggcccttgtcctgccacactctgcccctcctctgggatctctcttcccttccctgctgtggctcttcctgcacctcttgttctgagcttaactctggcttctccaggctgccctctctaagcccccagaatcctcgccacatctcactcaagtcaagtaggaaggcttcaaagtcaccatggctttgccctgatgctggcagctcgcagctccccacaaggagccctcactctgaaaaagtcagcctgcaacaacagtacagtagtctgcacctgcatgaaatgagaatgccatgttactttctgatatattcatcaggaaaaaacatttgaaagtcacagcaacacatgttcccttttctgcacattttaaccaagaccttgtccccacaaaaagcacaccatctaaaaccttcctatgcagagtgtggttcacacaccaccagcatggcattgccccagcacttgtcagaaaggcagagtcccaggccccaccccagcccaactgaatcagaacctgcattttaaccagcccccaggtgatgcatgttaaaatttgagaagcccagacctcagatacatacatccacctgcacaggagcacacctatacaagcacatgcacacttcaggtaggagctgggggagatttgtgccacctgcctccttaccttctttgtgaaaagcacagaaaggagctgtagcctctgcttcatctctggagcctcccattgagaagcatgatttctataaggcaatgtaccatgaatagaagcaatgtaccatgaaaggggcatttgcctctagagtctt

SEQ ID NO: 58057 - DNA, 1048 bp, Homo sapiens
agaagaagtaagggatgtttgttaattcttcatttctaggtcctctattccactgaaaactctttcctccgaatggcgagagaccccctaggtgattggaacagagccccatcagcttcctggagttctcccaggggcagctctggctgggagcaagttctgggcatctgagccagcccagaattgggcacacttgcttaaaatagcacagtggtgctctctctactttcctgtctggagaggacacaggctttctcttgtaccttcagaaccaggtctggggtgggaggcaaagcagtcaggcaggggcagcttcaaaggccctattctcaccaggcactcctgtcacagtttgcccatttgggaagaaataaatctcatcatgtcccatttttattacctgcattgaaggaagttgacaatggtatgtaatgcaaaatactgggtaatctgaaatcatttttaaaacctgggatgcagtcaaagataagcagtggagttgggctacagagctgggcccgtcccactctgcctatgctgtaacaggtgctgggtgcctcctgatgcaataagaggcaactgtggtaagcgaggagggtcctccctaaggcagacaccagggcacaccccttcttcctccagtgtctaagtgacattcttggagcagtcaaagaagtttccgtgaatttctcacatgtgctccagaattcacaaaccacgaggtcagttctgggcgtgggctacttctctggagagagataggttacatttcacctggtgatatgggagcatgaaggaagggccctgtcatctgtatgtgccaccatccacccccaggagaggaacagagttgcctcccaagcccagctgcagcccccacctgcccttgggccaccccatctcttcgttacattgtggatttattcctgcctttagctccagatggacccaagcagacttcccaaacaggctgggtctttacaacaaaccccatcttaagagagagttctgaataatgaaaatcttcctaccaggtggcaagcagatt

SEQ ID NO: 58058 - DNA, 1049 bp, Homo sapiens
gatcatagtggtgcccacctgggcagactccagtgacacatgttgctgggtgtggccagggccccttggcccaactcttttggtcaatgacctcctcccatttaccaccaacctcctgcagcttagcttctgcccaggcagcactttgctcttccccggagctcactaacactcctttctctttagctgctccaagagctagcctgacccagagtcctgggaactgaggattttgataagaaggagttgttcaaaagatggctacaggacaccactaatccttctctcatttgtttgaaaatatagcaggaccaattaattaaagttcaaacctaatttctttaattttaaaaaaaccattactgtattattgccttcttttgcaggatttaacctttttttctccttttgtgggctgttttgtgttgcttgttcttcactgagcgtattgcctttccaaatatgccgtgtctttcctttgcaaaagaccactgctgccctcctcagttgtttttctggctttgcatttgttttctctccccgtttatgcctctgtgacttctccgtggcctcctgtttgctcaccctcttttgtttgttacagaccacccttataatgactcgtccttaagaaaccaccctgacatgtacagtggtgagtcgcagcggtaaccttgggagtaaccttgcctgtgctaaccccagtttgcctaacttgactgataccacgtcattaactcctgctgggtggcagctggcccagccagggtgccaaggtgacacctccagaaggctgcctgccaggaggcagtgtgggggtttgaggtggctcacctggtggtgtggtctcctctaacaggcatgcctcaagttgctgaattctcaacaagttgttcaaaccagggtaggacttcaaaagaacttcttgaaaagcaggaacttttactgaaaaagtagaagcttaggaatcaagaatggatgaagggagactatcttaaaataggtgagttccatagtgaagagaaaacaggaagtctggttcctattgg

SEQ ID NO: 58059 - DNA, 1674 bp, Homo sapiens
ccaccagctctagtatccttcctagattttcatatgagttcctcctgctgcaattgactgcatttcttcataacctttcctttagggccagccatctcattccttaatgatattatgtcccccaaatcttcttcaagttttccatgcctttaagaatccaactgaggtgcctttagagctgctgaattccctcctcagcttctttttctccaccttgggcccgagttttttttaatagccactgaggagaggtgggatcttagctgagacagtgagaatagtaaaacatagtggaagagtttcaccagagcagctcactaagacagaaatatctttctcctttacctcttttgcccttgcattttctttggtttgaataagaaagatattcctgaagctgactgtcagaagtaggaacaagtgggatgcccatctttagacagagaggcaatgtagagtgggtggaaagcacacgtttttggtgctaaatggcacagaatccaaaacataactagcttggaaccttgggcaagtctgttgacttcactgagcctcagttgcctctgctgaaaatggggatacaaccctccaggtttgctgtgaggattaagcataaatggtggtgtggatggagctgtcagcacagtgcatggtccctagcaaacgttcactgaatggtggccctgattatgacctccaacttttaggatgctcttctctttttttgaactttggcttgtttccagtagcttctccttctttaggataattctattgttgctagcccacatcctacaaatgcaatattgctgtaacctctttatagtcacagctacagtgtgtcaaggcacccacagcagaactctgtgctaaattttcctccttcccatcattattgctttgctgggttgtgcgtgctggtggtgtcgcgcgttatggtgtaaattaaacgtccatagggtcacagattggtttctgcagatttcctcccagtgtggaaggagtatgacgacttagctgggacctacctcttccacagaatcccagggttcccagctcttgacggattcaccaacctgacaacagagccttctgccctagaatctcctttcctcatagtgcccatgtgtcttggttgttttggtgattccgtgatggtgggtgggaggaagctgttggtgtcaggcttccttggtgctgagaattggatgctacaagagttatagacatagatgataaccaattaaccacataatggattaaccccttcagtagtcactgttgtaatgtgtgtgctggtgggacagatgaggcatctacagaaagagaaataatatgggttaaactgctgccttattttttgttctcttcttcccctccaatccattcaccttataaaccttcattgagcatttgctgtatgccgtgtattgtatcatcagcctcgttaccctctgcatatgtttcatcctttcttcttttgacaaaaagataaaatagaagcaaactctatgaattgcactccaccagtgccgagggagagagttgagtgccccagaacaggagccccgccggtgcagccaggccccagcaaacccagcaagctcctttaggaagcaccagttacatctggataaagttcccccgcactctctcctcacgctaccagcaccg

SEQ ID NO: 58060 - DNA, 1217 bp, Homo sapiens
gtcgagccaatggaaaccccaaacccactgtccagtggatggtgaatggggaacctttgcaatgtaagtagcgagctgttgtcccatctgactctcatctctctgctgtcaaaggcttcagatccccatcactgtagccagtgctggtcacactagaagttcaggaagagagaagcccactggtggctgtttctcagctgcccatctcttcagacatctcaagaggcaggaaacctaccctctctttgtgtgagagaacaggaggcctggaactctgtggtcatattcccatgcttaagggatttctgctcccttggggttttttaaatctctgctttctccctctgaacaacttcagagcccagttgatggcctggggactgtggctgcatctctgggtggttgggctttgagtgatggctggggctgggaaggtagaggagaattcagtaacccattgttggttactcaagttccgctctctgctaagggcaaaagaagaagcagggttgtacaataatgtgaaatattatggttagatatgaggaagaactgcccccagaagagcagatgtacaagtgcactttatcgagtatgcttagactttggggacatttagtcctgcccaggtggatggagtagatgactccaagaccccttataatcagtggccttggtcaagttttcacatcatagactctctggttgcattacttttcaaaatgtcctgtccttactttctctaagaggtcagaggaaatgtaaacaatggtatcaaccaaatggggaaaaagtagatggcgagaactcagtctaactcaagagcagcagctggtagaagcaggtggagagggggggacacaggtagaggagagggtaagaatttacctatttagacatatattgtatgccacattctgtgctagatgctgcactccattgttgctttactttcaaacatttaaggtaaggaaataaggttctcctcagtgcaatgagttgcccaaaatcgcatggctaggaagtggtgaagttgtgggttgctgtgagtctgcaatacaactgcaccagctagtactgaacctagttatccccagtaaatgttactccccagctacaagcagagatatggacactgcctgccctctacagttctctccgtcttaataggactttgggggtaagctaggcaattgcgctaaactttacagcaccat

SEQ ID NO: 58061 - DNA, 1936 bp, Homo sapiens
caggaaacagatgcattctcaaaaggaactatttataacgtgtggagagagttggagggaaaacggcaagatacgtgatccaccttaaaggctggcagcagcaggaagccattatgccactctgagcctccatggacggggatagatgagtccacagcaagcaaggaccgcccttaggagccatggccttaggtagaagagtacaaggctgtcaacctgtagcccagcaaagaggaacccaggggaattgatacccacccttcctcttctcctgccctggggcctcctgttggcacctgctattggttaaacccatctggaagcctgagaacaagggaaccccgctgataaggtccagcgagggcagccccccaggagacggagcagggtgaggaagggtggaggacaaaacgaaggggctgatggaaactacccagcacaggagggggcaaatgagtgccctctgaacatgtaggcagagtctcttccacctagactgccacccttttgtcctgagccttccccaccactttttcaagtactgtctcatggaggagatatggcccctgccctcatggaatgcccagtgttgagtggagtgcaggtacaggccagcagagaacaagtcagaagcaactgtagagtcctgcctgcataaccagctctctgtcccaacacattgcagatcccagggctgcgcccactgaagttaaagtccgagtcatgaacagcacagccatcagccttcagtggaaccgcgtctactccgacacggtccagggccagctcagagagtaccgagtgaggaagccagctccggactcacctaactacccagctcactaaccagggccaggggtagcaaatgcgggctataagatatttgaaagaaaccctagcgttgtttattgaatccagggttgactcaagaagataatgtctagggttagatgttcaaaaatatacccagaaaaaaaaattatatatatatgtgtgtgtgtgtgtatatatatatatgtgtgtgtgtgtatatatatacgcatatatatatatatatatatatatatatacacccagatgtgtccaacagatatgctgagagattctgctcagcagaaaatcacgtgaaaggtggtgggtttgggttggtgttgcatagcacgttgcgtttggaatacatgcgtgagtgggcacacatgtatcttcagagcagtgttgaggcaccgctgagctactcccctcccctctcccaatggcccctactgggctccttatctcctaagccacaactaacaggcaaagccactgaaagcatgcaaatgccctccctgttgtcgcagccaactccagataacccagtatatggactatcaaggctcttggcttctcttggtcctccctgcctgagagcagtttctgctctatcatccatcctcttcaaaagggtgagctcagatgggaagaagagagagagcacccagggtatacacggcgctcccttctgagtagcgctaattaaaagttggctggaaagtgagggaggcagtaactgtgattaatgcacgttctgtggcctcagaggtcatcaggagttggctgatggacagttggaggcagagcaagagaggctagtctcttcccaggaaatgaatttggccagtaggggaaagaaggcaacgtgatgtgtacacttgaatgagctcttccccacagatgacttgcacccttaacctacttgcttagagatttttctggctaaagcttccccatgggtccccctctaagtctggaccccttcctaccttgccacaggcagcctgggagacactggcgtggccaactgacctgtggcttcttacccactgctaattagagacttcttgttgcccaaactcattccactgccccctccaacaccaccatcttccatagctgt

SEQ ID NO: 58062 - DNA, 1049 bp, Homo sapiens
ctttccctccccttggtttggttttcatcattggcctctccccaacactcccaccctcccacctcttccggatgttccaccctggctttctgtctccttacccctgaacccaacattctcagctcagaagcctgggcctgctgcctggacccagtgatgagaatccttatctgaggatagggaactgcagcctctgtacaaaacagctgtaagtggttctctacctaggaatggctctgcccaatttcgaggtatctttgcagaatcagagcctaacatgtgctgaatccagagtagttgctagaagaaaacctgatttacttcttcctctcttaaatagcagagtctgagctatgtttgtcctcagacctgaaggaaatagcatcctggatggggcaatgggctccggtcgtctcacggttctcccaggcttcagtttagcagtgtcgagcatgggggttgtccagaggtcaatgccttcatacttgtgctttgttttttgtgttttcctcatcctccctgccccctccccctcatctcccctgctctctcctccttccccaagtacccagtgcccctaggcgtttccgagtccggcagcccaacctggagacaatcaacctggaatgggatcatcctgagcatccaaatgggatcatgattggatacactctcaaatatgtggcctgtacgttctgcccttccctttctcttagataatctgggaaccagaaaccccattctcaccacttttcctaaggactcaaggtagaaagcctgtgggtgcagatggcattgtggagggatggaggggccaacgaaacagttcccaataggattaggggaggcagatgggactcaatccctgctctcctttcatagttctgcctgcagggagcttctagtctcactgatgagacaaagggacctccagtctaatgaagcagacagccatgcctttagggatcttttgtagtctccaacacgtacagagtctaggagagagagttcctcaagctctggagcttccacctgatggggtagatagt

SEQ ID NO: 58063 - DNA, 1033 bp, Homo sapiens
agttcccgccttccaaggttgcgatggtgtggagtgggtgcagctgaacatgctccctctctcctatccatcccactattcagcatcttcccccaaagacaggaaccatccttttgactggagttggtgtcctcccacaccacctactccttatcccctcaattcctggcatcatggagcgtcacccagcctgctcaaaggtcatgccaacctagccagagcaggacatgctgttgaggacagagctgggaacataatgctctgagtggactgtccctgcagccaccttttagatgtccagtccttgaatcgaggtagaaacagtgtgttagaaaggtctccaaggcccaggtggaaaggtttctgtaggaacatgcctgactcaggtggagttgaccgtgaaccctgaatgccagttggcatcctcaggccagcagccagcacctggccacgccgtctgcataaggtttgggctggaaccttccctgctttccttgtcctgtggtctcacttgtgctctgttttctcttcccttttccatcctttctccctctgtctggccatcttgggcgctgtgttctgaagctactccaaccgcaggtaccgtaccagccgcggaggtaatgggcatggcatggggcagcgcaggcggagcccagcccagccagggcggacaaggagggagaggctcaggctgaaagcatgctccagactcaccctttcagtggttgggaagccagactgtcaagagggatgtgtgtggaggatgggaccagaggagagcaagcccactttccccccttcccaaactatttgccccctgctgagtaggagaatggctcagcaggggtcacacacacaccggccctgacctgctctctggagctgcagtttcattctgacactgagtagattacttcccgttaaccacctgagtccttgcctgggcttgacagctcagagcagtgtccccagctgtggccctagaaggcgcgctgcagcaggagcagggacagctggctcctggtggggc

SEQ ID NO: 58064 - DNA, 1578 bp, Homo sapiens
gtccctctactgagtgggtgagaggtatctttgcaatcaccccacttcctacttcccatttagaaaagatctacactcatccagcatgagctcacggtctcaatcaaatgtttcctgggctccagcttccgtgtgacatggcagtggaggcagattgcacttttttggaaatgagatgtgctgataacatcagctgttctcagctttaaatgcgtaagaaccttctgcacaatgagcaggtgccaagcaacgaaactcgggttccatgtttctgacgtgggcctggcgtccggcccactgctgtcttccctctcgtcctctccaaacctgggcactatttccccaaactgccctgttcatctctcacccagtgaagataatccctctcatccacctgtatctgtagtctcttaggattgctgcccgtctgtctgacaatctgtgatttggccggggtagtcaacacgccatgtggacatttttggactaaaccttccaccttggaatgtaaggaagtgctgttctcttctttgacccagctcaggtctgcaaatgtttggtgggctcttgataggtgccctgttccgtggcaggttctgggacagaaagatgaatgacacatgtcatctctcctcagtgttctccatctcatgcatggtgctccctgaaacccacctggaaaacccttggccgcagccagggtgccttccagtgtgcattaggtcacaaacctgtgaggttgacgctgccatctaggaagggccttgtgcttccagccgaagcccactcaggatccccccttagctaacagagagtctctgcccgctgtccttggtcgccaggctgatggtctccactgagcactggccaggattgcttccaaacctgtagctcctattgcggcaggaaatgacatcctagcccagtcatgtgtctgcccagcctggtgctgctctgttggtaagccctacttctcagcttcgttgctcttctatcctctcctccacctcagccccaggggatgaaataatctgaatctccttagacctgagcagtggaaggttttccccatggaacacttgtcctcctctcgttcccacctgtactagccccctgacagctcactgcctgactcttctgcaccttccctcggaggcttttcttctttcctccaccctccctagctctctggaggccctgtcttgccttgggacaatagacacagctaatgagtgggtcggagatgtgccagcagtgaccttagccagctgaggttgtatcctctatggtaacttcaatggtgggagccccggggaggctgccggaaagtgacccctttcctctctctcatctcttgctccctcttactaagcctgagccagacaggaagcagctaggtagccatcatcagagaaaaatgcttcctttctgccacacttggcagaagtggccatcaggggaggggacaatgcagtgtagaaacatcttcagagccatctctcatccttacctctgcccagcagggccggtgaggaaaatgctgtcacctgggctctcttgacacctctgtcccccagc

SEQ ID NO: 58065 - DNA, 1117 bp, Homo sapiens
ctgaggtgggaggattgcttgagcctgggaggtcgaggctacagtaagccatgatcacaccactacactccagcctgggtgacagagcaagatcccgtctcaattaaaataaaaaaaatcagagcagtcctgcccaagtagacaaaataattgctccaggtctgtgccagcagcacagagcagcggaaagagcccatgtgtgtctatggccatgagagctgcagggagcaggcctgggagagaactgacctttgccccatgggtctctcaggctttcccatgtatgatgtgtgcacagtgtgtgtgtgtgtgtgtgtgtgtgtgtgtgtgtgtgtatgtgtgtcggtgggtggggataagtgaattccctcttgttgagtgtttttagtgctgagattatattccaggcctgaggccatcctggactgagcacagccctaaataaagaatctgagagggagagttgccccaccgctcacccctccgcacgccgccctgatgtctgtgggttgaccggggtttggggagtatagcattgtgagctttgagcctgcccaggaacctctggaacgtatggggcatagtcagctgcccagtgtgacttcggtggccagcaccctcggggcacagtagtacctctgatcttattagcagggaagcaggagtattccctccttctccaaagagggacttgtaattttggagacccaagggaatgaaagggcttttgctgggcaggctctggctgagaaggcttaggatcacttcactctcccttaaaaaaagctctctggcaattctttctctggcatccctccctgccctagcccctttctcggggatattattttcctgagagatttgaggctgggtaggattccttgggagtgagagttagctgcctgtgttttaaagtccctgcctactgccccattagcgtcaacactagaaagtggagtgctgtcagatcacaggagatccagtgcaaggaggagagggggctttgtctctctctgcttggcctcattctcatactctcagctttagcaaatattagatctgcgggtaaggatagggcagccctttccatgaccttctatatcaggaaagaagacct

SEQ ID NO: 58066 - DNA, 1009 bp, Homo sapiens
gctgagtgcgggttattccattagctccctcttcccatgttctcatgtgaatagaaagcacctggggtacctggacccaaagttcctagagagaaaggcagttataagaagtgtcactttggattagggtggttgcaggaagggctaccactgagcagagaagggaaagagagggaggagaggcaggggaatgaccgaggagagccaagaccggaggagggcgagggcaggcagaacgccgtgcaaggctcacccgcgcagagtggagattgttccctctctgtcatcgggtttgggtggctgtttgggctcatgcaggcatgacaaagggtgattttggagtgattggttgggaatggcaggccactctaggcctctgctggacagggccccaccgcctgcccacctctaggctggggctccagggctggacccaactggtgctgcttgggcctgtgtctgggtggcatctggccagtgtttggcctggggctccatgccatccctggggtctgagcgattcagcccgtgcccccttcccgtctcatcctcacgcatccttggctgggtgcatgctgggtgtttcgagccacgcagaccatgagaagaaaatgaaacacacacagggcttcattctcttcctctcccatggttgtgtcttctgttgctgcgacccgtctgacccagtccgttatgcttggggaggctcctgatgactaagccccgtctcctcaccgggctgcctgccttgcacgcgggggccgtgtgtccaggctgggcacagccaaaccaaccagactcggctgttttacatttccctctcagctcctcccacattgcccccgactaccgtgggtgcgacgggcgctgtgagcagtaccgatgctactgccattgctgccaccaccgaagccacaacagtccccatcatcccaactgtcgcacctaccaccatcgccaccaccaccaccgtcgccacaactactacaaccactgctgccgccaccac

SEQ ID NO: 58067 - DNA, 1050 bp, Homo sapiens
tttaaactcagccgagcaggctgccaagtggccggtatgctaagccctggggctaagggtaagggtggggaaagagattaagagagaaaaggatcagtaccttgcccccaggggatatcctaatcagatgcaggtcattagatacacagcatagcggaggggaaaaaacacacagtgatttacatgaacttctgaatgttgacttaaatattcattactcctcctgcacctggcctggcgaggctgatcctggtagcttgcatcttgggagtccctgcccatctgtgtaaacgtctcaccccaccccttctatcctagtccttcctggtccagcatcctgtcttcctccgtgtctccgcctgtcctgcacatttgcatgccatcaaggctcagagggtctgagagtcgggctccctgattgaggctagccaggccgactcaggcaggatgtctgagtggccagcctgtcctgtaacaaggggagcaaggccaggcaactggacagtggactgagcagagcaagtggctggactctgtctagctcagatgaggtcccaagctgttgctcactggtatgtgcatttgattttgcttcattacatatttgagtccagcacagcagcaaaaagcaaagatgatatttgaaaatagagttccatcctagggaagactgccaaaaccagggcagcctgctttcagagtttgacttctccaggtgctaagccctagggctgtgggtgagggttcaggccctgccctcagggatgtcctaatctgatttgggatattaagcacacgacagaataatgattgatactgggtatgcttctgaacctaaatactcatttctcttttcttgcacttggtggaaaggctcatcttgatagcttgctttccagtgatgaagcactcagccctggcaagtcttcccagactcctcccagcgagagctggagtgggcaggttgatgagcccagctctgagtacatattgtccacttctctcacaggctggctggaaattactgtctgcaaaccacatagggaaagg

SEQ ID NO: 58068 - DNA, 1050 bp, Homo sapiens
agggcagtcagacatctctggacggcaccatcaagcagcaggagagtgacgacagcctggtggactatggcgagggtggcgagggtcagttcaatgaagacggctccttcatcggccagtacacggtcaaaaaggacaaggaggaaacagagggcaacgaaagctcagaggccacgtcacctgtcaatgctatctactctctggcctaacggagcccacccaggcacagccaccactttgcaagtgggaggaggggagaaggggagacaaaaccactgcagacctaccacgaagccaccaccaccttcagtaacaagggtacgatatgggggtctgccaagctgtgaggaccagtagccaccaagccacccacaagccccctcccaatgaccccccttcagccccgggtgccaccagtgtgggagagctggagccgtggctgagctcagctggagggagcctggccccttgcccggtctcgcagccaccccgagcgttccaccacactgtccgcccttggcctcggcacacgctcaccttttctgttggttacgggacttctcattgtcttaatttcgctttgtgcatcttcccctccagacccaatgtctctgttttcttttccttttgaaaaagagtccctggaaaagaaagaataagtggattctcccccaggagaatcctttttgcaaagataggcaaaaaggattgaatccataccagaacacgtagacaggctgtaatattcaaaccacctctgggccaatgcatttccaaaggatgcctttctcgccatatgcctcccctggcccccagcccctctgcctcggccttgtcagttgctgagctgggcttggctcctttctggaaaatgacagtatttttggcagggagaaggtgcgcaggcctccttgctgctctctggtttggttgggaggtgtgtttacctcttgctcctcattcctcccctgcccttttctctggaatatctaagatgtgagctgcattgactctgaagacgtttgaggaacaggagtgggcactgataga

SEQ ID NO: 58069 - DNA, 1019 bp, Homo sapiens
gagcccatgtcagagtccactccagctcagcaggaaagtggaattgcccagtactgcctgccagctgggtctcccaagcaactaccccaagacataccaacagtgaagccaggacagcaccatgccatcggcgctccagtctgtctggctgggaggaaagtgctgggcatcttacagtaactctagaagttcctttgactaggctgcaatcccacctatatgctcagccctaagagctgtggtttcctgtgctctcatttgtccattcattcattcattcattcattcagcaaataatctgaaatccagtctgaactaaggcctgagctgtggataccatggcgcgtgagttagatgtggtccctgccctcatggggctgacagtcctaaaatcaagtgctaggacacagtggccattgagctgggagcattcttccctctaccgcttaagccactgatggctgcgagcttgaagagagggattctgagggagagcttggtccatctggtcaccaaggctgggcgggacagagcagtcaagaaccacggtgtggcttgagaaacagtcctgcttcctgagcctctttgctctgcctcttggggcaagctccttaacctgtctgtatttttatgcctctgtctcccattcagttcctccttgaatacctctttctacagagaggcacgggctcccctgaaggattgtcgaggccagggttcgggaagtacactgccatcggtcaggggacagctgcctcccaccttgcctgggtgatggtgaatgggactcatcttttcctgccttgcttttgaggagatggttgaatttaagctaacaggaaagccaaaccagcaccctcctttgtgctctgagaggttggagacatctggtccaccccattgcccctgcccctggcaagccctgaagtcgggagaggtgaccacaggtctgaaaatcagccagtgccaacattgcttgccctgcaaggtgcaactgagcccacatagcgcattcatag

SEQ ID NO: 58070 - DNA, 1039 bp, Homo sapiens
ggtaccctccagggatcgagacatacagccttagaggagactgcaggggaggggctgggatccaggagcacctggggttgccctgggggagcaccacagacccatcagcctgatcagatgtatattgagctccattgtgtgccacagccttgggtgaacacacacacacacacacacacacacacacacacacacacacacacacacgcagagtctgggctaaaggctggagctccttgcctccctaaaggtgaggcagttggcgtccagtcttgccctgcatccatttccatcacagtgtttattgaccatgtgccaggcattgtgctaagcacaggggagacagtaataaaattactgcctctacagagctccccgaccgcccgagtgcagcctagaatgcgctcatgagttcaccgatcagtcatctccccataccatctgccctattatgcgttctagaatgcccaggatggaggaggcctttttgtcaggagcaaggctggagtggagctatgccaggcccagagctggccctgcgaaccctgagccagccaagcctcgcccaggccagctgccctggtgcaggggtgcaggcacagactggcacaggcaagcacaggctgtcatcagcaggggctggtcctgcaaggcaccagcacatgggggagtggaccactggggggttcgggggcaccagggggagttggctgaattgtcagtcccaggaaacaaagggcctgggggacagctgggggacagaaggctatgagtggggctccaacacacgacaaggttttctgggataaggccccccgcatggagccagtcaaaaaataaaaggtacaccctccaccccagagttctccctactgggatgcccagctcctggccctgaatctgtctccccttctccccagtaatggagattggagagcaatgagagatttggcaacttccgatggatggtggtagcaaaggggagttcagagcccagctgtgggcagagactaagtgatttattatcagcctacaaagt

SEQ ID NO: 58071 - DNA, 1093 bp, Homo sapiens
caggggcatcttaggcccttcccggcagggatgagacatggacagggccttgcaggagagactgccttgcctaggaagggcattacaggagagtgaagatggatgtgctgggggaatgtcggaggggttgcaagtgcagaatgtcttgagttcaagtcgaactgagagtggcaaggacagggaggggcaggtattttgggagaagtggcacctgggcaccctgcctgtcaatcggaagtggatatgaggctgcagtcggggtggaggagggagtgccatctgctccaacgccccccacccccagcaaaacacccagcttctcggcttccttggccatatccttcctgacgggccctggggacaactctcccttctctccccccaggctcctttgggtgccaactgtggctgtgaaagaggcaggaaaaggttgtggagtggtcaaatgtggagggttgaaagggtttgggagctctcttcctgagaaaatagagtgtgatgtgagacagggcagatcctgagcttgcactggccttcagcccctgcacaggcctgagaggcaatcttaggtcctctgcagccttctttctccacacgggtccccatccaggggacagcattcccaagcccttggccactctgcattctgggagcatcaccagagccagaacactgagatccagagatgggacgggtcttgcaggcagttggtgaaagggcccccagccaggctctctccccaagccctgaccccctcccactgctcttaagtttccgcaaagagggcaggcagagcagagcagcagaatctgcagccgggctcgctggcccctgtggaggctctgagcccagtgacccaggttcactctgataaccaataactggaaagcaggcccctgacattccacactcccctctgaactaggaaagtcctcccagggactgggagtgaacggggaggctggctctgcccccgccctcacctcccaagagaaggccccatctctgagactgatgggacaggcatctgacttgctctcagcagctacagggaacaggttcttctccagagctcaatgattgaaccaagcct

SEQ ID NO: 58072 - DNA, 1089 bp, Homo sapiens
cacgttcatctctgaggatgagacccctttggcccacaccttggtaggggccaccctgggctctggggaccaatacagaatgggtttggattcccagggcccccctgtgtcctgcagagcagcccccaaccaggattgcctttgcttaagattttggaggaaagccttcaggatgaaggccgagtgggagccccccaagcaatgctccagggcccacttctattcccagagagcctcccttttcctaaccccgaagggagacaaggtagcaagagctggaagtgaggccaatgatgtggaacccaggtgtcctctcaacctcctcctatggaactgagctgggagatgagtagcgttcccccaccccacatccctgtggacaagtggctggggtagggacgagcagggggcccaggggcagcccaccttcctcagctgagtacacgagtgcagtgaggctctcgggcccatccccgcggcggttgtagctgcggatcttgacctcaaagggcgtgtagggccggacgctctcgttgctgtagacaaagtactgggcatcggcgccaggcacccgggcggtctgccagtgagtgctgccctgcctgcggaaggacagcaggtagccgaagccgtctccgttctggtactcccgtgacatgggctgaggggcaagagcatggcatgggcgagggtccgcggcatgtgtccctgcccgttccctggccccacccaacctttgccaagagtagcggccctggacgcctacgcctgcagcgtggattcgcgtaaggggcagcgggtgcgtggaagggggacaggaagttatccgcgtttgagtcagagctgtgcagtggtcctttctgcagctgctcaagcgggagaggggtcagggaggaggaggaggacatctgacccttgcagcttaccgtccagttgacgatgagctctccgggggctccacctcctccgctgagtcctgagggtgccaccgagggggctgtcaagggccaagggacaccgatatggcttgttaatgagcaaggaaaaaatgaaagccctgagcctgtgcctgtagagcaccgtaagatg

SEQ ID NO: 58073 - DNA, 1044 bp, Homo sapiens
cccctcggtggcaccctcaggactcagcggaggaggtggagcccccggagagctcatcgtcaactggacggtaagctgcaagggtcagatgtcctcctcctcctccctgacccctctcccgcttgagcagctgcagaaaggaccactgcacagctctgactcaaacgcggataacttcctgtcccccttccacgcacccgctgccccttacgcgaatccacgctgcaggcgtaggcgtccagggccgctactcttggcaaaggttgggtggggccagggaacgggcagggacacatgccgcggaccctcgcccatgccatgctcttgcccctcagcccatgtcacgggagtaccagaacggagacggcttcggctacctgctgtccttccgcaggcagggcagcactcactggcagaccgcccgggtgcctggcgccgatgcccagtactttgtctacagcaacgagagcgtccggccctacacgccctttgaggtcaagatccgcagctacaaccgccgcggggatgggcccgagagcctcactgcactcgtgtactcagctgaggaaggtgggctgcccctgggccccctgctcgtccctaccccagccacttgtccacagggatgtggggtgggggaacgctactcatctcccagctcagttccataggaggaggttgagaggacacctgggttccacatcattggcctcacttccagctcttgctaccttgtctcccttcggggttaggaaaagggaggctctctgggaatagaagtgggccctggagcattgcttggggggctcccactcggccttcatcctgaaggctttcctccaaaatcttaagcaaaggcaatcctggttgggggctgctctgcaggacacaggggggccctgggaatccaaacccattctgtattggtccccagagcccagggtggcccctaccaaggtgtgggccaaaggggtctcatcctcagagatgaacgtgacctgggaacccgtgcagcaggacatgaatggtatcctcctggggtat

SEQ ID NO: 58074 - DNA, 1050 bp, Homo sapiens
ctcctaggctgtctcagtgtcctagatgtatatcatgagttcagagcatctttgttgtttaaggttgttaggtggttctgatatatggctaaggttgagaaccactgactgaggcccaggcatagggagtcattttactgttgctcttattttaaaaaagatcttacattttacacgtacccttacccccattctgtttacttcagaggggatagatttcagaagacctgggttctgggccttgttctgctgttgatggtgtaatggggcaagctacctgacatcatctttgaaataggtgattgtgaggatccagtgagatcctgtgaggtaaactgaagtacgggacatgagttcaggaatattattgatgaagcattcagtacgggacaacttgctgagacattcaggagatagcttgctgtactttaagcaagcagtcttgacactagaagaccataaaatatcctactttaatgaactcaacatgacattgctgaggagggaggaagactgatgggtactatgtcccattttccagatggagagactgagtaacttttgcagtcttctgttgcagccagtagtcaagcatgggatggactattgcacagttctggcattataaccctctatgcattgggctcttgagttttgactccaaggatgtgaagggattgagcagagaagagaacaaaagatgctcagttgtgttagtaaagcaaaacctgttgaagtctgtgcaggtaatctacctttgcagggtcaaggggatgctgactggactaatatttgggttttagagtggctggtgttcccacatcccctttgggggcaaagtggaagagatgaccgttttgtgatatcatactggtgtccgtacaggccccttccggaggcttgttgtcagcctgggcttccaggcacacagctaatgagtattcaggcctccattcaccatctccctcttcgctgaaaaaagctgggggcgtagtcagcatggagccctacctgctttgcactaaaagactcaaaacacagagtcgtgca

SEQ ID NO: 58075 - DNA, 6042 bp, Homo sapiens
ctagttaatatttcacagcagctcatttaacgatgtctctcagaggttgagcagcttctatggaataatcagggaagtgttcatttcattgtactattcaggatattatttatcgatcattgttggtgtatagcaatgtagacagtagctctcacgaacatttcaccatatttgggattctaaggtgataagtatgtcacttaaggaactgtggtgctgggaaaagggtttcttgctcacttgttaatcatttagtgactaatcaatctttaaaatatatgaagggttgaaaggtgtggtaccctaaaatttcttctcctctcctcattgcactttttggaatgttaaacattatttgttagcaccttagagcatggttagcagcttagaaaaaatagaactctgatcattttgcttttcccccaaccctttgggacagtactgaggaaagtattggggtggggggtttggatttggattgttttttgttcaataaagagtaattgggagttggagttggttatgtattttcttaaaaaggggaatttcttggtccacgtgtgcttgtaatgcatcatccagcattcagtatttctgttcttacaagtaactggtctaaattgaagctaaaagaaatctttttgtgtctaatctctttagcaggaggagcaatctcagaactgttatgaagaccttcgaagttcttcattctttctcactttgccatcatgtggcctctggacactgtggtcagtcatttgaaaattgactttaatttaaaacaaaggcctgtgcctcccacccaggaggtgggagggtgaattttatgtttaaatgaagaagtgaattatggaagaagagtatacgaccttcccttccctttcaagcataagtccaaatagactctcaggaatgaagatttgtgaagacatcagataggaattttgactcatttaaactttgatgcttagttatgttgctggagaaaagatacttatgttttgctcatctaacttcattgtacccagcgtcattttgacatgtcatttcctatctcccatttgccttcggtcctcaatgcatgtctttgagtgacttcttatctgaaattttgctactggtatcctaggaaagcttttgttggatactctcattttaaacttctcctctccccagatacctcctatatttccatattgtgtgcaaaggatgggcagaaaagaaagtgcttgaaagatttcaaattttcagaaagggaacaacgaaggccctctcttcctctcataccacgttttgctcaagaagctgggctgtaacaattcagggttttcccttgttttcctctcattgcatgtttccctccaatattggttcattgtcatcaatcatggtttttgaagatagctagttttatccatctccagcaaagaatcatcaatagtttatattgctttacctgtgctggcttccagagatggaaacaaacccaggtgtctctcaacaagctacttttttactggggtgggggaatctatgcaaggagtaaagtaaaaccatccagaatcaaagcagcaaccacatagttcaaatcaaagatcaaggtgaattttttgtatcactgcctgtggaaatctatcctcatcagtcattgcatttttccctgcctatacctgtgctcctttttcttactgtgttttcagtcacttcctttctgtgaaaggttgcttagctttttttttgacatttgttgttctttataaaaataacagattggatagatgtgtacatttggtgtttgaaattctctgaaaatcccattaggaaaccaggtgtgaaaagggctcagtagcttctctgagtggcgtttttagctgactggaagtgcttaatctggatcgtcttttttttttttttttttttttcaatattttaaaaggagaatttaaatactgtgcttactgtgaaatatatcagttggtgagccgggcgtggtgggtcacgcctgtaatcccagcactttgggaggccaaggcgggttgatcacccgaggtcaggagttcaagaccagcctggccaacgtggtgaaagcctgtatctattaaaagacaaaaattagctgggcgtggtagtacatgcctgtaatcccagctacactggaggctgagtcaggagaatcacttgaacgtgggaggcagaggttgcagtgagtggagatcgcaccactgccctccagcctaggtgacagaatgagactctatctcaaaaaaaaaaaaaaaatgatatcagttggtggatgctcctataggtagccaaacacattgattacctgttagattttaggatagaaatcaaagtagagcacgtcagcaagagcctctttgtctcactccatcatttaaaaccagtatattcagtagttgaagaaagagctctccctgagtcagttgcaaaacgtctatatttttagatgccactacttttttcttaaatattcattttgagactgtcatgagttagaccagtggttgagattagtagatggctcactagacatgtttttgttttgcagacattatatccattccagtcctctgcactgtacactgcagcagtgtgcaaactatgggacttagagggtttctgccatctttccacgtgtgaagtagcttggtttcctctgcctgtgcatttggatgtttgtgctatgtccacctcctaaactggctactgagaaaatcatcttcagccctgtcagattgtctctggcagtagctcctaataattatttatgtttttggaatttttttttcaacttttaaaaaaccttctatccatttcaatttgaattatttgatttgtacaatatatgtatattctcttcttcctttttgtcatccctgccctgccacccccaaaattttgtttttaaaaatattctgggctgggcatggtggctcacacctgtaatcccagcacttggggaggccgaggctggtggatcatctgaggtcaggtgtttgagaccagcctggtcaacatggtgaaaccccgtctctactaaaaatacaaaaattagctgggcgtggtggcgggcacctgtaatcctagctactcgggaggctgaggcaggagaattgcttgaatccaggaggcagaggttgcagtgagctgagattgcgccactgcactccagcctgggtgacagagcaagactccatctcaaaaaaaaaaaaaaaaaaaaatctgtagttttgtacaagatgagacttagccttgggtacttcttgctgaagctttaatgctttgtaaataaaatcggatgtttattaaagaacaggtgtagatgtttatttgtaaacactgctcacttctggaactctctggccactttgctttagtacaaaggaaagtgtgatttcctgtgttgatactagatctttcagtgtggaaagatagatctggaaggggtagggagtggacaggtagtctagatttctgcctctagatgagattgtaaataaatgatgcaagtggaaaagttgttgatcaaaaagatcatctaggaatgatctgtcttccaattatttaactcaatatagttttgcaattactctgaagaggccgtagggctaggcattctggaggttacaaaaatgcatgctaggaagttcctgtcttccaaggacctttcttcaagtctaagtaagtacggttgaattcttattagcctttttttttttttgaatgaagcagctttaaaatttattaaatgctcgttgtctcctaaagataagatgtttcacaaagtctatgtaagtctttgattttaatgtcaaatttgagggtctacttattaatcttatgtgattgagaactccatctttgacatcatagctgtttcatagcaaccttgacctacgtgaataatgagctctattctgtaggataaagggagtaggccaagagtcagggagcatcatgcatcctctcactcaaaatatatcttcagtatccttgggaaggaagagtgcctaaaagggggagaggagctgcctttaacacaaccttaaacattctgatttgaaaaggtcatcttggcccttgtctttatgaatttccatttctatttaaaattccttacacattgaacagtgtttcacactttacaaagtgttctcacatacagtatatcattcagtgctctaagtgaccttcctcagataggcaaggaggtcttaagttacaaaggaggaaacagaaattcaggaagggtaagttacttgcctcctagtccagagttcttaatcctttttataggaagtttaggaacattaaaataattcaagttaatcttcctttttttagactttagtatttgttttatttggtgacatttaactggggcttttgaaacccttaatttagatcctagtttatagaggggaaggggaagggtgaggaagagtgtaacttcactatgcatttgaggtaatctggaaatttacttcagtttctgaagtcttttcttctttgtcttcccaagaggtggatttaaagtcattaagagaacacgaaaacggccagcgcggtggctcatgcctgtaatcccagcactttggggggctgaggtgggtgaattgcttgaacccaggagttggagacaagcctcgacaacatggtgaaaccccgtatctacaaaaaatagaaaaattagccaggtgtgatagcctgcacctgtagtcccagctacctaggaggctgaggtggcaggatcacttgagcctaggaggttgaggctgcagtgagctgtgatcatgttactgcactccagcctgggttgacagtgaggccctgcctcaaaaaaaaaaaaaaaaaaaaaaagcgtgaagactagtaggtaaggtggttattttattaacaacgatagttagtaaagcaacaccattgtgatttttttcctgccttgtggcctcacctgtttataaggactggacttttatttattaagttgtgttgttttattgacaatacatgcatcatatcttttgactttgaaggatatctcatgtcaaaggaatcaagttatgatttatagaggattcagctggaataccttgtgggtgctggctgagggtggcaaaacgcctaccgagacatgaaggttttagccactagttttgtccttgggagcctggggttggccttctacctgcctttggtggtgactacacctaaaacactggccatccctgagaagctgcaagaagctgtggggaaagttatcatcaatgccacaacctgtactgtcacctgtggccttggctataaggaggagaccgtctgtgaggtgggccctgatggagtgagaaggaaatgtcagactcggcgcttagaatgtctgaccaactggatctgtgggatgctccatttcaccattctcattggcaaggaatttgagcttagctgtctgagttcagacatcttggagtttggacaggaagctttccggttcacctggagacttgctcgaggtgtcatctccactgacgatgaggtcttcaaaccctttcaagccaactcccactttgtgaagtttaaatatgctcaggagtatgactctgggacatatcgctgtgatgtgcagctggtaaaaaacttgagactcgtcaagaggctctattttgggttgagggtccttcctcctaacttggtgaatctgaatttccatcagtcacttactgaggatcagaagttaatagatgagggattggaagttaatctggacagctactccaagcctcaccacccaaagtggaaaaagaaggtggcgtcagccttgggaataggaattgccattggagtggttggtggcgtgttggtgaggattgtcctctgtgcgctaagggggggcctgcagcagtgacagcttcaagaacttaacagccttgctcctgaagaactggctgcccaggaagccaagctagctttttaggggagtgttccagctgctggtagtggatcagcttagagggaacactccca

SEQ ID NO: 58076 - DNA, 1519 bp, Homo sapiens
agtctgttgtctgttgcaacaggagagtatgcatttcaagggaaaattggcagagagaccactatagagataatctggccatctggaatctggggctatagaaaattgtttcctgtcaaacagcttgtcagtgttggctagcactagagggcccacattcatgtggacatttttctatgtgaatgaggacccaaagtgaagcttggtgagggtaaccctgagcttgggacttttgggaaggaccaggctaacatagtctgcgctatctatcaaatgcttcttagttactttaaatactctccagaggacagtcctgagaccagaaacttgagatgtgagcagaatcaccagtcctagttgtctgtgattgctcaaggattgcccaagagctagggctccttggcagtaaaaacatcagtaataaagtgggacaaaggtgtggtcggttacatacacgttctaaaggcctcatgggatggtagacatgaaggggttggtgcacacctgggtctgttggagatggcaagggccaaagtgagcagaagcgacatttctgggagtggacaggcaccatgcagatttccctgtcttgggctgcgctacaccactgccctggtgccagcccatcaccctaaggctctgaaccacctccaagtcacttactgaatctgtgatttttttttttttaatgcttggtagttttgttttctttttttctctctttgtttttctctcccctccctccctcctttccttcttttccttcctttccttgtgaagactaatttatgaattcctgctagaatcaaggtagtctttctcactctgtgggatgttattaactaactaaggtagggtttgaaatcatgattcagtgttctcttaggccaacctagattgggctgctactggaaagtaccaataatagctggtcattttgagctgaattttcctacctgttacattactggagatttcctttatgttgtagctaaataatatgtttccttgggggcagttgctgcgtcaggtctttaaattggctggagtcttctatattgctagttctgtgtatcttatcttgctcatagtactgcttgctctggttttgatttgttgcctgatgcctcaacaagcttttgttttgtttgacttttatttatttattttgtctattcagaaaaacaaggacggtatagaaacatgagctgccctccagtataaggtagctcattagtcatcttgagtgcctattactaatgctgttgattagtgatcaagccactttctcctattatgatttaggtttaaaatggcaatgttgtattcatttttagatgattaccactaaattggtcagggtacctgtgggaatagttggtgaaaattgccttaaagtggtaaggcatgatattgagtcttgtggagtggatttttctatcacaggaagttttttaaaaatcaatgtagctgggcacagtggctcacgcttgtaatcccagcactttgggagtccgag

SEQ ID NO: 58077 - DNA, 1380 bp, Homo sapiens
tccatttaaaccgaaactctacaaaggggacagaggtttacctctggaaggatcagcgaagggtaaagtgcaggcggaactcagccagcccttgacaggtaaggacacattgggagcattgtctggcttgcttcgtggccttgctttgtgtagcccttgacttcatttaactgcaacattttttccccctctcttccctcgtttttcccagcagcagataatttctgaattttaagctgctgctaagggcaggctaaaccagatttggcttaattcagtggctcttaaccttgggtctgtaaatagttttcaataaatctacattcccctgatgttatatgcaaaatattatgtgaatatttttctggggaagatgtccatagctttcctcagattcctgtaggaattcatgacccaaagaagggtaagaacctctggtttaattcatttcttcatccatatttgctcttaggttttttgtttgttttgtctcaaagagccagacaagtagccagaagtacaagcttgttttatatagtccttgactggttcactgtggcatcttttctctccctcttcaaattgttcaaatcccacaggtagtgctttctctctcttagtattccagaagcaataatgaaattgttagtaccatcgtgttaaggaagaagatggggtttgttttggtttttgatttttttccaatatctgaaaacaggaggagatgatcaaaaagacagaaactacagtatctgtgtagtttcttaacacctaagccttttgatacataatatttgagttttctcacttttatattactgagggatttttattgggggacagaaaacaatttctgtttcttaccaaatacttgtgagcctaggctaattggtctcttgtttagaaaatgttaatcaaattagaatccatttctgtgtaaacattgggctttggaaattgtttttttgctttatatagaagcactgctttagttaatacagtattctcaatttttttgtggctagtttggtagactcaaaggtaggattgataacgtatcaatggttgtattcaggctcccccgactttaaaattttaatctaaatgtgtggactagagtgcaaaacagaattctttgtttaatttataacttacatcatttaatcattgtctgtaaacatgaattctcttacagagaagctgaaatagacagttattcatcattttgagtattccatctcgagtttactagatttagactttagtttttgatagcccaacaccataccactgagtaccaatatttttttcccgacaacatttatggtggtgcactgatggttaccacgtccacattcaacccacctaaggctgtgtttg

SEQ ID NO: 58078 - DNA, 3332 bp, Homo sapiens
gggatacacaggaagtataaaacatattcccacttaaaattgtattttggtttgggagatgacaagtagatatataaatattctagtctattactttgatttttcctcaattcttccctagtttattagtcgttttgtagtactaaggaacagatttctgacctctggtgttgatatttttatccttcccgtagttgctttttaattaacacggcagatcgaataatcagagtttatgatggcagagaaatcttaacatgtggaagagatggagagcctgaacctatgcagaaattgcaggatttggtgaataggtatgtatcacaacctagaagaatatgtgatcattcatgacctgggcttgagttccagctctccttggtactttccttgtcctttaggaccccatggaagaaatgttgtttctctggggatggggaatacatcgtggcaggttctgcccggcagcatgccctgtacatctgggagaagagcattggcaacctggtgaagattctccatgggacgagaggagaactcctcttggatgtagctgtgagtacattaggacattgcttttgttagtcacataatccaaaaaatctaaaatctgttcttaacaacctgtttttctttccttcactaaaatttagtggcatcctgttcgacccatcatagcatccatttccagtggagtggtatctatctgggcacagaatcaagtagtaagtattctattttacttgcttcgaaactagttaccccttctttttatcaaagaaccttatacataggaagctaaaaattacatttttattttcttttgcatatgattctcgcaacctaaattacataggttcagtgcatctagttgcactttattttggtgggaaggtcttggtcccaagttggttttctggctcttttcagggagaaactctattgaactttctgttgcatttttctattatttatttgagataacatttttcttttgcttttcttactttcagctcagtttctgttttacatcttaattttactttgaacacctttaaattatgtttgtaatcagtgtacttacaagaaaatttaacattttacctctaaattcctaaaatgaccaaagaaggcagtgattcaaaagagctacagttaataacttagcttatcttaatgtttaagatagaaaatacctaagctagtaaaacttacagatacccatttttttcttgtctgccaaatttaatctaagaattgtgaattcctttcatgctcacatctttcattttatcattaatgtgtagattacagattattgctttcacatatggttaagtagtatatcttgttgtataggaaaactggagtgcatttgcaccagacttcaaagaattggatgaaaatgtagaatacgaagaaagggaatcagagtttgatattgaagatgaagataagagtgagcctgagcagacaggtactatttctaaattgcagacaggatttcctaaagggaaaatgattgctttacttaatattcttcatttgtgttgtaaatttatttcagcacttcatctaaaatgcccccctccaccccacacttttttttttttttttttttgagatggaatttcgctcttgtcacccaggctggatgcaatgatgtgattttggctcactgcaacctctgccccctgggttcaagtgattctcctgcctcagcctcccgagtagctgggattacaggtgcctgccaccactcccagcgaattttttgtatttttagtagagatggggtttccccatgttggccaggctggtctggaactcctgacctcaggtgatccacccactttggcctcccaaagtgctgccattacagacatgagccactgtgcctggcctatgaaccactgtgcctggccttcttttttctttaagcttacacaatttccacagtatttggagagccttaatttataaggtgtttactaagggcttatatgggtattaccagggctcaagcagctctcttaacatatcattgtgtatttcctgattaattgcagatgactaagtgaggacatacatgcagcacctagcaaagaactcaccatgctaagagtgctcagcttttcccatgtattctgtcactcctttgtcagtaagagaagggtcaagaacctgggctctgaagtcagactgccttgggcaaaatactgcttaaactgaatttcctcatctgtaaaatagggacagtaatagtacctgctttttagggttgtggggagtaagtgaaataattcatgtaaagcatttaatatatgcctaggccataataagcactaagatattaatttccattatgattatgactgtgattttatctcttctgaatttctagataggagctccttgagaataaagatttgactttttaatccccgtggtgtctaacacagggctttataacatagtaaggtttgtgcgggtgaatgcttaggatgcccagttggcactgtcagtgagtaattaatgccacagattattgacccccgagatacttgatggtgccaggaatcaggattgggaatgaggttgattctgtttagtgtcaaagtgctggtcctcacttttgtgatattagataacttgcatgcctaatgtgttttaggaggacctccagggaagtagaatgttctagattatagggttatgttctgtcaaaccttcccagatttccacataaattgttcctccttcccatatcctgagcaagttacacataccattactgtattaaattgaaactgtctctctgtctccccagttagactataaaccttttactgaagagctgttcccaactttttctgggtcattgcactattttcagtgcctaggatagggtggaaattcagcacatatttgttaaatgattaagtgaagtgaactgtttggttttcctcctttgtttctctggaatttcaacttatgaaaaccttgaagctgcaaataaaaagcagtttttcacttcttctcaaacatctcctgtgtttctgtcctgcaggggctgatgctgcagaagatgaggaagtggatgtcaccagcgtggaccctattgctgccttctgtagcaggtgagccggcccggaaggctgggcaccttggctactgctgctcctggcctctgggggagtactctgcagtttccctggctatcccttcattcccgtctgcttattagctaaaagagataactcgtttggtgtacaagaaatccaatgtagcctttcttctctagtcctatgttcctttcacttctccctgat

SEQ ID NO: 58079 - DNA, 1045 bp, Homo sapiens
ggcaccatctcagttcaccgcaacctctccctcccgggttccagcgattctcctgcctcagcctcccgagtagctgggattacaggcattcatcaccacacctggctaattttgtatttttagtagagacggggtctctccatgttgatcaggctggtcttgaactcccaacctcaggtgatccacttgcttcagcctcctaaagtgctgggattataggtgtgaaccaccgcgcctggcctagaaagttgatttttaagaaattgtgataaaatacacacagcataaattttaccatttcagccatatttaactgtacagttcagtggtaattaatgtacattcactctattgtgcaatgatcaccatccatctttagaaatcttttcttcttgtaaaactggaattctgtacctattgaatcataatttcccattccctgctctccgccagcccctagaaacaccctttgaccttctctctttatgaatttgactactccaggtacctcatataaggggaatcatatagtatttgcccttttgtgactggcttatttcacttagtttcatgtcctcaagcttcacccatgtgtgtagcatgtgtcagaatctttctccttcttctcaaggctcaataatactccattttatgtttataccacttttgtttatatggcttatctgtggatacttgggttgcttctatattttggttattgtgaataatgctaaacatcatattttaagaatagattggccaggcgtggtggtgaatgcctgtaatcccagcactttgggaggccgaggtgggcggatcacctgaggttgggagtttgagaccagcctgaccaacatgaagaaaccctgtctctactaaaaatacaaaattagccaggcgtcgtggcgcatgcgtgtaatcccagctactcaggaggctgaggcaggagaattgcttgaacccaggaggcagaggttgcagtgagccgagattgcaccattgcactccagcctgggcaacaagagcgaaactccgtttcaaaaaa

SEQ ID NO: 58080 - DNA, 1102 bp, Homo sapiens
ccaaagtgctggaattacaggcatgagccactgcgcctggccctgaatgcgttttttttaatttaaattttaatttttttgagatggagtctcgctgcgacgctctagctggagtgcaatggcacagtctcagcttactgcaccctcctcctcctgttttcaagcgattctcttgcctcggcctcccaagtagctgggattacaggtgcaggcaccacatccggctaagtttttgtatttttagtagagatggggtttcaccatgttggccaggctggtctcgaactcctgacctcaagtgatctgcccgcctcagcctccccaaagtgctgggattacaggcgtgagccactgcacctggcctcttacttttttttaatgatcatgttttattttgtcaagactaattttactcagaattttccctgttattagacctgtggattttatgctttttcactgtttcaaatttgcttgggtgggagaattgatgagggtatggacagggatcagggaaaaggacagggaatcagcttgctgataccaaagcaacagccaatgtactgttcgtatttttaaacaggaacaaggttctcgtgtgtcccatgaaatctgctcctgtcatgttgaccctttcagattccaaacatgttgttctgccggtggacgatgactccgatttgaacgttgtggcatcttttgataggcgaggggaatatatttatacgggaaacgcaaaaggcaaggtaagcctaaaagctggcaaatcaggcatcttgtacactggctcatttaatgtttacttgttttgtttcttttgaaaattgtttttattcttggactaagcacagctcctttctgcagcaaatgtagtctaattttcttccatctcttaataataatttttgttctttggatttagagtgatagagattatttgacctagaaaagcatgggaggacctttactggatgctagtaatgaagggccattatgaaattataaaatttcaatgtcatgttatcagctggaacactgctgatcaaaatttctcaatatctggttttataaaagattgtataattcaggccagcttaactta

SEQ ID NO: 58081 - DNA, 1107 bp, Homo sapiens
ttatgtagccattctttagagtatgtctgctagcaacaagtgtctcagtttacccgtttattcctggaatgacagttcttttctttcagtgcttgaaaaatgtgccacttccttctggccttcatggtttctgatgagaaatcccttttcattcatattgttgttcccctatagataaggcatcatttttctcttgcagctttcaagattttttcattgtctttagttttcagaagtttgtatttctcggagtggatttctttgggctcatcctagttgatgttcttgaatctgtaggttttgtatctcttgccagatttaggaaattttcagccattatttcttcaaataaccttaacatcccagtctgtattctctccttccaggattctgatgacatgaatattacatcttttgttatagttctacaggtctctgaggctctgtgtgtatagatacatatgtgtgtgtgtgtgtatatatatatatgtatacacacacacacacatacatatacacacatatatacacacagacacatatatatatatgtctatggtaatttttattccatcttccagtttgctaattctttccctttttttcctccattggctgctgaattcatctattgagtttatttctgttactatatttttcagttctaaaattcccatttggttcttctctgtatcttctgtttctttgctaagattttctgggcttttttccccatctgtttcaggcatgttcataattgttgaagcatttttatgatggctgcattataatccttgtcagataattctaacatttatgtcatttctgtattagtgtctattgattgtcttttcttattcgagttgagattttctttgttcttgagttgacaagtgattttcagttgaaacctgggcattttgggtattatgagactgtagatcttatttattttttactttttcttgagacagagtctcactctgttgcctaggctggagcccagtggcgccatcttgggtcactgcaacttctgcctcccaggttcaagcgattctcctgcctcaagcctcccgagtagctgggactacaggtgcacaccaccat

SEQ ID NO: 58082 - DNA, 1184 bp, Homo sapiens
gttgacattctctagaaggactcactgattgcctgactacaggtattctagacccagtagaagagacacacagagtccttttgtgtgcaggctttaacttaatccctctatatttataaccttagcttacccctgccttcctctgttcctagagtcctgagtctggcagtatatttattttgtctctgatataaataattttttgagcacttattatgtaccaggcattgagcacttattatgtatcaggcattgagtacttattatgtgccaagccaagaattctgtatgtattaaattctttcaacagccttctgcaggtcgataccgtttttattcctgtgttatagatgaggaaattgaagcccataaagcttaagtaacgtgctaagatcacacagctaggaggtagtaatgtctaggcttgagtagaagtctgacttttgagccatattcttaaccatggagattatattgcctgctgagtttctcaatagcacctcctcttgatttcaaaacctgggtaaagtatcggttttgggttacttttttacttgttccatttgttttttgtttttgtttcctgccttcctgtgggctacttggacaagtttttagaattccattttgctttatctgtagtgttttttgagtgtatacccttgtgtagctttagtggttactaggttttacatcatacatttataacttaccacagtctactggtgataagttgtattggtgaacattttaccagttcaagtgaagtgtagaaaccttaccttcctgttgtccccttgtcctttcttgtgtgtaatataattgtcttaaatatttgctctacatacattgacacccacataagacagtgttaaaatgtgtgtttcaaacatcaaaactcaagaagagaaaaagtaattttttttttttttgagacggattcatgctctgtcacccaggctggagtgcaatgctgcgatatctgctcactgcaacctccgcctcccaagttcaagtgattctccagcctcagcctcccgagtagctgggactacaggcgtgcactaccacacccagctaatttttgtatttttagtagagaccgggtttcaccatgttgaccaggatggtctcgatctcttgacctcatgatccgcccgccttgacctcctaaagtgctggga

SEQ ID NO: 58083 - DNA, 1060 bp, Homo sapiens
tatgctatagatgtgctttacttttttaattgtaaaactattttataacacttgaatgtttgaggatagacattgtggttattttaaatagcttggtattgatatgaaataatttgacttctctaatgttatgcattgtaggctattccagggtttttcttttttaattatttaaaaaattcttttaaattctttttgtttaaattctttttgttttaaattcttggaataaattcccagaattacaatgactgcatcaatagatatgactttttaaatacttctgttatattttgcccatttgccctccagaaagtttatacaaagttatagtagtgatgtaagggattgatcacatctgtttccagaatccatggttagctttaataaatgttccttcattttggctattttaatagatataagaagacacagagagattatttggtatgcagtgtaatttatattcaataaaagtatcacaagtgataaagaacctttaggaaataatttggatacctggctattgttgcctctattcttgtatttgtttcaatttttaggaagctgatggaactttggattgtatcagcatggctttgacttgcacctttaacaggtggggcacactgcttgcagttggctgtaatgatggccgaattgtcatctgggatttcttgacaagaggcattgctaaaataattagtgcacacatccatccagtgtgttctttatggtaagacattttttaattaatatttaaatatgaggagaatgaatgatgactatatatttgcaaatctcattgtagatattttaatacttagatttttaaatattcagccattagtaatacagtttatcatggtttatgtagatcctgagtccatgctgtccttgaagcacctttcttgggagaaattcattgtattatggatctgtatcaggcgctgagaatatctcaatactgaaatgaaatattttcagattgtaattgtagtataattgtgatattgacttttcatttagaataaaaagtctcggttaggacagaagcttg

SEQ ID NO: 58084 - DNA, 1334 bp, Homo sapiens
cagtcttggctcactgcaacctctgtctcctgggttcgagtgattctcgtgcctcagcctcctgagtagctggtactacaggtgcgcactgccatgcctggctaatttttgtatgtttagcagagatggggtttcactgtgttggccaggctggtctcaaactcctggccccaagcaatccactcacctcagcctcccaaagtgtccggccttaagtggatttttaaggttggtaaaatatcaacaggctgaagtatgaaaatatgggagggatgttcagtaggcatcagtgagagaagacctaaagaattttcctgcttggccaggttgtggataaagagaatgccaggggatgggatcggtgccatctattttgtgttggttctcgaatgcctagctcaaaagtttgggctttttagggaaggtagggtagatccattgaaggattttgacttagtaactcaatcagagctatgagtttgtaaggtttgtctgacagcaatgtggagttgagttttggaggagtgtaaaaccagtttggaggggtagattatatgagtgatgaggaaggcctgagctaggaaatagaaaagacattgaggaggtagggatgacaaatttgagaatagattgcatatagtgctgatgagtaagagagtgacgtgaaaaatggtgagagcaaataatgatgctgttgataaagtgtaaggtcattggaaaaagacagctttggagaagctgaatgtggtctaggggtcaggagacaggtttggatttatgggagagatttgtattctttcagatgggctcattgaaaccttgtgaatagaggacatgatctagagaaaaagtgggagggggagaaaagaaaattgccaagcacacaatctgtagttagaggttaagaggaggaataagtggagataataagttagctaacggttataaagtactttctctgagctaggcagattttcaagtgccttccatgtattaatctatgtagaggaagaagagagtacagattggtgtggcgtcttcatagaagccaatcagagcagttgagtctgagggctgagaatgggttgctctgtttagtcctttggcagcttgggactcctcagcagctggaacagaaaccagattacaatgattttagaatggtgtgggagacaagggcaaaaggttgacgcttacttgtaaaaacttaaggatggaagaaaggtgataacgctagtactttgaaagagtagcaggatcttgcaaaaggcttttcttgaatgatacagaaggttcattaggataaaacttaggaaggaatatttatttttatt

SEQ ID NO: 58085 - DNA, 1232 bp, Homo sapiens
tagaggcacatgccaccatgcctggctaatttttattcttttagtagagatggggtttcaccatgttggccaggctgatctcgaactcctgacctcatgatctgcccgcctcagcctcccaaagcactgggattacaggcgtgagccactgtgcccagccgtttttattcttttttagaacagggtctcactattttgcccaggcttgtctcgaactcctgggctcaagtgatcttcctgcctcagcctccctaagtactgcgattgcaggtgtgaaccaccacacctggcttcctttagattttttaatttcttgtcatgaagtggtacaaaaagtagtcttttataattattttattctcatctctctgctttattttttaagtggcagacttctctaccatgtttttctacactattatacaatgtaaagaacaagggtttctactggtaaatggtcttattactcatctaaaatataaatctttttatttatcaagaatcataagacatattttaaataactatgtgacttcacgaagcataagtaggccaggcatgatggctcatgcctgtaatctcagcactttgggagactgaggtgggaggatcacttgagcccaggagttcgagaccagcttgggctacatagggagacccccccccgcaccatctctaaaatatatatatatagttaaaaaaagaataattagtgtaagagataacaatggctcataaattgtattactgttgatcacttatgatataatctgaaatcacaacgaactgctgagggtttcgtacaaaaaaagtttaatttttatttccaaataactttaaaaagctagaacagcttttagattttgagacggccatctcaatatatttgtttatcttctgcagaatgaataaaaaggattatttttaatttcttaagccagtctgagagcctctgtctctgaagccagtctgaaaaaatctttgcattaattatactgattcatttattttgcaaatattttacaaatacatattaaagcacctgtatgccctttcttttctaggcacaatggcatatctgtgaataaaattgacaaagtacttacctttaaggagcttatactctcgtaaaagggagacaatgaagaaacaaataaatgaatcaatgtataatgggacaagcggtgataactaccatgaaggaaaatgaagtaggggccgggtacagtggc

SEQ ID NO: 58086 - DNA, 1478 bp, Homo sapiens
tcttagaagtatatacagtgaaaagacaatggtaacatctgcctccttttcatttgtgaagccagaacaccacattcctcagcttttacacatctgagacacttttttgctaaagggatagcttggcgcttcagtgagctgctgaatatgctcagtcattcaactcttcactgtccaggagtcatccctgcctgggaaggttccaagtttcccagcaagcaccagttcccttgggagtgtgtcctatagtgaataaatgtcaaattctccccatggccaaaaggtgagggggaaggaaataactagagagtgaaagagaaaggtctttgctttcaagtagaatcatctagtcctctgtttggctgctcagaattggacttgcagagccgattcatgatgccctggagcatgggctggacaatgcccaagagaggcctcttcaaggggtcgccatcccaacaggcttccatcaactgccagcactcctcatcaaacacaggaagacgttctgggcgagcccctagagaaaggagcatggaaacaagatcacagtgagagggacccagcacaacaaagaggcatgaccagctcaaaggctgacttcccagtggggctcagaatactaagaatgcaaggagttttgacttcgattgcaaacatctaggttagaacctaacagtaagagcaattaaaaaaaaaaagaaagaaagaaaaagaaaagaaaaactggaacacattagcatatgaagttgaagaatcggacattttttaaaaaagacttttcgagatagttcaatagagagttgacttgaagcaaaggttgacttaaatatcttttctggattcatgacagtttaaacgtatctacggccctgctatggagtggccagatgggatgacaggagacccggtgacattgcctgggctcagtctgcgctagccaggggagttaggacaaggtagtacttgtggctcttacccctccgcacattgttccagagatggtctttgctagcacacctctcaaatgcctcagggagcttgacagagcctgagcagatataccagaaaagaattccaaaagcgtagacatccacggaattatcgtacttccctgatggcaagaaaggatgaaacgtaatgagccacagagagtcaggcagcagcatctacaccaccttgcctcagtagagggttggctttttccaaagcttttaacaactattatctctcaataacaaccctgccaggtaggcagggtacatttataatgcccattttacaatacaatcaactaagacattgggaggtcacagctcaatactaagagagccaagcctagaacttgacaaaggagaaggaaaataaggcctttcattctgctaggacagtcaaaaagattaatcacaaaaggtcatattagggaaataaagttggaaatacaggtgggtaggtatgttggaaccagaatataataa

SEQ ID NO: 58087 - DNA, 1856 bp, Homo sapiens
gatgactatctacttggttcagatgttgagtacgactacagctgtctcactaacacctaatccttacatgtatcacccagtgaagggctgggggaagactcgtacatgaaatgaaagaaatttaaatatattgctaattttaactcttaccaatactaatgactgaccagggactacctttctatcttcgctggcaatggaacaatcattcccatcacttgggctcaaaaccgtggagtcatcttttagtcattcttttctgttcactaaccatatcaagttagcaccaaaattttgttcattcttcctctgaattaatctcaaatttctcacgtttgtttgttttagcactaacaccagcttaatcatggaggcaaccatagaagaccagctatctagtcttaccttggttcttcccaaatcatctttacctactgttgctaaagctcatcttctatcaacattttcctctgtcccctactcaaaagctcagtagctccttaagtcttgcacaacaagccttgattcttctgtgggaatttcaaactcaatgtattttatctccaaccttgtttgctactattccccaaatggatttctttcctgtcatgcttatttctattctgtgattttcttcattatttccccttctttagcctccagaattttctctccttcatgctacagggttatactatggagacagaaagtcctagtcttaaatcatagctccattaccttttagctcaatggttttgggagtaggtttcttcatcaatctggtctcaattttatccattgaatggacataaaaatacatcatcgtcacagaattaaacaaaatatgtgaaaaacctacccatactgcttaggtcaaggtatatacttaataaatgagttcccttctcacctaccaatttcccaaatctgactcaagttctattcaaaatctcacctccatcacaaaaccaccaaacatttccaccttcatttattccttctctaaacaccaacagtacattatatagcacttaatttagcacttaatcatacgttgtgttgtactgcttcctattttacctcttaatatatctctatgtcaacggtaagttctttaatgatagaggacaactcctatcacacaggagttattcaatcaatactttatgattaaataattggctgattatggcagttatggcactaataaccgagagagatgtccaaatggtgattcccatttgtactttttctttcttactcctttacctcttcactttccctgctacttgccttaggtaggtctcccctgatctggtttctcccttgcctgtgccagacctgccagtagtgattgtggaaacgagctcaaggggtagcactcaggattaaagtagtacgccctgcccagacccactgcctgccctccagccttacctgtgaaaagttcaggggccatatggattggtgtccccacaatgctgcctgacatcatggcctctggcttgcagaatcctaagtcagtgatcttggcacggttctgcttatccagctgccaacaaagcagggcaagagtcaccttgtttctgatcctgcacacagcactgctgcgtacctaagctcaaaggtaggtacctcaaagtagtgtcactggataggattatgctctgaaaatgagttgtcaggtgatttcatccttgtacaaacaccagactgtgcttacaccaacccagatggtatacctgctacacacctagtatggtcttttgctactaggctacaaacctgtacagcgtattactgtactgaataccataggcaactgtaacacaatggtatttgtgtatctaaacata

SEQ ID NO: 58088 - DNA, 1697 bp, Homo sapiens
cttttaaaaataaatttagtgtagcctaaatatacagtgtttataaagcctacagtggtgtacagtaacgtcctaggccttcacattcactcaccactcactcactgactcacccagagcaacttccacttctgcgagctccattcattgtaaatgccctctacaggtataccattttttatcttttataccatattcttactgtaccttttctatgtttaagtatgtttagatacacaaataccattgtgttacagttgcctatggtattcagtacagtaatacgctgtacaggtttgtagcctagtagcaaaagaccatactaggtgtgtagcaggtataccatctgggttggtgtaagcacagtctggtgtttgtacaaggatgaaatcacctgacaactcattttcagagcataatcctatccagtgacactactttgaggtacctacctttgagcttaggtacgcagcagtgctgtgtgcaggatcagaaacaaggtgactcttgccctgctttgttggcagctggataagcagaaccgtgccaagatcactgacttaggattctgcaagccagaggccatgatgtcaggcagcattgtggggacaccaatccatatggcccctgaacttttcacaggtaaggctggagggcaggcagtgggtctgggcagggcgtactactttaatcctgagtgctaccccttgagctcgtttccacaatcactactggcaggtctggcacaggcaagggagaaaccagatcaggggagacctacctaaggcaagtagcagggaaagtgaagaggtaaaggagtaagaaagaaaaagtacaaatgggaatcaccatttggacatctctctcggttattagtgccataactgccataatcagccaattatttaatcataaagtattgattgaataactcctgtgtgataggagttgtcctctatcattaaagaacttaccgttgacatagagatatattaagaggtaaaataggaagcagtacaacacaacgtatgattaagtgctaaattaagtgctatataatgtactgttggtgtttagagaaggaataaatgaaggtggaaatgtttggtggttttgtgatggaggtgagattttgaatagaacttgagtcagatttgggaaattggtaggtgagaagggaactcatttattaagtatataccttgacctaagcagtatgggtaggtttttcacatattttgtttaattctgtgacgatgatgtatttttatgtccattcaatggataaaattgagaccagattgatgaagaaacctactcccaaaaccattgagctaaaaggtaatggagctatgatttaagactaggactttctgtctccatagtataaccctgtagcatgaaggagagaaaattctggaggctaaagaaggggaaataatgaagaaaatcacagaatagaaataagcatgacaggaaagaaatccatttggggaatagtagcaaacaaggttggagataaaatacattgagtttgaaattcccacagaagaatcaaggcttgttgtgcaagacttaaggagctactgagcttttgagtaggggacagaggaaaatgttgatagaagatgagctttagcaacagtaggtaaagatgatttgggaagaaccaaggtaagactagatagctggtcttc

SEQ ID NO: 58089 - DNA, 1055 bp, Homo sapiens
agactgtgagaagctactaaaggattttatttgagtgaaggtgaaaccctcagttggatgttgagtttcccttatctaaaccaccaagagggaattagagaggtttcttttgtctgttccctatgtaggagctgagtagaaggagagaaaagctgacctcagagtctccgagtagatcccttctcacagattcctcttggaccagtttatatggaggcttccagaagtagggcagaggaaaccttagaaatgcttcccagagtcatgaggaatcaatatgatgaagaaaatgactctccaagcagctttccctcttcatttcagaggagttaagcattgtctgatgcatttccacaagtgagctagagaatgtcctttgagcttttgaatgagtgatgtgacattttccagtattcaggagaccctgaattgaagtaatatgagtgactttggtatttgaatccataaaaccaaacctgggctaaccaggcctgtaaagcaatggaaataaatcttcctgagggacctagaaatagtcactttgagcctcaagggcagttccagaattttttcaagtgttagaaatgagctcatgccttagttgtttggttctatctgctagtcacatttgaagttatctgttcggcttaactgcagcctgcaagggattttatctggctttgtctcctttacaacttgctcttccttgcttttcctctacttccctctcctaactgctttttctcccccaaccttttttttttttttttgagacagagtcttgctctgtcacccaggctgaagtgcagtggcaccatctcaactcactgcaagctctgcctcctgggttcaagtgattctcctgcctcagcctcccaggtagctgggattacaggcacctgccaccacatccagctaattcttttttgcatttttagtagagacaggatttcaccatgtttgccaggctggtcttgaaattcttgaccttggcctccctaagtgctggggttacaggcatgagccactgtgcccggctcttcccctttttaaaa

SEQ ID NO: 58090 - DNA, 1068 bp, Homo sapiens
tatgtatagtacttaactcagagttataaagacaccatcccccagccacccagttcttctccatatgttcttctgcacttgtctttttcatttaatatgtatcttagagggcattccataaatattcatacaaatttgtcttcttctaatggatatgcctgaatttattgaactattctctcattggtggacatttaagctgtttgtttttgttttttatttttatttatttatttttttttgagacaggatcttgttctgtcgcccaggctggagtgcagaggcctggtctagtctcactacaacctccgcctcctgggttcaaggaatcctcccacctcagcctccctagtagctgggtctaaaggtgtgcaccatcacacctgggtctaaaggtgtgcaccatcacaccatcatacctgtatttagtagagacagggtttcaccatgttggccaggcttatttgtttattttttattttctctttcgctaatacaaaatgtactgcattaatcatcattgtacatatacaccttgggacttgtaagggtatatctcaagaaaaagaattcctagaagcaaaatagttagatcaaagggtatgtagatttttcttggttggttgaacattttaatagatattgccaaatttcctctgaagaagtggcacccatttaagtttccaccagtagacatgagagtgccttttcaggagcacatctttttgcaagtagtttgacttctctcaagttcttctgtcctctgatttacaacattaatagatgttctaatcctaagagatagtgtggcatggtggggacaattgagttttactttttatttatctagtaattgattagaataaaattcctggccggcggcaatggctcatgcctgtaatctcagcactttgggaggccaaggtgagcggatcacctgaggtcaggagttcaagaccagcctggccaacatggtgaaaccccatctctactaaatacaaaaattagtctggcgtggtggtgggtgcctgtaatcctaggtacttgggaggctgaggcacaagatca

SEQ ID NO: 58091 - DNA, 1378 bp, Homo sapiens
tctgataatttccattacaattcctttttcttccattatttgtcttaattcttcatcagagggaatcagtgggaatgtctaagcaataaaggaaggcagagaccaaaatttttttttaatctgatggctaaaggggttgccatcctttctacttctttgttttttcactctctctagatgagtgcctgccttcataggctgcaccagggagtgttggtaaccgaggaaggaggtggatcaatggctggggtaccgaagtccaattgttccattgtagatcaggattttggtctcagtgtgggactttggggagacagggattggttctgaccctgaggcgctgatatatgacccccttccccttccaggaagtggacgttgtggtagcaccatgccaaggcctccggcccacagtggatgttctgggtgacttggtgaatgatttcttgcctgtgataacctatgcactccacaaagatgaactctctgagagggatgagcaagagcttcaggaaatccgaaagtatttctcctttcctgtattctttttcaaagtgccgaaactgggctcggagataatagactcctcaaccaggagaatggagagcgaaagatcaccgctttatcgccagctaattgacctgggctatctgagcagcagtcactggaactgtggggctcctggccaggatactaaagctcagagcatgttggtggaacagagtgaaaagctgagacacttgagcacattttctcaccaggtgttacagactcgcctggtggatgcagccaaggccctgaacctggtgcactgccactgccttgacatctttattaaccaggcatttgacatgcagcgggacctgcagatcactcccaaacgtctggaatatactcgaaaaaaggagaatgagttgtatgaatcattgatgaatattgccaaccgaaagcaggaggaaatgaaggatatgattgttgagacacttaataccatgaaggaggaacttctggatgatgctactaacatggagtttaaaggtaggtcccagagagcttgttggggtgctggcacgggaggagtctctaaccattttctagccggaaattaagaacgttaattcctaaggttaaaggaatctcagggtaacttcatccaccccactgttaccagcaggagcccactatttagccaaggtggcctctcttgctctcaaagatcattgtggaagattccaccctcattccttcccaagaacattagctcaacttttggtaaattcatcctaatagctctgtaatctccactttctgcctgtaccccctcaacccctaatggagctggagaagagctgcttggagaatgttagtaaattgtgct

SEQ ID NO: 58092 - DNA, 1116 bp, Homo sapiens
tctttagggcagctttgtaatataaaaaatatttccacctataattctttactttaatgtaactgttttcttttcttttctttttttttttttttttttttgagacagtctcattctgtcacccaggttggagtgcatggtgtgatctcagttcactgcagcctccgtctcctcggttcaagcaattctcctgcctcagcttcctgagtagctggaattataggtgtgcaccagcatgtctggctaatttttgtattttcagtagagacggggtctccccatattggccaggctggtcttgaactcctgacctcaaacgatctgcccaccccagcctcccaaagtgctgggattacaagtgtgagccaccacacccagcctaatgtaactgttttcctttccttttagtctttatctcattgttatatgtgattataatgttgtcatttatgcagttgtatgttctattttaaaccttaaaatttgttacttaccaactttttgaatatgcctgactgaaatgattcatactgtagcatgtgtgactcagggtagtgaaagggggtttgttttgaatagcaagatgagcatcagactagtcttccaaccagaaaacattccatgcaacttgagacacagatgaaacagcaaatttcttcttggcttggggttggataaagggtggattgacttatgtagtgtttgctaaaatgacaaatggtgagatgctaaaagcactttgagctttagggagttcaaagtggccaggcaaattaaagttatgtgacctatctgagaatatagcatagttctttgtgagaaaagaaagtgagatatttgtgctttgttggaaataaaaaagattttaaaaactcaaggctgggcacagtggttcacacctgtaatctcagcactttgggaggctgaggcgcagatcgcttgagctcaggagttcaagaccaacctgggcaacatggcaaaaccccatctctaccaaaaaaaaaaaacccaaaaaagaatgaaaattagctgggcgtagtggctcacacctgtagtatcagctacttgggtggctgaggtgggaggaccacttgagcctgggaggttgagactaca

SEQ ID NO: 58093 - DNA, 1698 bp, Homo sapiens
aaaggtaggaaagactgctgagtgagatcctcagggcaagaagatactgttggaggaaggagtctatggaattgggccaaaaaatggtcaactccaagggaaaagaaacaaggatcatttatatgtacaggacagagaaacaagaaatgatattctagaggtataattaaaattttaaaaactcttattttatgtggcaaaaaaaggaaactgaagtgatatatttaaaaaggatgtggaaagttcaggtaaatgctaaattataaattcttcatggcagtaatcctattttgtttttaatatctctctcacctttaccctagcatgcactagcatacatagtaaaatctaaccatcctgcatacattgctctttaccaaaaaacctgggagttcctgttataggctaatatacctatgaaggatatgtgtgattcagaggcaataattttttttaatccctatgctcactatagtaaccttgatatctcttaaaagaacagcctggctgggcacagtggctcacgcctgtaatgccagcactttgggaggccgaggcaggcagagcgcttgagttcaggagtttgagaccagcctgggcaacaaggcaaaaccctctttctacaaaaaatacaaaaattagctgggtgtggtagcacatgcctgtagtcccagctactcaggaggctgaggcgggaagaccacttgagcctgggaagtggaggttgcggtaagctgagaccgcgccattgcattccagcctgggtctctgtctcaaaaaataactaaataaataaaaacatcctgtgtggccataaaaaagaatgagttcatgtcctttgcagggacatggatgaagctggaagccatcattcttagcaaactaacacgggaacagaaaaccaaacactgcatgttctcactcataagtgggagttgaacaatgagaacacatggacacaaggcggggagcatcacacacgggggcctgtcgggggctggggggaaaggggagggagagtattaggacaaatacctaattcaggtggagcttgaaacctagatgacgggttgataggtgcagcaaaccatacctatgtaacaaacctgcacgttccccacatgtatcccagaacttaaagtaaaaacaaaacaaaacaaaataacatcctgaagctgaggctgtattttctcaattcactgtcagtgattcatctctggccttccagggttagctcttgaggcaaaaatctgacagcagtcacagtcttaatcttcttcttttgtcttctgcctttgctaggattctacctctttcctgcaccaaatggcttcctttctgtttttactatctcacatatttgtttgtttccttctgagtagaggatggatggggtagggaatcttccctaattcagagactcagagattgaaaagtattgtcaacgggcagaaactgttgttaggactattaacaatattttctttttgactgctattgtgatgtctcagccaatccatagaggatattatcttgtttgataacaaagcctttactttgtaaccagcatatacttcttaatacagaaccctagctagaattgttaggacccctgaaagcatctagtctatctttttttttttttttttgagacggactctcactctgttgcccaggctggagtgcagtggcgcgatc

SEQ ID NO: 58094 - DNA, 1021 bp, Homo sapiens
ggatgaaataggatggttcttcctgctttagatgattataaacaggtaattagaataaagcatggtaggtgttctgcagttgagaataaggtatgaaggaactcaggactggcctgttgctacttgttaagtggccacacaagcaatttgctgtgtcctcttgcttttaggttgtagatcaaaagagtagactagtggtctggtgttatactcttgtatttagtaaatacccttgcacagaattatatacttagttaactctgttggtttttgaaaggcactcatctctttccaaggagagtagatttgcttgtttcagtgtctggtgttgctgatgtatatgtgcgggccaggctgatatccttatagacagacatgaaaagaagggccctaatgaaatgcatagagggatctgcgtgaacacagacctctttaacccttttggtgttactgtttgtggaagagaaggatgcttggggatttgaaatcgtagctaggtaggttcactctgaagtagaaccacctcttaattgattcaggcctcttatgcttccaattctggaaacaaacaaaataaatggcctacaaataatttaatgcagcttatggttaagtgactaaagcaaatactgtttcagttagtgccacccaaaatttcagttatgatggatgtgtttggctcaaggattggcccttttgcagcctaagaactgtgtctgtgcttttctgaacaaatgcaggaattgcctgaatcttagagataggcagacactgatactgaaggaataaggaagtgatatagttcaggctgagagtttcagtgaactaatttcggattatttttctcaaacacagattctcattctttaggaagcttgttctgtcttgaacattatttgaacgtgtttggggaagttatccatttagattagtagtagttgccttgaaaggagaagttttttttgtttttttttgttttagatttttattttttattttttttgtacaaaacgtaagggtg

SEQ ID NO: 58095 - DNA, 1031 bp, Homo sapiens
cagatcacctgaggtcaggagtccgaaaccagcctggccaacatggcgaaaccctgattctattaaaaatacaaaaaatcagctgggcgtggtggtaatcccagctactcgggagactgaggcaggagaatcgctttaacccgggaagcggaggttgcagtgagccaagatcacgccattgcactccagcctgggcaacagagcgagactccatctcaaaaaaaaaaaaaaaaaaaaaacccaagagtaggacccttccattcatcttgtggaatttaactaccatagtctcagctcgagcagtgagaagtccagctagactgtcttcacctcacctacacttcctagctttcttctattccctgtcctccccagattttcacataagtgtctacgcatgaatgcatactgacaacctttaaattcctataataaaaatggtttcatcacaaaaagaccaacaaaactaaataacctttgttactgctactaccaggagagtggataatagagaagaaaaccgactaaatcacttttcaggacgagagggagagagcctctgcacctctgaaacaaagtgtcaactacaggacagccaatgaaacaggctgcatcagccaaaaccagagcagacacaccccattattcatctgacccaaatgaacacttcccccctccatctttcctacaaaaagtcaccacaaataaacttgctactgtcaaaacgaccaaagaccagcgcagtaggaaagggtgctgaagttgatcccagtacactgttagaagtccatggcaaacatcaccgtctttgttttccaacatgtcactatccaagctctttgcttctcccactaaatctttagctttttcatccatttgacatctctaccagatttgaacaagggcatggagagaaatgaagttgaaagcagatggttttactcctggattcttgcacactgctcagtgatgtggtggaatgcaatatggaagtgggaacagcacgagaatgaaggcaggctttgccactc

SEQ ID NO: 58096 - DNA, 1090 bp, Homo sapiens
aagtactttcatcctcaaagtgtctaactttagtttcatcagattaagagctttagtgcctgggaggctgaggcagaagaatcgcctgaacctgggaggcagagattgaagtgagtcgagatcgcgccaccacactccagcctggcgacagagcgaggctccatctcaaaaaaaaaaaaaaaagctttagtgccttatttatgccagacaaatttcagtttagatcttttttttaatattttctagtctatttaatggggagagaatttcccagggtttttttgtttttgttttttttaaatcaagtcaaacttgccagagcaaagactaaggccctatcacaaatgcagctaggttacaagactattttaaataaaagctctttctattcaaatgagagggacagtgagaatgaaccagtatggagtttacgttttaggaatattccatatgatatactctagccttagcgtttaatattatggcgatatctaggtgcaaggaggaatgtgggggaatatagctagtaaagaaaagtcattcttattttttagtatataagaaccccactgaggaaacctctttcactttctcctgattgaacaactgacatgctcttctggttctgtcccatggagagaattggaaaagttttgctgctttaacttggaaaagtggtttgttggtataggataaaagtagttagtgtataatggcaatatagtctctaccactaataaacataaggggccactacaggcagtgcaaaatcaaagtcaagcttcctctgttggtttctttctttctttctttcttttttttttgagacggagtttcactcttgttgcccaggctggagtacaatggcgtgatcttggctcaccgcagcctccacctcccgggttcaagcgattcttctgcctcagcctaccgagtagctgggattacaggcatgtgccaccacgcccagctaattctgtatttttaatagagacggggtttctccatgatggtcaggctggtctcaaactcccgacctcaggtgatccgcccgcctcagcctcccaaagtgctgggattacaggcatga

SEQ ID NO: 58097 - DNA, 1066 bp, Homo sapiens
acactttggcaggctgaggcgggtggatcacctgaggtcaagaggttgagaccagcctgaccaacatggagaaaccccatgtctactaaaaatacaaaattagccgggcatggtggtgcatgcctgtaatcccagctactcaggaggctgaggcaggagaatcgcttgaacccgggaggcggaggttttggtgagccgagattgcaccattgcactctagcctgggcgacagagcgagactctgtctcaaaaacaaaaaactaaaaaaaaaaccaaaaaaaaccagtgcctgctaaggtgctatgtaagtattagctattattcaataaatacctgagtgcctggtatgtactgagcaatgtgctgcgtatgggggataaagagtcaaataaagacattggccttggccttaggccagtgaagatcagtctttcccttctatacttttaagaaagaaaaaataattataattatcatcaataatcatttatgtttgatgatggattaaaaaggtctaagaagacctgaacttggtcctctagaaaggtataatctaatctaaaccatatacgtgtgcaacacataaaacacgtacataaaaaagcagaatgctaagggaggttataagcattttatatgagttataattctcaggttttttttatagctctttgcctttggtgagcttacagctatgtttctccaacattcttcaccttctttttgtcacaccttttaaatgtgccagcatttaaaagaaggggaaaagcactagtgtacttatttaaaataggcattttcggctgggcgcggtggctcactcatgtaattccagcactttgggaggctgaggcaggtggatcacctgaggtcaggagctcgagactagcctgccagcatggtgaaacatcgtctccactaaaatacaaaaaattagctgggcatggcggtgcgggcctataatcccagctgctcaggaggctgaggcaggagaatcgctggaacccaggaggcagagattgcagtgagctgagatcatgccagtgcactccagcttgggtgatag

SEQ ID NO: 58098 - DNA, 1033 bp, Homo sapiens
ttttccaatgctggcacagttttccaatgatagaaaaattccattattgactctggaactgggtagaagttgacttgttttagatttgatggtggtaccacagaagggtgtttaatttttaatgctcccctacctcatacctgtgtttggtcaaggcagataagcagttctggtttgcttttgttttcattttaaactttggagatgagaacttttggtatcttagttccatttctgttttctcatgacagctccaggcactgtgatgaattaagtgcattggaagaaatcatcttgagaaaggggcaaaaataataataataataataaaggactctgtgtaaagcacctccgtagaggttggggcggtattggaagaggagagaatttttatctttgccaaagaaatctgaatggtgtttagtgacagttagtggtttcatgggctcctatggtctccctctgttccttcagcactgtggaccatcttactgtacactgtaaatttctgctacagtgccctgggatctgtgattatagggtgggaagggccagtgaaaagtagtagttaagcagcaattttaaaactgtaattgaaaaataacctaaaaatggacattgcctcacaggaggctcatgcagatacattgagggccttctcaactgttccacacacctgtgggaccttcggggaaaatctcagtagacatcctgcaacaggagcacaacaattcagtcccattcttcagccacttgcagcttggattcctgttgaaacactcgagttcatgtttcgattcatttgtccttattgcccagccttttgctgctaacagattccctgcttgttgggaggagatgctggggttgctaagccacagagagtgctggctgaccaaaagtacaccacaattctacagcaagaaaacccagttccattgcatatgggaggagaggtggggcttaggggaatactgcagacagggagcacacattcctgctaagaatacagcatacgggccgggagcggtgg

SEQ ID NO: 58099 - DNA, 1029 bp, Homo sapiens
ttggtaggccgaggttggtggatcacttgaggccaggagtttgagaccatcctggccaacatggtaaaatcctgtctctactaaaaatacaaaaattagccaagtgcagtggcacacacctgtagtcccagctacttgggagactgaggtgggaggatcgcctgagcccaggaggttgaagctgcagtgagccatgatcatgccattgcactccagcctgggctacagagcaagaccctatctcaaaaaaaaaaaaaaaaaaaaaaaaaacacaaaaaaacacacacacaaaaaacaacaaccgaaaaaaaaaaaaaaaaccacaacgtgtggtagatacttctgaggcccaggatgagtggccaagcataagagtgagctggttctatcctgatatgtgatggaagtctgaaggcacgggaggaaattaccaacctccccacctctctcacagtgggaagaattgagtctttcctgaaaggaggtgtctggggatgctggccatgggctttccccctggacttcccctaaggttctctttcctctcacaaaagcccctttaagtaatttccctggagatttctgagcagtattaatatatttccctgaagaaaaagggggagctccaaattccatcattcccctcctggtttgaagcacttttgactcaagactcatttgggttccagttcatgttccagtcacaccatacactggtcttcctgcctacttagtgaagagcaggaaagataattcgaagccagatatctgagagaaagtcacaactgagtcctgtgtggttctccctgctggctctccgcctttcctggtggtcacaggcagcttcctcccactgtgagtggcgtgtgttccttcaccactcctgcagagagcccactagagaagggttcatgcagtcagcagataccaccttcagcaggaaaggtgctgctgaattaaattgtgaaacatgcttataaaagtgcctgaaaacatgtacgcagtttaaataacagaagcaaagcagac

SEQ ID NO: 58100 - DNA, 1041 bp, Homo sapiens
ttgttcagcccttaatgagcagacactctgcatgtagaggcagccaggcccacctctcatgggtgagtcaatgaatacattttaaaaatcaaattagaaaaatcctgtcaagcaggagtctctggtatgcagctattttatgaggagggaaaacgtgaaccttgctgtctttggttgcctagggctcccatgaagacctcctgagcagggggaagacgttggggtgggcagtgggcactgtcggaagctggtgaaggactgtggatgtttgcaggggcctgggggaagtggggcaggctcattagctggggagcttctctgtggggctctgccatgtggctcactgtgcccaagatatccagatgggagggaggaactctttttttgctgcttatggaagacgagacccagacactttgggtgacctgatgaggggacggttccctgggttcagggtgatcatgggggaaatggttgttcttgtgactattttatatccttctttagaaccctcagctttgttaggtgtatggcctggttgatctttataacatacctgtgaagttggcagagcaggtgttatctccattttacagatgagtagactaaggcctagaggaaaagagactgcttgcctatggcacccagctaggtcttggcagggagacaagggatcctagtctgtacccaagactcatctgagaggtgacgtcactgaacccggctggggaccattttatgcaaagtctatggagagcaggtttgcctcagcccgagtgggatgattttatctcttggttgccatttccccttcagttgcatagatttcctgacctggagctgtccttccaggaatgggcgtggccctgggggtcctgaggagagaaaggttgcttccctgtcacagaggaaaaaggtcttccagccatcggtaaaccctgctctgtcagctgactcccccagacccagaggccctgggctggtgtgagaagcagtagtggttctgccctgatctctgggcatgaataggaggtattcttc

SEQ ID NO: 58101 - DNA, 1251 bp, Homo sapiens
tgtaatcccagcactttgggaggccaaggcaggcagatcacttgaggtcaggagttcgagaccagcctggccaacacggtgaaaccccatctctactgaaaatacaaaaattagccaggcatggtggtgggtgcctgtaatactggcttctcgggaggcagaggcaggagaatcccttgaaccagggaggtggaaggtgcagtgagctgagattacgctactgcagtccagcctgggcaacagagcgagactgtgtctcaaatagataaacaaacaaataaataaaagagttctgggctggaggttctgtcccttcctggccgtgtgtccctgaacaacttgtttgacctttctgggccaaaagaggagcagctctgcctagactgcattttggggatgctgtggggacggggtagagagcagatgtgaaagccctgtgtaagtggctgtcagggatactgctcttgtggtggttgtcttcttttggactcctgcatccattttctagatagaaaaaccaagtccagaggcatccaggggcactcctatggtcccagggtttacccatgcttcctctgcctgcctctttccccaggtcgataagggagacctggtggccctgagcctccccgccggccatggtgacaccgacggccccatcagcctggacgtgcccgatggggcaccggacccccagcggaccaaggccgccattgaccacctgcaccagaagatcctgaagatcaccgagcagatcaagattgagcaggaggctcgcgacgacaatgtggcagagtatctgaaactggccaacaacgcggacaagcagcaggtgtcacgcatcaagcaagtgttcgagaagaagaaccagaagtcagcccagaccatcgcccagctgcacaagaagctggagcactaccgccggcgcctgaaggagattgagcagaacgggccctcgcggcagcccaaggacgtgctgcgggacatgcagcaggggctgaaggacgtgggcgccaacgtgcgcgcaggcatcagcggctttgggggcggcgtggtggagggcgtcaagggcagcctctctggcctctcacaggccacccacaccgccgtggtgtccaagccccgggagtttgccagcctcatccgcaacaagtttggcagtgctgacaacatcgcccacctgaaggaccccctggaagatgggccccctgaggaggcagcccgggcactgagcggcagtgccacactcgt

SEQ ID NO: 58102 - DNA, 1041 bp, Homo sapiens
acaggcgcccgccaccatgcccggctaattttgtatttttagtagagacagggtttctccatgttggtcaggctggtctcaaactcccgacctcaggtgatccacccacctcggcctcccaaagtgctgggattacaggcgtgagccaccgcgccccacctaacccttccttatttagcctaggagtaagagaacacaatctctgtttcttcaatggttctcttcccttttccatcctccaaacctggcctgagcctcctgaagttgctgctgtgaatctgaaagacttgaaaagcctccgcctgctgtgtggacttcatctcaaggggcccagcctcctctggactccaccttggacctcagtgactcagaacttctgcctctaagctgctctaaagtccagactatggatgtgttctctaggccttcaggactctagaatgtccatatttatttttatgttcttggctttgtgttttaggaaaagtgaatcttgctgttttcaataatgtgaatgctatgttctgggaaaatccactatgacatctaagttttgtgtacagagagatatttttgcaactatttccacctcctcccacaaccccccacactccactccacactcttgagtctctttacctaatggtctctacctaatggacctccgtggccaaaaagtaccattaaaaccagaaaggtgattggaagcaggccctgctgttctctttggtgactgaggtggggagggatggtgctgagcaggtttttgagccttctcctaatactcgttcccctaggctgccagggatgggaaatagaaaaactgccgaatcaaaacaaacgtgagctcagtagctctggcctgaccctattaagcacacaggtgggaaggccctgggcccagggtcccagttgctcttccggcctttggcactaaagtagaagtggatttggcagattatcccaccctgcccccaccacctgcctccttctcctcccacccctgctcctgtctgcttgagccctgctcctgctgcgtaa

SEQ ID NO: 58103 - DNA, 1065 bp, Homo sapiens
cactgtgggaggccgaggcgggcggatcgtgaggtcaggagatcgagaccatcctggctaacacagtgaaaccccgtctctactaaaaatacaaaaaattagccgggcgtggtggcggacgcctgtagtcccagctactcgggaggctgaggcaggagaatggcctgaacccaggaggcggagcttgcagtgagccgagatcgtgccactgcactccagcctgggcaacagagcgagactccgtctcaaaaacaaaacaaaacaaaacaaaacgaaacaaacaaaaaaagaacttgcagtgagaatttctggaaagggcagcccagaaaggatggcaaatttgtcaaaagttagttagcagtggttaactggttctcaaacttgagtttaaagtacgtaaggatcacctgggatgtttgtttaaaatacttacattctctggttccacacccagagtaatttattctgaaggtctaggatagggccatataatgtatattttaacaagccttttagagcaggtggtttaggcattattatgttttgccaaatccagttgggtgctggttgtgagggggtgtgtgtgtgtgtgtgtgtgtgtgtgtatggtttgccctattggctacatcagcagttacttccccagattgtgtttgcttttgcagccagtagctggtttgaaattcaagaagtcatttcattggtgaaggagagtggatgttggagaaaggggtagattatggccccatcaataggaccgagtatgtttttcctgctatcgcctggcacagtccccagttgcctgctgccaggttacagctattgggcaatcatgtacttcctggcttgccttttctttctctttctgcaaagtgtgagggcccggtgaggctccaggcttgaggctgttggacccaggctttgtcaggggcttagctggaaaatagctgctggtggcttgtgcttcgtgcctcttgggggtggagacactgggtcgtggggactggggtggcccagagactgagaaactgagattgaagttcagagttcccatcaggctcttga

SEQ ID NO: 58104 - DNA, 1048 bp, Homo sapiens
cagctcaccgcaacctccacctcccaggttcaagtgattctcctgcctcagcctcccaagtagctgggattacaggcatgcgccaccatccctggctaatttttgtatttttagtagagacggggtttctccatgttgatcaggctggtctcaaactcccgacctcaggtgatccgcccgcctcagcctcccaaagtgataggattacaggcatgagccactacgcccagccaagaaagcctcctcttttttttttttttttttttgactattacagaagtttatttaacaaaaagtctaatatgaaaatgtacatgacctaatttttacatcatagtaaaacaggacctatggagagagagcatgggtttctctgctgaccagccattatttatactcattccaaggcttctaacatgatgatactatttcctcatattaccaccattccaatattgttctgttgtccactagtcgccatttccacacattcatctatcacaaggttcataaagggatcaaatccccgcaatattccttggacatgtctgccaccatttaatttcaatgataacttcttgtccataaattttttcagctcgggagggtgagctttgctcatggtgtatactccgcgggctcacagatcgaaagcctgctcttaaagtgagcagtgatgatcaaataaaagcccaatatatgctatgtaccaggtgaggaatctctatgtggaaacaagaggaatcttcggggagtggacccttctctcctgggtggggatgagacaacaaatgagcttttgtcttccaaataaggcagttttcctaggaagagggactccggtgagggtgagcaggccagccttttgtttagccttctgtttctagcaggccctctacctctaggcctgcagagccccatggggctggactgtgggtctgtggccctgctcatttagagcctgccagaaggagagccagctcccagtgcctcagcacacacacacacatgcacacacacatgcgtgcgcgcacacacatgcatgcac

SEQ ID NO: 58105 - DNA, 1159 bp, Homo sapiens
gtgcgcgcacgcatgtgtgtgtgcatgtgtgtgtgtgtgctgaggcactgggagctggctctccttctggcaggctctaaatgagcagggccacagacccacagtccagccccatggggctctgcaggcctagaggtagagggcctgctagaaacagaaggctaaacaaaaggctggcctgctcaccctcaccggagtccctcttcctaggaaaactgccttatttggaagacaaaagctcatttgttgtctcatccccacccaggagagaagggtccactccccgaagattcctcttgtttccacatagagattcctcacctggtacatagcatatattgggcttttatttgatcatcactgctcactttaagagcaggctttcgatctgtgagcccgcggagtatacaccatgagcaaagctcaccctcccgagctgaaaaaatttatggacaagaagttatcattgaaattaaatggtggcagacatgtccaaggaatattgcggggatttgatccctttatgaaccttgtgatagatgaatgtgtggaaatggcgactagtggacaacagaacaatattggaatggtggtaatatgaggaaatagtatcatcatgttagaagccttggaatgagtataaataatggctggtcagcagagaaacccatgctctctctccataggtcctgttttactatgatgtaaaaattaggtcatgtacattttcatattagactttttgttaaataaacttctgtaatagtcaaaaaaaaaaaaaaaaaaaagaggaggctttcttggctgggcgtagtggctcatgcctgtaatcctatcactttgggaggctgaggcgggcggatcacctgaggtcgggagtttgagaccagcctgatcaacatggagaaaccccgtctctactaaaaatacaaaaattagccagggatggtggcgcatgcctgtaatcccagctacttgggaggctgaggcaggagaatcacttgaacctgggaggtggaggttgcggtgagctgagatggtgccattgcactccagcctgggcaacaagggcgaaactccgtctcaaaaaaaaaaaaaggaggttttctcatggcctgcctctccttccttgcctccctcctaactccaaattttgtct

SEQ ID NO: 58106 - DNA, 1050 bp, Homo sapiens
tgattgtagccctacattacaattctcaatgtcaaaccctggagatgaagaggtctaacatttagcccagaacctttccagtgatgaaaacaaacaacgactcttttggcattggtctgatattcagtgacagaataaagtttgttccagccgaaattagcaggctagggtccaggttaaaatgcaaacaaagaaagcagcccagaggcagctgggattctgggacacagataagtcacaaagctgggtttatctgcagggttcaggattgatcagctcagcgtatatttccaaggctcttctctactcagccacccctcccagctcaaaaaacaagaggcccacaccaaaatataaaaaggtgctggatctaaaatcctgcctaatttaagctctgctcacaaaggaggccagagagcagagggaggggtggaaatcaaataagtaaatgtcagccctgcagttgggtagaagccattagccaggcagagcatccaattagaagccattgaattagagcagtgaaagaagggcctcacgtcagagggcactgcggggagggccggcacaagtgggcaggaaggaacgcggggtggcgatcaatggaggattaccggaagatgtgcaaatggcaggaacagatgccttccaaatgacagggcacccggtccagatactctacataaaatgcccacatggttcctttgtcctcccccaaatcctgtctgagggagtccagccatctcatgggctattttggaaaacactgctcccttttgcctcaacccagagataaaatgggcagctctcagccactctcggattaatctgaacagacaaagaaggggagcaaatcccttggcaaatggtgcctgggagatttcatttttccgctttgcagtacaaacctactcaaacagatactaaaatacaaagcgaagtttgttcacatggagatgtttttatttaaaactataatattattttattttgtaatcagtaattgtcaatgctcaatctttttttttttaacaaattcttatttccttg

SEQ ID NO: 58107 - DNA, 1008 bp, Homo sapiens
tactctagaagcttacatattgggatgtattttccacacttgtcaaaaatcaagaaagatgcatgatatcatctgacttcttttttttttttgatacaggaccttgctcttttgcccaggctggagtgcagtggcacaatctcagctcactgcaacctctacctcccgggttcaagcaattcttctgtctcagcctcccaagtagctgggattacaggcatgtgccaccacacctggctaatttttgtgtttttttggtagagatggagtttcaccacgttggctaggctggtctcaaactcctgacctcaagtgatccgcctacctctgccttccaaagtgctgagattacaggcctgcacccggcctcatctgacttctgaatatggtagtgagtgtggacatcagatgtagtaaggaagctggttttacaccagaaattaagagagcaaaggcatagagtgtgatgggagaggaggtgagaactatttcactaggtctccattgagaaaactaagaaaataatgataagaattagtagaattcttgaggtaaaagtgagtttggggctagaaaatgcacatgtgtaccccagatctctgataggctctgctagaatgatggcagtgttgatgccattgcacctgcctataggtgggtgtaccctgcctatgctggcatattctggctgggctcccataggtacacaatgtagaaggtcaatggacttatccagatagtttgtcttggccagaacctgttattaagggagatatgtgggggtgggaatgctggcaaacaaagaagaaaaaaaagtagatgctacagactggttacctacagagaggcagaaaacagaatctcacctgcagatgtattttgtttgcccacagtttgttgctttttaaaattttgaattagttgccaatttaaataattaagacatttcacataaatatccagaatattcccttcctcttgaaaagtctgatcacattcctgcatgga

SEQ ID NO: 58108 - DNA, 1044 bp, Homo sapiens
taggcttaactcattggtcctctggcctgagttttagagactcctcctatatatggatctattagagataggaaaaaaacaaaagtgttttttcatttatttgtttgttttggggttttttgttgttgttgttttgtttttttgagacagggtctcactttgtcacccaggctggagtgtagtatcgaaaccatggctcactatatcctcgacctccagggttcaacgatcctcccacctcagtcacccaagtagctgaggctacaggcatgcaccaccatacatggataatttttgtattttttgtagagacagggttttgctatgttgcttaggctggtctcaaactcctcagctcaagcgatctgcccgcctcagcctcccagagtgttgggattataggtgtaagccaccatgcctggccaaccaaagtgtttttttctactcccacccaccacaacagttctgacaccagatgtgtgggttttttccccacacaccaagcaattctggcaccaaattctccatcagacaccaactggatgccctataatttaattcaattccaacactgtctgcctaggcacagcatcagatcccacaggttcggggctcagtctcagaagactgccccccacttccaatgccagttaagaaccctacattgtgacctgtgcttctgaacaaccgactataaatcaaggttcctaggaccctctccttgggttagattaatttcccagggtggttcacaaaactaagggaaacacttcccttacatgtattggtttaataataaagggtgcagatgagcattcagatggaagagatgcacagggtgaagcatgtgggaaggggcacggagctccgcgctgtttctagcactccaccctccaggcatctccacaggttcagctacccagaacctgcttctgaacccactccttctgggtttttatagcggcttcattatggaggcaagattgattaaatcactggccattgatgattgacttaaccttcagttcatctccctttcctgga

SEQ ID NO: 58109 - DNA, 1045 bp, Homo sapiens
ccttccttcctctctcccttcattttggtataacttagccttttgtctttaatcctggagttctccggggctagaagacaggcagagacgaatgccagcagcagagatgcttcaggcagattctgtaagcctgttctccctcatcagggagcagctcagccaaggagcaaagtcagaccccctctagctccccagggacagaatagcccttctgacaggtaaacaggtgacctgggtagagagggcaaggccccaagataggagagtcagggctcccctttccttggaatgtgggcctctctgggcaactagggagggcaaaagtcttcctcggctggttcgcccaaaacctgggagaagcaagggcacattctatgctggcagcctctgcctgcccagctcatgcccacactcaggggcctttcctgggctttgggcagattgggtgggattcaggttgtctttatgaggcttgagcacagcttgagttcctcctcccatcctccaaccccttcctttgcccctacctcctagcccccaccttctacaatctgttatttccttttatatccaaagaattataaacagaagtccttccctcaagggaacagcaagattcagcaataaaggccagtggggtcacaaaggacagaagaaaaactccctggttctttgtcctcttggatagtagaggccttgggtgaggcaaagagatgggcagaaaaagttaccttgatacagaggccagagagcctcctggagggcatgtgtttccctagcggtcacctgcgaggctgcaatcctagaaaagtcacttctgtggcagaggatgaaattgtatccccggagactcagagatattgggtgttatgtcctgaccacacaggctcaccaggaggaaaggttaggaaagtggagaaagtacgtcctggggagcgggtggccgaggagagctttccccttgtgcgcctctcaggccttggcagggattgcagctgcaggggtttggcagtgagcccatccagagagcttcctcccccgggag

SEQ ID NO: 58110 - DNA, 1961 bp, Homo sapiens
cagtctggaaaagtggagggagctttctccataggtgggcaagcaagatacaagggtggctggtctggcaagctagggtctgtggtctctgaaggccattggaggcagaggccttggcctgtgattccagagagctcggtgagccagaggctagagctcaggctcaagcaggccaagaaggagttaacctccaaggagaatgcgggcttctcccagactggaggtctgtgcccagttttgctggtgccaactccgggaagaagtcctgggatctgtagtttgtgccaccacccacccctggcctgcctgtttatcaacacggtcttgtagactacagttcccagaaacctgcagaggctaggctttgggggaaggggtggggaaggaggctccgtggcggccagagggagagggagagggaggaggtggggagagaaaacccaattcacccccttcgtttttaattctttctcctggtgtgtctgctccaccgcccgagctaatcccccaaatccggtctcctaagccgcagctgcttcccttcgcagtgatgaatggctcagggagggaaggtgaattcatattttaattactgagacgcggtgctaagggagccggggagggggcggagggctcagctttgttctagaggcgtcgagggcacaccctccttactgggtcacttctcttttgccctttacctggggtggggggtggcggggagttaaggtgggggttgccttgctgagagtgcctctgctctctgccttgggagatgaagggatgggtcgtggggggcgcaatatccctcttcttgtttatcagagaattgctggcatgccccagcacttttaaatagcttcctagccttccacccccgctgccgcccactctgatgaaggacattgccaaaattcgagacacctaggagtttgtggtctgcaagcctggggccctggatttctctttatcttactttctggcctgctctgagtctcctctttctcttggttcttccacatgttcatgctgtctctgactcactgccccatttttgccagaggtgcaagggttggaggaccccaggagagtatctggcacagagagatgtgggggtcaggccaagggaaaggatcagcagggaggccgaggaacctcctagtggtgggggaggacggatgctctatggattggcatctcttctgcttggctcccacaaagctggctgggcagggcatcgtctgtgcccccagaccgtaaaccatcttggacctgagctgggaaaaagccagagaggaggatggggaagaagccagggccaacagcttgcagtcagatgcagccaactgtgtggtagcaggaggtttgtccagtgtccaccctgcctctccatcctattctgggcttctgtttttctgggggctgtttttccattccttagtccctcctggactatgggcatggaaaaggagggggaggatgggaggggagttcccatgatgagctctgatgagtggggagtggacccaggtgctagtccagactcctccccctcaaatagacgcagcaaggggacctgacttcagggagcctccagctggtactggagccctctgccaagggtgaaggggtaaagtcagggaagagagtcgacaggactcctgctcgagcaaagcagagaggagcagagaccacagcctggcagagggactccccaggtacctgctgctggggactctgagggaggagtggggttcacagcgggcagggatacggaaatgggttggaattctctgccccatgtccccccacttcaggggctggcccggcaatctgcatgctgcagacagagcccaggcagcctccggggcatggagttgtgcaccttacagtgaggacccttttagagaccctgttagagaagaggaaggataaccagagcactttagagcaaagatctg

SEQ ID NO: 58111 - DNA, 1043 bp, Homo sapiens
tcagggatggctccagagtgagctgccctcagcttggggaggtttcagctgaagccctctttctgactccaaccaggtctggagacagagatctcactctcctctaaactatgcaagaatgggtgttgtcggtaaccacccagactggtctgggtaggttggcccagcccccacccctgggggcactcaagaaacctatttaacccctctaaacaaagggtaggtcctcatcgctgccctcctttacccagaccctcctttgccctctgtgcttccagtggctggactagaaagagttaagctttgtaaagagggagcctaacctggggccccccatcctgggtactggcagcagcagccttgaaaagatccggccttattctctagggaaggggtagttaaggaccctgggcagggggctggaagctaattaagggaatttgaggaggtcctttatggccaggaagccacccctcctcataccctggagtgaggaccattgtgtgaggcctttgtagggcaagaactggaaactcattactgggatggctttagtgcaggtggtggaagatggtgagagaatttaacctggggggcccagtcctggagggaggcagtgtgggtgggtctggggtcgggggtgctgagaaggggagtgagggcttctcgggtgccccagcttctcgcttccctatgagattcctgccgctggacccctccactctgctgtggcctatggcttttcattcctatgtgattgctgtcccaaactcatgtagggctaaaagccatgggctacagtgaggggcgagctccttctcctgcgcagctgcacctcccatgggaccaggttcggagccagccaccaaggggcaccagaaggaggctttgcttgggggtggggcatcacgggatctggtaacctgggatcggggctaagccgtgtgaccttggcccagtcacttcccttctggccctgtttcctcactctggaatgaagagactgggccggtgattccagagggagattccctctgaggaag

SEQ ID NO: 58112 - DNA, 1013 bp, Homo sapiens
tcaggtgggctgggattggtaggcaggccaggggctgagcccttcatgtgcccagggataggcagctgggattggcaggctatggctgggaatccgagcgcaggactgggtgagggtgggtggagggggccaggctcgagcaggtctgagaaaggaaatggaaggacagataagtgctgaccttgtcctcccagggcaggggagtggtgggagcagaataggggtatgggtgaggagaggaaccagggctgcggagaaggggaggggggccaggcaggagaggggggcctgcagggagccgtctcaggtctcctgccaaaaattaaactataaaaaagctggaggggagcggcaggggaaggaaggagagaaaggagatggggagggagggagggaccaaacagcccctctgcaccaatagcccggcagggggacgtgagtaatacatggctggttcagagggagtgagatcaaaagccagtagatacaagaggtttgtgcttcaccgaccagacagccagaggctcaatgagacctttgttactcaggcccaagtcagggttgaaggaatacctggctgccccgcctgcccagcccgcccccacccccacccccaccgtcctcagggctgggggaggggccggtcacaagtgagtcaagttgagttgggtacagctcagccctggccggtggtgggcgggcagggggagggaggaggcctgccctcgctggggcgtggagcttctcggggtgagtggaggagtgagtggctgcctggaaggcaggaagtggctctgcggggaattgtgaggcggactgcgagggaaagggggccttgttgagtccgccaggtgagcagcccctgggacccccagcccctggcccagcatcccttgggagggagctgagggcattctgcctagagtccatggctttatgcagggcctgggtctggggttctgggggcccatgagagaggaaggaaaggagaaccagagggggttggggctggg

SEQ ID NO: 58113 - DNA, 1095 bp, Homo sapiens
ggactgggggctccctaaaaagggagttgctgcagcctgctccccagtgaaacaggctttagttttcatgctggacctggcttctgcagcttgcactaagattaagggacttgttactacagaggaggggagggcacacccaccagccaatcaggccagggacacctgaggtctcttctccccagccctccctccgcctcttgccccaggccccctcatctctccctgctgcctccggttctgcctgtgctccacctctgcctccagtttctctttgtcagcattcttcttttctggctctctgctttctctctctcaggcttctcctaccctctcctctaagagcaaaaaatgcccatccaggcaagttgtagcctccatcaacctcagttttctcatctacccaatgggaataataataataaatatttgtgttactgaaagatgatcattaagggggacctagatgcatgacacagttttcactaaaaaaaaaaagttgcttttccccttctcgccttttttctcccattgagtttcttctgcatttccatctgctatcacctctgtcctcttcttcacaatttctctcagtgtctccattctgtgtctctcagttccatctccccctcactcctgttttgtctcccacctccttttattccctcttggttacccccccgaccactccccccaactcctgccacaggcggcagggcccaggctgtgctgacagcaagggcaggcaagcagggcgggtggctgtctccacttctcatcagaggcccaagaatgtgtggagtcatgagggacaatgggagcctgcggcaggaagaatggggcctctgttggggcagaagtttcccaaatccggctgaatgggagtacctgagggctagggaggggtggaaactcctgaagtggagaggaggccactggtggtaggtgtgggggatgggcaaggctctagaattggccaccatgggaattcttagcatctgttggcatttctggggagagctcagacctcaaaggtgactgcctctctccctggagtggccaaggaggaaagggaggaaagggatcctgggggac

SEQ ID NO: 58114 - DNA, 1045 bp, Homo sapiens
cctaacccctttacagccccttcctcataccactccataccatggggtataaaggaaacggaggaggcactccaagcgggtttcactcagcggggacaggaggatcggctacctccggagccaaggctccctctcacactccccccaatcccaccagcggcaaaatcctttaaaaggaacaaaggcaatgggggcggggagggggcttcctctttggtcgacctagggcggcggctgacgcagcccgccgccggtcagctttcaggtgagtgcctgaacccgcatcccgcccatgccttagggacccctcttcgcccagccaagcccggggcggggaggaaagtccccctcagccgcactcgggcccccaacccggccaaggggtcgccaactcgcggcactttctgcctgtttgttttcgctcagtactcacagtttagatgctaagccggctcctcttgcactcacttcctttgtgtctctctctctctttctctctctctccccctcaccaatctctttcttccctccttgtccgattctctgctgtagcttccagtggagaaaaataattattcttcaatgggttagcacggggcgcacgcacacacgcgcgcgcacacacaccccgccgaggtacccaatcaatgcacaaatcttcggggtccctttaacctctgcggatgactccgggagttaattatgaagcctatttcggcgcggcataaatatgcattaaggtaggaaataatcgatacgctgaacttctgggaactggcatttagacggactccgtctcgccgccccccactccctccatggccccacgagccacctccacagcctcgcgccttcccggggtcgcaacgcctatcacaagcttctacccgggtttcagggggcccctgtagtggcgtgggcgccgcgccggtgccgggagaccccctcgtgcgccctctgcggtcggggcagaccctcagccggagcttcttcctcccccacccctgcaggccgggcccaagctgcgacacccccagcacgggct

SEQ ID NO: 58115 - DNA, 1032 bp, Homo sapiens
cttcctccgtcccctcccccgcccctgcgggctcccggccgcacacacacacatttcctgacaattagcgaacacaccttggccgcgcggcctccggcggcggcgccgcagcttttgtctcccgcccgccgggctgcgaggtgcgggcgcttaggcgcgaagttgcagctccgacgcgctgctccggaatgccggctgaccgcggccgtcggggggcgcggagggcggggtgggccgggcacgccggccccggggctggggggctgcaaaagagagaagagagacaaaagtaaggcagcgctggcccctcttcctttgttataaccctgagtgtgtgcgggcgtgagcgcgcgcgggagtgtctgtgtgcgcgagggtgtgcatatgtgtgtgtgcatgtgcgtgcatgtgtgtgcgcgcgtgtgtgcaaatgcctgcatatgtgtgcgggtcgggactggccgggggcggcaggacccgaaggcgctaggcggattcaccggattgggagttgaatcgcgtcccggtctttctagctgtgcccggaaatcgggcgtgcgggcaggtagccgtcccgctctcgccagttcctccgagtactgagctcggagtttgttcacaggctgagcccgtgctgggggtgtcgcagcttgggcccggcctgcaggggtgggggaggaagaagctccggctgagggtctgccccgaccgcagagggcgcacgagggggtctcccggcaccggcgcggcgcccacgccactacaggggccccctgaaacccgggtagaagcttgtgataggcgttgcgaccccgggaaggcgcgaggctgtggaggtggctcgtggggccatggagggagtggggggcggcgagacggagtccgtctaaatgccagttcccagaagttcagcgtatcgattatttcctaccttaatgcatatttatgccgcgccgaaataggcttcataattaactcccggagtcatccgcagaggttaaagggaccccgaagatttgtgcattgattggg

SEQ ID NO: 58116 - DNA, 1069 bp, Homo sapiens
ataaaagacatttagagaacagttgaacaactatgagatgttcagaggcctgggggaggccatgcaggccaaggaggcctcctgggcccagcctggtgggagggaggccatgcggagtgtgaggagggagaggcggggcaatccaagtgaccagaagctgggagctggtcagaggagcccagtggagttcttggcggtgacatgaagctgctttttttaagctagtctctcagattggaatgaggaaagttggagacgaccagccaggggttcttgtcagaatgtgggcactgggcggcgtgggccagctggtgggggtggagtataaataggaatatggtttagagatgctgggaaatcctccccattccctccccctcctgagactgagaggtccccagggatgccaggctcaaaggcccctgcagttctgttgccaaagttgggcatggagagaaacccagagacaggactgaaggtcccatgacaggccagcaggagagctggacacgggatatctggctgagagagggctattgggtgggtgaactcaacactcttcttttcttctccaatttattgtgtaaaagatggtaggcaccagtttctgtgccagagcaagtggagaggaaacaagctgtttcctctggtatttaaggaagacctaaggaaaggttccagactttgggatctcaaaaacacaggacagttggggaaggaccttccttgagtgtctttaaagagggctgataaaaggagcagagagggctcctctggctgggagagtaaggcgggctttctctggaggcaggaggatgggggagatggaggccaggcctatcctggcccttgccccttgctctggtctctgatctgggatgttctgtacgcccaggaccagaactgacagaagggctccttgtcccatcttatcacttggacatcctgagcctcctcagagagtgcagaccagctttagctgggcccccaaaaaaggtcaaaaggaaaataccagaagatgcaatatgcacctctattccttaagcctcaggaagccagagagcagcag

SEQ ID NO: 58117 - DNA, 1023 bp, Homo sapiens
gatgcacacggatgacagaatcaaggcgccaggatgggcactctgccctggatacaggctctaccctcctcccccaggacctgcctagtgccagtttggtagtccccctttctggccccttggagcccacacacgtttcatctttttcccctctgagagcaagaagagacatggcatgttctctgggaccctggaatcctaggtacccacatgtgtgccaaagcctaccccacctggcaggtgtcccacagcaacagaaggaatagtagtccccactctttccatcagccctaccctaccctcattccccgacaccctctggcttgaaccatggctgagcagtgccggcatacgctttgctggcatgcttggatgcccagctgtgtccagaggtggcctgggaccgccagttgcacgcctgccacctcagccagcccccgcccagctcatcagtctgaatggagttgccttaaattggcaggtggtaccgtactcactgcccttggagctgtgaccggctcctgcctgtccaccccttcccgaggtggctcctgcttaccttatcatcccagggctctgattagccaggcctggtcagggtcctggggacggcacccagatatgcagagtcaccctgacactggtgccaggctgacctcagctcccgaaggctcgcacagcctccccatccttccttcccagcccttgtggctctgtccacctgatcccaataccagcttcccccagcccctgccaccccagagggcggccacgacagggagaggtgtagatgccaccatctgagggagaggaacgtggaacaggagcaggctctgatgctgagaggcttgcctccgggggctggaagcctgggtggccggggcccctgaagaaggctcccctctgtatcccccaggtctcctcaacactgggctgatcctgaatggcacaggccaaggggaggccagcctcgcctttctacccaggccccctgccctgcccacctcaggcccccaccctcca

SEQ ID NO: 58118 - DNA, 1054 bp, Homo sapiens
ccctaaccagaactttgcagaggatatattgttttactcttttattatgagaatttaaaacatgttaaagtagtatatggagctccaatgaacccaacactcaactttagcagtcagcaccggtttcattggtggccttgcacttcttttctgcactaggttacactaaagcaagtcccagatgtcacatcatttcaatgaggagggtatggtgagatgcagctcttcccctccctccagcagggcaaaagaggaggaaaggagaatggagtcacaatgagggagattttggaggccggaagatctagatgtgaggtcctctctgtcagtttctggaagtgtgactgacctagggtaagttgctaaattcatctgagtttccgtgtcctctgttgtaaaaaggggaataatatctacattatagtattcaataaaaagtagatgttaggttgtttttttttttttcctggtgaataaatgaaacatgggtggatttgaatagaactggaagagttggccctctcggtcagggcaggagttgagcaggaagctgggccctctgcagggtggccagaggctgtgagaggtggggtagggagtggtgggttccgaagggatggaaaaagaactctgactgcagttccaacccatctcaggctctgagagctaaacagcattcccacgggccccctctggccctgctcccagacatggcttgtgtttgctttggacttttccatgcatccgtttacatctccagatcccacatatggaggctcagctctcagggctggcttggaaacggaaacaggtaacaacggcacagggggccctgctggctttgctggagactcaggaaagggacagtttgagttcagaaggtggctatctgcatcttctcacctgtcagaggagtgctccccaaatgctcccctctcccttacaggtccccacataccgaaccaaccagcatctgcagcaccatctcgccaactcctgcccctgtcaccagcactgtggttgcacagcctaacaaaaagagaaggtttggttt

SEQ ID NO: 58119 - DNA, 1046 bp, Homo sapiens
atgaggtgacaaatggagtgaagcgcgcggctgtctccttccttcccatctgggtatctggacagctcttaccaacagtctgaaccagggaagaagataacttgagaagccaggtaaacttctaatgattttgaccaggtaccaggactcaatttaatttcctctacccaaccaagttttagtggagaagacttgaatagccattgagagagcgcctccaccaccacccagctttctgaaacagtatggtcgtgctggtgatcaagaggctgaaagtcttctcttgccttcttcacccagttttacctctggtagcactcagagttttccattccaattgatctgtcttgggtaggaactacaaaagaaaaacaaaacaggtagcatgtttcagcagctctgatgagttgcagtgatgattcattctgagagcttacccaggctgtttgtttctctgccattctgtggctctagagggagcaaagtgaaaagtcagaccccctagttctggcgaacagttggtggaggcagtttcctgagactgctgtctagggcttggggaatgtgtctgtctcccatgaataaggagcccattaagtgttattcatttaatgttcagcaaatattaattgaatgtaggtcttaaatgaaactcctgtgtgtgtgcaaccagtactgctgtctcagaagtgaggctatagttagtgctgttttgggggccacctttccttctgggcctttgtactgagcgtttagagcgtagatatgttcacccactgagagcggatggtgaatgcctgttcctttagtctttttgtgatgattttgctttttatagggaggacagagtctccgcctgggcaccttctcttaagaactggctttgcacacagccgatgcagtccctgggcactttgaaagcagtgggcaaaagggcaggtaagggctcagggttatgaaaattgctttgggactccccctgcctggggtctctagaagggagactattcttaggaggtgtctgtgccctgaaggagactttcttt

SEQ ID NO: 58120 - DNA, 1258 bp, Homo sapiens
gaaacaggagaatcgcttgaacccgggaggcggaggttgcagtgagccaagatcacgccattgcactccagcctgggcaatgagagtgaaactccgtctcaaaaaaaaaaaaaaaagcgcaaactcaaacagctgtgccagtcagctgacaagcattggtgttaaggagtccattggatggttcccatgttttttgttttgttttggggtcaaccgtgctgtcacccagtctgaagtgcagtggcacagtcatggctcactgcagcctcaaacttcagggctcaaatgatcctcccaccttggcttcccaaagcactgagattacaggcatgagccaccaccatatgttttgaatatgtcaccataattaaccaaaactatcttctttggtcaaggtcatattgccttacatgttgccacatctggtggttgacattcggtgttcattggacctcttggcagcactgattacttaactccttcttgagatgcacttcatgtgccctccaggaaaccacattttctcctgaacttcctatttctctggcttttctcatgtgcgctgctgggacttgttctttttctaaaactctagatgttgaagaatcccagggctcaatctgtccatctctacattcattccctagcttgtgtcattttagtcctatgactttaaatacttctttatgtgaccacaaaatttgtatcttcagctttgacttctcttttaaactctagacttctatatctaacagccttcttgacatccaagattgcatcataagatgatcatgtccaaaatagaactcagaatgtctccccatggccttccagagttaaatggcttcatcatgtacccagttacttaggtcagattccttcaggtcatcgttgattcttttttgtttgtttttttgagacggagtttcactcttgtcacccaggctggtgtgcagtggcgtgatctcacttcactgcaacctctgcctcccaggttcaaccgattctcctgcctcagcctcccgagtagttgggattacaggcacctgccaccacacccagctaatttttgtatttttagtagagacagggttttgccatgttagccagtctggtctcgaactcctgacctcaggtgatccatctgccttggcctcccaaagtgctgggattacaggcgtgagccaccgttcccggcccatccttgattcttatctttctcacactacacccaatccatcagcaaattgtcagtttc

SEQ ID NO: 58121 - DNA, 1623 bp, Homo sapiens
tgtgggcagggaagattaaatatgaaattcagtccagtcattttgctactggttagctttagtttgaggcaagtaaaaatttttgattaaaattagtttcttaaaattatgcccttgctttaccaaataatcaaattggctaaaaaataagggtatgtaactttgcattttgaagaacaaaccaataatttttcatgagccctactcgatcttctttaaagaagaccttcctaagagacaattagggatgagtttgattaatgggaaatagctctaggttagattattttaaattccatacaccaagtgatttaaccacagtggcagtggcagtttctgaaccgtcaagtatgaacatcacttaaaaattaaaagatgcttaataataaactcttaattttcattaagccaatctgtaattcagaagaaaagcatatgtctgccatgggactattgcagtgcgtctccatcagtgttaacacaggagagatatgttattttatgtgtatgtcttagtttgggatatgtggtagtaagaacatgtcaagagtgctttcttcaaacctgtcagctcaactgagaagacagttacttcattgcttattttttcccttgttttattgaaatctgtatctcatatccagtatctaacactttgtagagatacttacatataatgtaagtgcacacctacccagaggaatggataactgttaaagtgttaataatagctcgtcttagttgatttcagcataatttacattagggagacctaaaaagcaccttcaaagtattaaaagcaccttttttttttctttttcctaaaaaagcaattaaaatggtcactgctaacatttattaaacttcatgttagttgatgaaacagctggagggaagctgccacatctcctagctaagcagtctgacttacctgttgggaaacaaagggatattgctctaagattgattaggatgattgtagctagagtcttgaattctatctgtatacggcagagaaactttatagagtgtagagaggtgagcgaaaggatgcaaaagcactttgagggctttataataatatgctgcttgaaaaaaaaaatgtgtagttgatactcagtgcatctccagacatagtaaggggttgctctgaccaatcaggtgatcattttttctatcacttcccaggttttatgcaaaaattttgttaaattctataatggtgatatgcatcttttaggaaagatatacatttttaaaaatctattttatgtaagaactgacagaggaatttgctttgtataatgcaggctggctttacaaaagcactgtagcaaatttactacaagtctaaaagtatacatatatgttaatagatatatgtgcaactagatatggacagcagttgtatttttttaaataaatatttttaacaaaatgattttctgaattgattatttattcccttctctcacattcattgaggtggtctctttacagtctctgtattacattttcatccatgctaactgtgggtcaggaaagagttgttttcccaatggctatcattaaaatctggccttcaacaatttgatatgtatctacattaaaatatttaaagtc

SEQ ID NO: 58122 - DNA, 1054 bp, Homo sapiens
cttacttattgtgaaatatgaaaatccagagtggtttgtatgagaggggaaatactggctctaagctttctacagaaaacaggaaattcatgctgttgttgacataattttaaaggaaacttttaacaagaaaattcatgagggatacaatcaaacatagttaatctcttgagtgctaatcatttgagtatagtccacatcaggaagttttatgaggttgaaaactttactttgaaatatttaattgggagactagaccatttctttttccaagtcattctgatttattgtcctagtaaatgtatgtgtatgcatatatactgatgtattgactgaatgtgtgtgtgtgtgtgtgtgcgcgtgtaaatctgttttcatagggaacatacattgatggctcctagtctattttatactaaaacttaaaaaaatttgctgcactttgcagttgccactttttaaaagattaatgctttgcacatttcagtaggccttaaagatgaattgctcaccaacattttagaaatacactgcttacatgtgacatactctaaacaaagtcatagtaaactgttctcttaggttcatgtattattgagcaaataaggatgtcctttcttaaaatttctacatttatgtttgcttttgtgtaaaatctttattagtttgtaagtttctcaaagaggaggtttatactggaagcagtatttctaaagtacagagattcgaccatggattgaatacagtagtggaggaatgctggtattgtggcctaatttatccttttaaactgtatgtcattagtattagccaaaacctcagagtggagtgtcttgggctgaatgatcttctcaactttgccttgtttcccatctcataaaggctccttctggttcttttcccttccaaggattgtgagtcatgctcacataggcctgggatcttctggatggggtcggggaggaggtgggggtttcctgtggctggcccagagttctagccaatggaatcattcaagaatgcctaaagttcaggggtgggaatgccatatatt

SEQ ID NO: 58123 - DNA, 1827 bp, Homo sapiens
accaatctctcccaccggttaaactcgtcttctaatcctgtagaatcacatgaactaaatgaagaagtaagaacttgaaggctcagactgacactgttacaaactagcatcttcagatgcatggtatttactttaaatgtgcttatatacagtgtagagaagctcttgtataagaagacatctatgctagctaacttagtagtagtagagggaacatattcagtgagctgcctttatatctgtagtgtcggagacttgttactggttcatttgtggttatcagttgaaggttctgttcctgagatgtgcaatagtagtgttgaaaggtattgtttaatagtgatggggaacagacatattggacttttttttccatattaaattatttagtttgcatgcctgtttgaaattggacctctcagcagcactttgaaatagttttaattaggttaacattttgtacattaaataagtagatatagatggttgatttaactagatgtgttaaattttgaaagcacaaaggtattttatctttttgaattaaaggagaaaagccattgatttgttttcacagacagtatttttaataattaactgtctcagcacagaggtaccttggaaccaagggcaccattgaaactcagttgaagcaacttcctagtaaaccattttagtgagtcctttttgcataaatctatagcctctcagaggtgtgaggctgtcacagattggtgatctgctatctctttgagatcaactaatttggagaagtgtgtgtgtgcgtatccttttttaagtcaaagtttacaaccttactgcaggtgtatgaggcagacagttctgtttatagactacctccttcctggaaaagtctcagcttcatattctgttgaatatatgcagaattcttagtgtgaaaggtgatgtaccacttcagatcagttttcactggagagacttgtaattggtagctgtagctcgtatccatccctagtcactttgccaggatgaatgctgttgggcagcagtagcctaagttacggaaggggagcagattgaatggggttttgagacatcttctctgataccttagctttccttctgctctggtcgctatccactcagtcgtgtgctagaaatgtttaacaaccaggatctctggggtgggggtgggggggagcgctgaatttgtagcatttgctgcaaatataaattataaataaaattctaatataaattagaattttatatcaaattctttgatataaattagttactcctcctgtggctgatttcaagctaccaccttagagttcagaaaggatgtgcacagttggctcagagccagtgctggcaaaccattgcatttactccacccaagagtggattttcacataatttctaaaataattttttcttatttatatactgacttttcaaaatacaaaattaaaatatcatgtctgacttcagtgatctttttctttttctttttttagaaatgagatctttcagtaatcctttaatttaattttttagagatggagtcttggtgtgttacccagggtggactcaaactcccgggctcaagtgatcctcctgcctcagcctcctgcatagctgggctacaggcatgcaccaccacacctggcttagtaatccttctttattaatggtttgtcacagtacgtttgtgatgttatattgctcatggcatactttatgtgttcgaacaaaggtggaaatttccattgatttttttttttttaaatgtatgcacaaacaatctggattttgaggagtacggtcaggaaaaaaaaaaaa

SEQ ID NO: 58124 - DNA, 1083 bp, Homo sapiens
gggtttatgatttgctccataattgaattacactctgtagtgcatattgtcatttacttgaactttctaaaaccttcatttgaggttaattgtaaacctgtgtaccttaggatatgaaggagggtacaggttgttctttgtttctactccattgaggtaagttggagaatgttaatatttaatatgttaggacaaaagatttttgtttctagtttttgttatgacatcatattctttcatgataaacagccactgcctttgtcctgtgagccattacagaaggctgttgtgttttgcctcaggtaatagagtaggatagaaagtaaaagttggggttgagtaataggatgataatgtgttttgttttctttctcagtttccttctgtactgaacagtcatgggccattcactctgtctgggctggatggaccttccacccctggcccattttccccagacctacagaagacataacctatgcacttgtggaatgagagaaccgaggaacgaagaaacagacattcaacatgattgcatttgaagtgagcaattgatagttctacaatgctgataatagactattgtgatttttgccattccccattgaaaacatctttttaggattctctttgaataggactcaagttggactatatgtataaaaatgccttaattggagtctaaactccacctccctctgtcttttccttttctttttctttccttccttccttttcttttctcctttaaaaatattttgagctttgtgctgaagaagtttttggtgggctttagtgactgtgctttgcaaaagcaattaagaacaaagttactccttctggctattgggaccctttggccaggaaaaattatgcttagaatctattatttaaagaaatatttgtgaaatgaattggcatctttaggactaagtgtgctctgttgaatgacttaaagtgagctgttcctaagcagtggaagaagaagaatcattcctattcatacaaagtaagattggagcagtcatactggggagattgttttgtgtgaactataacgtgtaagcaactccatgaaaaggc

SEQ ID NO: 58125 - DNA, 1264 bp, Homo sapiens
gggactgtgtttggtatggctagatgaatttaggtgattttgaaagttttaagtaagtgatgtctacttctaaaatggagaacctcattaccagctttttcttttttttttttttttttttttttttaagacagactcttgctctgtcaccaggctggagtgcagtggtgtgatcttggctcactgcaacctccgcctcccgggttcaagggattcacctgcctcggcctcctgagtagctgggactacaggcgcacgccaccatgccctgcaaattttttctgttttagtggagacggggtttcaccatgttggccaggctggtctcaatctcctgacctcgtgatccgccctcctcggccttccaaagtgctgggattacaggcatgagccactgtgcctggccgatgccagctttttcatgaactatgggatataagtttataagaaaggataaaaatgcttttttttttaacctacagaatatcatcaaaaaagtgaatggtcagaagtttgtgtacaagtttgtctcttatccagagattttgaacatggatccaatgacagtgggcaggattgagggtgactgtgaaagtttaaacttcagtgaagtcagcagcagttccaaagatgtggagaatggagggaaagataaaccacctcagcctggtgccaagacctctagccgcaatgactacatacactctggcttatattcttcatttactctcaactctttgaactcctccaatgtaaagcttttcaaattgataaagactgagaatccagccgagaaactggcagagaaaaaatctcctcaggagcccacaccatctgtcatcaaatttgtcacgacaccttccaaaaagccaccggttgaacctgttgctgccaccatttcaattggcccaagtatttctccatcttcagaagaaactatccaagctttggagacattggtttccccaaaactgccttccctggaagccccaacctctgcctctaacgtaatgactgcttttgccaccacaccacccatttcgtccataccccctttgcaggaacctcccagaacaccttcaccaccactgagttctcacccagacatcgacacagacattgattcagtggcttctcagccaatggaacttccagagaatttgtcactggagcctaaagaccaggattcagtcttgctagaaaaggacaaagtaaataattcatcaagatccaagaaacccaaagggttagaactggcacccac

SEQ ID NO: 58126 - DNA, 1049 bp, Homo sapiens
tttagtatttatcaagcgtttgtagtgtcctgggatctggcacttcgatgagaaagctgtgacggccccaacttctaacagcgagtggtaaggaggacgagggacacaggagggaggagactctccccaaagcttagcaccaacagaagtggtcccccgcaggttgctctgcgagcgccacctcttccctccaaccgaggagaaagtggcgcgcctttgaggagtccgaggtcccggcccaggcggcagcttgggtcctggcgggttccggacgggcgcctcagggacctggaagcaaccgcaccgaacgcgacggagagcggcgagacgactccaggaggcgcccgagctacatcccccggccacaccaaacccgggtttgctggcagacgcggctcacgacaccccttagggtcgcagcccctcccccggaagtgacgtgtagcgactacggcgtctgggagggacccaggagcagtcggggggtttgagagtggcggcggccgcggagggcctggcaggccccgccgctgcaaggaacgccccgaacgcgcgcgcccggcgtgtagcggccccaagacccgcgccgccgctgccgcgtgcgggggcggggagggcggggcgccaggagccgcggcggcgggagatgcgggcggctgcgggcacccggcgggctcggcttggccgccgccgccttctacggctccgccgcgggggtcgcagcggctgccgcgccgtcctcgagtttccagcgtgaggaggaggctgagggcggagaggcgcatcgtgttcgaggcggagaccgagggggagccccgcgcgcggcgtcggtgagcggtcagccccgcgcgccccctcgggatctcgcggccacagccccaccggccgggagcgggggcgggggccgaggggcgcgcggcacaacaggaagtgggggcgggggccggggccgggcgcgcgcgctccccttgggtccgcccccggcccgccgggcaccgcggcgcacaggtggacgccgcagcgcaccgctcagctctcgtcgcctcttg

SEQ ID NO: 58127 - DNA, 1137 bp, Homo sapiens
gccgaatcgctgcaccagccggtccatgaccagagagaagaccagggagatggcgcactgcaggaacagccccaggctgcccatccgaacgcctgcagagggagaggggccatcagacagagcctgggagggaagggtcggagcagtctcagggagatgagaaggcggaaccacaggtacctgctgcacgagacctgctgtggaccagccctgctccccagcacccttcccctttctacctctagcaatgggagtctaggttcttccactgaccctcagagaatgtgggcaacgccccttgctgaaggcagaggaaggtagtctgaaggtttcctgggagtctcagctgtgaggacaggcgggtgagagggaacacaaagacagctggccataggcttcaagacgcttctaggacgcctgagctggaaggcgctggtgagattatttggaaagtcgttgggggagcagagggcacactgcggctggaaccaggcagatctgaaatccagccttaactcctccactccctctagactttgaataagctccgcctttccttctgtcaaactggggcaacgactctgatcagactcctagagcagccagaggccttcctgaaaccgcaagcagagatgttccacacccatgagaagccgtgtatgcagatggggtccatccccactttcctgacagagaagtcggggccaggatggagaggcaccagcccagacacagccccgagtgtcgtctctggtgggcggctcccacaccagcctctgctggctgccaaggccttaccttcatcatagtgtctccgggcctcggtgcccggctcagctctgggcacgccctggtacagcccctcgcccacgaaatccgtgtaaaacagcgtgaaggtcatgagtgccatccagctgcacagctcagccacgaagagccggcgcagggtgcggggcatgcggcagcacagctggtgcagccggggaagcagggcgcccaggttccggaaagccaagcgggcccggcatggacagcagtggggcgacaaggagggggccgacagcccttctgctggctcggtggggcccagcgctgcctcctcagccaccagcagtgtggctgctacgcaggtgagga

SEQ ID NO: 58128 - DNA, 1093 bp, Homo sapiens
gtcacttgcaagctttggcaagaagcttgccctgaggctgctgatgggagtggtggccagaaaagtggtactgaaagacttcttgttctctgacctccctgagcctgacaactgagaaaggctgggctcctccgtttgtgctccagggaaggcggccctggagcggggatggcgagcagctggacttagtgctcaggagtcctctgtggtctccttagcccgaggaccctggaggagggatgaaatgacagggactggggcactggaaagcatgcaaggataagaaaagggggctttggagggtagtgtgtgcttatgggcttggaacttctcaggcaattccgggctgggaagagtaaagtctgggggtatcaagaggactctggacccgctgggcagagtagaactcaaacaagggaggacggactctgccaccaaagaatacaggggtgcttgaagcctgcacccttcctagtcaaatcctttccccacctggcccaaccccaagttaccaggtaaagaatctctgggtggggatggggggcgttggagaaaggcaccccaggaactgggaggctactaatgagctatctgggctgtaggaggatggtggggggcactcttctctttacctctttctttttgtctttttcccatgtgggctaagaaggatcctgctaattcctggggggcctgggaacttgattaagggaggggcaaggcaggtggggtgattaatggttgctggacagctgtggtttatttttatttttttattttttagagaccaggtctcactctgttgcccaggctggagaacactggcacgatcatagctcacttgcagcctcgaactcctggactcaggagatcctcccacctcagcctcctgagtagctgggattataggtgcatgccaccatgcccagctaatttttatttatttattttttatcttatgtatttatttttatttgagatggagtttcgcactgtcatggggctggagtgcagtggcacaatctcggctcactgcaacctccgcctcccaggttcaagcaattctcctccttcagcctcccgagtagctggg

SEQ ID NO: 58129 - DNA, 1111 bp, Homo sapiens
gagggcgcgtcccacacgctctgccggggcgggtgccgagtgcccggcgcctgcacgggtccccgctgagctgtgctttcttccgcggagggcgggcaggcaggaggtgcccgcgctgtcccaggcggggcggcggtgtgggcggggagcggcccctccccggagccccgggccgggccggaccgggccgggccgacggctggcggaccggccgctggctcctgttgcagcctcccgtgtcagacttttctttggaaagttgcgtttattttcttctcttgtctgggcttcaccggaaaggggcaggatgagtcactgcggcgcgcacagtccgggacttgggggagccgggacgggagccgacggccgcggcgccgcggggtgctcaggcccaggccggctttcttgaggaagagtgagttattaagacagggaaaggggactgagccctcttggacttagaactggggcgagctctgggtacagagttgggactggaccgtgtgtgtgtgtgtgtgtgtgtgtgtgtgtgtgtgtgtgttactgtgtccccttttcagcctcagtttccccctctgtggggagagaaaggccgctgttttctcctcgcctcccaggtctcaggtggggaaggacagagttctgcaaacggcaaacaggtgtgatgtggtggtacctaggcatcccgtgcagcttctcagagctctgggcctaggcaggcttgctagaaaagccccagggacctgcatgctttctccctagtgcgggtcaggccttcctgtagtcttccgctccccccaggcactgcagtcctgtgagttgctcttgcccttgacctctgaatcagcctccatcttcctgacagacactcttgacctgctcagcttttccccactccagggcgtgttccctatgcttcctctttttccaaggggccagagttgggggtagggaggggtttggcatggtgggtacctggtgaggactcgcccttcagctgttacacagacccggtcccggtggagcagggactaagaatagcccagctgctgtcttgctgccctggagtctgcagccgggcattgccagttgaccagggcccgcagtgacc

SEQ ID NO: 58130 - DNA, 1006 bp, Homo sapiens
tggctctctgctaaccagctgggtctttgggaacacaatctctctgagtctcagtttctgagactgttaaccaggtcagtaacatctacttctcagggttgtagtaaggatcatacatgaaactgcctggcaaaaggccttgcagtaatatcttcaccctggaagataagaagttaataggacatcagtagcagaaacaaggagcagccttggttgctgagccaccgtacctttcattcttgctgccgagggacgttccctgtctccgtattttctctggagggtgggatgatggcgcaaactgggtaaataaggggaaaggagggcaggttggaatcctaccatccaccatgtctcagcgctcctgcgttcctctgtgcctccctgggtgccttgcttcagacgctatctgttaacttatacttgttctgtgaactatctggcaaacaacacacttcttatgacattctgatacttgtggatggagccaggcagaggtctctgttggaatgccctaacattcagaagggcaacaatcaggtcggcctcacaacattctcttgcctggtcagatctccctggttaggtggtgggtggagggcatgatggaaatgataggtaactagtaccccttgtgagacactgaatgtggaagctctaccctaggaaatgggaccataataataagagctgggcagagggatgggttgggagtacagtgagctccctcttaggcctctctctccaatgctgcagtggattcctaaaaaggagggaagggcaggtggtgggcaggtgagatgcagaataaccccacacagctttcttgttccttttcccttgctcccttggtgcagatgacttgagtttatttgagccttggagaggaagacaggccacactgggtatttcccaccagtcagcttttggctcacctccgcctccctacaggggcttagcagagtcagagtgtggtggggaggcctggaattcacatccacatcca

SEQ ID NO: 58131 - DNA, 1090 bp, Homo sapiens
attggggacagaatcctggggctcagctgggctgttttactgatgaaatgtgacatcctgtgttctcacaatactgaagtctcactagaatgctttttgtgggtggcccctatcatgagacccttacatagactgataacattttggcaattgaaccccagggacaagctataagatagacaccgccctcatcccccgcaaattctcttcaatctttggggaagaaagacccaatttcaacatagtgaagaggccgtttttaaaagtttgatttatgtaagttgagtaacagactgtataaatactgaaattttggtcaggagcctgttatcttgtaataccctcttcctctagattgctaagatcatcatttgtgcttcttggattgataagataactctcagaagtctgaagttcctcttgtcatgttatcttgctgaaggagatagaactagtcatttggctttggtaaaattttcacttgtctcaacccaatttctatcactgagttctgttaatgtgcatgacgcatgcttctccctcattaggccttttggacaagtgtcagcatttaaggtcgtgagaactggattttgttccctctgaagagtatgatattaagaaaacttagctgaaaactaggatagcattctttccccaggcttcgctttcacaacattcttgtggagtcagaatgctaacttagttggagataaacataggcaaggccaattctcagtctgaaggtgttcaatggtgaaggagtagagtgagaaataagcacctctgcttctggagccccctgtgtctacctacttgacaagccaagttagttcttgttatgtcagtcagacttgcacaggaagtttctttgttttgggttttttgctcttgatttttcctgttttaccataatttttttttttttttttttttttgagacagagtctcactctctctcccaggaatggagtgcagtggtgcgatctcgactcactgcaagctccgcttcccgggttcacgccattctcctgcctcagcctctcgactagctgggactacaggcgcccgccaccacgcccggctaatt

SEQ ID NO: 58132 - DNA, 1166 bp, Homo sapiens
tggcctgagtacaagataaatagcattcctaagctctgttgtagggaatgctggtgtgacttgaagtacacaggatatacacagtatctagttcaaaagagtggtttttgtgctaaaccttataaaatcaccagtcctgggccattggcaaagcaagtcagtccttttctcaccttgctttcctttctcttgccatgcacttaagggaagcaataagacctctaatatttagctcttgggctactcttctctagaagtcaacaccattgcacagtcactgtgcaatgagagaagcagatggctctctctctgggagagctaagtctaagtaaggacacactaataataccagacagtggaaacaggagttcttagagcacgtgttgcttccacaggtcacctctgaattagccagcaatatttattgacaatgaaaattgtggtgactatattccaccaaaaattgggatctgtgctacaatgaagagttctttcatattcctcaacaggaaaaacagtttaaggtatagtttggttctcatgatattggcatgtctggatacttctatggtttaagggactgaagcagacaatgttgaaaactggagtattccaggtaatgtatgtgaatagtataaaaagtgcaacaggtgttccacagcagagttcagaacagcacatcgtgctaactatagcatgagtagtcatttgttttatttgaacccccaatcacttttccttgtctggcgacctgctttggagaagctatgtggctggttgcagatgaagtcagatcaatcgacagggtgatcttgggcaagtcagcttatccgcctacctcccactctatgctcgtttcttctttttatataatgaggattataagggactgattctcctctgcttcaaagggacattatggggccgggcactgtggctcatgcctgtaatcccagcactttgggagacaaaggcaggcggatcgcctgagatcaggagttcgagaccagcctggccaacatggtgaaacctgtctctactaaaaatacaaaaattagctaggtgtggtggcaggcgcctgtaatcccaactactcgggaggctgaggcatgagaattgcttgaacccgggagatggaagttgcagtgagccaagattgcgccatt

SEQ ID NO: 58133 - DNA, 1047 bp, Homo sapiens
caacaccttgccacttacttgggttatcgaagccctgtgatcagtgtacccagttaacatcctaatgtatgtagcagcaatcttttctgaattttaaataggaaatagaatttcttgattcatgcacatctgtcttcttgtgttgttccctctttatatctcctaagcctatgtggataacatcccgaaatagaagtgcagactgaaatttcaaaatgcagctgtgaactctttgccctattttgaaacaggtgttgtctttgaaattgccttccagctcaaaagccttgtttcttgtacaatcagcactgatatgtgttcacacacaacaaatacttagatttgttttcaaggtaatatggtagtttgtgttcctttatcttgatgacttgcttctcttttcctccattatcttactagaatagataggtactcattttgacatgctttggctgggtcaccaccaagagaaatcagtattattcatgggtgtgccccctggttcaatagtaaaccctgcacaaatattgtgaaataaatgctgtgttaattctggggtcagggagtgagagggtacagccagagttcccatcctaataaagcaaataattactttaaactatgataacaaaatgttggaaataattgtttgccttgatttagcagtaagctggcacccagaagggatttgtttaaaaatctaactttaaggaacaggttgatcaaggaagagtacacatatatattattattggtaatgttttagctattaagttgaatacacaaacccttttattagaatgtgtaagaccacctccttggctgatgtacaaagcaatgtgtgtaatagttatactttttccatcttgggaagaaacacaaatacacagtctatatgtagtcagggctctcctgattataagagattagggtagatgggtaaagtaaggctctgaaggagatagaaagtcattgatccaagaaaaatgatagcctaaattttaggatatgataactaccaatttggtaaccctagctgattggtta

SEQ ID NO: 58134 - DNA, 6147 bp, Homo sapiens
acttcctactgttaggaatgatggaactatcaaatgttatttgatggctttagtttctgatcagattaattcttttccttccgtctttttgacctgctttttataaacaacttttatcataaacaactgttagtttaccaagcaattaaggatgttgtgcatattctatagcatggtgcttcttctttacaggtattactgctaacatcatagagtgttggtaaaaactgatgggaaatactgtagcatagtgtagtaacttatgaccagtttagaaactgagatagatttacctagggatatatgtgctcccttgtgcccaccttggtttttagtaagttgcatattgtctttatagattttattcttacagattgttgtattttgtagctgacttttattaaagacatttttttctcttcccttccccaaattatttttctattttcagtgacgccaagtccagtgaaaggcaaagggaaagtgggtcgccccacagcttcaaaggcatcaaaggaaaagactccttctcccaaagaagaagatgaggaaccggaaagcccgccagaaaagaaaacatctacaagccccccacccgagaaatctggggatgaagggtctgaagatgaagccccttctggggaggattaaaagtgatgatggtctggggagagattttattaaaaaaaaaaagaaaaaaaaagaaaaaagagggaggaaaaaaaagaacctacttaagatagaacatggttttggctatggcttgactcatgggctttcagtgcttttttccatttgttgaaagtaacatttctctctctctctctttttttttttttttttttaaagcaaaccattgtatgtgtaagtgtttaagttacctttttgtctattggtctctttgccagccctcccctttcccaatgaaagccatgtcaaattaatcactggattgactgcttcatctttttatttttaatgaaaggtgtaccacggttgtaaagcaataagatttgagatgaacactattgaaacttcgctttttgctaaaaaatagcaagttgaatagtaatcaaaaaacatagaaagattttagttcaaaatgattgctcctttctctacctggacttttaaaaaatcaattgtcatctaatatgagtttatttgtctatagacacaagtatcaatgtctaaaaaaaatcatgactttaaacttccaccgatgaggcaggtaggagataaagatgaattctgaactgttactaaaagtactcattttttaccttgtagggagggtgggcaatggggttacctgaccttatttgagggtatgggctttcttttttatttcatcacttgttatctcaaagagactcggagccagtgatccttttatcctgctacagtctttagggagctaaaaaaaaaaaaaaagcaggggctgccaaaactcttgatttcatatttccttctctaaatatatatgtatcctgttttttggataaaattttaccaagaatccaaaaaaaaaaaaaccctagaatttaatcaacaagatcagtctacaggtcacagtggatttcttttcaaactgacaatgtttaggttttaagcaaataaagttccagttaatgtgaaactcagtcacaaagagttgagatttttcctttatgaaatagaattgacattcttttatgctataaatgtgcattcaggtcccattaaccatgctctgcttttatttggggatagaacattttctttttcatatcccgatcttcccatttcttcatagaaatgtgataagaagtacatccctgtgatcctgctgcttcgtagagcaccactgcacaccctaccccgagtgccaaccacctctgctataggacactattttcctggccctattcttcacttacttcccatcctgtccttgactaggaatatgttaaatgctgctcccatacaattcagttagctcttgtctttttatttggtccaacccctgctttactgctcatgctgcttaaagcaggagggactagagaaacaaggcattttaggaggcctgtgtgcagttgaaaaccgacttttacacgccttataaaagcagtcaggagatagatccgtaggtttgatccttcacatctaataccaggcgctaatgggaacaaggtttaaagggtcctggtatgctaataaattgaaaaattagtgaaatttaaacttctgcctttttttcctgccttttaatctagatttgcttcctcaatatcctactttgtggtttactaggaacatgcttactctgatctttttttaaaaaacacacagtggcagagtcatttcactattgcactgtgtgttaaagaatgaataaggagttttcagttacatggccaaaaatacaggacttgaacataaatagcagttggatcattctctttcatgacggttaaattcagaggtgtgaactttgtaatgagggtgttaaagattaatctatttgcctaaatgggtttgttcaggtatccatttttaacaaagaagtttgtgttcatatagtaaaagacctatcagtgtttccaccatgcacttctattttttaggagtttataattttaagtcttacattcctagtaacatttgggcttttcttaggttatgtttcgtgaagatttggggggagggctcttttaaaacttcagcctcagttgtttaacagtctctttaatatattaatctgcactaacatctctgtgatatatgcacatattttagaggtaatcatgtcttctagattacttgtgtgcatttgattgggcttcttgtttagggtcccttttaaaattaattcattagattgaaaaatgtattctatatttctgatagactggacagaaggatctgtgtccccaagtgagacaggctctgaataacctttgttttctccactttttattgatgatttaaaacactctagtcttcccctcaaatcatgcatgcaaataggaggacagtggtggtgactcaactggatacaggtgctcaatagtcaggcttgatagtgatgtcaggacgcattacaagctgtaagccgatactgactggccattggcaccatccttgactaaccttcctctttttctctagtgtgcctatggtgaaatggcaatagcattcactgtcgtattttgcagtgctcaggaagtgggacgttaactttgaaggtgcttgtttgtattagctctgctaggtttacctctacaacgtagatttcagcagctatgctgactgacactacattctagttcttaagattttttttccagatccccccttccccagctagacatacgtagcatactttcatcttattcagtctttctgtaacctgctgctgcttttagtcctcctcacctcagatcggaatcaatggagtgggcccagaggatacattttaattccagtaatggtaggtagatttgtcctgctttctaaaacatctcctcatttcatatttccactccatattgattccataagggaaaattaatgggtgtttcctcctttagggaggtaatgcaaagagtgtggacatcttctaatcttgaggaacagtagttgatttcccttgaaggagcttacatattgactgttttcacaataacctgtttgccccagttcaatcctcattttaatacttaatttggtactggctcaaatagcattttcttacagataacaaatcaagagtgaaatttgaggttatactccagtaaagtttttaacacttgtgaatatggtcagctagactaaacttgactcttttttttaatggcttttttatctgtgaacattcagataagtggattttcaagtactggttggggatgggaatcgtgcttttctttaaacttcagtttacgagatgctttgagagcgttaggcaaaagcagaaataaatatcaggagcaacggggaaagctttataaaagatcatggtggccactgttgcagctttgaagaatgagtgctggcttgaacagttctttgcctgcatcattggtagctgcactgaaaggaaaaaactttcaccttaagaatttgaaaaggaagaaacctgggctctggtcttcatggcatttagactgagatgcttaaacagaacagaagtaatacgcatttcctgccataggatagggaaaatgtaacaagctggttgctcttgaggttagaaaattgtctgtttctctgtggatgaagctggatttacttgaaaatggagagttggcttattgtttgaatattgggacatcaagctatctatagccaagtttcagtcgcaaccagttttccctttgtctggggtaaattcgatacaaaatgattctttttgaatcctgaatccataaattacacttttttttttcaaattcacaaaattcacagtggtgctgactgtgtaataaccactattgggaaacatcccgtaaacctgcctgttgccatgccaatggagtgactgaactggtgacatctgtttgagcatgctttgtgtggctggtagaatgccaccgttgtgcatacactttgtacatcaggggtgaagggagggttttctagattattgggggagggtaaaattgggatttttttgttgttccttttttgatggggtgtgggggtatagtactcagcttatgccctaaaataacatgtataaaaacccctgaagtattgtgtgggtgtgtacgtgtgagtgtgtgtttgtatacatctggcaattaaagctttgtcttctggaacttagtgaattcttttctctttttcctccagaagtatttgttacaagatttgtaaataagagctctacttagtttgtttaccatgaacatgttgcagcaaaccttatgcatctaattcctacaaggttaaagaaaggcttttagacttgccaggttaagcaacagccaagttctcagtaattgtttgccttgatttatcttttagacttcattttgccagctctaaaactcccagtcttccttgattttagtccttaatcttttatgttctgagcaggaagggtaaaagacaggaacctgcttcactgtattaactagtccatgggctgagaccggggcatctcttttcttcatactgcaatgttgctagatacatgatcagacaccagagggttgggcattcttgcaataccttaacagtgctgaaatctgcagcatggtactaaggaagttaaagtttgaatgtaaccactttatttaaaaggtttttttctttaatttaaatgaaatggggttgaagtgaacatgattttgttgaccatgttcgtgaattacagatgcaacatgcattggtagaatcgtgtgatggtcttttgtgatacttaatttttacatatcccagtctctgtatgtatctgcatagacaaagaaaaaacaaactcctgctttgcttttattgaagggtttccaggactgcgtgtctgctcctgagctctgttttaagtatgtgtatcctttgcttgtattttgtattaaaaaaataagaaaaagaagcctttattgttgagcatgttggcattgtcccctttatttttttctctttttgggacatatgaagcaagttattctttttctgtatctttttttcttttgtaaactttttttttgttttgtttaaaaatggctttataaaagggcttttataacccagatgtgtgctctgtgtacttcttgtaataccttaaagcaaacacactaacttacacagctttgttaatcagctcccagttcagcctgactttgtgggaacttatttccctaataaattatttagaaactttaacagtgaccatccctgttgttggtaaaagataaacatgtcttggttcaaaagttaatacctcaggatggaatcaagaagcagtagacttaccagtttgattaattaagggagcactggactgggtgcgtaaggattcttaattagcattttttctcatgtttacatccaaggttatgaagtgttgtggaaagcaaagtttaacaatcatatataataaaagataatgtttatactcacagaacacacttgcattcaattccaaatacccataagaac

SEQ ID NO: 58135 - DNA, 1999 bp, Homo sapiens
ctgtgtccatgtgttctcattgttcagctcccacttataagcgagaacatggcagtgtttggtcttttgtgcctgcattagtttgctgaggataatggcctccagctccatccatgtccctgcaaagagcatgatctccttccctttttatggctgcatagtattccatggtgtgtatgtaccacattttctttatccagtctatcattgatgggcatttgagttgattccatcattttgcagaaatgttgaaggatagaatttgcccttttacaatgaaataaagctgcagattatatcctatattggccactgtgttggccttttcagtcagttatgttttcagtcaattattaatcttttgcactatcttgtcaaatataaaattctttaatcattatatcatggtaattctgatattgcagaggatagtgaagatgaaaaagaagatcataaaaatgtgcgccaacaacggcaggcggcatctaaagcagcttctaaacagagagagatgctcatggaagatgtgggcagtgaggaagaacaagaagaggaggatgaggcaccattccaggagagtatgtgaagttgttttgtgtactttggttgtttggtcataattgtagtttgtgaccttggttactttggcattttctaggatgctaaatgttacaaccagtcccttaaattgggtagatactccgtgttaaaagagatgactgtattggttcctgttaatatttttaaaggttcagagattctcacgattgcccaccatttgtaatggttgcaccctttatttaatgatgtctgtgttcaaacactgaatgaacaatttgcttaagtaacagtcacattaggcattgtgattgagatttgtattttgccctggtggaggaggttgtagacctcttttcacagaaaaaaacatgttaataataaaatttaggtgtttcacaggttattcagattagttaatcctatgtatttttgttttgtgtttggttttcttgtttcacttattcataattggaccaaaaaggccctgtcagttcagttttgtttccctggtctcaaccagtactacttggaagtgatggaactaccaaaagttatttgatagtttcagtttttattcagattaactcttacccttcctgttttcaatctacttttcaaacacatcactcatgtaactctctcatgtaaggtgcatgcaaaatccatttgacaaatgaggccagtgatgactccagtcaaattggtagtacagctccaaatagaatccaagggtgtttgactcccaaatcccatcctctagtcattcttagcactctcttccttttttacttggaaggatgtgtacattaagttagatgttgaaattcttctttcttctcagaagattccggcagcgatgaagatttcctaatggaagatgatgacgatagtgactatggcagttcgaaaaagaaaaacaaaaagatggttaagaagtccaaacctgaaagaaaagaaaagaaaatgcccaaacccagactaaaggctacaggtaatttctgcagaagtgaaattaaatttactgctttaaaaattttgagaatcattattttcaatacagaaattcctcattaggatttggcattggcctgatgtttagcaggaatacaagaaatctaaaagggtcttgtattctgcaactggaagtatctcttattaataaagacactagcctgtttaagagtctagtgggcttagccatgttcttcaactactgccagtacttgagcaagatttcagaatgatctatttgtttcagacacagtggtagaaacactgtgtcatcatagttgttactgctcttttttcctcactggtatcacagtctcagcagccagcaaagacttaattgtgaaaatgcacaaacctagagtaatacgtttaagttccacgttctgaactctaccccatcctctgtgctatcagaataaaaccacac

SEQ ID NO: 58136 - DNA, 1797 bp, Homo sapiens
agcaatctgcctacctcagccacccaaactgctgagattacaggcgtgagccaccacgcccggactacagttccttttaataattttagatattttagcagtttttcttgtgtatatttagtgatctttatttgccatcaacactatgtatttttagtatttttatactctgcctctgttcgagaatatttttcttattaaatattcttgtgaaccaagctttatccataggtgaaaaaattccagcctgtgttgagacagcttctttttttcctttgagtctttggaagcagtgttttgtaacgtaaataaaattgtgcttattcaccagcatccctgtaaataaggaaataaagtactccttagcatttgtttgaagattttatatagaagaggtatttttcacttcttctcaagtcagaaatcagagatctatgttcacttagattttgagctaagacttttatgcatttgcttttttgcctccctttatagtgaggactcagaagacaaagatgtgaagaccaagaaggatgattctcactcagcaggtagtaaactattttaaatgtaagaggtataattatatttgtatattattttattagatgttttaataagtgatttctatgccaggcactgttgcaaatctgggattacaaagacgtttccatcttcaaagagctcctaatgattgtcagtcctggtggcttattacagtcatctatgaatcttttttaaaatgcatattctgggtcctgtcccaaaatttctgattaaatagatctaagtgggatgttggggcttggttttctttaagtatctatacattattcttatgcacagtcaatattggaaatcatttacgtaaacaaaagacatcaaactaaatagaataatatataaatataaaacttggtaaaataggggcataaaaagggggagtggtggactctgggtggaaaagcaaatgaaagtttcattcccactctttttagtggagacatagccttttgtaacagtagccatagagaaagttttttttgtaaaaattttaacttaaattaatatgaattaatggggagtctccatggccaaataaaatgttcagtcctgatgattctacttgttgttggtatttatttttaaatttaatcttctaagaattgagatttttaatccatattacttccagccactttagttttgacctacattcccttgctgttgtctccctggatctccctttaaatgagactgctgtttagctaatacaaaggggagagacaaagttctgctaaattcactctgcttagctgttttgctttccctcctattcaagtatactatctggctacctaagttgaaaagaaactgtattaatcttttgcactatctggtgatcctgtgataatagagtatatgctttcagtcatttgccttgtaaatcctagtttgaatctcttacacttgctagtttattgagcacttctagataaataactctgtactagtattaagctaagcttctaccaagtgggtttagttttgggtcggccatgtcagctttattctgtttgtctctagatgagatttttaaaagtgaaagagatgacttgaacactgactatggcaaggctcatgggactagaagtgttttcagaaaagggctgtaggtagagactaaggcaaatatggtttagtctagaggcagtaggctggcagcctaccctttaaccaaatttattcacaaacacaactgtgtgttaaaaaaattttttttaggctgagcatggt

SEQ ID NO: 58137 - DNA, 1114 bp, Homo sapiens
gggcttttgaaattggagatattttcttcaagtgcaagattatgttgtatttaatgctttagtttaaaagtaatttgcttagtaatagtaattgtgtttacttcctaaaatgtttgtaatataaccatattacaataattttcaaataagtgtgaagatgttgaaatcaaaaggggagggtataaaatgatgagagaggtttagctatagaaagatgaaatatatatcataaggactagagggtaatatgcaaaaacgaagtgaaggtgataggactgcgttgggaaataatttagttttttaaagatgaaagaaactatttgggaaatcctgctcctctcaccatttaaacagcatgagagataattatgtcagtaaatatagtggtgattttaacatgtaaaaatcatagttaattaagtttgaaaaacactgtttagatgaagattatggaagagattcgggccctcccactaagaaaattcgatcatctccccgagaagctaaaaataagaggcgatctggaaagaattcacaggaagataggtaagaggcattgtttttctgttcctgcttacactgttaccactctgagatgagagcagtctctgatctctaaattgttggaatctcatatacttttgaaaagtacttactgtccacttaatattttgcatatttcatattatctcaggctgtgctcgagtatacaatttgttatctaaggttaatactgacactttcattgtagtgataacaaaaaataagtgatatatctcattcagtcacaaatcactggcacaattaattacaactaaagcttgtagaatcttaagttgtatagcctgctgccttttgctgtctcataatcaattctcctttgtttaaataatttaaccattttggagagtttcttttcccttagttttacaaatgagttgtgattttaactataattttgcctcataagaccaggatattaggagtacatggtggctcatgcttgtaatcccaggactttgggaggcctaggtaggaggatcgcttgagcccgggagtttgagaccagcctgggcaatataaggagaccacatctctacataaaaatttaaaa

SEQ ID NO: 58138 - DNA, 1124 bp, Homo sapiens
ggttgcagtgagccatgattgtgtcactgctctccagcctaggcgacagagtgacaccctgtctcaaaaaattaattaaataattttctttttttttcttttcttttttttttttgagatggagtttcacttttgttgcccaggctggagtgcaatggaggtatctcggctcaccacaacctctgacccctgggttcaagtgattctcctacctcagcttcccaagtagcagggattacaggcatgcaccaccacgcttggctaattttgtgtttttagtagagacaaggtttctctatgttggttaggctgatctcaaactcccaacctcagatgatccaccagccttggcctcccaaagtgctgggattacaggtgtgagccaccacgtccagcaattaaataattttcaaagtgctagttcagttctgtttatgaaagagaaatgtgtgttctgatgtcttagaaaaatcctacagttttatgattttaattagagtctcttctttctacagaaataggaaggttgttgattactcacagtttcaggaatctgatgatgcaggtaagttttgtggtttcaacaaattttaagttggactgaccagtggaggttaccagcttatatagttttattatgcttttggaataagttttacttttttatttttagatcatttaccaaaaccatgtcatgatctgtgtcaaccaaagcaaaagttgaacttacatggattttaacttttccttggtaaatcattgataataaacattaaaaagcttttttcttacctggttttggagtccaaagtttaaatgtccagtaattctgatacagtgttcattgcttaaaatatctcctgctgtcagccagtcgccatggctcatgcctgtaatcccagcactttgggaggccaaggtgggcggaccacttgaggtcaagagttccagaccatcctggccaacatggtgaaaccccatctctgctaaaaatacaaaaattagccgggagtgttggcatgcacctgtaatcccagctactctggaggctgaggcaagagaatcgcttgaactcgggaggcggaggttgcagtgagccgagatggcgccactgcactccagcc

SEQ ID NO: 58139 - DNA, 1035 bp, Homo sapiens
tacttaaagtcatttagagtcaaatagattctgcagatattctcactgttttgattttgtaatagtcaggacaggctaaccattcactttattaagaccatgcatatatccccagaactagttctttcctgaggtctagttttataaatgttgctgataaaccaggtctgtaaaattggaaaaggaaaaaaaaagtttagaaacaaaagaatagagtcaaatacatagatgtacataaatctgtgaggctttcatagttttttaaataaagcatcttttgactggaccaattaatttgtttccttccccttctgtataaagcttaacattaccataatttttgtgcattataatgtaactgtactatacctaaaaattgcttttgccttgaaaagcttagtaataaccttgtttatcaagtatacatatatatgtgtgtagcagtaagagtaaaatatcatttacaactttagcttataaatagggcatctttgtatataatgaatacataggtacatggtgatttggctcattttgctgttttatgtatatttgttttgagagacgggagattgttttgtagaaaagaatggtatttgagaccgggcacggtggctcacgcctgtaatcccagcactttgggaggccaagacgggcggatcacgagatcaggggagaccagcctggccaacatggtgaaaccccgtctctactaaagatacaaatattagccaggcgtggtggcacacgcctgtaatctcagctactcgggaggctgaagcaggagaatcgcttgaacttgggaggcagaggttgcagtgagccaagatctcgccattgcactctagcctgggcgacagggcaagacttcatctcaaaaaaaaaaaaagagagagaaaagaatggtatttgaattatcactgagatgagcagtatgagaattgtagcttgacatacttgtggtttatgctatgctttcttataacagaatgttaagtacttaggcttaagtgggggcctttaaaaaataatttt

SEQ ID NO: 58140 - DNA, 1060 bp, Homo sapiens
tgataggttttatgaatgctttaaacttaaaaaatgatttaaaaatttttgatctaaatggtaacctgaactttgccataaagtcagaaataaaaatagggagggctggatgtggtggctcatgcttgtaatcctagcactttgagaggccgagaagggaggatcacttgaggccaggagttcaaaaccagcctgggaaacagcaagacttggtctctacaaaaaaaaatttttaatttactggctgttgtgacacacacctgtaatctcaactccccaggaggctgagttgggagaattgcttgagtccaggagtttgaggctatagtgagctatggtcacaccactgcacttcatgcactccaacctggatgacagagcagaccctgtctccaaaaaaaaaaaagagatattttggtattacattttagtgagatgaacaagaaaacaaagacaatctttctgaatgatactagaaccaatacttttaagacttacatatttttcaacaaagtgacttaatcatcatatccaaataagagttagttatgtgttcaaaattacagtggtattctgggtggaacaagttaatacttataagtaataatagctgttattgatatttatataccttgcacaaatgttctgaaatgttctcaacactcttgttattcctgtaacaggtattgttattcctgttttacagatgatgagactgaagttcagtcaggggaagtaacttgcttgaggatatacaactagtaagagtcaggacgtaaattcaagaatctgtgtttttaacctctctgctatattgaaattttatgctgtcctccagttctagttattgatactcattttacattgaagagttagtttagctttggcatttaactatcatgtgtcacatagcaccagggatacattctgagaactgcatttttaggtgatttgcatgtatttccacaaaaccagatggtgtagtctcctgcacacctaggctgtatggtatagcctattgctcctagactacaaacatgtatagcatgttactgtactg

SEQ ID NO: 58141 - DNA, 1567 bp, Homo sapiens
ttattggggtggtaatactgataatatccaactgataattaccagtaaatctttagaaaacctattttgacaacacaggttggacaattctgtaatgagataatttttaaaatacgatactataagacaaatgtatacttttaaaatacttttgattagctgtgtttaattttatgattcctgggaagattttatttgaacaaaaagtgtttactgctaaaaagtttaactgtcactgatttaaatgaactaatttccttttttaaaaatttattagagcaaaagaattctgtgaaaataccgaggttttatttcaacaaggattttgacagcttcacataggtccttgtaagatggagaaatacaggcagaatgatagctcagtgtgagggactttgcctgagcagccttacccggagagggctgacaaataaatagattgttaccctggaagactgtttgcactgttgcctgaaaggattctgttcttggcatatcttctaattaatgatatagatgaggacactgatggtgtgctgattaaatttgcagatgttaagaagttggggaagataaataatatgctgaaatggcaggatcaggataccaaacggtcttagattatggaaaaggaggttttagtcattggaattacaatatatagtccactgaatgatggaacagtccaaaagggaactgaaatcttggattgcattgaagtatagagtagaataggaagaggagggtcataatcctgatttgctccccattccccatctttttataatcatattatgtttcatcctgggtgctgctttagtatttactaaatccaaggtggtatggaggaaagcagctagagcatgaagcgagtacttgaaatatgaggaagtgttaaaaaggagccctagtatttagcttcagagaaaaagtgggaatagtcatataaatttaaggaatgctctgaagaggaggggttagatttagaccatgctaatcccaggaggtggaactagatagaaccagtgagtggacactagaggcagattcatctccttgtaaagaactatttaattattggaattttttttttttttttttagaaggagttttgctctgtcacccaggctggagtgcagtggcgtgatctcggctcactgcaaactccgttccccgggttcaagctattctcctgcctcaacctcccaagtacctgggattacaggcgcctacaaccacgccgggctaattttttattttttattttttagtagagatggagttttgccatgttggccaggctggtcttgaactcctgacctcaggtgatccactgcctcggcctctcaaagtgctgggattacaggggtgagccaccacacctggcaattactggaattttcttagcataggctgccttggagatcatgagaagttctcagtcattctcttctagggatatttgttaacaggatacaagctaaaggttgaattagattgtctagggtccagtagctctactacatataatactctcagcaccaccatatctcccacccccacgacc

SEQ ID NO: 58142 - DNA, 2770 bp, Homo sapiens
caattctgtagcagccccgcagtgacgaatctgctgcctctcccacgggttttgctattagaggattttcaaggtgatcaaggcagacgagatgaaacaccattaaactaacactgagcaacgctgaaccctacataaatctttttttctagtctttctaagatacgaccccagacgaatctgcaactctggagtggaaaccagggggcgggctaagcagcgaccatttttgttttgcggccgtgcgctctcagagcatcttgactaacaggacccccacggtgaaggtggagcctatcagagagcagggcggggcctggaagacgtgatgattcaaacggactaatgatctgggcgcatctggcagaagtctccaatgagcaggcgtgttggggaggagcgcacaaaccctagtgggtttggttgcacggcggctttggcgcattttcggctggtttgattcatccattttgaagagacgggggagcggggggctcgtctgttccaggagccctgaaccaaagagcagcggagtttgagaagccagcagctcggggttcggcagcagcggtcccatcggctgaagttcggggggggtggggcgccgagcgcgcggggtggggggggtcctggtctttggcttctcgactcggtcctgtttcgacagcgaacatgtcgcggcctgtcaggtcagtgcggagtctgaggcctggagcgggttggagggggatgggggcgagtggtgaaaagagtgggggacagaaggctagagtccgccatccccggtgccgcgcgcggcctcctccctttcggggcccgcgcgcacccttgagcgtggggggccctgctggcgcgcgggggtggtggctgcgcgcccgtgcgcgcgcccctccccgccccgcgccgctgcagggctccggtctgctcagctgcctcccccacccaccgcactagagcgggcggggtgtccctgagccgccagcggccggagggggaggggtgtgaagtcagcgcccccaagaggccccacctcctcggggccgtccccttggagccagcgcggggaggcgggcggactcgagctccactccccaccttcagcgaggaggggcggaggcacccgtattgccccttcccccagcgactggcgcgggggtgggggccctgagccctctctgtagcggacgggggtgttcctggcaaagggggaggggcagcactgccaaccggccccgcctctgtccttcggggtcgctgcaggccccgcctcccggatcgggccgagcgtgggcgggacccgtttttttccccccgggcaaaagtgagagttcgggactggatcctggaaaataatgggctgctgcctctctccccacctcagagttttgagagagttaaccccaaagttcgctctttctctccgactagaaatgtccttcctcggggaaatgtccgtactcagggaggtgcgggttaacagcacggcccaaatcccgtgtggttctcgttccactctcacccgcgtacgcgtctcgggatatttttgtaaccctcttgtccccgagtgactttagtaataaaagggctaggttcgggtaaccatcagacttcattctcggaatttcaacaagtttgctattcccccagctgtcggtggaatcgtcctatgccattctccaggctattgtatggaatgtgccatttatggaggggtgtggtttagtccaatctgttgaggccttaaaaaggagagctgttgcaaataaatatttttaatgtaaggaattggcttctttgcatagtgtgttttctaaataaatagataaaggcttagtttttaaatgttttaacagtcgttgcttccccttcattccaagttgtgtgggaaacggaagtacctttaattagagttctaaagagaggtttgggaccctggcaagggttttgttctacaccgttctgtctccagactagatcatcctccaactggtggtggtatgagactgcgtactcctacacacggggtgggaatgaggagaaagctgctgttagctctgtttcaatcagcatctgtggtaactcacgatctctactctgaaagttatgctggccttttggcaaggagtctggatagctctttcagagtatagtttgcgtaatttttttggcataaaacttgaccaatgtatccatcaactcacgtagaatattttctttaggatcaggtaaaataataaaataaagatttattttacctggattggatcttttgtcttctggaagtaattactgtgtggtcaaattaggtcaaattaggaaaaataattcctctaccttttaaattttagttcactaagttttgatgactttattttattgtggtgacgttcttatctcatctgcctgaatttgttttcccagatttaggtattggaacatgaacagaacatttttactggaaaacttggattttttatgttaccatgtggggatatatatattaagcacattctatcagttttttggaggcattgggacttctgcacaacttttttattactcagtatgttgtttaaactaattttgaccttgtttatttcccctaattgaagagtgaagttaatatgttgtgggctgtttttttttttctttgccattttcaaattattaatttcagagcaagttggttacggagtatattttagtcataaattctttgtaattattttttaaaagaagtctttattcatgaccaataataaagcagaaa

SEQ ID NO: 58143 - DNA, 1055 bp, Homo sapiens
acactttgggaggctgaggcgagcggatcctttgaggttgggagttcaagataagcctggccaacatgatgaaaccccatctctactagaaaatacaaaaattagccaggcatggtggtgggcgcctgtagtcccagctactcggcaggctgaggcaggagaatcacttgaacgtgggaggcggaggttgcagtgagccaaaatcatgccactgcactccagcctgggtaacagagtgagacactgtctcaaaaaaaaaaaaaatctgcagagctgttgtctagtgggctggaaaagtcaatgttccagtttaaagcctgtcaggaaggagaattctcttttacttgggggaaggtagtattttgttctactgaggccttcaactgattggatgaggcccacctacattgggaagaacaatccgctttactcagtctgccaatttaaatgttaatctcatccaaaacaccctcacagaaacacccaaaataatgtcttggccaagtatttgggcgccctgtggtccagtcaagttgacacataaaattaaccatcacatcatgatgggtactgttttgattccttttttttatagtctaatttaatttgcaatcaagttaaagttcatctgattaagaactatatgttagtgggaataaagaaagcagataggaagaggaaagaggtattttatgatttattttgtatagaattcgtccctcagatctgtgagttgtatatgcctcttacactatctttgaaataagaaagtaagcaattcttcccattctgtgtttcagggaacaaatgtcttgaaatttgactgaaaggcagctggttgaatttgtaatacagccaaggcataactgcaagtcttctcattctctgtctccattctgtcatttaggtttctgggaaacatttggcctgaaaaacctattttagaaaataagcccagacatttagagaaacagaactgagccctttgggttttgaaactcttggtttgtgttagatatcttttgagaacatgttcatgtgtgaaatagagacat

SEQ ID NO: 58144 - DNA, 1439 bp, Homo sapiens
agacccctactctgtgcagtgctgaccacagctagagccaccgccccattgctcaaccagtatttatttccctaaacgacccttcctcacattcccttccctccacctctccttaccaagcacccaaaagaggatttagaactagcagggtggacatcatctggttgtttctacttttctctgcctagcacaaaattgggagaaaactggagcctccatccgcagtcacacgtgtacagatctggggatttggatgtaggctttttctaacttctctctcagaagcttctacagaaacccttccatctgtagcctcaagggcccacctccaagggaaggcttaggcaatgatcctgtttctaccaacactgcaccttatcccaggaacctgccctagacctccagagaccatattttctctccctccatttctacccagacctccaggcctccttctggaatcatagaaccgtagaattggaaggaattttagaggttttctagttggagttgtgtccaacagaattcattaacaccagcctgggcttgtttttcctcctccctctggacttttttcatcttttcctccacctcaaaaaatacttacacacagattcttcttgtacaggcatcaaaaccaactcctctgcccctaaggctgtgtccctgtggtctccagccacccctaccccagtcactcgccccttcctcatctctggaatttggccaggcagtcccagaagactctggagtgacctcctttgcctaaaaagcagacagataggcatgccccaggccctgagtgagcagaggaggactgtagggtgagagggaaagaaaatgaaggtgactttcatggaagtttcatttcttttccccgattgtaccaactgcatgtacttttggcctggctgcaaggagcaatattggtttactctcgtatccttaaaaagttacagaactgtgtcttaagagaattatttatagttactataactgaattgacaaatgtcaacttaactgataaattatatttggtaaaataaagaggacgtttatttagatggttggtgtttcctgtatgtctcatcaaaaagcagcttcaactgttgtcttgggcccctctgtaggccttaccctctcctcaattaggagtagaaaggggccaaagtgtgacaagaaatgaaacatctcggccggctgcggtgactcacgcctgtaatcccagcactttgggaggccgaggcgggcggatcacaagctcaagagatggagacaatcctggtcaacatgatgaaaccccgtctctactaaaaatacaaaaattagtcaggtgtggtggcgggtgcctgtagtcccagctactcaggaggctgaggcaggagaaccacttgagcccaggaggcagaggttgcagtgaaccaagattgcaccactgc

SEQ ID NO: 58145 - DNA, 1181 bp, Homo sapiens
agtcatttagggagcccaaatgtcaggcactgtgcagattctaggagattcaggcctgccccaccgtggtattctagatcaagggcatcgccaacttaaaagcgcatgtaaatcttgttaaatgcggactctgactcaagaggtccagagattttgcatttctaacaagcacccagctgttgttgatgctgctggtcctgggcccactagcgagattctgatctgagtcattcttaattatctgtattaatagaaggtaagcaagaacacagataaaatcaaagccacagatcatgtcaaatgtattttgaattggtatgcattgtctgctttatattaatattgaggtgacttattcacaattcaactttattaggactaatgttaaaataaacttgcattctttgagcccaaacaatggaaaagaatggaatgaaaagccacaacaacagaatgaaaagggtcaggaggaagccagcttgggatgatcatctgttacttaagacaaccgccagcagcagcttcaaacactatccttataccactctgccgagagaagacatccctttaggaaaagctgactccagcagccagccccctgccatgctcctggaaaggccaacatggcaggaattggagtgaccccagaatgaggtgacccagagttagaggcaagagggctgagtttctgcaacaagtaggatttaggtcaggaagctccttgtttggtaaacttgggagcagaatataatgctgatgtgggtgaccctgggtcgtagcagcatcttcctttctaaagagctcttattgtgcctgttgtctgctcaaagtggtaattgtggggtggagaaacacagagaggttgctggggtggaaagaggaagattaaaaagtaaggattatggccagccaagccctgtgatgcactgaatgggtctgatcatgtggcctctggctccccctggagagagaggatggctataggctgggcccttttgtctccccaggtgctgattctcctgtacatcgcagactggatggtgcactggatgtggggccggggcctggacccggacaacttctccatcccatacttgactgctctgggggacctgcttggcactgggctcctagcactcagcttccatgttctctggctcataggggaccgagacacggat

SEQ ID NO: 58146 - DNA, 1525 bp, Homo sapiens
aaataaaagaaaccacctaccctgttagggccagggagggagacacaatcctaaacctttttgcaagtcctcagtttcaattgcaagtaaagtagctttcaaatagccagtcctggttcctgcagtcctcttagcactaactagtggaatactgtctgaaccccagtttactcattcacaaaatgagaataaaaatagcccctaccttactgggttgttaagatgattaaaagagaaaatacatggagagcacttagcctagcacacaatcagtccttaatagatgttaaccaaagacattggtaggagagccaggattgattgtcttgggactagaactcaggtctcctgactcccggtccagggctcttcctacaggagtacacttgcttctcctagctgagagattgaggaaggtgtgtgggggtaaggcagtgcacagagaaataaaaagcctcttgcaggccagcattcagaggtttaggggccacagtcttaattcagagcctgttcagaaggagagttgctgtggctgaggcccaaagcccttggagatagaaaccaaacaaactctctaatctccccagcctcggccccagccctgtggagcccaactcttcacagctgagacaacagagaaactggactgaaggcaaaggggccagggattgcaatttgaggggggattgcaaaggatttctggggtgtcaggcagcccagggcagctcagctgtgtgggtccccattacccttccccacccacctccaggaaaacagaaaaggtagggccagactgagagtctcccaaccggcagaaaccctctccatctccctggttctgggtggcaggaaggggggttgtgttgtttgaagaatcatgggcttggtttggttccaaggttcttggaggaaaggtggctggcgtgctcactccctgctgattctatttcctcctcgagcccctgatctcagactacctgttgaacctcaatgcccgccctttggggcactgaaattcctgggttctgttttcacctcgtagcactgggaagtcttccagaaggtgacagaggtcttcatcctagtgcctgcgctgctggggctcaaagggaacctggaaatgaccctggcatcaaggctttccactgcagtgagtatcctggctgggaggagtggggcacagagaggactctgggcagcacagagccagagactgggagagggctacgagcccttctccactgcccaggcctggagtgtggggctggggtgggaagggagggcctggctgggcaggtgtagggagatcccaggctgggtgtcctgctcctgggcaggggctccctgcccaaagtggttcccaggcttggtttctggatgtcccagccacccctggactcctgccccaccccctacctctcaaccacctcgtgactgtttgtgcagctttgacaggcaggcatcatgctggttcctccacccgcacagatgggggcctcctctgatctccagcccctgctttgca

SEQ ID NO: 58147 - DNA, 1058 bp, Homo sapiens
atccctcaggagggttgctggtggggaggatggcggggatagctcctgctgagcctccagatggagcagtgcaggactgagtaatttttgcggaaaaagggaggcaaatagcaaactctatagctatatgatgaactcctaacttccttggggggaaattctcccagtacaagctgtcctttgctatagtgtaatgttctttttcttttctttctccttcccacataaggtgttccacactgattctcgtgactttaaggaccagggatttgaagaggtattagctcttcccaggaagggaggaagtttctggaagagaagggaaagacggcagacgctgcgctgggaccagcagagcctgaggagctgtgggaagctgacagagcccagccaaaggagcgggaaggagccgcagccccaggctggcactgtgttctgaaagatttgaactcaagctgctttttacggaagaggggccacttcagagggcaccccagaatttggttgagctcttctactctggatgccccctgctctgaggagcctgccactgagaaccaaagaagataagaggacagatactttttcttcaagcacagagctggtgggttggagtcaggcatctgcacccctagtggctgtctggtgaggaatttcttgtttcttcccagcttgcggcttcagtgcttgatggggctgcctgttggtggatcagtttttgcagtgcctggtaggagtggagagccgtgggaagaggtcctgcggcgcccaagcctgggttcaccccaagactaagttctttcccaagttagagaagaagagagaaagcaaaaagaagagaggaaagttctcccttcccctcctccgtgcctgtcatgtcctctaagccagagccgaaggacgtccaccaactgaacgggactggcccttctgcctctccctgctcttcagatggcccagggagagagcccttggctgggacctcagagttcctggggcctgatggggctggggtagaggtggtgattgagtctcgggccaacgccaagggggttcgg

SEQ ID NO: 58148 - DNA, 1050 bp, Homo sapiens
caactttccatcgaagggatatctcaccaatgcccttggaaggagattccatgttcctggctgaaatggtgcttttcgtaagaatagctataggctttcaagagagcccaggcattgctctgtagtgacccagtagtcaattttccagccaggccatccccttgccacttcgttggtttgattgctcatgtaaatttgttccaattcaagatctgattcatgactgtaagacaagtctcccaaaacatttaacctaaatctatcatgctgtaggttgctttccaggaagacccagctcttacatcacctatagccagtcagctgaaattgaagtcccagtgcttaaaaaaaataagtcctgtctgtaaaccctgaggctctgccttgctggaaagaaatcaggatatttaagcccatattgtacatgtatagaaatcaataagaaatcgaaccccctttgtttctaccctggaggtcctagaactcacgaagaacattgtggctgataacagagtccagttccatgtgttgagtgcctttgaccccctccccgtcagcccttctgatgacaaggccttgggctaccagctgctccgccagaccgtacagtccgtcttcccggaagtcaatattactgccccaggtaatgacttcatcagctgtggctggagggaggagggggctggaactgtttcctatccaatgtctacttccccacccccaccctagatgttcagcctgtaaacagctggctgcttcccctcctgatgagactagaactgtattttcccttcagagtggaagtgagaacgcaaacaggaaaggaacagaaataataaattaggtcagtcaagcctgggtccttgcttaacctaggccagccactctggcatagaggggagaattggcttagactactccctcctctctaggagccacagaaggggccaagatcttcccagagtctggttctgatccattctaggataacagctcagcaggagagctcagaatcctcagctcagaaaagcctcccagcccataccattt

SEQ ID NO: 58149 - DNA, 1012 bp, Homo sapiens
cgcctacctcacattagtgttttgccctctgcaatatgataatgaaggcaaaagaactttttgtgcacagaggactgtagaaaaaaacaatgactaattcattttcaatctttcatctctatttgactctgacaggtgccatccagattccaacagtgacttttagctctgagaagtccaatactacagccctggctgagttcggaaaatacattcataaaggtcagctgcaaatcaggggcaaggggtgggtggtagaaatagcaatggagacacagttcttttacaaagtgataaagaagtttattttgcgactgatcagaggacaatctaattcccataggcagagtagagactgtagatttgctcttggaaaaactaagccaccatatgtagggcaaagattgagagttcatccagccattgcattagagtacaaactctctcaaattttgccctacatgtgtgtcattcaataaatgttaaatcatcaaaaagtagaactaggatttccttctacttgtgcaactgcccagaactatgttccatgctcctcccacccctacctccttacacacccaaacacaccggtacatatacactccacgtactcaggcctaccccagattcattactaacacatttctaggcctctaggcagtcaacaactttgagctataacatcagtctttttccctcatccctaccacccattgagtacagagctgaggaaggatgggtcagaggaaaaaaggattcttggaactcctccctccccttatgaaaatctcatggagagtgatgagattaccttcctaaatctaattaaaaacaacccctccaaagttgtcagaggtgggagaaggtggcctaggagcagcaagcagccccctctctaacaccctgggacaaatggctctgggattagccatgcatggtggcgagcacctgtagtcctagttacaggaggctgaggtgggagggttgctggattccaggaattcaaggctgc

SEQ ID NO: 58150 - DNA, 1128 bp, Homo sapiens
gcatcaaagggcgtcgcgaatcccttctcagttcagcaaagaggaacgcgtcgcgatgaaagaggcgctgaaaggtgaacccgggtccccttcacccacctatgctcatatgtgggtccctccctccccaggtcaacccgtgactccccgcttccgccgcaaagcatctgctactgcagctggagccccgacacgcaccccagcccggccccaacacccttcccagcacatcgtgcccctgtctggggacgccacacttcccccatacctggctcctggaactctggtgtgccctgcctaacctggaagctccaacttcacccctcttggcgtgaccaccgtccattctttcccctgcttgcctcgagtattacaccagctttcatttgtacatcaattttaacctttgaaagtttgcatgcctgataaattactgcggtgtcgtaaaataagacaaatgatattagtcttatctacaaaggagagaaattgaggcttaggtcagctaaatgatcttccccagggccccacagcaaagagtgggcagtgggtgacagcatctagtgcctgtcggactcgctgggatcagatggctctaaagaaagggagtggagtgttcccggggtgtgggatgttcctaattctcaatcataattgaagaacatgtctcctctagatctctaatccagaccaaaaattcatccctgttctgaatctgcattttccaggaaacaggaaagtttctgttgagtgctagatcctatgggatgaaatccttctttaccattcagcttagctccagtcttttccctttcattaagtaatggattaagagagactgcctgcataaacatatagaagcagatgcagggaccaaaagctaaccccaatagttggatatagattgttcatatgctagagtgacaagcctgggaggcagagcagggctttcccaaagcataaataattctctaaaaggcattagacagccactcacagtctgcacagaagagaacaaaagctacataagctagaatagggacctcatagcaacacagcttggaactctgagcaggggacagaacacctgagatcagatccttgggtctgcccttgagtaggcacttg

SEQ ID NO: 58151 - DNA, 1045 bp, Homo sapiens
cttggaggagtggtgaccatcgaaaggagcaagagcaagcttaccgtaacaccggaagtgcctttttccagaaggtatttgaaatatctcaccaaaaaatatttgaagaacaataatctatgtgattggttgtgcatagttgctaacagtaaagagagttatgaattacgttatttccaaattaaccaggacaaagaagaagagaaagatgaggattaaattttatttatctggaatattttgaatgaattcttgaataaaacttgggaaccaaaaagaatgggcaaaggatctgagcagacatttctccaaagaaatgggtcacaccagctcattgctgtagcagtgatggagtaaaaaaggtaggtaaggaacgtgagcagtatgtgggaggtgtctcatgtactttactagggagcttgaagtcttccctgaagttaataaaaatccaacaatgcaataaaatttatttttcaagttcaccctggcagcgctatggagaaaaatttagaaaagattaagatgagagctagggtctgtagattagcttttaagggttgtctgttatatgtaaaattttgtgcttgtgtgaccatgtgattcttctgtggagaggttcagagttattgttggattctcaaagggctccatggcccaaatagaggagggtgatcattaaggcatctaatgcaactgtgatgatgagaacatgaaccaagactgtgggtggtacggccaggtgtgactggcatttctccaggcatatcatcctgagggtatggttggggtacaaaatgctgcaagcaggattatagtcaagcactgcatagtgacatttcagccaaatggaccacatatatgatggggtcccagaagattatcacggagctgaaaaattcctgtagcctaataaccatgtagctgtcataaagtcctagcacaatgcattacttatgtgtttatggtgatgcccagtataaacagacccacttgctgccagtcatataagagtctagcacatacagttatatacagtacataatac

SEQ ID NO: 58152 - DNA, 1055 bp, Homo sapiens
atcagctgcacagcctccaaaatccaaggggctttaactctggccccaaacttacaacctctctccaaaacaatagcctcatagttcacttgactatcctttttagaaggaccatctgttgtcacccaggcataccccttggggtcttaccttccacccccatccccaagtggctcatcaaggtatttactccaaccctattgagtactctctgtgagatttctgatttaaaaaaattttcgtctttgaagttctatttccagtgatattttagtgcactagtcatgttttaccccttgtcatagattgacagcaaagggaattgttcagctggttggtcaccccttaatgtaggttctccttgaggaatttgagaaatgaagaggttataaagcagcacccacatgtccaacactatactcttcccacaggttcctctacttgtgatataattagctctccctggtgggtccatctctcccctgcacccagactgcaccccacgccaccccctacaggcctagacctgtctgaattagttgagtaagtatagatgaggcttacatgctggtgcctcagttgacttgtaacccaatagagaagggacagggatttatgattaagaggccagagaggaggagctaacagctcctgggttttaaaatatcaacaatactaatactataacattccattgtaatgttctttataatgttcaaagatcttcgaatcttttttttttttttttaaagacaggatcttgctatgttacccaggctggagggcagtggtgcaatcatggctcactgcaacctcgacctctatgctcaagtgattctcctgcctcagcctcctgtgtagctgggaccacaggcacctgccaccacacctggctaattttctgattttttatagagacaaggtctcactttgttgcccaggctggtctcgaactcttggccttaagggatcctcctgtcttggcaccccaaggtgctgggattacaggtacacaatttggtgagtgaaagaagtgaggtcctctcagcctttcc

SEQ ID NO: 58153 - DNA, 1002 bp, Homo sapiens
aacctaccataaatataatatgtaatggtgaaactttagatgcattctcattaaaggtagaaacatcaacgattcctgctctttgacattgtactggagtcttagcctttgcaataagacaagaaaaagaagagctaaatagaataggagaaaaaaattattgttgtttgcagacaatactgtatgtatagataatccaaaattatttacaaactgcaggaaaactgctggatataagagcaagacacaaaaatcaatattgttcccatatattgggaataaccaatagtaattagaaaatgtggtataacaaaattatatacacaatggcaacagaaactgtaaggtacatagaaataaatctatcaaaaggtgggaagacatttttgaagaaaattataaaacattattgaaggacataagaatagacctgaatgaaatcataaatatatcaattatttcccaaattaatctctaaagtcaatgcctcaaaccagaaactcaataacagaacttttttggaacccaataaactgataccaaatttcaccatttcaaaattttgagaaacattttaaaaataagaacaaagggaggcttgtttttaccaagaattaaggctcattagaaagctgttgtacctaaaatagtgaaatattgggatagggatagaaaaataaattaatagaataggccagagattccagaaatagcctcatataaaatttgaaataatgtattatacagatgatagttgagaaatgatggacaattcaataaatggagtaattggcttgccctgctggggaaaaaatgaagttagattcttactcaacacataatagaaaaataaattccagttggattaaagctctaaatatgaaaaacaaaagttaaatttgttagaagaacatacagggggaaatatttctattctcaaggtacagaacacaagacacaaaaagccaaaataataaaaggaggaattgattgcatcataat

SEQ ID NO: 58154 - DNA, 1059 bp, Homo sapiens
aatttattcctaaaagtgtatacagaagtcaaatggttgaatgtctaactacagttttatgtggggtaggtaggttctattattataaataagtgtatatgtgaaattcgaaattatccctcacctgatatatttttagcattgtataccttgtctttagttctgtttgtttttccacaattaaactcgtggcctgcctgctcaagttcagtgaatacctaaagagtccacgtagctgatgagttctgcccttatcttagtagtacagtgatgagacctctacttctcaatgcaacattagtaacagcacttttgtttttccatttccactcatttttgtgttgcaaaagataaccaagtgttaaaatgtgtgcacagcacaagcattgctgtgcagagacaaccatcctgctgaaacagaattggtacctggcagtcagcatcactaagacaagcttgaaacatttgctggcaactgaaaatttgacattggcataggaaaggcatcttaggcatgtctgatttggtaaagatataagtttggctgatgtaatagaccccaagtaataatggcatacacaagatagaggttgatttctctctgatgtcatagtctaggtgttagccatccagggctgtcaggcttcttattccatcccgagagtgttatccttttctgtatgacccaagatggctcactgccaccatgttctcattccagccagcaggaaaaggcaacaggacgaggggcaggtatggccttattttttaaaggtgcactctggaagtggcacacacagctcttcaactcatatctgactggccagaacttagtcacatggttatgctgaactgcaagggaggctgggaagtgtagttattgttctgggtgactataaagtagaatttctctaaatatagaagaaggggaaatattgggggacaatcagcagcatctgccatggtgtatgaaaggacaagtgtaggaaagaccatggccacccatccatacagagtgccacaggtgcacaaagaagagagatttcttctgattggagg

SEQ ID NO: 58155 - DNA, 1780 bp, Homo sapiens
tttttaacagaagttaggagaaagaattgtttttgaaggagtaaaatatgagaaatttggttttggattttaagtttaaggtgttggaagagtattgaagctgaaatttctagtagttgacaaaatgaatggctgtatgcagggctaaagagattttttggctgttggtagagatttgcacacgtgcacagaggggatggttgaaactgtggaaatatttgtgatttccaatagtaagggtttagaagaacaaaggggaaacttcctttgtatcatctgtgatactcagattacagagtgtataaaggaatttaaatgatatatttatttgtgtatcattgagtatacattttgggaacctaattatgtatcaggaattgggtttagtactggagatagagaagaataagacaatctcctattttcactaatattaaattagcagaatatcaaggaggtagacatagaaagtaaactttcttgtttggctggttatcagttgtgtcactattggaagtgatgtgagggagcagggcctaggtatcttaagaatttggtagacattcaacctgcaatactcctttcagtgggaggttagttacacaattaattaaagaaaaattattgtagagtctgtgttctcggcttcaggcccagtatttgaatgtgcgccatctctgtagttacatcactactgcggatgggttcctcccctggagttgagttcaaagtcattcaccagtctcacaggatagcattgggttgaaaagcatagagtcagctggccatggaaaatgttatagttgtggttgcaaatcggaaaagggtggaagaccagaaggttcctcattgacttatggagtgaccttgagaaggaaagtaccaggaaacatgaagctcccgggagggagaacccctgacttcctgggaccagtgcgtcactcactcattttggacatatttgggagctgtttgttccctcaggaaagattttgcccagatgtagcatctggtgttgcaagggttggcttcccttctccatggctcaagatgcctttgttcagaaattaacagaaggttctttggtgtgttttgcatgggcccagttcatgtagaaccttaggtcattgttgagtcctttttggaggaagagttgggaggacttctcacacatgggtaaagcagaatggaagagacgcaagaaggccatttgggaatcagcaagacagggtgatccagtctttggaagagagaaagaattcagttaaaagttctttgggaagctttgtgactttgtgtgggaaaaaccagagctttgagccagaaaaacttgggtctgaatcttgtctcttctactcctagcttgtgaccttaagcaagtcacttaacccctgttagcctcaatttcttacctgtgaaatgttgacagtaatacttaccttgaaggattcttctaaggatatatataatgtatatacagcactagctaatgtttgtgacttaatggatgctcaataaatggtagctgatataattatcaggaaaagtcaatcctgatagttaagatcagccacagaagagtcagccctgatagttaagatcacaagttctgggaaccagatttcctgggttcacaatcctggatttctcccacttacttgctgtgtgattttagatgaaaggttttaatcacctcagtatcctcgtttgcaaaatgaagataatattcataactaccttatggagttgttatgctggttaagtgaattaataatatgtg

SEQ ID NO: 58156 - DNA, 1098 bp, Homo sapiens
ttagaagcaaaatatgcttttatgagcaattgggaggatgttggagactcctgagagtttcctgtgtctcctaggatttgccactggaatgtcagcaggccatacctcaggcgttcagctccatggagcaaagacagtagtgatcacgttccttgacaacagtgctagtgtgcggggagcttttagttttccttttctctgctcctgtaagccccataataattctgtagcagacacaggaagcaatgtgtctaactactactaggcaatgtgttcttgggatttttaattctcaggaattcgcagccaattaaatgaatttactttgatccagttctcttttcaaggcaaaagctgtgtcatcttattgggagctgactgtgttaagtgggagggtttacaagataagaagaaaagacagtctctgccatacgtgtttttataattgaaatgggggaaatcgggcaggctgagagagaataataagaacacatgtgcacaggaatttaaaaatagcaccccatttaaagcaggttccagtagtcaccaggaaaagaagaaaggtggagtactcaggagggacttgtacttggttcagtcagggaaaggtaaaagatagtatagttatgttctcaattagacttgttccctggttaattgaagtaaagactttaatatctaattcctacactgcacagaagtatcacacattgaaacagtgtgacatgggaaggactcactgttaacgaaagatttagagagaatgaaaaaaaaagtaggatttgggtttttcagagttgaaataggttcatcttttctgctagctcctccttttatacatctccactgtcgttgctccttgggttttaaattcagggagaatcaatgagcacagttctgcgtcttaatatatttagggtgcagctgtttaaagagccaggattagaaaatgaatcgaacaaactaggattatcttcaacagtaggatgctgagctgtgtttgctgattcctgcttaagcagtcgggacagggcatccttgcatgaaattcagacatccctccctggcagcctctgtggtaaagtagaggttgcagaa

SEQ ID NO: 58157 - DNA, 1166 bp, Homo sapiens
acttgctaatttgatctactaacctggaaattgactagggcttctcttataccactcagccctttaaagttttgccagtaaagtatcaacatggttaataatatgctgtaatttagagcacacaagccaatggacatacaaatttggtcattcagtagccacccagagagtgagcacagatacacactggagcagctgatttggcaagattggtggaggctgaacatattaactagtcattaaatgaatcatggtctttctgtcctcaacatttacaggattgctttggctctggcatctgttgttagtcaatactgattaaggacccacctattcttggtgataggtgttcattaaacattctaaatataccctgtcctcaagagaataccttactgggcctgggggttgttcctcctgcacccccacacaaaaagagacttccttctaataaaggcaagataaatatccaaataacacatgagaactgataatgacacatgcagccaatctgatgactgtgtagacttcattccatttagatctatagtttcacagaatcaagaattttatttttttcccctccttttcattgttgttatgagccatgtaaggggactcattgtcccagggacgggtatttgggagggggagatctttatggataccctttcttctcagtggcttattgctatttggcatactaaagtacaatttgctagccaggaggagtttctggctgtagatcaaacttctccgctcatgcctggtgccagagagatgcttgctcttaagggggtggttactgctttgataataagtgtgtggatttctgagtgacgtcattccactttggcacagacaggtatttatttctctagaatgaactaccaggggtgagccagactgtctgcctcagtcatttcccaaggtttcatttattttaaaaatctgctaacacatctgtgtgtatttttttttctctgtatgtttgtcaagtgctataattacttatagggcttctggtgacatcttaattaactagagaagaaaaaatcaaagatataattgtagagttgttcacaggtttttctatggactttgtggatccaactgtcaacatgatattgatggttacgaattctttttaagctgagaaacgtata

SEQ ID NO: 58158 - DNA, 1046 bp, Homo sapiens
ccttggtgatttttaccccctccttcttttaacaccttccccagcaaatccaatccatcctctggcttatctgggtcagcaagggtctgattttatgcatgacactgtcagaccataaatccgctgcagctttgcctctctatccagcctgcctgcttctgtcagcatcagcaaaatgcataatagagaaaataagccagaaaggctaataacactcatctgaataaaataatctctttggctgcctcagttcatttcattttaatcaaggtgccaggagggaatttaggttaaaaaatccagcctccttcttgtcacaagttccctgtccaaccatcacttaaatgattccttttatcatgcatgtacctttttttattcaccacatacttgtatgttcaataacatatattgaatgatgtatttaactctttaagttttgtctatcatcacagataggtctgtttttaaaagcgagaaattatattctgcttagatgtattgatagttgccatctctctatgcagattggcaggtttgataggaattctgagacaggggatgggagcttagtataagttgctgaagcatctagggttttggcaatctgtgctccctttggattcctttctgtcaacctcagcacacagttcccagtgtggaatgcaggactgattgttctaccttgtcccttagggaaaggacagtgggagattaaaatctgctctcctgttggtatctctctcacgtcttcccagagccttacggctgctttgttaattgcctgttgctgctgtcttactcaaaccattatttgctgaaggctgtgcattttcagcaggcagcaatcttggccctggcccagagccgggtgagaagcatgttggaaattgatgaaagctgagtcctagtttgtttggaaataaaaataataatatttcttcacatttgtatagtgctgaactattggcatagttcttttgcatccatcatttcatttgatccacacaacagccctgagaggtgagcaacttagagactattgg

SEQ ID NO: 58159 - DNA, 1050 bp, Homo sapiens
tcagttgaaaggaagaatatgtctgagaaagcttacagactcaaaggaccagaaatattgtgtgaaaagctgcattaatagtaggagaggctgagaactcctggaagaaacagccaacaggatctagtgctggttttttaagcatagactccttttttaaaataaaaatcttgcatagagcctcaatatatgaaacagatcaaagcagtatttttattggtataaatctgcttttaaagtacaaatttatagagtacttattatactgtcagtcaatgagaacaatgaggctgttttcatgaactaaaaatattgagatcaggattatgaatcagttatagttttatattcatttcagcatctggttttggtttaggtagtcagtccaatatcaagaaaattctgattagcatagataagttattgtaatcttgagctttaaattgatttagatggaaaaaagaagatatttttgttttaaagttgagtcactatcatcacctagcagctattccccttcataaatattaattggataagccccaacatgtataataggcatcgcaacaactgatgatgagatggtatgatattaagcatgttgattttcgctacccaaccacggtctaacatgaacccagcctaggcccttgagccttctatggcatgtgattgaaccttgctgctgtgtgtcaagttataggctcacctgtacagctttattggaggaggcacacacaggcttgaatgaaaaaataaacctatgcaaagctacatgtattctaattaatagcatattgttcagaagttccaaggcatacagtgattctttcttccagggtttacataaaacaatgctagcagcctgcgagacattgcagtggtatctaatgcagggagactgggtcctgggtctcttgctcatgtcagtgagggttgctcatttgaatggatgtgtcaccgttttttaaattgaaatgtgattttctgctaattccagagtatctcagaacacagtttaaaagctcctgctctctgaaaccaatacta

SEQ ID NO: 58160 - DNA, 1351 bp, Homo sapiens
aaatcctattagatattatgttgattacctgggtgacaaaattatctgtacaccagacccccatgacatgcaatttacccatgtaacaaacttgcacatataccccccttgaacctaaaataaaagttggaaagaaaaaataaaagaaagaatatcttattggcccacttcataggctttccactagtcattccctaccacatacttgcggagaaaaaaaatatttgaattggcattcctttcttcctttctgagctgaattaatagtagccttgggaaaggaaccatttgcaaggtataaacccagggctggtactataattcataatctgcatctattaacaaaaactgtgttttgggaagttttcttaaagtgatttgtgaagctgttgagcttaaggggccaacactgtcattttatgttttcctattctagttcatttagcaaactcatatacgtttatgtttttagtttagttttcttcccagggtcttatcttggccaaggtagactcaaaagtgtggttattcttatcgtggtatgtctttgtctttgggtctctgaatgctttcggaactcaattgttatcgtacttccttgggtataggttgaacaatttgacaaaggaaaactcaaaataatcatgataatcttaaggagccaattcaccttacctgtcaacgatggaactagcctcttgaaaatccaggaagctcttttctaagctgtctcagcttgagctcaaagtggaatcatttattcatgaggttgggttacagacagcggtgaaggccccaaccattgtatatgatatgccatgtctaccattcaagcattgacatccccggaagactttccagaaggcaaataatcttcctaaaagttataggtagaaaaagattatagagggctatttagaattcatcagtttccaggtgacaaaatccattattaaaatttgaaagtatgagagaaaagactggtaaacaggattgtagtcgatacagtcaaagctcttgatcagctttccagttctcaggaatttttccagatttcactagatctggaattaataccccattttttttctgtaattaccagcctgatcaaataactgatttggaatcttccatctacctaattgcatccgtgaaggtgctttccctgtgtcttagagacagaatattgagggtacaatcatctgacgacgaaaagaaggcagagaaagataactcctcccagagctcactggcttttattagtagcccggctgtgctgtggttggggccacacctcattttggagtgagggtacttctcaccatctcctccatggtttccagcatcagct

SEQ ID NO: 58161 - DNA, 1023 bp, Homo sapiens
caagtcagattccctatagaccagtagctttcaactttgcctgggcatgaaagttacttggggagttttaaaaaaatctttgtgaccttgaataaacaaaggtttcttagaatataaaaagcatgaaccataaaattttataaaggataagtcagacttcatcaagtcttggacttttgttcctagaaagactttatttacaaaatgaaagacaagacgcagactgggagaaaatatttgtaatatgtatctgacatggacttatatcagattatagaataaagaactctgagaactcagtaataagacaaactacccaaatttttaaaaatggaaacaggttttaataaacatttcactaataaaaatatacaaatggctaatcaacacatgaaaatatgctcaatatcatcactcgtgatggaaacgcaagttaaaactgtaagaagatataccatacattcactaggatggttaaaattaaaacatctggcaataccaagtgttaaggaagttggccagaaccctcatatgttgctagtgagagtgtgaaagtggtacaaccactttggaaaatagtggcagtttcttatggcattaaatttgtacttgtcatatgacccagtaattccaggtatttataggcatctacccaagagaaataaaagcatatgtctaaacaaagacttgcacctgaatattcataaagcttttgtgataggctgagtaatgcctccctcaaaaaaaaaaaaaaaagaggtccatattctaacctttggaacctgtgaatgttaccttatgcatgtaatactttgcagatatgactaatttaaggatcttgtgatggggatattatgcttaattagctgggtgggctgtaaatgcaatcacaagtgtcctcataagaaggagattacagataaaagagaggaaggtcatgtgatagaagcagagggaaacagagtcatagagagaggatgctatgccactggctttgaatatggaggaagtggccatgagcca

SEQ ID NO: 58162 - DNA, 1204 bp, Homo sapiens
aagccaacaccgaggggagctttgcagctcgtgctgttgggggtgttttagctttggtttctgtgacactgggtcagcagcatctgtgtgctctcccttgaggctgctctctgggtggtccaggcttttatttagacttcggaaggtgcagctcaaagggaatgtgtgcatcaaagatgtctgtagtcttttgcttaggttagtttgtgtgtttgcctttttggtgttttagttcttaggtatctaccttttctaaaagagctcaaggtgctatatttagaactttcaaaagtataatagtacttcgatttgtataaatcaaaggattattaagggaatctgaagacgaggaatggaatatgggaaatggaatatgggaaagagaggtgcagtagacaaaaaataaaagtgtccatatgcaaccttgtattggaatactaccctaaattaggagattatacagtcaataagtattttagtgaatactgcatgcacagcattatgctgctaggtgcttaaaagagcttgaaaatcaaattgaggagtaagatttgcctcccaagggagcttggggtttttggtttatttaggtctctcaaaactttctgtgggatgatgatgatgacaaagtaataatagtaacctttcgtaaaattcacactgtgaatacctcccactgtagtaggccctagatgtgtattttctctgaacctttcatctatttttgcaaagtttttttcctaaactatttatgaaagtataaaatacttagagaaagtacacatattataaagtgtacagctcaatgaatttttacaaactgaatacagctatgtaatcagcacccagatgaagaaagaatgttactagtatcccatgaaccctccttctctccacttcaagtcattactctctgaagggtaaccattatcctgacttctaacacaatataagtatttgcccatttaaaaatttgtttgtgtaaatggaatcagataatttttttcaacaacttgaatatgtaattcacttgccttctggcctccattatttctgatgagaaatcagctgtggttcttagattcttattattgcttacttgtatgtaatatatcatctttttgtttgtttgtttgtttgttttaaagagatggagtctctgtcccccaggctggagtcctgttgcatgattacagctcactgt

SEQ ID NO: 58163 - DNA, 1529 bp, Homo sapiens
ttttttgttttgttttctttttttttttcctttttctctgttctctacaaatcatttgggtctacatccagcttctcccagcatttactcaatatgaaacttccagttatagattaatttgaattctttgcactaattgtttaaaagaccataggaacctcagaccatccctcttcatggtctcaagagctcccagaatcatcctcttggtaagctaagtagttattagtaaggcccagggacaggactgagaagtaacatcttctattttttatttcagttttcctttaagttggaagcaaacaaacaaaaaacccttcagcttagggttttttcaattgttaaagtaatactgagcttcagttaaggctatgaaagaaaagaaaaaattttaaaaagtagtaacgtgtttttttcaagatattgtgggtaaaaacataataaaaagaaaataataattacttggaatcatgattaacattttgatgtatttccttccaatcttttttatacacatttttttaaaaatgagagttacattatatattaagcttagtgtaatttttttcatttaacatttggagaagcatttttatcatgtcattgcatcttcttttaaatgttgcctatatgatcatacagcagtctgtagtctggctgtcccttaggtttttcatatattccttatggttctttggctatgttgtctttttttttttttttttttttttggagatggagtttctttttttcaggctgaagtacagtggcgtgatcttggctcactgcaacctccgcctcccgggttcaagtgattctcgtgcctcagcctcccgagtagccgggattacaggcgtgggctaccacatccagctaagttttttgtgtttttttagtagaggtggggtttcaccatgttggccagactggtcttgaactcctgaactcaagtgatctgcctgccttggcctcccaaagtgctgggatttcaggcgtgagccaccacgaccagctggctgttgtcttgactctcccctggactatgttcttgtacatctagaagcaattaaaaatctcattgttgtctttttggaaatcacttgtttttaggatgactaggtagccaaggctttcatttggaaataccctacttccatttaatataaggtaaggagagagggtttttccccctgctgctttccctttttcttcctcttctgtcttgctcattgtcttagagcttagctgagaatcagtgctacgcctgagcttgggccctggctggctcagtggagttctttcaccatgctgagtttcactttcctcatctttacactaatgaaattactcataccctcactgttccttctcagaatgctataggcatcagtaaaacctgggaacaaagtgctctgcaaagttatgttatggtcagaaggtatctggttgtgttcatgcagaagagcgtgtgtcttgtgccttcgcccagctagggtggtctttgcaatctctaagctaatcttttttta

SEQ ID NO: 58164 - DNA, 1081 bp, Homo sapiens
agctttagacatggtaaagggaaggtttagtgagggcaagagctagaagaagacttgaaaattaaccacacaaaagaccagttgaggtcatgaaagggtattcagagtaaagggtagttgaggcctagaaagaagactttgaagagctagcaaagaagagagaagaacaaattaaaatgggcaaaaggaaaatgagagtaatatggctcaaaggacttaagagagaagaagactcaatgatgagttctacgaaggggtcaggaagaatgggaactgaacaaatgtcattagatttgggttttagaatcttgggaaactgtggtgcctacaacttaacctcctttaaaattttaagcacttttcttgccgtttcagctaataaggagaaggaatataacagggtaagcctgagacagagaattaaaaacaaatttacttccaactcctgcattaccttcttgtgaatcctacacaagaatttgactttcccagactcccatatgcccatctataaactgaacaagaagcatacttcttgcccactttgcctcctggagatcctgtgaggataacaatgacaaaggataggaaactgctttggaagagaaatgctacataaatcaagatatccttttctagctgactttaagtttttaatttaagaaaaattcttgaaagagtcacaaaaaactttagagatacactaaatgcaggacgtgttgactgataaaatagatattcttcttggaaacaatggaaaatacttcagtatcattttgattaaatcttgcttaataactgttcattagactcatatcaaatcctgtcttggctttgttatttaatttaatttaattttgtagtcattgttacccaaccacaaaagaattacccctgtgcttaaggccacacagatttttcaaacattgatatatcagcattggtccttctgatgaaacacaagatgaggttttccctgctgagtgtcaggcagtctgtctcaagctgcaggctgaagccccagtggaatctaattccatccttccagtccccttcatacgaagagtgggaaatagtggga

SEQ ID NO: 58165 - DNA, 1453 bp, Homo sapiens
cagggaagcatttcttattgacttttccagagaaagagagaaaataagcaagccggcaacaagacagaggggaaaagggaagtggctcagttcttactttaagaaacaacatggaagatatgtttgttgatttgagggtggtgaatttttgcactatagctttgtgagggagctggaaagagcctttcagtttttcatgactgggagtttaatttggtttataacattacttaaagataactttgaaattggtctaagaacttagggttgttcctgaccccaggtcaatggcctacttgacctaggcgagaggagaaagagttaaggatagggagttgagctttttgctccaaaatctatagagggtacacccctcttatattctggagtcttactgggtttctgaaaatgcccttgtgggtcatgaaacaatagtcctttgaatatttttctgccgctgctgatgtgagctgcttaaactggcaggcagatgatggaaggaatggttacatgtcccaggcgggaggtcatgacagttggatctgtggttgacagaagaatttcaacacacattcaaatcagctcctaagatagattgtctgagttccctgggcctgcctcatgccctcctcaaatgcatttgactccttctggcccgtaatactcacacttcaaatgtttggcttggcgtccacaaatcaactcagggccggggtaggggtactgatgagcagtgatgccctctttgggagctaccacagcataggaaatgaacattagaccaggaatcaggtaacctggttggggacccagggctctagatggtttatttttttattttccttattggttaaattccctaccgcagttttgacattctcttctggatactgactgtggtctagagaaacagctaaggaaggcaaatctgaattaaaatctggttcttgggaaagaactgaagttttcagattttgcaaaattatggagagtgcagactaggagaaaaaggacaggcatagttgtgacaaggagctcttttttctagttctgcattctagaaacagtactgatgagtccaaaaatatagagataaaatttgtcttttttcttgctttaaaaaagaaatgcttctaaatgtctacatacttgcctaagaaaatatttctcaactcctccagaatatttagggttaactaaaaattataaaaacataccacagagctagtccactctttatgcctagggtttacccaaaaggtgtgcatgctctggcttggagaccctgaccccatctcaacttgctggtttcaagtctacatatttggctgcaaagccctaatgccaggaggaatgcggaactgatgagtccaccccatctacaagctagaaggacatcttgattaaattagtgtcaaggggggtggagagaaaggcacagtgacacaaaggg

SEQ ID NO: 58166 - DNA, 1051 bp, Homo sapiens
actgcactccagcctgggcgacagagcgagactccatctcaaaataaataaataaataaataaataaataaccaaaaagtggaagcaacccaaatgttaatgaagtgatttatggaacaaacttaaagtatggcatacctatacaatttaaacaaaatgtgtcatgtccatacaatagagtagtatttagtcataaaaaagaaggaagtgctgatacatgctacaatatggatataccctgaaaacattgtaagtgaaagaagctaaacataaaaggccacatattatatgattccatttatagtaaatgtccagagtatgcaaatctatagagacagaaagtagattagtggttgctaggagctgggggaaggagagatggggagtgactactaacaggtttgagttttcttttggcatgattaaatattcgggacttagtggtggtggttgtacaaccttgcaaatatactaatagccactgaattgtgtaccctgtagtggtgaattgtacagtgtgtgaattatatctcaataatttaaaaaaatcaaacaaattttagtacaaaaaatgcagtaactaaaagagctcaatgtgtagatcaagtagcagattagatggtgctgaataaatagttaatgaactgaaacgtcagaaaacaatgcatactgaagctcagagagataaacagatggaaaatacagaaaagagcataagagacttatgggatagggtaagtaggcctaacatgcttctacttgaagtctcagaagaagagaacaaagagaatgggatagaagcaatatttgaagagataatggctgtgaatttccctaaactataaaagacttcaagccacagactgaagcattatgagccccaaacaggagaaatacaaagaaaatacaaacagctagaggtaaaaaagacgtattatcttcagtggagcaacagcatggttgacagctgacttctgaacaaaagcaatggaaagcagatgacagtggaatgaaagtgtagaaaggaatacccttcaaaaatgaaggtgaa

SEQ ID NO: 58167 - DNA, 2686 bp, Homo sapiens
tgcagccatagtacatcagcaacagaactgaactgaggttgaggacaagtgcatggtccccactgggggtgaccccacccatctcttttttcacactcgtcttttcaaaacggaatgagtcaaaaaatacttcctcaaaataagttttctcctcagctatgcaagctcaccctggctttatttggggcataattactagagaccagccaaagtctaggtcattggcacaatggaccctgttagcagcaaaccagggaccctgaactaatggcaaggaacgtagcctgcattgcactattaatatgtgcctgtcggaaagcctttattgttctaggtttttcatcagatcttggattgatgtatggctttgagactagaacaaatgctctagagggcagcacagagtcctaaatgtccccagtaagagggaccagtttgagcagagagagctttgcctggcttcctggagttttataaagccaaacctcagtgacgaggcaggctgcgggcttggagaagagaacacaatctgttctgagatgactggcgcttcaggcacatgatgcctgtggctggtgcgtgttaattcatgcgcagagaggtggtggtggtggttgttccccagccatgtttttctaattataatgaaaacaaacacacactcacacacatacacaccaaggaaattcctgttgttatacagggaatacttaagttatacagctaatgcctttcaggggccccttctccagcttggatgtgccagcctactatgtcattctccagggtttctccatcctgtttgaaggtgatactgatttctgatgtttacttgcttatttgctgcattttttcttttcttttcttcctttgtttttttttttaattcacagaacaggcagtggtgacatgcatgacaggcatttgggatcagatgttgctgatccagaagcctaggtgtggccattttgtcatggcaactgttaagcaagtaaatagggtagagtagtcatctgacttatctccagcgatgttcagtttgttttgaatttctactctgtgacacttctgctctgaagccaagcatagatagatggtacctttcgttcaactcccaagttttcatttctctcaaatgaagttaagaggttttaaaaatagaaacacatcgatgtgagccattttcagactggatgggtttcctgaaccttgtctttttaatgctttacttctgctcttttagatcaatttctaagcgccaagaagagctattactcctttctcctagcagagaattccctaagatagaaaatgacacatgtagtcattgtataaattcttttattttcctgtaagcatcttgaccctctactatttgcagctgtttctggggaggagtagtttggataaccaacaaaccttgccacttcttcagtgggactcaaggcagcagaagaagactactgtctaaggatctgttagcttttacccagggtcctatgtctcttcatatgctgtgctttaaaaaaaaaaaaataagtgaaagggcgtaagctgtgtttgagtgaggaagaaaaccttggaacttatttctctggtctgcagagggccgagctgctacctctgactgcagacttaagacagcccaatattcgccaactactttactggccattgtgaggccatggtcaacatagagcataacatcttcccattgatgttcaaactgagaattgcctgagtgtggtatcccctgccataaggtgagctggaatacaccttcataatctgttaaaggccaaaattaaaatgtgatgttttcctctagtaggcaatggaaagagggaaaaaaaagagtagaggcactaggaagtttcagagaagtcaaaacattctggtccaaatggagttttaagcagagggagttttaccccgagaggacatttggcaatgcctgaagacatttttgattgtcacaactggaggagtagaaggtgctactgacatctaatgatctagaggccaggggtgctgctaaaatcctacagtgcacagggcagctcccacaacaaagaattatctgacccacaatgtcaatacagagacattgacaatcttctgacccacaagattgagaaatgctggtctagtgactagagtctcctgaattaagcagcctagattctaccctgtcttgactactagctgtatgagcttgagggataccccaaacctctatgaccttggtgtctgcatacactccatgcactggtatttctatatcctagggggtggagtagttgggtgagttatacttcctgaaatattaggctatagctaaggatcaaataggtttccagagtctgtaggccattagaaagttcagtgagccaggctcatgcctgtaatcccagcactttgggaggctgaggcaggcagatcacgaggtcaggagatcgagaccatcctggctaacacggtgaaaccctgtctctactaaaaatacaaaaaaaattagctgggcatggtggcgggtgcctgtagtcccagctactggggaggctgaggcaggagaatggcgtgaacctgggaggcagagcttgcagtgagccgagatcgtgccactgcactccagcctgggcaacagagcgagactgtctcaaaaaaaaaaaaaagaaaaaggaaa

SEQ ID NO: 58168 - DNA, 2693 bp, Homo sapiens
tttttaggggaaagtaacattgtaaattgttgatttttgttacttcatttgttgacttggtagcgctattctttgaccccttttttatctcatgtttattcataacgttttctctttatcatgcaccttcatgaaataggaaatcactttaaaaaagaaaaaaagcactcacttttgtaacttctcactaagcttttgaatcccatggtcagattcaggtgaaaaaagagaaaaaaaagaggagcctcctatctacacttcttcagctgagataacagatgcctcttttccacttcttagttaacctggaaagctgggggtctgtttgaattacttagaaaggcttttaaacgccattagttgttaagtattttttcttctgtatagaaaatatgaagagtattatcctggtaaaatttacgggaagtagtgttaggttcagaatgaggtgaaactgatttaaaacattctgcattcaaaatgagacataatttagactctaatgtactttgattttgtcagtgtcccagtattctttattctttcatctgcctctagctgatcgtaggggctagattagtatacccacaaagtctttctaagctagattttctcagcgtcagcaccattgacatttgggccagataattagttgttgtgggggctgtcctgtgcatgggatgttcagcagcatccctgacctctaactactagatgccagtagcaatccccaagttgtgacaatcaaaaatatttccagacactgccacatttcccctgggggccaaaatagccccaggttgagacacttctctaactcaggttcatacatggaaccagtttctcttttcaggaatatcttgaccatatttaacctttcctcccaaccagttcagctccagtcctatccagaggagagtcggtgttgcttaatggctaagaatgtggtctttggagtctgacagacctgggtttgaatcctgattccaccatttactcattgtatgaccttgggtatgatagttaatctctctgagccttatttccttatctttagaaatagaaataataacagtgtctttcacagagttattgtaagaattaaatgaggtaatgtacgtaaagcccatggtacacaatgtttattaagtggtagatattaataataatattgtacctttgcactcctgtgttacacacacacatgcacacacacacacacacacacacacatgcacacacacacccaacttctactctctaattctccatctcaaagaaatcttatggcatcacactttcagcactcgtgaactccctgtgtggaaacagaaagttcccacagagtagagcaggcactaggtggctggaagtagtatgtttagtaggattggaaacaagcttgagttctaggcttcctggcctccctgttaagagaaaggattggactcctagatggttgctttgatggaaaatcatccttcaccttttatactacttccctcctgtggcaattccagttatacttgatatggattttattccttcccagactcttacctgaattgttttgaaggcttacagtcttcatagggttgttgtctagattgtggaattgtcctaaggatgaaatgagaaaatgtgttgtgtggtacttggcataaagccaggaatatactaagtgctcagtaaatgataactggcattgcagttgctgtgagagggtgtttgatctggataaagcagaacagacagatccccagaatgccaggccggtaaaaggagcttttggaagcttttcctcttccctattttatatctgaaaggtaacagaaagcataggctactccataggctgcactgccctcttcggggttcctgaccagcccagaaaggctttgcccttggggcctgagagtggtggtgttgtttcccatctactcagtattatgaggtgactaagtgatagaaatcacctggccaatattaaagagaaatgattacaaatgataatgaatagaaataaataatacatgatggatagacattaagttatttcaataagaggaaatgttggctcagttcacatattgctttcctgtgctttggagtggtctttaatctgtgtttgctgaaccaaacacttctggatttttcccttaggggtgtgaggatattgcttcatgggggagagctccagctgagtctgttagtctgtaaagcagagaaatgacccccttggcttgacctctgggggtgggggtgggcgatgtcttgcaggtgatgaagacatatcacatgtacaatgccgacagcatcagtgctcagagcaaactaaaggaggcggagaagcaggaggagaagcaaattggtaaatcggtaaagcaggaggaccggcagaccccacgctcccctgactccacggccaacgttcgcattgaggagaaacatgtccggaggagctcagtgaagaagattgagaagatgaaggagaaggtatgtaggctcccacagctgtagatgctgggaagcaacattcggtaaggcatggctgataggaatttcccagtagtcactgggaagagcagacgaggaagctctgggttcttttagtgcctaatgactgaaaatgaggccttgctctgtgccctggcaggaatactaggtattggaagaactgggcacgtgggatc

SEQ ID NO: 58169 - DNA, 1035 bp, Homo sapiens
gagtgcagtggtgcaatcttggctcactgcaacctccatctcccaggttcaagcaattgtcctacctcagcctccccagtaactgggactacaggcatgcatcaccatgcccagctaatttttgtatttttagtagagatggggtttcaccatgttagtgaagctgatctggaactcctcacctcaggtgacctgacctcaggtgatccacctgcctcgacttcccaaagtgctaggattacaggtgtgggccctgcacccgacctaggaaatactttattacatcagcttctcttgcacagaagtgagtggcaagaacttaactaaagagttacaatgccatcccttatatttgtatagcatttaaggtttctcagtgttaactcatttgactctcacatcaccattatgggtaagcattgctgtctccagttgctagataaggaagctcaaggtccagaggactacgagactcacttgtccaaggttatgctgcaaattagggtcctgtcaggaaggtatccagctccccctgacatctggcccattttttaaaatatgtgatgcaaaggggattgaggaaagcggctaataggcacatgtgttttgcaaggggcaagcgcagggataagctttttgttttttgcctgtgagttattcttggccttgtttttcctgctgcttccccttacagttgggtcttacaagccctctcacctacagactccaatctggcccaggtcctgagccacacctaagtgaagctatgtaattacaccctttctcacctctccttccagtcatcaaagtgaggcatctggagccagccaatttagcatcccagtctctggggcttcaagtgtatctcatctcggaggcctgccatttgtttcagggtcttgttggcagcagttgggctttgcaaaactctggcccgaccactcttgctttcctgccttggtttctccacaagcaaacctgccacacctcacaacatcatatgggatttgggtccgagtcttgctgttatatcac

SEQ ID NO: 58170 - DNA, 1011 bp, Homo sapiens
gattgaagacagattacagtttgttctggctattgaaccttgctcaaattatttaacttcactgaacctcagctttcaagcctggaaaattaagattataccaacctcattggggttattatgaggattaaaatgtagaatgtatataaagcacttagcacatggactgacgtatagtaagcatacttagtgaaatagaagcattttttaaatttcaaaactgaggaaggtggattttaccttggggaaaaaaaatgagaggtattttaggttcttcaacaggaaagtgccataattaaagtcacagtttaggacagtgaagcagacggtgagggtatgaataggggtagaggtagtaagaatggagaggaaagggaaattaccaaaaacaggtaaaagttttttgaagggtaacttttctctcccagattctaccccctgcccacaccccctccacccacactcatacactctgtgggccgtgttacttctgttcattagacttataggcatagagctcatcaacagggtctacatagagctagtcaggaaggtttacaggttcaagggcagcctggtgagaccagcagcatctcccagagagcccatgcccgtgcagagtcctaatgagccgcttttgtctagcttccatttgctcttccctcccaactgaatttaatgtctttccatcctctgcctctagttaagttgtaactgctgttattccactgcagccaggcagctgccagggcctgttggcactgaacccagagcccaacccaactgatgttctcactgagcttcttgtcagatgccaggaaagaggaggcacatcatatgccttttcttccccaatagtagctgcttccaatgtgatcatgatgagaggaaaaggctgtggggagagttaatttgatgcttgcttgtgcaatgaaatggcaatcaggcagatggccttactctatgcatagattcttctttgaggtttcttctcaggacccggacctcaga

SEQ ID NO: 58171 - DNA, 1030 bp, Homo sapiens
tctcccatctagagttgagcttgcatacattagctgctgttgcaatactcctgctttcagaaccctgaaatggcctggcttggttgctatatagtgatttaaccacagtaaccctcagtgagtggcaggttgtatttttattgttgaattttgttataatgacaaccccagataaacctgaaaatgaaagaggattctctttaactctcaattcttctcatgtttatgaagtagcgcttaattaaataatgtcattttatccttatgaatcttcttcctcctaaccgcctcacagccctctagggtgtgtttaactgttgaattgggagtcaagaactgagaactctcacccagaccttggaagtcggaatgtcagccctctttctactgcacagccaagcctattgatgtggtcagatctgccctctggaccaccttccttttctgccaagccttggggctgtccatggtgtgctcatgtgccttctccttcccacagcagtgttgtgacttaggctaccatgcaagtctgaaccgggctctacgcaccttcctctctgctgagttaaacctggaacagtcgaagcatgagggtctggatgccatcgagaatgcagtagaaaacctggatgccaccagtgacaagcagcgcctcatggagatgtacaacaacgtcttctgcccccctatgaagtttgagtttcagccccacatgggggatatggtgaggccctttccctatacccccaccctcaaggggcttgagtggacttgtctagattaattacacagaaggcacattattctggggtgggagaggcctgggcccggctttttgtcaggtgggtgaggcacattccacttattgagcaaacagttagtgagtgcctgctgtcagacactcgggcttgggtgcagacatgggggattaaagccctcagggagcttacagtctggggaataaggtcgctaaggcttgaggagggttcaaactatgcatagagaggggtatccaaaggggcccagcagg

SEQ ID NO: 58172 - DNA, 2040 bp, Homo sapiens
gcctgagttgtggagtgggaggttcccctcgccgagggcagttagaccaaagctaccaaaaaaaggaggagtggacgccggggaccaaaaaacagcaacatgtgtgctcctcaggaatgatgcttcccttaagattagcatccagactctagaaatccccactccagaatgacagctgtggcagtggaaccagaggatttgctgtcatcagttggcctctatggagagtgagacgctgtcctggagatagaaatgtggagttggtttccttcctttccttcctggggaaaatcaaaccatttacagttcatttccattgctgtggcttaggaaatgtcagtgtctgaacagatggagaagtgagatggcagcatgtgcaattagaattgggggaaggggtgtcaccaagcctcaggaagccccattcctcacctgccctggcttctggtcaaacttgccttccaagcaccttctccagctgtcactgaggttccttcccagggatcagtggaacttggggaccagctgagtggagtgatacattttctggtgttagtgactgagttgccttctgagccaaacagcttgtctccataaaggaggaatccagatgctgggtgctcaagccccctcctccccctgtcagagccttatttccatactccagagtgcagctgaagtgtattaccttgcaccctggtagcggaccactgccaaagcatgcatcatcatcagctctgctacttcttaaaggaacaggcttggaggtggtttttccctccatgattcctctctgctaggtctgggttactttaaaaatcaatagctcactcttctgccagggccctccctttatgtaatatagctgatcagtggctgagccaggcaggggccaggaccagtcctggagcttgtgaaggttccgcattctagcctagccttcatatgagtgaaaataaaaagagatgagagggtgggtcattcttggcctctgcagccagtctatccccatcagtgtgggttgtctgcagattgtggaggcaacaggagggagctgcctggaagtcgttgaactagggccaaagattgggtagcattttgaccggaagccttaaaattggccagggtcccacactaactggtgttctggggtgcacagcacatgaattgatgccaagtgctctcagatgtactaggaggaggtgcttggctccatttttggtgccctcagaggctgtgggactctggatgcctgactggtgacatcaggcagccagagaatttcactcttggcgctaaccggttctggccactgagctttctccattgtgtctgcttatccaagagttagagtgaagtcagctctctgtggatctgagagttggctcaggccagcctctcagctgggggaagaggtcaagtcagttgggagcttaaaagccaatggaggaaaaggtcaagtcccagccccctccatttgaagaaaggttttttcttttcaagcaagggaatggtccgtgggcatgtgaatgtgcccactctttgctgaggaggaaggagaccatttctatccagatgtctctctgcagacaagaggctaaaggacgaacggtaacaaggtgacaggagctgtctccacatgggtcctgcctcccaactctctcagccttctgctcctcatctgtcatccaggggactgtggatgacctcatcccataaccacatctccaatgggagacagtggaacagccattccttcacacaggggaaagctaattggcaataatccttgcgggaaggtcagactcctctcttacagatctagggaaggcctggggtaaaatgatggctctttggaaaatgccaagctccttcagattccataccccctcgggccctctagcataggcaacgaacttgttcctggcttcacgctttctcattgaatcaaagctctcatgcatggcctggatttgtaaacacatgctggctgccagcagtggcaagttagcctcctgacccacttctctcctgctttca

SEQ ID NO: 58173 - DNA, 1665 bp, Homo sapiens
gcaaatgagcaaacaagttcatcagtttgttgaaggtcatgaaacagaacctggggctttgcagtactaggcccatcacacattttaattagctgtttgtatgagggggttggtttagatttattttattctctttcccttaaaacttctattataatgttgttatataatattataataatgctaatattaaattttaaaagtaaacattaaaagatctgggtcaagtacatagcatgaagggttgtagtggcttttaggttttcactgtagagagtagcatgctgtagcagagtccatgtgatgtttacctcccacttagcactgtccagtgggaagcagagctgcacactctgatggcatcctgtggccttccccagcccactctcttcaagcttctccatcacctgctgtttaacaacccacccttcatgcatcctgttggcccttgtcgtggcaggtaaagaagacaatggaggccaccctgcaaaccatccaggacattgtgactgtcgaggactttgatgtgtctgactgcttccagtacagcaactccatggagtccgtcaagtccacggtctctgaaaccttcatgagcaagcccagcattgctaagaggagagccaaccagcaagagacagagcagttttatttcacagtaagggagtgctatggcttttaaagagcgtcagcatgcactgcagcactcaagggagatttggaactcagagtccttgttaagtgtctgaaggacaggcgttgaatatcttagatacgaatgtgggcatactcagagaccatccctacacttaaaggtgcaaacattaaaagttgtatatgtctaacagggatccgcccaagagaaaggatgctcccaagtatacaactaagaagattttcttttttaagaaatttttaactagctagtaggctttcactggaaagtttccttctcaggcacaggggatcctgaaaggggaacttcatcttttagttcttggagagtacatacaaatattcataataacacatattttgtttataaaaatctataatctcttctaggtgatatgatgacattattttataacttttattgttgggaaactattttttctaattattgctaaaacttaaaggatgggtaatatgcagcattactattttgcacataattccaaaacatcgtattttcttattcatgtatctctagtcttcttttagacagttggacccttttttctttttcttttttttttttttttttaagtattgttaacaatcctttggaagtcactactggtctttgtgtgctgctttttaataattgagttattttgagcttgccaagtaggatctattgcctggactaaaatttatttcctaatcttctgatgaccaagaaaggaaaaattaagtttgcagatgtgagatgaaatatagccagtgaatatgcatactgattctgaatgaaaggaattaacttttcagtcaagaaacagtctgcatgcagtaaattgaatttttcctgcaactggaatgatttgtttaattcttctttgaacactgccctttctccagtaagaacactaatgatttgctaatattttttaaagaaatctgtttttttaattagttaagctcagacttcctcttattttttat

SEQ ID NO: 58174 - DNA, 1063 bp, Homo sapiens
tgaaacccgaagaggtaatccatcatacatctttaccagattgttatttattttaatggttcatcaagtgatagccagagttaactaatgaattgtgaacatgaatttaaaaaatgatttctggaatcacaagtagtgagaggaaggaatttgtatccatctcctttgagaactgtggctgttttctgagcagtctggtcttgttttgaaggttacagcttcttggtgaattttcctcattaggaaacctttagagtctcctgggataaccttccaaagagagaggcttttgaggcttgcattgttggcaatggatatttcctgaaggctttccacctctgggccctaaagtactgttccaaacccacaattaggcattggttggggatttggatattaccccgggaagaatgacagcaggtgagctggcatctggagcagatggaaaagggaaggtgataacagagcctctttccttgcagaagttcttgtgcaaaagcataaaaggacagagggaacagatcatgaataaggcagtagaaatgatttggtgtaagatttggttttggcttgttttatttttaatttagagagtacgggcacactaggggcttggtttgtaactgctgaggaagggtctacccagaggagagtgagactgctcattcatttattcatcatgcatttattgagtatctgctatctgctaggcgtggtagtatcagggatgcaaaggataatgaatgacatggtctctgaccatagagaggaggcagtctgaagaaaaagacacatgagtaataaaccctctgtgacagggctgtatgagaagtgctgtcatggagatttgcatggtacacacaggaccatctgggtgaacatgggagggctagggactgcatcccagagaaagcagatttttcttttgtttttaaacaagagagagaatcagatgcaagctcttagttaaaagttcacactgtacagaaaagtatagagtaaaagtaactcacatttgttcacttttcttttctttttctttcttttttttttttttttgaga

SEQ ID NO: 58175 - DNA, 1873 bp, Homo sapiens
tgactgttgctggataatgaaatattacattgcattggctcgccaaagagtattggtagaaatatttgcctgatgtacaagtatgcacccctcccaatctttccccaccttccccttcctcctccaccccagccaaatattttccctctcagtcatggtgctgctatgagaaaatttgtgagctgtcggagagcaaggtattcattcatccagcagttctcagatgcctagaaatgtgctgatttaactagagaaggggctttaatgggttggactccttagagaccctgggttagcccattatatcaaccacttatatctgccaaaacacataataattatgaggccatttacaattataggttcattatttagagatagcttcatttggctttcattgttttgtcattgtgaattacaataaagatcccattaatataccagtcttgatgactggagggaaccaggataatgggattctctggaacacatctttttggtgttagagtcttactgtaagttcacctgagctcctgagtctgtggaaggctctgtaggactgaaaagagctgagttgaatttcccggtgctgagttattttgctgtgagaccttaggccgctcttttcccctctctgaactctggtttcctcttatagaagaccagagcactccactagattcaaggtgtcctaggattccaaaggggttcctcaggagtggcctggtggcaggggcagagcgatgaccagcaaccaggctctggtcccatccttcactcagagcaggacagccctggcctccttggtttgggtgttatgcctctgagtcagattccctttgagaagaggcttctgaggctaaacacagattggaaaacattgacctagaggattctcaaggttgtttccaaactagatgttctacactctaaacccagaaaaattgttccctgtaaagatagcgatctttaaggatttcctagagaaacaaaacaaaaagcatcctttggtgtttcccagtgtctcctagcaggcaaaaaaatcttcttattgtctagcccaaaaatattttactaaaaattgaaccagtcctctcctattctaattttgagtagtggtagacattaaaagcagggacgtctgtgcttttgtgaaaaaaaagagctttcgtaggctttattgtggaagtaatttatcaagtttcttagccatttctgggactgaactgagtaatgtcacatgtttcattggctaccacacagattttttttaattattaaaaactttacttctgggtttaagagtgattgtttatctcattcgtcccaattttctctttttctcccttgttgctggattggtccaatctgattcggcgggattggtcacaggcgcagctcaactgtgaggaaacaggtaagggcccaagcggggccaggctggtctggcctgaaaatatagtccatcccacaggcatttattgagcgccactgtgtgcaggacagacacctctgacttcatgcctgcatttggaatgtatcatttagtcatagtatgtttaatatggtggcaatgtcattgatttaactagttggagtggccatagtctttttgacttgtccctctcctttctagtcatttatcctcttgcatactaggggtttggtttcattggtgcagattgttccagaactgcccatggcatccttttccaagaccacaaaagaggcttgacacttcctacatttgtgctaacatatcagtaactcacagcacctaattagctagaccagacaatctcgctttaagttggcagattttgtttgattgtttccggtggcgtagtcattctagatggattcctaagacatg

SEQ ID NO: 58176 - DNA, 2168 bp, Homo sapiens
atagcagctacttaacctcactaagccttcatttcttcatttttcttttctttttcttttttgagacagggtcccgctccatcacccaggctggagtgcagtggcttgatcttggctcagtgcaacctctgtcctctgggctcaagcagtcctcccacctcagcctcgcaagtagctgggaccacaggtgtgcaacaccatgccaggctatttttagtagagacagagtctgttgcccaggctggtctcacactcttgatctcaagtgatctgctggcctcggcctctcaaagtgctgggattacaggtgtgagcgaccgcacctggcctcactttttcattttaatgagtataataataataatatgtactccataggattgttaccagcactagtccatctaaaggacttagtacatggcctcacacctctttaaattcctctataaatggtaggcactaatgttcatgtgttaataggaaatattactctccttgcctccagtcccctccccagtctgtagaaggcaaattgaggcccaaaaaagttcagtgacatgagccagactgtgaagcaaaacaacagagcaaagattgacatctgggaggcctgcttctttgcttagtacctgttagtccccactatttagagttagtttttcttttctatcttacctttataccaaacaaaccctctttctgaagctcccattggttcattctgctaccttcaactgagaataattgagcacctcttatgtgagagcatcatggccaaccctggacacccaggaattgacataggatctgctcttgtgaagtttgagctgtagtggtgacaagtgccaacaaatattcacatccacacattggagtcacagtcagggttgaggagaacatacccccagcaggagcagctcatgcaaagccacgaggcaaaggaggactttgcagaacagaaacgtggccagcatagctgtagcagaagctaggggaaagaacaggcagtggaactggaggcacaggcagtattcctggcatgcaaggccgtgtaagagagtaatgagaggtctttgaaagagtttaaataatgaaatgtgcccttttaagattacctaattactatgtgaaggaagagaaatgcgggtcagaagatggcaaggatgggaattgaggtattggtggattgaactaggttgggggcagttgagatagagagaagcgaatggatttgagagatatttagaaggcagacatgacagaatattaattaattaggtggtggagaaggtggtgagaaactggtttggggcagaagatgatcagttttgtttaggacatgctaactttaaggcatctgtgtagcattccatgtgggtggttgtatttttgtgctctggaacttggaggacaggccaggtgcttctttgtagaccggctggtgatccgctaagacagttctgcacggtttggcccgttttctctgaccctgggctatccctgtttgaatattctaatgttgtgtttccctttggcttttcaggactccagccaggcaattcctctggtggtggaaagctgtatccggtttatcagcagacacggtaagcaggatgacagccttgtccatatttgtgcaaagattgggaagaacttccaggaattctttgtagagtaagaatagagattgacttcccatcctggcattctcagaaaaggaataaattcttacttgtccacataacttttgctacctcaaaatagccacacctagacattgaaagaaatgcatcatatattttgacacaaaatgcctcagccacttatcacgcagcatttttttagcttgagagtaagtttgaaattgcagctgttatgtaaatacagctgctattatgtggtaacagtagtttcaccattactcacagtctttgcaagtgtgggtatctcccactgtacagcctgaccattttgtcactttctgtaccagactagtttgaaaacaactcctttcccaatgttgcagtgattcctaataatcagtttttgttctggtttggtctcactggatacagcatggccaagggctgagttagtagctggtcttaaagttgtatccaacttttgagaatctgcagaggcaggctgcttctcagcctaggtgaaat

SEQ ID NO: 58177 - DNA, 1009 bp, Homo sapiens
gttaaataaaaagggataagctgtggtaattcagaatagagtataagaaatttcacaagatagtaatgattaacagtcaaacagtttgcaaagaaaagtccaaacggagttcaggggaggatgaattatttgtgcctaagagacaataggaagaagaaagtctgagccactgttcattagcatacatttcattcattgaacgaatacatattagttgcttattatatcccaacaaaaagtttctgccttcataaaccttacattccactgaaaggtggataagcaaatgaccaattgatcagccagtaaatacagtatgtcaggtattggtgaatgtcatgaagaaaagtaaagcagggtgaggggatggagaaggaagagggaacactgtttgaagctggttcagggaaaaggcctctcctaaagtgacattagggcagagttgtgagggagtaagccttgtggatatctggggaagagtatcttggggagcgggaacaagtgcagagatccttgccatatgcaggaagccagcgtagctggagcagagcaaatgaaaaaggaagcggcaggagatgaagctggaagccagactcttagggcctcatgtgctaggattggattttattctgaggaagatgggaagccactggagaattttgaacagggagtcatctttttaaaggatccctgatgctctatggagctaagactgtaagaaggagacaggaagcaactgcagtagcctgaggaagacatgatggcggcctagaccagggtgttagctgtggtatttgctgaaaagtgggcaggttccagatattgtggcatgaatgtacctgtttctgccccttacagccacagtgcgtgagtgcttcaccattactgtggtgaagctctggggaaacaggcacatttatatgttactaatgggaatgcaaactgatacaactctttggaagggaatttggcagtatctaacaaaacttcatatgcacttacgatccag

SEQ ID NO: 58178 - DNA, 1769 bp, Homo sapiens
agagaatgagattgttgccaacctttaccttgttgtgacattattatttctgaggaccaagtaatttatttctgtgaaagcattgattagcagcagtcactatgccagcatttttttcatgatttttttctctaacaaaaccaagaaattcttgtgcacattatcgtagtataacattcatgcatgtttgtctttagagtaaagctgtagtcaggaaccagtgcctagcacaatgtctggcaatactatctgttgactgatcacttcatagcaagcttgttcaacctgtggcccatgggctgcagcacaaattcgtaaactttcttacaatattacgagattttggggggattttttttttatcatcagctatcattagaatattttatgtgtggcccaagacaatttttcttccaatgtggtccagggaagccaaaagattggatgctcctgacttatagtttcatgttctctctttttcatgagtattgaaagcattgcccccttgaacaatcaaaccgtgttaaaacagctaaagcaatattataatctcagaccttatgaaactcctctgatgagaactaatgccttgacctatttcccattcttttttttttttttctttgagatagagtccactctgtcacccaggctggagggcagtggtgtgatcatagctcattgtagcttctaacttccaggttcaagtgaacctcctacctgagcctcctgagtagctgggactacaggcatgctataagcactgtgcctggctactttaaaacattttttagagacagggtctcatgttgcccaggctggtcacaaactcctggcctcaagcagtcctgctgcctcagcttcctgagtacatttttctattcttgaccctagatgatttaaaaaagtaccaatgggtcacttctttgctttacagatgggaaaagagaggcaaaacaagggaaggaatctgcctcatagtcgcccttggagtcaaaggagtctctaacttggtgctttctagtgaaaatgaatgcctcgaaattattccagtgacttttccaacatccttgcacatgtttttctcctttggcctaaagaagagagacagcgtgcttaaatacatgctggctgggggagacagatattcaactaagcttggcactatgcttgtgaatttgctttttcttcttcttgatcacttttctgtgtatttccaggactacagcatgaaggaattttccgggtgtcaggatcccaggtggaagtgaatgacatcaaaaatgcctttgagagaggtaaggaaacagtcttgaagataaaaccaaatatttgccagccccctggggtattggctccaccctttcttctctaagaggtccccagaggtcaggaagccaacttccctgtctcttcagggggtacctgctgtcttgtacacattcccctgtagatatgcagagaaataccagggcacatcccagtttccttcttctttcgtagccctacccatcctgcctctttcacgccgatgatctgccaaaacccaagaagttaactatgatatctgggcggtttatggcttcatccggaacccttggtagcagttaatatcaaggctaatgcgcttgttcattgtagcccatttattattttgtgggctattaaggtaatgggcaagctttggcaatttccgtcactgtaatggatatatatagtgtcaatttgaggttggccctatcattaaatctaattacatctgatatgaa

SEQ ID NO: 58179 - DNA, 1151 bp, Homo sapiens
caagcagcagcccagaggaggagaaaagagtgccacggggccatttaaaaccccagagtcatggtaatagcgagtttggatttggatttgggaagcaattagaagattttctttttttttttttgagacggagtcttgctctgtctccaggctggagtacagtggagcgatcttggcttactgcaacctctgcctcctaggttcaagcgattctcctgcctcagcctcctgagtagctgggacccaggcgcatgccaccacgcccagctaatttttgtatttttagtagacatggggtttcaccacgttggccaagatggtcaccatctcttgacctcgtgatgtgcccacctcagcctcccaaagtgctgggattacaggcgtgagccaccgcacccggcatgttactatctgatttgtgtattttatttttttaaaaactgccaactgctttgtggagaagttactggaaagggtcatgaagagaaacagggagaccctatcccaaggttaccatctggtctggccagaggtgttagtggctgagtctggagagcggtgaggaggggtcaggtttgtgatacattttgaacatagcattaacaggatttgcccatggattatacatagaatatggagagagaaatcttaaattgttggcatgagcgacagggacatagggtggtcatttatggagttggagaagacaaggtgtggagaaaggaatcaagacaatgtgttgatgtggtcatggtcatttgaggcacttgtgagatgtccaagtggagattttgaacaattggacctaggaatccaacccttaagggagaaaccaggagtggagctgccagtgcaggagttgcccatgtactggtggtatttagctaatcacccagggaacggatgtgtctacaacaaaggtctgaggagcagagggggccgcgggtgtggatggggcatttcttctcgtccaagcagcatgtccttgtgtggagcaagctttggagtccccacatgacaggaaaggcaccaagcaaggacatgtgattcttcccctctgaggcacctctgtcttttcactttggttttgctgcagtttcgccctcaacagcctagaccaaaggttataaatgggcaccctgagagccaga

SEQ ID NO: 58180 - DNA, 1036 bp, Homo sapiens
agaggcgctacgacagtgtgtggcggtgtcctgccacgacgccgccgtctccagagccaccacacagttgactgtccttacccggcagtgctcaggacctcagccgataaaccacaacctggacttgccgcctccttctccaggaggccgccccagcacggcctccccaggaagcagcatggggtagaaggcagatgcctcgaatccaggtgtcccctagccacgctttcctgaggagctgaggagcccgcagaactcagcggattatttatttttatttaaacgacccttcaaaggcccttaggtttccttgcctctgctcacagaactagtccagccaggtgtcgctgctgcctcagagctgtgtggggtcgcgtgtatgtcggggggccatcttgccgatttaacgctgctttttgtgttgttgttgttttccctcctccctgcctgcctgccccttctcccccagcgaggacggtgtcgtggagaggtccagccccaagtctgagattgaggtcatttctgagccacctgaagaaaaggtgacagccagagcgggggccagctgtcccagtgggggtcatgtagccgatatttatcttgcaaacatcaacaagtaagctctgcttttcattttctgctcccctgaatgacttgcaacacccagcctcaccctctggcctaacccccatctccattcctgtgctgcacgtagggctcccagctcccccagcctaacagtttgcatgtggtcattgctgctgcaaggcggacagggctgaggatgctgctacaagcctcggggcaggtccaggtctccagctagctgccctcgtgctgtggaagggtgctttactgtgtgttcccgcagtgtctgtccacccagacctttgtggcagtcttacagctaaaactttgaccaaagctttggtcactttatgcaacctggttttgtactgtttctcagaggtgccttcttttttccaatccatactcaaataatagtctttgatgtctgtcttccttgacccgtgtt

SEQ ID NO: 58181 - DNA, 1516 bp, Homo sapiens
cttttcttctgccctttcacaccaggagaaataattttccattttgttcctattgctttggccttttgtattattctacccccttagtccctttgcagatccccactcctgctcagcaggctcttacctctgacccccagctttcattgtggctgttagcaacatcctggggtttaaactccacccacgcccgatctggctgtctagagggattctacgcctgcgtgctgccgcctccccaagaggcattcaggttattggagaactaatctcatctcaaggggccagacaccaagtcccaaagcctacagacctctttccgccaggccctgaaacctggccccgtgccagcaggatgacaagccccagggcgctcctgatgaatatggattggagatgatgtacagtttttattcccctctggcttttgaggaatgaaatgatttgcactttgaaaacctgttaaccgtagcctctggacactgagactggaaggagaataaaggatgcttgttgtttttaaactataccaggtttcccagatctcttggcttttttccacccagacggtagcagggggagtggttggggcacgtggctcttttccatctctttcaccctcaagttagtaaagtcgtttattcagatcacttactcagtgtagttataatttaattcagaccagttaaaaaaaaattgagaagtttctgtttccctccagcacactgccctgctgggagggcaagccaatatcaagtaactgtgggctaatcacatttttttccttatttacaattctgtgttaaattgtaaccctacaatcaaaaggtcgtgatcctataattaactcagaaaccaaggcggggttggtggaggaagagttagataattagttaagtacatatttttaagccatcatatatttgatgccatttgtgcatagaaattgtagagagtaataactgaaatggtaaacagaagaagaaaaaaaaagagtatctgtagacagttaaggtggttcccttgaactccttgtttgctggtgtcaggagtcttgggatggggttcttggaggacaagcctcatcacctggtgggtgggtgagcggtggccccggggcatgtctggcccttagaagtgagtcggcctttgagtcttacctcctgccccccacgccactcctcctcccaaattccttgagtttcccgagtgcccaggttctctttcgcccctgggcgctcacgcctgctgtctcctcacctggtcacctcctcatctcccttcaagactcagtccgaagacttagctctttggggaagccattctgacatccctgacttccccaggctgagtgaggtgcccttatgctgcattccaaagacactttgaataccttttggtactcacgcttcactcagatcccccaccagattgagctccttgaacccaggaactatatcttccttttctttacatccccagggcctagcctgggacatggcacaccacagccacc

SEQ ID NO: 58182 - DNA, 1027 bp, Homo sapiens
cttcgcttaatcagacattttttctgacagcaacttacatcttgacaacacaaagcccgtgaccaccaagtaagtatccatttctccttcacccagcttgggggtggcaagggaatgaagacatggagaatgcaagagaagatgaagccgaggagagaacgagttctgtgtccctctccttccgaagtccctgggtgccaacatctgccccctcccacttatcctagcttccttggagccagggctccctgatcacactgccctttctgtttgtgattgaaggcaaaggaagcgtccagaatctgggagcatccggaaaacttttcggagtgacagccatgggctgagcagttccctgactgactcctcctccccaggggtgggggctagctgccgcccatcctcccagcccatcatgagccagagcctccccaaagaagggccagataagtgttccatcagtgggcacgggagcctcaactccatcagccgccactcatccctgaagaatcggctggatagtccacagatccggaagactgccacagcgggaaggtcaaaaagcttcaataaccatcggcccatggaccctgaggtcattgctcaggtaactgtgggctcctggacagacagcatgagtctacattcatcactaccacttagtgccacccacctaattatgacaggacttgaaacagaatgattattttgtatgtgatatactgagtatatgtccactctggacatgtggacccaataagacagcttaataagtggtctgcctgtccctctctccccaggaagaacctaaagacagaataaaagaagcctagcttcttgctcatacactggctattaggaaggctgttgtaatttttaaagccggtattaagagtattttgaaagcccaagttttgagtctaaagaccttggtagactttagtgaaactgcccgactgttgaggatcaggtgtaatcctggccacatgtttatattgctgtgcccatcaccatcatcccgattcct

SEQ ID NO: 58183 - DNA, 3183 bp, Homo sapiens
aaactcctggccattcttactttgtccgtgtttctcttccccactagattatatgtcacttcgtcgataagtatttcaatatctatctctaaaacctagggtctctaaaaaaatatcaattactttttctaaaggaaaaaaaaaatctcatgacagtgaaaatccctccgtccccctttccctacttcctgagcattcatatgttcaaagatttaggccaagtacaataatctggacatcttacggtcattttcttcatgccttggcctgtgttgttgaaaccggctccttggggaattctcccctcatttgcctcacctcctcctttttcctgttttgcaggatattgaggcaacaatgaactcggccctgaatgagctacgggaactagaacggcagagcagtgtcaaacacacccctgacgtggttctggacaccttggagcccctcaaaacctccccagtggtggcccccacgtcagagccctccagccctctgcacacccagctcctcaaggaccccgagcccgccttccagcgcagcgccagtactgctggggacatcgcctgcgccttccggcctgtcaagtctgtcaagatggctgccccggtcaaaccaccagccacacggcccaagcccactgtcttccccaaaacaaatgccactagccctggtgtcaactcatcaacttccccacagtctactgacaagtcttgtactgtctgagggataataatttaattgttctagacaaggggactatagggactgactgttattaaaatcttcctatttaactagcttggggacttcagttgaaaattaggttctaagttgttcttgcaggaattagcctccccgtctcccaaaaccttgagaatgaagcccttggtatcgcctctcccttcccactgccctctgcttcccccagtcgtcgtaattcagccagctgcagtccgtaccgttcttaggttagccagagacaggttttcattatcaggtcactgtgaaatctggtaaggcagtcctgaggacatgggctcaagtctcagtcccctcagaccacggtgatgccttgaccagatggttggctactgccatccagctttcagtggcatcttgttttgggaactgattatagagaatcatatatagtccagtcttcattttacatacacacacatattttacacacacacacattttacacacacacacacacacacacacatatgtttttctagtctctggcatgtgtagcctctcctggtcatagaccagtctctttgtaagttattgtggcagttcacacagtagccaccaggggtctctgtttccattacaaactttgttctgtctgggccagagaacctagcctttgaaatctctccatcatatgaaacataacgggatgggacaatcccgtaacctgtttggggttgggggctttctctctgtgttctttccattgatgtgaattggtcattggtgtttgctcttgcctctcctccatcccctagaagtacacccccgtcttattaaggagcttttaaagtttttctgaatgtatagacatttctcgggttcctacctttgtctctgatggaccattttccatttaagacattttcctgtataagacagttttatagctggttccttttagggtaaagagtcttaagagagttttattgtgtctatggcaggtttgggaaaggtaagaaatgggtcctttttcctcctaatgtttttggcacttaaaacataaaattcattatcctattaaaaaattaaattcagctttgctaatccagaaattgttcccaaatgaaaacttgttttaagtccaccccttagtttccttattttacaaggtctctcttcagggaccaacaggggcttagagagccttagttagattaaagggagaccctacctcttaaaaccagttttcatttatgcaaacaaggacaattaagggaaccctgaccccacaggctctcaagtcttcccaaggccagaatcgaaagaaaattaaaatttgaatgctgaatattctggctctactctggccttttttctggttcccttccaaaatgcacaaatcatacccttgtctgctccaattcagtctccaaacctggtgcctgtgctcctggcccccctagcatcatgctatcccaggagtatcaggaccagacacatccacagccaggctcatgggtctcagacagcaacttgagttaaagctgaaactcatccttcttctctgtgttttctggtttaaaagctgcacttatattttagccttattattttctgtagttccggagagatggtgggttgccattctggtaggaaaatctgagttttcttatctttgacctagaagagattctttttggaccaacctgcgaaattggtagttaggtctatggaaagtggtaggattttttttttttaatcctgtgcaaaggaaaagaggtgctttgtgggaaatcactaatgagaaggctaacctgcagcaccagagaaacctttccaagtgctaggcaggagaactgaagaactctttcagtgaagtgagtcagcctagaagaggcaacccacagtcttgatttttgttgctgtttcctgacctgttcttgcctgtcacctgggcctacacaggtcccgagccaacggggctttcatacccaaggatctgtttccttgctgaaaatgaaaccctatctttcactttacattcctttcaatccaactgatcaaaactggtacccacacttgccctttctccctctctccagcacactcccctctaagaaagtaaaagcaaagctttcttaatggcaacactttgggcctgttctgttgctcctgccttatttctctttcaaccctgtacatgactcgtgttcaccatccccttgatcagtgtccatccgcgctaatttgcatcatgaactgaacagtgtgtgagtggtcacctactaaacccagctctgggggcagagctgtcttccccatctctggtgctcctaacacctgtgagatggtcctgtcgagaggactaggaaccgataggaggagagtccttctcggcagagctcactgcaaacaactggaattgaggttgcacactgtgatttttacaccgaaaagccaaaaggagctggccatcca

SEQ ID NO: 58184 - DNA, 1056 bp, Homo sapiens
cagacagcaggagaggacaatgcttcaacaaagcagggaatctgctgttgaatgccaatggggtaaggtgagggtggcatagaaagggaatcattggacaagagcattttcagcagagggggaatgagtccaactggagtgggttaggtggcaaatgggaagggaagaggcagtaacttgacaactcgttgaatggggagcatcgagagacaagggtaagatgggcagtgcagaggtgcatttgttggtggggtgggcaggatgcagtagaacgggaagaatgaatgtgcaggagaggagagggtgagctgcagggtacaagcgggagggttggccatggccactagaagaggctcaagaagaggcacttcctgctgtcgcgtgggagggaaggcaggtgagtacagacacagggcaggcagtggatgtgggggaggaaatgagggggctcccttctgattgcttcttttatctaagcgaagtttaaggcaaggtccttagctgacagtgtaggagggaacagtgcagaggaggtttgaagagtgaagacaatgagagaaacacttgcttttcctcgaagagagacgacgctggcaccggcgccgatttccttcagtggcctggatgctgcctcacagcttgtcccactgcttggggccatagcagcaagattggctgcagtgtttgtccctccttctgcacccaaagctcctagccagagctgacccctgaaggtgacaaagagctgggctctgagacctcgtccctcagccctttgcccttgtgactgagcacagcaaatacgtatggcctggcaatgccccccagcctcttccatatgcaccccaaccagcacccgagtcctttcccctcccctttaaggcactgggccggcgagtcagttgtgaaaaactggctcaggccccttagaggtggaaaaagaaattaatatcttttcagagcagaccaggtgccaggagcttcatctcattttactttcaaaccagccctatgagaaacgtcgagtgacgtgctagggtcatccacagtaggtgg

SEQ ID NO: 58185 - DNA, 1033 bp, Homo sapiens
agactgtccccgaccagagccagctagtggcctccccgtctgtccccagtggccggcatgaaccacctgcgggagaacggcattgtgcatcgcgacatcaagccggggaacatcatgcgcctcgtaggggaggaggggcagagcatctacaagctgacagacttcggcgctgcccgggagctggatgatgatgagaagttcgtctcggtctatgggactgaggagtacctggtgggtgagctgctcgagacccgctgccctatgctgagggctccccttgccttgtgagccccccagagcccccatgagggggtgtggcccacctcctgcttccacaggagttatgtctctcccctgtaccccaaccagaagaatgcattctgttctctaagatggaaaaggtgaggctgacacccatttttaagatgacaaagaaggatttgaacagttctgttttcacctgcaggcggtgaaagggggtctgacaggtctcaggcccttgccagccctccggctccatggcctcattctggttctctccggcagcatcccgacatgtatgagcgggcggtgcttcgaaagccccagcaaaaagcgttcggggtgactgtggatctctggagcattggagtgaccttgtaccatgcagccactggcagcctgcccttcatcccctttggtgggccacggcggaacaaggagatcatgtacggtgggccacagggcagggaatggggcggactggcagtcccctggcccttcccccaccggtccttgctgtgtcttctggtcccctcacactccatggccctcctctggtccaccccccaacccaggctctttgtagatctttttttgttaatgggatcaaacaagcagctgagctctgcccagggctgatgggagtctgtgaatatgctctatgttagttcggtgcttcactctagccctctgctcccttactgctctcctcgtctcaaccgaagctcaaagagtgccttgcctaaggtggaagagctcaccaggggcaaag

SEQ ID NO: 58186 - DNA, 1048 bp, Homo sapiens
tggataaggaggactcctggatctctgaacctgggcctgggccctggccctctctagccccagtattgttaactgtacattgggctggaggtggggagacaggtggttgttaacgtggcactctccagctccgtcattatgactcagtgatcacagctttcctcttaaaacacaggttcggtttggtccgtctagcggtggtcattttttagaagaatagtctaaattcttctggacctggtctctcccttctcttcccaggccagagatgggtctccccctagtgcttcgtaggggaatcttcacttttgctttttgtttttcccttggaggtaatttttaggtaattcctaagatttccagagtccagtggccagggaattcccagccagctttgctccatggcttctccctcacggtaatcatagtcctctgcctcccaaatctgtagcagaagagaggttcctggggctctgggggctcaccagaggcgggagctcaccctatgaggtggtttctgaggaatgacccatgggacagtcaaccccacagtgctaccaaacagaggagctccgatgaggggtgtaagccacaggccaccgcctctgccccacccctcctctacctttcctcttccctctcctaaccttgcttttgctacatcagtggttttcaaaccttggtatgcatcacagtcatctggagggcttgttaagattattgggcttcatccccaaagtttcagaatctataggtctggggctggggtttgagatggctcattttgagcaagttcccaggtgttgatgctattgatccagggacccaacttggaaaaccattgctctaggtctgaggtggtgattctgagaatgggcttctctgttccttctccccaggacaagtgtacttcagtggacctgacagataaaagcccaatgagggctattcctgaatactttctgctgaaggtgtaaaagggaaaatacaatttgcccttgtggtctcttattttaatctcccactttttctgcaagcagttctcttg

SEQ ID NO: 58187 - DNA, 1030 bp, Homo sapiens
gagctaccttgagggccccagagagaattttaatatctactttggtgtctgagcaacaactgagcagatcttatgcctttccctttagtacaaaatggtcgctaaaagtgtatgtcaatcccatccagccctgccacacagaaaactgatacagtcattttggaagagagtaaagaccaggatcttggggtggtctttggctctctttcctgtgcctcagttcagcagaggctcccagcttcaccccacctgtccagcactttcccttctcaccggccttggaggaacctgcttccataaagccctccaccccaacccactcttttacatgggaactcagcatctgaaccaaactggagcttgctcaggtgcatcccctcttggctgttctcacagagacgacagcccctgtgtgtcagctgcccatcttgcctgtccacatgaggggctggccatctctgaccttagagttgcaggacactcgtcttaccattacattgacctttcctgtttgcttcctggcttgctttctggcagtgtgtgtgtgtgtgtgtgtgtgttggagttggggctggggttgtgtggagggagggagcagttgtgtgcctccaggccctccgggctgggctgcaggatgctgaatgcccccagggtggtctgtcctctaaatcaaggaactacagtaagtggtctcaagagggctgagctttgcctccttcctggaaacataaggatgcagatgtcctgacctggctgcctgacccttggagtggggagtttccattcccttgctgccagcctcactaggagtttagccaggagtttgaaaaacttatagatcatgttgattttggcaatggctgcagacctccaggcttgactatcacagtctctccgccttcccattcaccaacatgacctatccttccagcccccctgccttactcctctgcacccattaaaggcagaagttggagggaagtgggagcaggtgggaggaactcagatgagcaggaaagttgcacagttc

SEQ ID NO: 58188 - DNA, 2001 bp, Homo sapiens
caggtaattctgatatacagttgaggttttgaactatttctctagagtgttttgttgctgcctgggaaggaaatggttcctgtttttaaaccaaagtttaggtgctgtgcctgcctctcactgccagctaggctgcaagccctcagtttcagagggtgagatttttgcataattaggtgaggaagaggcactgcaaagatggggtttcttttacttggcagtggaaaagataaccgtttctgatatttcttgggaggaatagaaatatcctataagaaaatacactgggatggggttggtgtgggggatggcttgctccatggcctgaacagccatctctctcccttcttccccccagttctccttcctcacctgcctccagaaaatacacctttggtttggtccctgcagaaacacttcctgtactttgtgtcttgaatccaccttgtatcttgaggcctctgtatatcttcctgtgtcattttgctggagtctgtaagccctcagaagacaggaatcccttctaagaaactccttttactgaaccccagagagggtgatcagggataaatgcttcagggtggtgggcacggcccctcttatccttacgggaagcatcttgactggatattcaggtcagggacagtgttcctcagcacgaggctggccttcagcacagaactctccagggaggggcagggctgggtgagcaagtgcaggggtggactgaggagggtgaggcaggctgagctggggacgcgtcctccaaaggtttcagtctttcattcttctaggtgcctttttaccttcaatgacacttttccactctcttttctcccttggatcacttctggaaagggttttaaagagctctgccatattctgaccccattctgacctcttacagtgcttttattcttacccaaagagagatcacgcttgagctcctaagagaatttctttttcctgtctccaaggaaaggagttgatgtgtttcccggtcgtcgagagattgaggccctcatctgggaagggctgagcttgcttctataaatagccttgtcagaacaacctgtgtggctgctcagtttgtgcctggctagaacagagcttcagggaagcctcactgctgtgcgatgccaccacctgggagttgccactggtcagtcccaggagttcccaagactcctctccaatgccctttgggaagaggtcggaggggtgggaaaggtctccccatttcataggaagggggtgcctaaaggtcaggagacagcaagggagatgggggcaccaggccctgggccctagcttggtctctcttttcagaaaatggcagtttcctggggccacgtgcctcctttgagaggggccggggacttggttttgaatcataccacagttttaggaggctgaggcagtactctcctggtactttcccacttggctaggcacaattagatcgtgtttctctgggtcaggcatgtcacaaatggggcctgggggagagccagcctgtgggcttgggcagtgcagacgtagatggtctcagtaagaccatcatagttacctcaatctaaggtgttgcctagatgggtagggggacttatcaggtcacaagacaaggttttgatggacccaaggttagaacttccctcttttgcctcccaggccagagaattttcttccttagtcccacaaaagatagggtttggtgatttgtaggactggtgactgtgaagccaggccaggccctctgtccatccctcatatttgttcatttttttcctatcagggatctgaccctggaagtggggccagcttccattcttatcaatttcccaaatgcctacaggtggtggccatttaaggctttgacatctgagcgggaacacaggcgttctgaactcttggcatgttaaacaggctctgggaccccaggactctggcaccggcccagagcattggggtgagtgctctgaggacaatacagctttctgc

SEQ ID NO: 58189 - DNA, 1043 bp, Homo sapiens
aactggaagtagacacgggccttttaatgaaatgaacatgacagtaatgaacagggcaataaccttttatcttgggtgtctgctcagagtttaaagcatgattccattcacatcatctcctgaaagattaggaatggtggggcagattcctcccattgcacagatcaggaaatgggagcctagggtgtggttttcctgaagtcacatgcagagtcagggactctgctcttgcctccctgcccggattccacagatctgaacaccacatgggcagctggacccctggtgctcaggagaagcccacagctcccacccaaggccggcaggagttttagagggtgggcttggacacaggtaggaagggaacggtctggttgggttcactctttctcctaccttgtccgtccttgtgtatccgcttaaaaagtgcaaacttctggggattgtccacaaccatgaacttcttgagcagcccctggatgacctcactgacggtggtggtgctgctgatgtgcagctgcttgatggcatctaggggcaggtagaaggatgtccgcttgtccgtggtagccgccaggttcacctccttgatggcatcatagatggactggggccggatcccagcaggcaccgtcacaggccgccggagtttcagatgcactttgatgaaacccgtgtaggtgccgtcttcactctgccagcgggggcatgtcacagggggtcagggccgtccgccttgcatgatcatatctgccactcggggccattgccccagcagcacccacctgtctccttgagttctttcctgcctctgctgacgtgggagagctggaggaaggagcagagatccctttccccatagtgggctgggagaagaccctcaggatccagctaccaaagaggacctgtggggctgcagtggatttccctcccaggaggctcaggccagctccctaaacctcctgtaaccagttgcctttggtgagtgcccattgtaagaggcagggtgtggggtagccactctagtttgtacctctgaacca

SEQ ID NO: 58190 - DNA, 1056 bp, Homo sapiens
ggtgacgagagaggcaactatttggttggtgaaaggcttgcagatcgagagaggacgtcagctgtttgtttcacatgagttctgatccttggcagaatctgtggtggggcacagcctgggggcgggcacagctgaacccccatgcaaacacttgtccatggaagagacttttgccacagctggaactgctgggcaggcacaaatgcacctgccagagatgtcctgagaaaaagtgtctgttgcaaaataataattaataatacaaataaatctgaatgcaccaggaggagaggaagcaggaccggttacccaggtttgccctgggattctcttaaggcctcctccagtttctgcctaaacttgtcatacttcttttgcacttgttggattttgtcctgctcctctttttccaggattgttaggaagttctgaagttcagggatggagaaggcatcccactgtgaggcgagagggagatttgtgggaagaaacagaataggagacaggttagaagttgacacgacctgagagaccctgctgccttccccttcccagttcacatccgtgattcacacacagtttgctactgaacagactgaatcagcgaagcctgggctttgcatgcctgtcatagcagcaacaaaattccaaatgctggcatctcatgaccaagagttgccagtctatgaaccatgtttttattttgaaactcaataatcttaagtttctgtgtagcagccgagatcttgacggtgatgctggaaccacccagcctcccaacatgcagaccctcagaaagcaggtggaggagtggaacgtggactcaggagactggggttgggcctgactccacctctcccagcagtgtgacctcgagcacagctttccacccttctcagcctgttatctgctgggaaattggggtatctacctcccatgactggcagagcagataatgagagcctgactggcccaggcgtacccctaaaggacctggcctctgatggcagaaggcaagttggacttccatcaggctgacccaagagcacaagccct

SEQ ID NO: 58191 - DNA, 1053 bp, Homo sapiens
tagtctccagagcttcaaaggcaacacaagctcgcaactctaagatttttttaaaccacaaaaaccctggttagccatctcatgctcagccttatcacttccctccctttagaaactctctccctgctgtatattaaagggagcaggtggagagtcattttccttcgtcctgcatgtctctaacattaatagaaggcatggctcctgctgcaaccgctgtgaatgctgctgagaacctccctctatggggatggctattttatttttgagaaggaaaaaaaaagtcatgtatatatacacataaaggcatatagctatatataaagagataagggtgtttatgaaatgagaaaattattggacaattcagactttactaaagcacagttagacccaaggcctatgctgaggtctaaacctctgaaaaaagtatagtatcgagtacccgttccctcccagaggtgggagtaactgctggtagtgccttctttggttgtgttgctcagtgtgtaagtgtttgtttccaggatattttctttttaaatgtctttcttatatgggttttaaaaaaaagtaataaaagcctgttgcaaaaatgactcatgttagaaacgtctcccttgaacttcaccatcttacggacactgggagcgggggagagagggtgagaatggacatgatcacatgcttcctggtggagtcagattttcttttgccagtgagcagagaaatgaaggctactgttcaaataatttgggaaaaattgtccaaatgcgtaggcgggagggcgctgcctgggtgaccagctgttccatgtctccgcagtgcaagagagtcaaggagactgattgcaggcagagatgctgatgtgtgggaaagagaagggccttctggagctaagggtgatttgacaccaggacaggctactgagctgagccatgattcttctacttctggaattatttaaaaataaggtagaaaggaatagatctttaaaagtttaagatcacttcacctggaggaagggggctagatcaaatgaccaaaacaaac

SEQ ID NO: 58192 - DNA, 1031 bp, Homo sapiens
accccagccttccctgccaggctctctctggcagctcctacacccatgttgcaggcaccagctgtcctggtctccttgcagttctccagattctccttgcatgttcacccacatgtgcttccgcctgggctatccccttgcctaagatgccctcccacgcccaagcccacctgacctcagaggctcactggcccagcccaggggtcctgggaggcctgagcctaaattagcattttaaacattgctaatgtagcactttccaattgtgtttatatttccggttaatgtctgcagcttggctaattttttctaatgtctgaacctcctgccagactgagctgcatgagccagaaaccttgcctttttcatcctcagggcctggcggatagtaagtgctcatttaggcaaatgtattccatggcctatggcagtacctgacagttaacttctagagttgagcctctttatgtgaagaaccccatacaaggtactgagaagaaatgttatgagcaagagcgaggagcacagactgaacagacacattctctctcgtgaaaaaattataaatgcctgaaatacacccagaaagtagctctcagtgtgaaaatttcagaaatatacacatcagctgtgaggtgtaggcgtaagtggtcagtcccgaagttgagtttgagctgggtggaatgacattgtgaggcaacggggactggtggagggccagccggggagcaaggtcatgctccgctgaggagtgtgtgctttttggattgtagaagagtatcagctccctcgaaaacacatccaaggtctagaaaaggccctcaaacctggcaagaagaagtgacagactcttttgtctcacgtggtggatccggtggaaatccaagctctgggctggtaatttttatgagcattttcagcttttgcaaatacaaaatataattctttacaaaaataaatttttattctaatctaaatctgacttccctcttgtttcctccacttagctaaaatgtactaatttttgaagt

SEQ ID NO: 58193 - DNA, 1018 bp, Homo sapiens
tttgtttttatgtttaaatgagccttgtcttttggagatacatactgaaatatttatagatgaaatgatctgatgtctggggaggtttgctttaaagtaatagaggagtggggagtagacaggggtatagatgaatcaaggttggccatgagttggtaattgttgaaactggtgataggtacatgtgggtttatatattattctgctttcatttatgttttgaattctccaaataaaacttaaaaaagaagtagacattctgtgtgatacagagagtatctgtccctctaaatatgtaatacatatattggatggggtagacagaatcaatttagaagcacaaaaataagtgatttggatttaaaaagtactagggttataggaatggtgaaccatcagagaacacaggggctcagaaggctgctgaggctctggaaggccctctggagggaagggaatgcagtcaccaccgtcagtctctgtccccactgtccccccaggtgaccgtggtccggaacttggaggcctatggtctggacccatactcagtggctgccatccttcagcagcgatgccaggctagcaccaccgtcaatcctgcccctggggccaaggacagccttcaggtgcagatccagggaaaccaggtccaccacctcggctggctattgcttggtgagcatcccctctgaagagtggaggcattggtctagctcagcaaagaccttcctgccaactcaacttgcataatacacacacacacacacacacacacacacacacacgcacacacacactctctctctctctctctctcgcgctctctctctctctctctctctccatttagtttttagtagctatttagagaagagggaaccagtgtttgaatcagatcctttggctccttccaaattcagtgttttctcttccactattagagtagttttcttcctggttggtccctttctataaaacatatggcgagcacccaaacttttgtgctaggcccattgtt

SEQ ID NO: 58194 - DNA, 1020 bp, Homo sapiens
atgtcagaaatgtgaagcagcactcgcaggcaatgggccacttaaggcacattcttgagacaggtagtagcctccacagggcagactgggcagattctcaaaaggccaggtcagtggaccgtttccaggggcctaagtcactgatgttcccatctttgaatcagtgggtgtctaccttggccgcattttagggagctttaaaaaatacatagccctagtcagagatacagatttcattgatctgggctgtagctccctagggatttgaatgattctaatgtgcagccaaggttgtggacctgcaatttcagcctacacctaactgcctgctggtagtggggtatgaggaaatggtttctgttggctttatcagtttgcaactcataacttctgtttcaggtgtttggaaaaattacagcctgcctatcaagtgacccttcccggacaagagcccattgtgaagaaagggagaatctgtccaattgacatcaccctagcacaaagagcgtctaataaaaaggtaattttagaaagacacaatgttcaaggatagtgatttaatgttcttgccaagttctggtctccctaatgtgattggaggtttttagattggcctcaaactcatcaaagatttttttatgaaacacccgtgtttatgtgcctgggctgggctctgtatgaaacaggtaaagctgaccccgctcactcactgccctctaggattttgttctaggaaacttgctagagcctggttccaaaagtaaacaagattgtattttcatttttttcttagaactatgttatggacattcagctcccacatattctttcacctcttaggccttgctcaatgaaaataacttgtaaaaaacttgctgaaggaactgagtgtgtttagcttggcaacacaaaattgtggggaaccaatgacatctctcctcaaatatgtgcaaagctgtcccctggcaaagtagggcacttattctatatgccttgaaaggacagaaataggattattgg

SEQ ID NO: 58195 - DNA, 2970 bp, Homo sapiens
tgggattacaggcacatgccaccatgtgcagctaatttttgtatttttagtaaagatggggtatcaccatgttgcccaggctggttttgaactcctaacctcaagtgatccgcctgcctcggcctcccgtagtgctgggattacaggcgtgagccactgtgtccggcctgaatttatttctttttgagaatctggctgtggttttttaaaaaagtgattcttaatgtaatgtcttcccatttatacttgggtgtctttaagctatcctgtacaaatgtggtgtctggagtgtgtggagggatacttggtaatctgttctgactttcttgggttgcaaatatatggtaaaggggccccagaatattctgtaggataggattctggggtggattctagaaggactcctcgagaatccactgctattgcgtgtcatgttttgagagaagatgtaagcttttatcaggaatgttctctccaaaactaattgctgtagtgcaggggtcagcatgtttttctgtaaagggccagatagtaaatatgaatattttcagttttgcaggccacaccatctctgttgcaactgctcgatgctgccattgtagcactaatgtgaccatagacagtagataattagttggccagacctgaccccaggatgcggcttgctgggccccactccaggcctggctgcccacagtgtgagtttgctgttgcaactttggaggccacagaaggttgtctggtctgggaggaatctaaggctgtatccaatgtggtagccactggccacatgtcgctattttcagtttaaattaatttaaagtaaataaaatttaaaattcagttcccttggtcacattagtcacacttcaagtacttactacccacatgtggctaatggctgccctgttagacaacacagagaacattccacgtctatggaaagttctcttgaacagcactgatttagaatgtcccatagtctgcgtccctctctgctgtcatccctgggcagagagttctggcacagtggcctctctctgaaggtgggggaggaaggctgaggaaaaaggccctcctctcagtgtcaggcaggtcccagtatgactgctcattagtttaatttgccttttccatctgccatcagccctgaaggacgacaactggacataaagaagtcaagctacaaaaaggtaagcaaggatcttctttgcagacccatgcagagagttgtgtaggggcacatatgacataagccagatggatgctggggaagccttgtctaccaggctcagtctagaattaagctttttgactccaagtataagggggaagaaagaaactctccctgggctgaagcagttggtggcacccactttcctttctcctttgacccctttatatctgattagagttctgaacggcctcactggttagtctctagcagcttcttgctccctggccctcaggttgggggcctcccagttcctggttgatgaaggcaggggctgtctcatatccctgcacagtccctgcctagctcactctggcacatcctgggtgctcagtatgtgtgtggaatcaatgaagtcccctaccactggccctctctcccttagctctctaagttcctgcagcaaatgcagcaggagcagattatacaggtgaaggagctgagcaaaggggtggagagcattgtggctgtggactggaaacacccgaggtgagtgcagggggcctgtcactgtagcccagctggccccagggcacctgggccacggactggggattgctgagatgctagtataaaatgtgttttttctttccttctgctgggttttaggattacatctttcgtcatacccgagccctccccgacctcccagactatccaggagggtagcagggaacagccctatcaccctccagatataaaacccctctactgtgtcccagccagcatgaccctgctcttccaggagtctggccacaagtgagtttttggagagcagcccttctctgcctgcttggtgttctggcctacagttcctctcaatctgagtagtgctcttttgcgactggcaaaacctgctctgcccctgttctccccttctccaaaatccagcttccagccttcttccctgggcaagttcctctggactaaatgaacgagtaggtctcacccttttctgcgtgtaattattcttcacatggtcatgctcacttcagtcaggaaaagggaagaaactagaggccgaaagctaaggaaagttccctgctcagcagggagtgagtctgggcatctgcatttttgtctcatggcacagcatgaactaacccctgggtcacttctcctcacctaggaaggggagctttctggagggcagtgaggtccgaacgatcgtcattaactacgccaagaaaaatgacctggttgatgcagacaacaaaaagtgagtgcatgagaagcaccagatctgtcttattgggtctttgtctttatcagacatagacacatttggggaggatgtctgggagggagaatagaaaaccatagcatcttagaggtaattaagatcagtggtttccaaaccatgggctgtggacactcagagttattgtctggggtgttcagatccatgtatacgatcaacattgactaccgactaagtaaatattctctcacaaatacccatgaatcatctttaattggctattgtgaggaataaaatgcaagcttacaaagaatttactgaagtcatcatagctttaggtatttatttttattgatagatatttgtacatatttatggggtgcacgtggtattttgttacatgcacagagtgtataacgatcaaggcagggtatttggggtatcatcaccttgagtatttaccatttctatgtgtcgggaacactgtaagtcctcttttctagctattttgacatacacaatacattgttgttaa

SEQ ID NO: 58196 - DNA, 1047 bp, Homo sapiens
tcaaggtataactctaggaggagaagagcccatctccccacctctcaatttaggagcctgacgaactccactccactgctgactagaatggcccttaagcttccggagggggaggggaaggtccttattttctgtgagggtggcgcagcagccctttcacatcttgtttttgaatcctttccacataagtcacgtcttcctgggagctaatccgccctggcatttgcctgtcttcagctacaaagccctccaaggtttcttctggctcaacttctctgggtgaacactcctagcttggtgggactttgtggcttgactccttctctggggtcaaccctctttaaaggctcagtgctcaagagaggctgggagctttggtacctgggaatgggttcctttcagagccaagtgggtgaggtagggatgaagctgggggtcgttttcttgtaccaggtgttctgtatccctcaggaaggatgtggctcttgtcttttccctgcagaacaaatggatgagctgttacagcaatgcttcttacatgccttgaagtgccgagtcaaaaaggctgacctccctttactcaccagcactttccttggcagccacatgttctcctgctggtatggaaagcactgatgtgggctggaggccggggccggggtctcacgtgtgctccttggtagtaggacaggatggggccaatgcagggactggttgagggacatgctgtggaaagagtggagggaaggcttatctgacaaatacattagttcctgggttctaaaaagttaattcttagcttgctgggctgttaaaacaaaatcttaaattttagccaatgaaaggatattgaggaccggaaagttaaaattcctgagattctgtgaacactgcctctgccgtgggggttctgggcaacctcacaaatcgggcagcgtgtcctctgcaggaagtgtcccagggcagcctctttgtcaggaatcttcttctggaacattcaacctcctcacacttctgaaaagtatgtggggggccacattaggtttt

SEQ ID NO: 58197 - DNA, 1055 bp, Homo sapiens
tgtctataggtctcatggcatagttatttaatcataaactggcatatttgcgaagcatgtatgagaaaggagtgggcccaagggctaggcatgaagtcaggaaggcagggctgtttcctgtgtcaggctaacttggattgttcactgggcctgttttcccacccataaaatgggaaggcataccccaggaatgagtgaaaatagatgacaatggatgaaaaagagtttaggatgtttcagaagagtgtgtgtgagactaggacatcataaaccaggcaatctttctttggcccttgtgattttatagtgagcacttttgagttcgttcttgatatttattaaaagtctgtccaggcagcattcacagtgctggtgtgctttccacaggagaaagcttcgagctgatgtgacaactgctttccccacccttggaactgatcaagtctctgagttagtacctggaaaggaggagctcaacattgtgaagttgtatgctcacaaaggggatgcagtgactgtgtacgtgagtggtggtaaccccatcctctttgaactggagaaaaatctgtatccaacaggtatgacaacaggacgaagatggccattaccattaggtagttcttgcctaacatctgcttctctctgtttcttccattgtctcccataaaataagcaagcacgaaatctcccaataccatccccaaggatctttatggacctggtgttcctagaattgggtctttcaattctaggatgcaaaaggttttctcttatgcaaaaccactataggagggattaaaaaaagggctgacatagtaagtaagggtggttgcaaagggaagttctgagatgaaggaacagtggctgagaagtttacagtgggttgactaggaatagagcagaggtcttgaaaaggatggaatttcagggcatgtcttcatgagacagagtcttgctctgttgcccaggctggagtgcagtggcgcaatctcagctcactgcaagctccgcctcctgggttcacaccattctcttgcctcagcctcccgagtagc

SEQ ID NO: 58198 - DNA, 1012 bp, Homo sapiens
cctccccccatccctgtctcaccgggcgcgggggacggggctagagcggagttagagcaagaagaatttccacccctggattccctctgaaaccctagatcggggtatatgttaagggattacgaaaatctaggactttttgtggggctttttattaaagggggggagcccgggagcaataccttggaaagaagccctgttgcttagagcggataaccaacggctgaactcttggggtttgctgtgaggggtgcggtctagcttcgaatgtacaggttatgggctatgctgggtacggctttctccggatcctattttgagagattccccaccttgcgttgtattttacacctaaatggagagaagagacccttgctccccgctttatttgcatgcagactcttgttaatttcctctggctgttagtcactaggcaattttgcacgttttctttttctttatatatgtggacgcctatcctggtttgttttatcaggcttatggcaaagggtcagtcacatccagaatatttggtttctgttggtgaagccattccctgttaaaaatataaataattctatcagaatgtgagcatgtttttaaaaagagcattccaaaaatatttgtagcggtttttttccctttatatttttataacacatctataaagaaaactctagaatgaatttcacaaaacagtttttaaggtgaccagaatattccaggatattttaaaagacgttaaaaaattattcctctgcaacatcatcattgttatattcatagtgtatcatgtaaaatgatacaatgaaatgctgatgtgtgtaactgggaaatccgtgttcttggtagcagatgaaatacattattcagggccatcttgtggattaaataaatcctctccgtcttttgtgttcccttacagtggtggagccacagtgttaaagaacagagaagtgatccttaatcatttagaattttgcctccaccatccaccagaaaatgaagtgga

SEQ ID NO: 58199 - DNA, 1107 bp, Homo sapiens
aataattgaattgactcatttgtaatatttctctttcacgtttctgtgtttaagacctgaaattgtttctatatggaaaaatcacttctatttttcatagtccttcctgtggtcatcagtttttgcttaaaatcaacctttttccttttttttttttttttttttcctgagacgcagtcttactctgtcttccaggctggagtgcagtggtgtcatgtcagctcattgcaacctccacctcccgggtccaagcaattctcctgcctcagccttcctgagtagctgggattacaggcgactgccaccacacccagctaagttttgtatttttagtagagacagggtttcaccatgttagtcaggctggtctaactcctgaccttaagtggtccacttccctcggcctctggaagtgctgggattacaggcgtgagccaccgcacccggccctttccccactttcaacactagtagtatacaaaacgtgagctaaaaatattttgaaggctggtcaccctatttttcgtcccctttttggagtgtagtggggtttctttccattctttgcaagttgtttctttaatatgtcaaaatgtctaagaacttcagaaccatatacatcttgtgttgcccatcagattgcttggttacttgctgccaattggttcacctctataggaaactatttgcaattgggttgaagtgttaacatctgactttaagtcattttaactgattttttttttttttttttttgagatggactctcactctgtcacctaggctggagtgcagtggcgcaatcttggcttactgcaacctcccgggttcaagtgattctcctgcttcaccctcccaagtagctgggattataggcaccaaccaacatgcctggctaatttttgtatttttagtagagatggggtttcactgtattggtcaggctggttttgaactcctgaccttgtgatgcacccacctcagctccccaaagtgctgggattacaggcgcaagccaccgcgcccagccaagtcatttttactttgattcagagttagccgatgctatttaccttccagtaggttacttacattgtatgtttcagg

SEQ ID NO: 58200 - DNA, 2355 bp, Homo sapiens
agtttgcccagtccatcttgcaatctttggatgccctccacaaaaataagattattcactgcgatctgaagccagaaaacattctcctgaaacaccacgggcgcagttcaaccaaggtcattgactttgggtccagctgtttcgagtaccagaagctctacacatatatccagtctcggttctacagagctccagaaatcatcttaggaagccgctacagcacaccaattgacatatggagttttggctgcatccttgcagaacttttaacaggacagcctctcttccctggagaggatgaaggagaccagttggcctgcatgatggagcttctagggatgccaccaccaaaacttctggagcaatccaaacgtgccaagtactttattaattccaagggcataccccgctactgctctgtgactacccaggcagatgggagggttgtgcttgtggggggtcgctcacgtaggggtaaaaagcggggtcccccaggcagcaaagactgggggacagcactgaaagggtgtgatgactacttgtttatagagttcttgaaaaggtgtcttcactgggacccctctgcccgcttgaccccagctcaagcattaagacacccttggattagcaagtctgtccccagacctctcaccaccatagacaaggtgtcagggaaacgggtagttaatcctgcaagtgctttccagggattgggttctaagctgcctccagttgttggaatagccaataagcttaaagctaacttaatgtcagaaaccaatggtagtatacccctatgcagtgtattgccaaaactgattagctagtggacagagatatgcccagagatgcatatgtgtatatttttatgatcttacaaacctgcaaatggaaaaaatgcaagcccattggtggatgtttttgttagagtagactttttttaaacaagacaaaacatttttatatgattataaaagaattcttcaagggctaattacctaaccagcttgtattggccatctggaatatgcattaaatgactttttataggtcaatgcatctttgttattatcgtcagatgtatttcaactgatgtattatactattggtttaaatctctttctctcaagatagaaggtgtagcaaaagtatcccaactactcctcgcttctagtgtccctcggcatctgttctggaggggtaatttgggatgtggtgttagttgtggctgagagccagtgctaggtcccttgccccactaggccattctctaggctcattctaggtgaaagagctcacagcagactgtggggtgggggagcaccaggaagctgttggtgacctggacaactggtgtccctggttttcagtgactcgctcctcttcccttcagttctctgatgtttggtgttattattttatgttgttattttgcctctgatttgtttcctagtcactcaaagcattttacagaagccttaccactttactaaataaccctgtaaggtactgatttaaaaactgagtcatatgcatccctcctcctttcctctcccatgcccaaggaagataaaacagcttctctgccacaattgacccagagtggtaaagatagagaatcagcatgaaaactgcagttccccagctttgtggtactccacggaccagcctccttgctgcattttcatagaatctcttccttataaaagtaatcactctcggataaaccttactacagtttaaaaatgcttccctcttctctttacagctacctgccacttcaatgtgccacatttttccccccactttcacgttaagcttaatgctattccctagatctgagtgaacttcagttagaagaagaaaactaaaaatccagaaactggtgataatcaagttttccctttttatgtttcttaattttattctcttcaacagcttttctttttctctgctaagatttaaacagtgagggctgataataaaactaattgttaagccagtgtcctacttacaagggtggagacgggacagaagctaactcactgctactgggttttgtttgttgtttcctgtcccttgctctatttctgtcctcttccagaacaaaagtatgctcaagttctatcctaaatgtgtgctcttggctgggtattagtggctcatgcctgtaatcccagcactttgggaggctgaggtgggtggattccttgagcccaggagttcaagaccagcctgggcaacatggtgaaaccctgcctctacaaaaaatacaaaaattagccaggcctagtggcacatgcctgtaatcccagctacttgggaggctgaggtgggaggatcacttgagctgag

SEQ ID NO: 58201 - DNA, 1043 bp, Homo sapiens
cctttaaggaccggccccggacgcagacgaggctgtgacgcggccgccggcccggggctgggtacattgtcgcgcggccgcttccccccggccgggcccccgccgccccgcggtccccagagcgccaggcccccggggggagggagggagggcgccgggccggtgggagccagcggcgcgcggtgggacccacggagccccgcgacccgccgagcctggagccgggccgggtcggggaagccggctccagcccggagcgaacttcgcagcccgtcggggggcggcggggagggggcccggagccggaggagggggcggccgcgggcacccccgcctgtgccccggcgtccccgggcaccatgctgtccaactcccagggccagagcccgccggtgccgttccccgccccggccccgccgccgcagccccccacccctgccctgccgcaccccccggcgcagccgccgccgccgcccccgcagcagttcccgcagttccacgtcaagtccggcctgcagatcaagaagaacgccatcatcgatgactacaaggtcaccagccaggtcctggggctgggcatcaacggcaaagttttgcagatcttcaacaagaggacccaggagaaattcgccctcaaagtaggtctggggcccggggaggggaggcggggccggtcccgggccctggagctccacggcgtcgggtgcccgtcccggcctgggtcgcggcgcggggcggaggggtggccgcggcggggcggggcggggcggccgggccggcggtgccgagtgcggcgcgggcggcgggtcccagcgccctcgcctccctgaccgcttccggccgctcccgggcgggagccctgggacccgctcctggggactcaggggaccctgccattttggggtttgagcgggatccagccgagtcagaacggttggcttcgggacttctgctaatttcactccatctcaaggaagtgattttggggttggtggttccccgtcctctcctccctcctttttctctctctgcgggcacaaaag

SEQ ID NO: 58202 - DNA, 1023 bp, Homo sapiens
cttacatggtgtcagcatccgagccacatcttgagacctggttccctgggacctgctcttggtctgggcccctttggtttttggttgctagaagactgtagacctggtggagcaaaactgagctccactaacgcatcagctaggatctttccacatgggttaccttgtaaatgggggcattggtgaagagaaggggccatgtcactggacagtgtaataacgtatggcagttatagaacccaaatcagattgctgtgtaccttttctagtttttaggaaaatactggtattttgtattttaagatatatatatatatatatatatacacacatacacagatatagatatgtagagatgagcttgttaccatgggttatgtgctagataagaaagcaaaaataagtgcatacataaatagaaagcttccagtgtttgtatgctgctaacaagttacatgaccttgaataggtcagctaaactttccaggcctcattgcacagagggtcggctcgagcagctcctgagcaccggcagggtgaggcagtagaaggcggtgctgcaggccagaggtggagggcaggcaggatagcttgctgacttgctccgggtctgaccatcagcagtatctgggtcagcacagatgccctttcgtaagcttagtgcctggctccagggcagcctgtgtccagttaatgaataatcatcactgaccagctgctccttctcttgtgtgaagacttagaaagtgttctatgctggtgactcggcagagaggatagactacgtaatttagcagggtgtgcatcttctctttccttaaaatcagaagaatcatagtgtagtggtggtgcaaagtagagatgaggaactctattccctgtttgagattcctttctcaagttatggggcatttgagggccactgtgatttctggtgcaggctgttccctgtgcacagggatctggttgaggagctaagcgaaggctgaagtccagccactgtctccttgcttggctttgtct

SEQ ID NO: 58203 - DNA, 1087 bp, Homo sapiens
tggtcctttgtgactccattataattgggtacttagatgacctagcaattttaagtttatccaatatttatgggatacttattttgtgcaaattgctacgatgagatgaataagttgtaggccctgcctttggaaacatacagtttagaggaacgaacacccgtgtgtataaaaatgaatgaaagaggacttcctctcaaaatccagatcttaccatttcttgcatttttgtcatttgacccttgtaggccagatggtgtggttcctcgttttgtatctgaaggaagagtttcagggagtgggtgggggtaagtgtctgggcaccagggtggccaataaaggatgcagagacacatgatgggctcttcaaggtgggaggaagtagagggtgggatcactgcctggcatgggcagaggatacttcatggacatatacctgtgacacagccaggggagggtgcagatgaaaatacgtccagtgggatggtttctaaggagaagtgtgagggactccactggggctccgtattttgtctggctgaggagggagagatgctgcctctccaggaatctggtaataggcaatgcttgagattggtgtgaaccaacgcatcacatagagccaggagaagtcacgaaggaggcaagaaaaagaaatggctgggctaaagctgtggcagagccctttttatcctcctttgggccctcatatggcttctcttttggtctgaagaatctcatccttcttgagtttagccttctaggtgaaggagtgggcagactgcatgcagggagacagggaggccgtgtttgtgtccttcagctcaggagctgagagaacagaggtcagggcttgggatggagctgaccgttagtgcagatgggaaagtgaagcaatgggtcgggtctgtttgttcctgagcatgtcctgtgacaaaggaagttgcaacatgtctgtctgtctttctctctctttttcttttctcctttcttttcgtttctttctctctctctctcttctttttttctctttctttcttcttcttactttttttttttttttttttaaataaagaaagaagcaggt

SEQ ID NO: 58204 - DNA, 1106 bp, Homo sapiens
cagaaggcatgacctcgacttctctctcacagtgaccttgtgtttgtgttggtggcttgaactcactcttgtgtctgggccatttctctcactgtgtaggaaagagtggttcctgtcttctccctggccatgtagtctgctgtgtgtcaccataacaatcatctatcttccggttctttttccttctctcctcacccagttgtctccagtcttaggcgtgtggaattgtgtactgggtgggggatgtgtgtgtgtgggccgccctcttgatttgtaggatccttctcttcctccacattctctgtcaactctcctccaccccctgtgagatctgtggactcaggtatacgttgctgtgagtctcattctgctcagctggggtgatgaaggtgagattgcttttgtcgcttcaaagtaaaattttagatttgctttggcagccgcacagggtcgtatgcatgggggctgcttaggccagaggcgcagtgttcctgacctccttccgtcttactttctcttgctagtttgtccatctctgtggattttttaaagtagatactagatacctagatactactaagaacatgatctttctcttcttgccacttggattttagcttaaagccaacttggaacatttagggtgtttccttcctaccactgtctgcctggtctcctagggaaagatgccttgtatcttgttctggtgtacagtctgcccatttaattggtaagtgtttattgtgactcttctctactgggctctggccccaggcctgatgcgaatagggcaggcctgtgaacagagcaaagacgagtcacttaggaggggacgagagaggccagcggtaaactaatattaccagctcagggtttatttgtcaaagcctcctttgctgtgaataaaaggttagatctgaattgggtctgagtcctggctttattacctactagccatgtggccttgggcaaattattaatacttccttgggccttggttgccgcacctgtacgatggagtcagcaatggatcctgttctgtagggctgctaggaagcttaaatatagcaatatttgctatatataaagtgcacctggtacataat

SEQ ID NO: 58205 - DNA, 1840 bp, Homo sapiens
tgatctcctgacctcgtgatctgcctgcctcggcctcccaaagtgctgggattacaggcacgagccaccgtgcccggcagcagatttcttacaaggctcttggccagttgagttgtaggcttgttcccaagccagtcactagcaaagggactggaattaatgagactggcttagacaggtcaagattgaacccctgaggctggtgagaagccagcctcctttaatacccctagccaattggtccagggagaagaaggggcatcagtgaggttcgacgagttaagtaacttgctcaagcttggaaatctagtaataactggattcatactggcatccggctgacttccaaggccatctgttgccaggttgaagtcaactacagaggtagagagaatattgctctggatttgttgtgctgggtctgagtaattgctgaggggccttttcctatggactctggagtctctcttctctctagccccctttccaatactgtattggtttttctcagtctgcctttctccccgaagccccttcaccccctgcttcccagtacctgagtgctgcctgccttccacagtagactttatggcctaagctggagacaggtctaagctggaccgaatggcctgagggctgatctcagtgtagctgtcaaggccccaagagagtcatcatgagatttcatatagagcagataaggaactgcagaggcctcaggaaatgtgccaagggggctggtggggggggccagcaggagtggggggtttgtggtatgtcggtggcgatgtcagggcatgtgggccaggggcttagagcaggcccatgtgacagcgcagttactcagaaagctgtttggcctgcagatgcttcaggactgccccaaggcccgcagggaggtggagctgcactggcgggcctcccagtgcccgcacatcgtacggatcgtggatgtgtacgagaatctgtacgcagggaggaagtgcctgctgattgtcatggaatggtaagcagccactgttctagtcccggcccagcctgttcccactcctcactcaggcaccttaccctctgaggacagcccagggatgggcctgaagcctggaatgtaaacacttgattttttggggggcagtggagagtggcggcgggctgttgtgttctctggatctcactgtggcttcatttcagtttggacggtggagaactctttagccgaatccaggatcgaggagaccaggcattcacagaaagaggtagaaagggtctgttgtgggagcacgtgcaggcaggcagggcagtgggggtctgaagggggcctttgcagtgcctgctcttggggaagggtgctgaggctgctgccccctccagcatgctgcaaggggtgcctcagctgaccagggaagctcctggtggctttgtttctggggtgggtggtggctgtggggagcctcaggctgcacagaggtgggacccggtgcactgggttttcaagcctaatgatgtgtctttgtgactttctttcccactcactcttccctcccctctacagaagcatccgaaatcatgaagagcatcggtgaggccatccagtatctgcattcaatcaacattgcccatcgggatgtcaaggtgccagctgttcataaccctgagcccgagtgctgtggggggcaacaaaggggctgtggccaccccagagatggttgccaggccaccctgcgtccttgctgcctggttcctgagcatgccattctctgccttgtagggccttgccctctctgcccatgggcaaacccctaaacccagtagtgaagcattctctggccccactcagccc

SEQ ID NO: 58206 - DNA, 1003 bp, Homo sapiens
tgggctggaaagtgtgcgccttagatacttgctatgctggattcccgggccccgggcttgactttgtatattgtgcctgtgtcaataagccctgatttctctgtgacctttacaaggagaagagcctgtttctcatcctgttcctggtacagggccactaagtgacagctgttctgtctcccacttccttcctcctgttgatgcaggctgtgtgggtatccccccttctactccaaccacggccttgccatctctccgggcatgaagactcgcatccgaatgggccagtatgaatttcccaacccagaatggtcagaagtatcagaggaaggtaagaacccaggctttcaggacaaggggaagagcccgtgtgtgtgtgtgtgtgtgtatgtgtgtacacgcagacacatgtatgggcctccatctcatgtgcgtggtgtaactgtgggttagcacctatgcccacgcctgcggggtgcgtcctgcttcattttgcctgtgtggagggctggaggcagggccaaggctgtggggctgtgcagggcctctcaagtggtacagccgtaatggtccttggggccagttgctccggcagcctgcctccatgcaccccctctttgaacctggtttccccatgaaaactggggaaaggagcaggccagggagagtgacccctgagctgtcactgccccctgtcccaccccacagtgaagatgctcattcggaatctgctgaaaacagagcccacccagagaatgaccatcaccgagtttatgaaccacccttggatcatggtaagctcggcaggctggggagccttgggtctcacgggactattccacaggacagagtcttagccaggaccctaccccaggctttcactcggaccccttttctctcttctcagcaatcaacaaaggtccctcaaaccccactgcacaccagccgggtcctgaaggaggacaaggagcggtgggaggatgtcaaggtgaggggcaccact

SEQ ID NO: 58207 - DNA, 1032 bp, Homo sapiens
ttctccatgggccaccgcccagctcatgtaggtgagcctgggcagcttctgttggcagagcttttgcatttcctgtgtttgtcctgggttctggggcatcagccagctaccccttgtgggcaaaggcagggccacttttgaagtcttccctcagatttccattgtgtggcctggtgggtcagggggagtctttgcaccaaagatgtcctgactttgcccccttgcccatcagccatttgccatcaccccaaacaactcagcttcggggccggtgaggggaggggcctcccccagcacagatgaggagcagctggggtaggctgtctgtgccatggccccccactcccccttcccttggagggagaggtggcaggaatacttcacctttcctctccctcaggggcaggtggtggaggggcgcccagggtcgtctttgtgtatgggggaaggcgctgggtgcctgcagcgcctcccttgtctcagatggtgtgtccagcactcgattgttgtaaactgttgttttgtatgagcgaaattgtctttactaaacagatttaatagttgagagtttttctttctctttcttcctggggctcaggccttaccccccaccgcctctatgtgcagaggggttttgttgggtggtgagggtgtgggttgggggtcctgggagaggagcggagggcctcctgggcgagcaggagccagcacctcattggtgaggacctgggcaggatgtgtgtagggcatccttaaagcaggacagggaggctgcaagggctcaagcccatcttcttttgccaaatgcagaatcaggagccaagctctttttggcatatgattctttgacctacatagccaccaccaggtgctggcacctttagcctgcgaaagccagctggtatagggtccagggaagagggggtgctggtgaatttggttgaaatcctggtaaagataccaggggagcaggttagtgtagtaccggcactctccaggaggcggtgataggggtcaggcagaaaccaaagg

SEQ ID NO: 58208 - DNA, 1066 bp, Homo sapiens
gcctcatgcccaacgttggcccttgtgttttgcttccttccctgactcagcccatttcaggaggatgcttttgtggtcagcaaggattcaggctggggttggctttcagggaaaatggctggggcgaagggccaggaggggtctggcatggttagtggggtcttgccacagcttttcacccccatgcccatgtccctgaccttccatgctggcatggccctgcgagtccctgtctctagggagagcttaacacctctgctaaatgcctgggtgggatggcaatggaaacttttgtccctaaaggcagatgctggcttgcatgggttcaggagcaggtgtgcttcttgaacacccttaagtagtgtgagatgtaaagaggagcatagagacactcctgggcccctaccaagtaccgatgctgggctcttcccctccatctcttcattatcagaaccctctgaggtagtcagtctcgtttccagcttacctgtaagaaactccaactcagaggagtaaagggactcgcccagcatcacacagctagtcagggattctgacctggatctcctgtttccaagtttagagcttctttaagaaagcccatggacatcgtcttggtaagggagtgcagagggggcggggaggagaggagatatgaggctggattccactccactgaggaaggtctagttttctttgctatagaatgagggtgatagtcctaggcctgtggctgttttaaggattcagtgagatggtggatttatttatttatctgagacagagtcttactccatcacccatgctggagtgcagttgtgtgatcttggctcactgcaacctccgcctcccaggttcaaggaattcccctgcctcggcctcctgagtagctggaattacaggcacataccaccatgcccagctaatttttgtatttttagaagagatgaggttttaccatgttggccaggctggtctcgaactcctgatctccagtgatccggccacctcagcctcccaaaaagtgctgggcttacaggcatgagccactgtgcccagcctagat

SEQ ID NO: 58209 - DNA, 1057 bp, Homo sapiens
atcctagggtagtagtgtttccaggaccctgatatgcaaagtatctgtacaagttatgcaaatgagcatcctgtctgggtggctctggtcctagccccgggcagttactagctctgactactgctgtccgagtgtgtgaaacgtgatcttgctccttcctctgtccaggcagctgtgggtctcttgttcctcaaacagctactgcctcttggggtaataaggcctcaagtttcagaatgagctgagttctcctagcccttaccttctgatctggagacatgtggttctgaattcaccagtcaaaggtttacttttgaaagaaaccacgatctcatctaagtctaagacagagaccttggttagctggagtctgtggtgcagagagacctggtatttgtagtaagacctagaggggcctttggttttctggcactcagctgtctccttttctggtcacaaacctattctaaggaaatggtcctcatagtgagactctagccctacccacccacaggagggtcgagggcaggaggggaaggatgacagccaggcattctttgagccagtgtgcaaggaagagaaagggtagacgagaaattcagtctgatcggcttatttcaggctctgaaaatgacagctgactcagggtaggtgcttagtatctgttggatggatgaaagcatctaaaggaaaattaacacaagtaattttagtaactcaaacaagacattatatgtacatatatagacatacagagtgaggcgtgaacctttctctttataacgtctccacctcagtgatgccaattccctctccagaaaaaacttcattgaacagctttattttttttgaaatttttatccaaaaagtttctgaaaatttatctagatacaaatatacttataagcacaactgagaagtttctttggcagttataacaagtacaaatggaatcattaggcatattgttctgcaacctgcttttaaaaaattgtgataaaatacacttaactgaaaatttaccatcttaaacatttttaactgtaaacttcactag

SEQ ID NO: 58210 - DNA, 1026 bp, Homo sapiens
ttccctgccctaatcagaggcattgacctggaggccctgtgtaggagtccccatctttcggaattagtgatgtggttagagtagcaacgtgactctctgtggacggaagaaggtaggtcggatgtgagagtctccctccatgaacatgtgtgcgtcatctgagtcaaagcttgtatctttactctcaaaaacaagtcatttttgttcctgtcagcatcttggccagcccacaacaaagagtacaagctggatgcttgtactgtgctgcgataaagaggcccagacacaggcctcaggtgatcctacagagcatggctggagagaacaggaaaggattattcccctgggggctgatggggctgccttcagcaacacaaaaacatgcttacagaaaactgctggaggacataggagtgatctgcttgcaatgaggtttttcaaccaccaggaatggggtgacctagtccagagccctctaataaagtgactttcaaactgactgcacttcaaaataatcctaagctttaacaaatagagatgcccaggcttcatcccagatgtacaaaattcaactctcagggacagggtctgggactctgtgcaaagccccctgggaattctggaacaactaatctggcattgctctaggaaatagcacttggaaagcactccagcaaggtgggagggaaaattattccagcttgaacactacaatatcaagtaatcctttctctcttcgccctgtctcttcccttccctttcttgctctctgtaacaggcaggaggctcagaagagcttcttctctcacgcttcttgcagggcagtacagggaaagatgtagctgtgtaaattccaggagggcttcaggtatatttaaatatgggttgcttgccacattcacctgcctatcaagtttgcagatgacaactgcagaatgtggcacccaggtcttgaaagtcatgaagcagaattggataacatctgtccgagtcatgacaaagagggttcctgtgctgggagtgggg

SEQ ID NO: 58211 - DNA, 1058 bp, Homo sapiens
tgaattataagcattttgccatgatgcccttttatacatatgtttttaaaagtactaaccaacatataggagtttaggaatggtgaagatataatttgattaagttgtaggtaaacagaaaggatcatcttaggctcagaatttctaatatgattacatgagtctactttataaactggtataggctatgtaattagcccgtaagttacttaaaggaccaggggacctaatttttgtcagttttccagtcacattggtgccattcaggactccagctgtttacaggaaatatgtacttagcagaatagtatttttccttgaaaaaaatttgaattcagcctaaatacagaatgaatatgaatagtttgtgaaaagggttagagaacaacaatattcctatagtttctgtattaatgcagtagagacagaggttcctaacgcaaaaagaaaaccacaagtaaagaccgtcaaattagagctttagaatatgacttgaaaaagtagggatgggcaaaacagcataagaaaatattttttcttaatgcagatggacagtgttttcttgttttaaaaatgttttgcctatttgccagcattttttgaagtaatacactgctgctacctggaagatgtctaacttcattttctacaactcttatgtgattttgccattgtcattaagatgcattgattttatttatgaggtgtatgactttaaatatctaaatgctgtattaagtgacttgtttcaaaggaataaatgaagtgaaaacgttgtttgagtatattttgggatcagggcagatatggccactgaacggctattttactcaatatacatattatcaaaagcttaccgaatctttaactaaggtaccaaaatctgccaaatatcaccctttaggcggactcaatgaatgagacaggagaaactaaggtatttctccttaacgaaaggttgaaattcccattcattgactaaatttttttctaaatccaatcctacaagttgtaattcaatatttgttgctgacaagttgtcagtgtggaaaggctta

SEQ ID NO: 58212 - DNA, 1847 bp, Homo sapiens
atcttccagataaaagttttctacctcttttcttaattattctgatcagggatgctaaattataatttgttatgtattatctcacataatgtgaagaggcttaatgtgaagttttgttattttggtctcttttttattaagtatctcacttagaaattcagtggtatactttaaagcacttggatctttttcagcatatctgcctagcaaatgttttaaaattgacatttatttttagcactttcacttggtgaaggtggccatataaaattaaggaacatttgaacaatataagagaaaagaacttttaaggaacaattcacaaagtttgtttgaaattgtcagatgacatttcttgagtaccttttgtgtgcatagttattttagacaatataagctgttatggtcagcataacttaaaagtgtttagttttctattttactgagccttaaaaatagcactgatgagcttatgatacttaatgtttggcaatcataatgtgttcaaattaatgggattgaaaatctctccacacctgactctcatctgatctggatggttttggttttgtatcttttttacttctcccagaaaatactaaatttaaaactgtaaattaagaatataccactagataacaattatcaaattgagctttatgcatcattactcagaaagcttgccttcctttctttgctacttcaggacacagagttgacatttgcttactacagctttagatctagaagtttattcgtgcaacaaatatttattgagtaatttatactgtgccaggcatgttttgatatgtttctgtcatatgttttgatatgttccaacataagtttctgtcactttatattcagtatatattttctacagtgggtaaatttaacaaatggaaaggaatagaacactgatattttacagaattaaaccccttcattgtaagggctttgtttacatattaagtgtcaagtatttattcaggggatcttatttcattgtattttatctgttatctaggttgtccatttaccggttggacactgatactctgtcaaattcctttcaaaaatgactctttagtctgctgaaatttagcactagtactttagtgttctgatcctggaaaattcaaggtgaagctttatttgtggaccatctgatttaattattgaggattaaaaacctaaacctttgctcattctaaactcaagcttttaagcctcacagaatttacaggggtttgctttttgtttgtttgttttttcattttttactgtgcttattaaactcttggaattagttattaaagggagtaaattctcatcttgggaattttgaaaatctatggacttacaactttcaggaggattaaatgtcttaagttttgtactagagcagaatgaaatctttcctattcattgagtttttgcctgccatagaggaatttttttaaaaattaaaatgacagtttatattagtggcaaagtgaataaagacctcactttcccaccccacccttcttcctttctcttacttttctttggattaaaggtcaggtgtagtactatgaagattcactcctgaataaagtgatttcagaagctaaaatttaacatacctggaaattttgtgatgtgttagccaagtgaagacattagtgtgttccatcttttgctaatggttcatggttgatttcttcattgtttcccatgaaattagcatagtcaagtggtacccttgacgcttgactgctggtcagtttgaccctgtttttaacaactaatgtagtcatgccgcttgattattccatgaagtcccagcaaaataataatgagga

SEQ ID NO: 58213 - DNA, 2279 bp, Homo sapiens
tttcaccatgttggccaggatggtctctatctcttgacctcttgatccgcccgcctcagcctccccaagtgttggaattccaggagtgagccaccgtgcccggcctcactgtttgcaaaactgagtcctaccgttagattggagttaatttcctggtaatgtacttcgtctatacataacccaccccaccccaactgctgccactactctgcccagattcttaaaactagaatctgaggtcatgaaaccttgagcaggacacttaattcgatgaatctcaaattttcaatctgtaaaatgagaagaaataatggtggcaaaatctgcctaattacaagattattgttaggactgaagaagataacgtctgtaaatgtagactcgtaagtcagaagataaatgtaaggttctagtgcaactctttttataggtgaggaaacagagggctagagaagtagctgctaactgggagaaacaggactgaacctgcctcttggcccagggtgtttttacttataccacacggatccaatgcactgactttttttaagttatgtcttctttcttccccttcccttttttacattctacttctctgtttcagacatctgaagagctgccatgtctggggcatcttcctcagaacagaacaacaacagctatgaaaccaaaaccccaaatcttcgaatgtcagagaagaaatgttgtgagttctggcagagaggagggactgctctctctcagcattttatcttgggaatatagttataatcctggactctgctgcttggtgggagtgataaataattatttgacatggaaatttaatgcaaagtctccagggtagaatgtcctgtctaaaacaagtagacttagtgaaatgtctgttcttggggcttgactactggtgtagtccagcagtttcttactgctttcttaaactgaatctctgtctcctgggatgtttgcacactggcttgctgatggaagttagaactaacattattgtacacacaatgagtaaggcacagttgcaggtgcaggaattacttggagctggtaatgttaccagctttatctgttgggctaagttttgggagagtgctgctcattgtagaaattgcagatgggagccagtgctgcttggtttccttcctacaggcctgaggggaatgagccctgacacttggcttctcacagtgtcttgggcatcttactttctcacaggtttagcctttgtactttgtaaactattttccctataggttcatttttttgaggacagctttcacatgagcattttcatttctatgcctgtcttttagatagaaacagcaggagggtttgcgaggagatgaagcatcatttcctgtccccaagcatctgtatttctaagcatcataggctgcatagcttcccaaaagatctgggactctgttccccacatattttggggaacttcaaggaatgctaactcttgcctctgcttctggatggcaccattcctgcagaatcctgtcagtcagttcttctcacttcagtggttatatatatatatatatatatagccagttagtcaaggaatatatatatctcagcaggtggaaacagccgaccagcatgagaccaggaattatctcatgttcaaagcttttcccagagcctcgaccttgatgtcatgcccttgtcagtttcatgattgacaatgataatctctcttcacctagcacccatggagcctgctggacagaagcagctggctggatgtgatactggggttggcagagttagggtctacaattagggtctcttttctctgccagggcaagaagccaggtgctaagggcagaataccccatgagagataactagtatagcatgatgtttgagtatagcctctggagtcagactgcctgagtttgaatcccgggtttatgacttcttagctcttgaacaagttgcttgttctctccatgcctcagtttactccttttaaaagtgggaatactaacagtgtctcccccaagagtgatgtgaggattaaatgactaaatgtaggaaggcgcttagaagagtgttgggcatatatctaatgtgtgttatttttcacaggtgactcaatctgcctgttgtatttattcctgaaatgtttatattgaatcatactcaaatgctgtattggaagctcactatttaaaagagggctgtgaataattattttttcagtaaaaaatgttttcttctcttatttgacaatattgtaacccagatttggggat

SEQ ID NO: 58214 - DNA, 2861 bp, Homo sapiens
ttttatatatatctttatatatatctttatatatctttatatatatctttatatatatctatatatctttatatatatctttatatatatctttatatatatttatatatatctttatatatatatatatatatatatatatatatatatattttaagagacaagggtctctctatgttgcccaggcttatcttgaactcctggcctcaagtgatcctcccacctcattctcccaaattgatgggattacaggcatgagctgtcatgtctggctgcagcatggttattttctttcttagccttgctacttttttcctctttccaccttgggtactgcagtgaagacctcagacatgtgggaaagacgtatcttggtttgggcattttctggaagcctgcataaccttttaactctatttcaggaggcctgcctgatatctccttatttgtcttcccagacttgctgaacctttgctccacaggtttatgaagataaaatgagattatgactatgaagttcgtagctcagtgtataaaccttactagaccccagcggggctgggcgcctcacgcctgtaatcccagcactttgggaggctgaggtgggtggatcatgaggtcaagaaattgagaccatcctggccaacatggtgaaaccccatctctactgaaaatacaaaaattagctgggcatggtggagggcgcctgtagtcccaggtattcggaaggctgaggcgggagaatcacttgaacctgggaggcggaggttgcaatgagctgagatcacgccactgtactccagcctggtgacagagtgagactccgtctcaaaaaaacaaacaccaaaaaaccttactaggactctagtcatttcgttttattttgtttcatttccttctagcatgggcctcctacatgaccaactccccgactctgatcgttatgattggtttgccagcccggggtaaaacctacgtgtccaagaaactaacacgctacctcaactggattggagtccccaccaaaggtaagtgtggctcattccctaggaaagacaattattagttcctgggcctcacaggtctctgggagacttattcttcctggcatcaatgctatagggtgcttttggcagaaatagcagttgctttctggtttactggagttattctctattcccagacttgtctcctcctggcgtgggtggattggcctagttttgagggaatgcctttgataggactgttaagatttagatgagcatagggctgtaccttttcagaagccttacatggacatcatcttatataaccctagcagtgtctctgtgaaatagacagagtggctgaggaaattgaaacctcagacagcttaagacttgtccaaggtctagaaagtcagggcttgaacccaactcttttgactcttaatctgatattgttcccaacctaccatgctgccgcttttttcatccccttggtcactccgacattaggccaagaaacaagtcccatttggtggggccatcatattattttgctgctgaaggatttgggtgtcttctacagtgtttaatcttggggtgtatcggcgtgaagcagtcaagtcctataagtcctacgacttctttcggcatgacaatgaggaggccatgaagatccgcaagtgagtcttgtttaaggcctgatctccaggtcagctctttcttggccgtcatgagacttggtgtgacagggcttggtttcatctcagtaaatatcttaaggggaagttaaatggaagttatctgatgggcaagtgaccttgggcttgggtggtcagaagaacagggctcagggtgattgatacctgtgtgcttgtaggagaagtctaaagagggctaagatctgtgcattggggcaggggcaggaaggggttataggatggtgtgaaaaccctcagtgagaaagttgaaagatctagttagagaaaggttttgaacagtgggaaactaagtgggcagggatgtgacttctgtagccacccgaatgtttgtgtctctgactgtttgagcttagctctccttgctggtttcatttgctcttatggcagacagtgtgctctggtggcgctggaagatgttaaggcgtatctcactgaggagaatggtcagattgcggtaagctttatctgctgcttcttctttctggtccccacccttgcagcagcctggctacccagccccaccttgagtctgccctggtggggttctgtttctctgttcctgctcatttaccttgtgtactttcttcacaggtgtttgatgccaccaatacaacccgggagaggagggacatgattttgaactttgctgaacagaattccttcaaggtaggatctgactccatgttggaggaaaagggatgagtagaggtggggagtcaggctacaggcatggatctctcactctagtgggtgaggacaggatgggatatctgaatctcttctctcagagcattcccccagtccttgagtgttttcattcaggtcctttctcagactgttagcctgtatgtttgaggcccaggggctgtggtaagagctatgaggaggacttgagggccactttcatgaagaaaatcctgggagatgtggtggctgggtggggtagatgagcatgtgctcttaattaacagcctggcatttttgacttgcttatcactgccttctctccatggccaggtattctttgtggaatccgtctgtgatgatcctgatgtcattgctgccaatattctggttggtgacacccctacatatcatctcctcttcaccttttgtgctgtgtgtgttgtggggtgtgtgtgtgtgtgtgtgtgtg

SEQ ID NO: 58215 - DNA, 1112 bp, Homo sapiens
tctttctttcatcaaggtgataaacgtgggccagcgatttttagtcaacagagtccaggactacatccagagcaagatagtctactacctcatgaatatccacgtccagcctcgcaccatttacctttgccggcatggagaaagcgagttcaatctcttggggaagattgggggtgactctggcctctcggtgcggggaaagcaggtgagtaattattcagcacactggattttctaggcttagagttagaagggcatgactgaggtcatatattttatctccttacttaaatcccatttggacgtaggctgtggtttcatagtcaggcaagtgctcaaggtgtgttcttgctcactgcgtctagctctgtgttaaagagtagataactttgacccatttctgctgtgatcattcaaccatcagatattcattgggcacaacttgtgtacttagcaatgtacagggtgctccagttaaagttcatttccttttgggtttatattaactatgtagcaccttatggattttgaccatggttatgcacgttgtcccttacagaccaagttagcaggctttgtgtatgtgtgtgttgagtgtgtgtgtgtgtgtgtgtgtctgtgtgttttctttttacccttaattttcatttttaaaccccagtttgcccaagctctaaggaaatttctggaggaacaggaaataacagacctcaaagtgtggacaagccagttgaagaggaccatacagactgctgaatctctcggggtgccctatgagcagtggaagattctgaatgagattgatgctgtgagtaggaagctctgaaggcccagaaaagccaacaagagttcaggcaggaactctcagaagtcactatttagacagttttatctaggaaactacaaccaacaagtaaaaactctgaggaagctgactctatggccagcccgggggatcagggaggacaattgtacccctaatcaggggtttcctgcctgattcagtacctgtgccaatcatgggacccaaaccaatttttgagccagcctttctggcacctggggaaagtagggctaacaaggactcattttgttcctttgtatatttgcct

SEQ ID NO: 58216 - DNA, 1044 bp, Homo sapiens
cgatatcctggtggggaggtaagacgcccctgtcatgtaaagtgactgcctagacccttgctgagtgtttaactttaatttgggggaaggattgaatgtgatttggagggtctaggcatcatttatcttccttcccttgggtcattttggtttcattcagcttagacaatcgaatgcctcattaattgttaagattcccagggataagggtgacaaggcatcctctgttcagtatgttttagaatcaacacaatcatttttacttctttttttccttgtactctctcaatcccacccccacataagtaagtggagtcaccaagtaaatatatgggataggaattatttccctgtcatcttgagtgttttaggctatttccttgtctaagtggcttccatactctagggatgtgtgaggcaaaagtaaataaaactgaatggcagaggtacaggaaacccctaggagtctcttgtctcactgcctgtattaatctgtgggaagaaaaaacacacacacacaggttgaactcacacttcctcttcttaacctgtagttttcttggtctaaatattgcttttgaaagatctgagttttctcaagagataccagggctgggggcagttagcaggtgatgtaaactcactgagcctccaggaggaaagccagctgaggaagaagaagtggcccttagtctccaaggtccagccactgacttggctgccagcttgcacctgggctcctgccagcctgccccatttccctccacagtcataccaggacctggtgcagcggctggagcctgtcatcatggagctggaacgtcagggcaatgtcctcgtcatctcccaccaggctgtcatgcgctgcctcctggcctacttcttggataagggcgcaggtgcctttgagggaggggctgggagacacatccagtgggagagggctggacttgcagtggcaccaggattcctgggaaacagacctccctgtctccactcaaattagagtactttctccagacagcagtgtggggctcccagcag

SEQ ID NO: 58217 - DNA, 1047 bp, Homo sapiens
attgagtcttttaggacagattctcagatgggatgatctggaggaggaggaaaaagatacactcccttggggctgagcatgccccacactcttggatcttctctctgttccctggtgtcttcactaatgtcctcatgttggtgaagtgttgggggatggagggcgggtgagcagtcgggggacaaaaagtctatttttccttcacttttgtctcttcaatgtgtgttttcctcacactccttacttgactgctttcttcccccactttcatgtcccctctggattgtccagtgtaatgcatggcattgtggtgtctgtctaggaaggaaggggtgattgacaagagacaagtctggcccagttaatgctttctgcagtgggtctaaatggatctggactggaggagtctttcctttcctttctcccttcctctccagccaggtcctgtaagggccagcccagactacaggacatccacagaatattctggagcttgcaagtagacatagggtgagagttcttgcctcctttcatgagaaacagttctaagtcttcgatgccctgggagaatctggctctgagcatgtgggaaatgtcttggtttttatttttaatttagagtcaggcctgggtcttttgaggtctgcagagtggggtttaggagagtagggtgggctctagctcttgcagggctcttagagagcagtcatgtcttttctcccatgactctcaggttctttgccaatcacagcaacttttcctgccaaagccagtatcctctggggctgtttagaagggcagttagattcaggagtcaccactgatgtttgagttgctcaaggcaagaggcagagaagagttcactaaaactgcttatttttgaataatttcagcacactgtccttaagaagaaagaaacatcaaaacaaaatagtttttacatgaccatttttttcccaaatgtggaaaagcttgatgatgaatttaatctctctcattggagtattcttttgttcataaagagaaactatctcatcttgatgtcca

SEQ ID NO: 58218 - DNA, 1283 bp, Homo sapiens
catctttaaccctttacattgctgagtgatgtggaacaaatcactgaattaaataattgtctctagagagcagctggggattttaagcaccctggagagaggtgcagaccctgccaggatgataaaggttgtcatcactggcaactgactcctgaccccgggtcctttactcgtatgtcccaagtaggataccataggcagcttctaaaggctgcttacctagattcttctcaaaattgtgtccaagatgttaagtaacctgctattcctgtttagtggttacataacatgtacttagtgtctttgtggagctttgggctggtaggggcagggataggggaaagctaaacagaagtagaagaaaaggtccttgtccagaggaaggttattttaagagacaggacatgtaatttataacaaatggacatttgcaatatagcaacagtctgagtctagaagtgttcaaccatcacatcgcttctcctgacttttctgttgtcctatggctatgagactacaggggttgggggatggggatgcccccaccaccaccagtgtgagaatgagatatggttggggaggcgtgtttggcacttttacaaggttgcattgtccacatttgcttggatggtggcatctgtagcccaaatgggcattcagtcttttcttctgctgtgaggtaagagtaattcagacctaatgaatgagaagagggagcactttgatccacagactttggattaacactgtacccactcttagcaaaaggggacttctctaacaagctagcattgtgttaacctgtcattaacccagcattagagacaggtcactgggatgttcattctggctctcagcctgctgttatttccccactctcacctgtgctagttcgctttctccagaagaggagctgaggtggtcttatcctcagataggacatgagaaattggaatttggcaagcaagggcttcagcatcctttagtttctaaagcaagatcccttcagagaagtctagcaggaagaagccaggagaatgtagaatggaaaagagctcttactccaaattttagagaagtttcagctctacttctcatcttttctctcctggtcttacttgaatgcatgttggtaatctgtatacattactatgactgtgtctatcacaagtcctacaaaataaaaatggacttaaaagtactctctgctgaggctgtaagttttgttttgtgagaaataggtaaagacattagcatttaatctactggaataagctggttgc

SEQ ID NO: 58219 - DNA, 2125 bp, Homo sapiens
ctaaaaacttgcattgtgctagggatctgccctatatctttgcctctggtgtttcgttgttgttgttattgtttgtttgtttccaaagaagttggagttaaggacacaatatatttgtacccctagactgaatgggtgagtattccatatgaggatctgggtaatcctctttgcaacccacatttggtcttcagagacactggcattttgaagaaacatatgatatagctgtttggaaataaattcatctatgttactttttttttcttttttttttttttttatgagcaggagatcttaattgacagaaactcattggtggttggagtggccaatgggcacgggaaaaagtatccagtaatcagaagaattgtatctgggttatgtaatcttatgcacattccattgtctttgccaagcccagaagccatgttgtgttcattgttaagaaatttgatagatttacccagcttttctatgtattttgacttattgaaaatatgtaacaactgagtcgggttgcagcactggtggggtagaatcgactttccctgaaggtgacacagatgtcagaattgtgtccagggatttaatttagacccatactgtccaggagactgtctctagttggatctctgtgctgactgactgacagacagactttagtgtctgtgtgctgactgacagactctagtagtgtctatatgttgaccaactggtagaccaggaggatctgtgtgctgattgactctagtaggatctgtttgtcactgacagactgtagtagtgtctgtgtgctgactgatagatagactatagtaaaatttgggtgttgcctgactaacggtctagggtctgtaagctgacagtctgcctgctttctgattgtatccattgaagtgtatgtacattatggtaattctctgtctattaaatgtgtctaacaaaggaaggaattaagcactccacgtgttttctttataggggagttctgtacactatgattttaaatagatatttcttatatagtagtggccaaattctcattattttgtacaagataaaggttatgcatcacttttatggtattttgtgaactcagctaagggaatgcctgttcagagcctggagttgttacctttacttgaagtcatctcatccagtcccctgctttagggcaggacttcagttccactgttcatttctgaagcttctgtgtccccagcttaccctgttctgaaatgttgtattccattggacagggctgctatttttagtcagccatgcatttggattttacacttaatctagtaagtaaaaatgagaagaaaatttggcatttaaaaattgattttaagggttggcaaaagtattttttccagtaagcctttcactggatatctgtgaccaatgtttacctacgcaatgtttttgtatctgaattgcttatgtacgttttttattatattgacctaacaagaagatcaacttatgctggtatggtgatggttttgctatggcaaaatcaaagggctgatcatacatggtgccctttgggaagggggatggtgtggggctgagcacctctgggttgaatgggaatgggtcagattgggaagcctaggaagagagttctactgtagatttcctaggcactgctctgttgaaataggaacataagtctttagcaacattctgatttaatcgggtgacactgataacaaagtatgccactcagatccatttaaagtgtgcataactgtatttgaaatgtgtttttgtgtgcgtgtgtgtagaatgggtaaataaaattgttgagtaacttgaacctatcagaaggcttctgggttttttgtttagtattttcagttgtgtttcccatcccttccccacccctaaaactttgcctcatgctgcacaaggattcagactcagacaagccaacagaagttcgcactgtaattgaagaccatggtgtagccgtggctctcttctgccaccttctggggaagataggaagaacattatggaaagcacatgaacttcaatagttgtgtgttcctgttggcacttatgcaagaattaagaaacaattacatttcactgcactgtgcagtaattccca

SEQ ID NO: 58220 - DNA, 1018 bp, Homo sapiens
tagagtctaatatacttatgctagcagttaccatttgccacattggaagcaagagacaaatcaccaggtgaatggagggtcttctgagaaattcagtccctaaaacatcttctctgccttgatagaagaacagtgtcagtggcaaccttttcatttagagaagtttttcttgttccaggcccttcaggacaggatctgactgcaagactccccaaaatgggtacccatcttctaagttcccttttgtagctactgtacttttgacttgatgcatgtgcctctcatgcatcaagatggggctgatgtggttctcctgggtggttgggaatgtggactagacagaaaagtagagtgccatttatatcacgtgagtaagtcaagaaagctccttgagaatcagcccgatcagggagtgttttggcttcagaacaggtggaaggagacacgcccctctgtgggctctgtcaccatgatacagtccttgagagagctgtggctgtgacttggagggcagtagtctcctgatacctgcctcttggccactggtcactattgtggtcactgatctctcatataaaagtgagggtggcggggtcatggaccagcgcctcagtgcattagtcattcgcttttccttacagacaaatcagataactcttccccagtgattgtcaaatgtatgaatgtatctctgtaaatgtggttttgacatgtcactgttactgaaggagagtatggaatccccacaggatattatatcttgcaaggaaagtctattttttaaagaatagtatgtttttagctttacttttctttcttttccttttcactcaaatgctcacttgctgggcaaaagggtgagtagcaagaaaagtaatgatatgtagcttttctcaaatggttcttttatactgtggatgatacaggactctgttacctaagatgtgataagctgggctgcaggcggttcagcatccagcaactaggagctgcttttctacgtacaaagctgccttca

SEQ ID NO: 58221 - DNA, 1066 bp, Homo sapiens
ggaaggctgaggcaggagaatcccttgaacctgggaggcagaggttgcagtgagctgagattatgtcaccgcgctccagcctgggcaacagagcaaaactccatctcaaaaaaaaaaaaaaaaaagtctaaggataagaaatatcaatggttcagatgatgaatttacatatatgtgcttgataattttttcaaaatttttacctgagctttattgaggtataatcgacaaatattatcttaggtgtacaacatgatgttttgatatatgtgcacattgtgaaatgattaacacagtcaagctaattaacatatctaccacctcacatagttaccttctttgtgtgtatgcctgataatttaattttaaaaaatcaatttgtattctattctagagaaatcatgccctaatccgggagaaatacgaaatggtcagattgatgtaccaggtggcatattatttggtgcaaccatctccttctcatgtaacacagggtaagtttgggcatactaaaaccctgtatttaggaaatgagaaaacaaattaggacttaaggtgagattgttagtttcatgactggtattcacagctagtagcaattaaaacaatccctctcctcaaagacccttcatcatgagctcatcacagttaaatttagtaaaatgggggcaagaaaggaagatttcttaaaccaccagaattctctaaattctgatttcagtaaatatgtgattcaatataaaattttaaatgtgattaataaaaaaatttgagatgatgatacttgcagaaatcttcaaatgttaaatactaaaccaatctttagttgacctaaataatgaatttgcatgagtttttctatatgcaaacaagctgttacaaaacagcatgagttaaagacattcctagtgtgaaagtattctaagttctttgataagttctctgtatagggagaaggaactcattcattgagtaccatcaatgtctcagacactgttgaaaactttacatttattttctcatttcatatctgtaaattaaataattctattttactctgtgtgtg

SEQ ID NO: 58222 - DNA, 1051 bp, Homo sapiens
ttccgttggctttgtataagtgtttcccaatttttttttgtggggggtggggggtgcgttaattcttgctctcttctcaccaaagacctttttagacatttttttttgatcatcctccaccacacatatactgtaaatcagtttatgtatcacatatatatctgcactctgtacttaaaaaaggaaaatttttttttaactttcatcaggtatcacccccattgagaatgcttgctttctgttggttttgtttttattgtttttaaagacaaaatcatatagaagaaagagcttaacctctggagtcaaaccagtcggatgttggtttgaatcctgtttttttcacttagtaattattcaacccaagtgattaagtgattaacttaatctctctgagactcagttttctcatttaagagatagagattgtgattcctatgtgaagtatttgaagcttaatgtgattagtgggtatgaaaactccaagcacagtcctaaaagttgaataaatattagcttaaggaagtcactgcatgcaatcactattattttcctaagctggatttctgataatttcatcactccctctggccacaccaaagaataagaacagtcttttattcaggtaatatttacatgttttctctgtggcaagtactgtactgattttttttaatgtattatttcatattcttctcacaacaatcttataatgtagcatttttatcccattttcagctaagataactgtggttttgcaaaatttgtaacttgcctttcacagagctagtaggcaataaatagaggccgatgactagtttctctattaccaggtttttttttttttttttttttttttggatgggggacagggtctcactctgtcacccaggctggtgtgcagtggtgcaatctcggctcacggcaacctctgtttcccaggctcaagtgatcttcccaggtactttaaaagatagaaagatgctcatcctagtgacagaccaagagacaatacaacccaaattggacaattaaggtgccgtgattccct

SEQ ID NO: 58223 - DNA, 1046 bp, Homo sapiens
acacagccttactaccttctagtcacatgtcagaaaggacaactaaactattaccatctgctctttaacggcttcaacacagatgtttagctcctgactgaaatgagcaaaggtatgacaagatcgggggaaaatcatctgtatccttgctggaaaccaaggcagagcatatatgaaaagtgtggcattcattgggtgggaaggaagaaaatgggggaagagtatagtcaaagcacacaaacagccttaacgcagaggggacattgctggaagaaagggaaggccattgagtaactgtgtgagagaaatcttaacggtcatagcacaagtagtttgctagggctgctgtaacagagtactccaaaacgggtggcttaacacaaatgaagtttttaaaattctgttccggaggctgaaagtgcaaaatcaaggtgttggcagagccatgctcccctctaaaacctgtaaggatggatccttctttgcttcttccagcttctggagccccaggccttccttggcgtgtggcagcagaactcccgtttctgtctctgtcctcacatggccgtcttccctctgggtctgtgtcctcacatgctgttttcctgtctgtgtatggctgtgtcgaaagtgctctcttttaataaggacaccaatcataatggattagcgcccacactaacgacctcatcttaactggattgcctctccaaagaccatatttccaaataagatcacattaataagcactggggattaagacatcaatatatttcggggtaagggggacacaattctcattcattgctggtaggaatgcaaaatggtaccatgacttggaaagataatttggcagttttttataaaactaaacatactcttaccatgttatccagcagttatccttcttggcatttatccaaaggaattgaaaactcatgttcacaccaaaaaaaaaagaaatctgcacacagatgtttataacagctttattcataattgccaaaacttggaagcaatcaagatgtcctttagcaagggaatgg

SEQ ID NO: 58224 - DNA, 1028 bp, Homo sapiens
gagttttggtagagacaaaccagattcaaacaatagcagtaacacaccataatatagaaaaagtaagtgagtcttggaggaaaaatcagctgtgactatgtaaggcaactgacagtttttaaaatttggtcaagtagaaatattggaatattcagttgacacatactgcttgctaggcacaccgagggataccaaaactttaagacagtgaccttcctaaaagaagttctaaccttattgagaaataatatatactgagagcaataaaagcaaaatactaaatgagaaataccaaataagtagaattattcatgataattactctaagagtccagaaggaggagagattcctgtgaatttaaatcagggaagatttcattgagtataggggtatacttaatgaaagtattcttatactcagtgagctattcctagaaatacactctgttctaaataatattaatagaagctaaaactcatgtagcactatctatgtgccaaatgctaacttatctaatcccctaaacaaccccatgtactgttatccccttttaatcaattaggaagctgagtgaaggaactttaagtgacttacccaagctcaagaaactagataagttgagaagcagggacttgaatctatccattccagctctagggcctgttctctctacacagtccttgtccttactgtgcaaagtggtgtgagaaaaggcacagaaatgaatgtgtaatgtgattgcaggaggcagcaaagaggctgggtggaaaggcacagcagatttatttagacatctttgctcttggccaatatatattcaaatggggaaactctatttgattaaattgcagatttatttagcactttcgttatatagtatgttgtttaagaaaccaccccctcaaactactgtagtgtagaaaagaaaccatataaaaaattccttcattattatgtgtgtcttattaattgctatacaaaacagtaaccctttcttttctcatttagttattacttaattggtgaa

SEQ ID NO: 58225 - DNA, 1075 bp, Homo sapiens
catatcttctaaagaaaatagggttttaaaacatcaaactcaaattttagttaaagagcttacagtttaacaaaagacttagaatgaatcctggaacacagactaagattaggtgctttgaaatttctgaaagataatatacattcatttttactgatttttaaaaactgttttcccctatagttttagaaatagctttgaaatcaaacctaataattttaagacttttggtactcatggttttatgatatatattccttttatactgatcatcaggtttgggctaagtcataaaagtacaagctttactcataaggaactcaaacttttttcatattacttggttatcttttgaaatacccataatcccttcacttgaatcttaaatcttgtattaatggaacacgatatgcatatttgatttatctatcagttgtatattctaaaagttacatatctacaacgtgagtacaaaatattatcaatggaatatttttacaaatccataaggtttgcgtagaaacaagttctaaagaaaacaaaacaaagtcgcattctgcttattttccttctttgtttaaaatatcactgcatcagaatttttaaaggttcattaacaagtattaatcaaactctctctagctagcagttaatggtttttctgttgttgttttttgcttttttgtgatggagtcttgctctgtcacccaggctggagtgcaatggcgcaatcttggctcgctgcaaccttggcctcctgggttcaagggattctctgcctcagcctcacgagtagctgggattacagtcgtgcaccaccaccaccggctaatttgttgtacctgtactagagatggggtttcaccatgttggtcaggctggtcttgaactcctgacctcaggtaatccgcccacctcggcctcccaaggtgctaggattacaggcatgagccaccgcgcccggccttaatgggtcttttaaagctcaacagttatctgactgttacactcccaaatgaaaggttcaatagcagtagtgaactgagattccaaaattaatttgtccagtgatttt

SEQ ID NO: 58226 - DNA, 1035 bp, Homo sapiens
gcagggacaggagtaggggagtggagtctttggcagtttccttaatttctgaaggccttagagggcctagagatgccttttctatgtgttgaatgggaaacggaacctcagcatgtccaggttctccaactctctgattcttcagacttcttggagctcttgtgagaactggcttgcactttttggctgggaagccagccactcaccatgtgttcttggagaggtttcctgtatttggaagcttctggaatatgtgatgcatcaaaccactgtgacacatctgtatggcacctcatgcctatgcacacaggcatgcttctgctgagtgcagctcacttagagatgaggcccagtgtagggtttttgaaatttttccaacacatttgtaagagatgccctgagccttgcccagcatgcatgttgtgtgtatgctacctgtttgctggctaatgtacagcgcctgctggaagccttggctaatgtacaatgtaaagtaagggactagaaacactggctttagttctgagtgtctgcttcatgattgacttgaaaaagtagggcttacccacagagagaaaggtgggtaagagaactcgtgggtgtcagttttccttaaaggcagagcataatcccccactctttataagggctggtaaggcagagtattggacagcaggacttcttggccagttagccctcttgagtgacctttgtttaaatagacccagaacttgtatgaaggaggaaataatggtttatctttatttacagcggatttagccatgatggtttaggctttttctgggggtattcctttaggacagttgaggttggacaggggcagcatgcatatgtgtctctaaatgtctgtcctttggtatttcctgaatgcatccttggctcatactgaaaccctgtgatggggaatccacagcggaattgttttagtggataaagccttctgtagcttcatgtgtgaagatttgtcatgttggatccagttcattctgtccacttgaaggatggaaaagagag

SEQ ID NO: 58227 - DNA, 1068 bp, Homo sapiens
atctgaagccacatcaattgagctttccttcagggagttaggactgacacaaactaaccccctcttttttcctaataacttgggaaatccatccaaggtccccatggcttacaggaacttgtcgtgagtcagggatcaaggtggagtagatgtcaagcctttggtctccggcagactggttctctcctgtctgccatggttgctgttggccttctgcctcacaccctcccaggcaccagctgacttctttcctcagcctggtcactgtgccccacacttgtccatgcagcacagggaaacgtgcaggttaggtctttgccgagccattggtcaaatgttcctgcaggaggctggttctgaactcagcctgtcctgccagaacgagccgttcccagagctaatcgtctcacgatagggaagggatgggcaccaggcatagagaagtgacctgtgccagatgcttggttgagctgtgtcttgagaggcggaggcaggttggtggtgctggggacagggcaggcatgtgtcatgtgttcagcgcatgtagctccagggctcgggacttgtttacttggtggaagaggcagcggacctgcggagtcaggccatgtgattgttggctctttggctgatcatggacagctgacccgccggactgcacacactgccatctgctgccaggggtctgaagttgcacagggatgaggtagtgtagttgggggtgctcagggaggaggagggtcaggaaagtggggtttgtgttgctctgtgttgagtcagccgaccctgattctggtcctagctcttgttggtaaaaactcactcactttcctcctttcagctccagtttcattatctatgaaatgaggggatggaaccagaatctctttggaggttccagctgtatcctggggcctccctgaatgttcatggagatgttccttagccagtaattcaagatgaggaaaactaggcccaggtttccacaagagaaggggagggatcttgatgacctgtctcagagcggctgaagtggtactgttggaattagggtgggtgggtgggagg

SEQ ID NO: 58228 - DNA, 1033 bp, Homo sapiens
ccctacccagtggtttatcagggacttaaaatgggagcatagcagggggctagagaagaaatgggggagacaggagctcctgtgccctaagtggtatcacagcaggggcgcagaggaggtaacctaggcgttacgcccttcaagcctgcaaggtgtactgtcccccacctgccataaatacccctttacttctgcatcaggaacatgccatggcatctgagtggtgggggctggtgacggcagagggagggtcagtgagctttcctgggagccttttgatgccaggttagtttcccttctttctgaatctcagcagtggctgcctgcttccctgacgctgctgagtcccacgggaggggagctgggcaccctgaagcccctcgttaccaattcgggggccgcggagcagagtgtgacgacagccagtgagtcgtcagtcgacggcaatggggaccctggtgacggctgctttgttgttttttttcctctttggaagatgactcagtgtatcgggagccgggagatggagctctcagcagagtggccaggatgttctgtcaacatgaaagctacaaaaacagctcggggctctgagctgatccttagcctggggtcattttcagggagggctggacagagaaggcggccaccgcccgggcatcaggatgggagcgacaccaggtaactcagcagggctctgggaacccttgcattttagagtctgaaaagaaaataacagctgtatgtgttattagatgagcttggcaaatagggtcactttttgagttcttcccactagtcccagatgacagacatcttcccagggcccagaaagccctttgggatttttcaccgtggttctctttgtgatagtcttgctggtcattgccttgaatgaagggcgattcgcttcttggggtaggggtgggccaggccgacctcagtgaatgcgggcgcacctgtaccttgggagaagtggccgtggtggggctgtggcgtcttgagagtcctctgccgggcggcgcttcaagat

SEQ ID NO: 58229 - DNA, 1167 bp, Homo sapiens
aagtgtggccaaggaagcagagtgtaggcccaactttttttgccttgtttgaccagccttggcactgccctccggctctccaggggaaaagctgcagttctgctcttgcaacacaaggagcagactggagaatttagatctgcgtcacagagctgagagagagagagagagagagagagagagagagagtgagagagcgagcgagcaagcaagctccgtcgataggtctgctagcaacagccgtgctgcagcagagagagagagagaaatcaagaaacaagtcatagcaacaccgggcaccaggttctgccagctcacttgctgagcgttcagagatctgtcagggccagaggcctctgggtagcctaggctaggagatgacacgcaaggtggcacgggcggttcccgtggggaggaggtggggtggtggtggggggcaggggtgggagcaagaggttgtggggcgacggtggagggtttgatgggaccaaattctggaacattcgggactgcggcaccttacggcgggaccaagatttgggtctgcgcaggcggcgatgggtggtccgacgggcttcaggacttgatggcgtaacccccttcttcccccacgtatgtatttgctgggatcaggggcgctgtctctgtgtatgtgggtgctctgtctttctcaccttctttctcgatttttgctatttatttctctgagggagggttttttcccactttaatttcttttccctagtgtcagctgctcaagcctgaccagggtagaggtgagaggagtgaaccatcccctgcttcccacctgacctcccagcttttaccctatttccttctagtggacagacagactggttctccaagttgtttgggtgtcagcgtccatctgtctgtccgtgcaggtcttatgtggaaggtaagggagtgagaagtgccgaaaggaagacagagggacagttttttcccaggggttgccttattgaaaggtctggccctgggattctgaggctggtggggagccgagtggccagggtggggtgtgggctgggagaagtggggtaaagctggtaggtttgtcactgcgtagttgggaaaagtggggaatggtgacgcagtcactgttgcatctggttaggagctctatggggacaggtagtgaggctc

SEQ ID NO: 58230 - DNA, 1053 bp, Homo sapiens
ggggtagccatacatttcttaaagaagacacagaaagcactaactctaagggagaagactgataagttggatgtcattaaaatgaggagcttctgattatcaaatgacatcaataaaagagagtgaagccaagcagagaggagaagatatactcagtacctatacctggcaagtggattcatatccagaatatataaataactccaacaaatccatcagtaaaagaaacccttccccctggacagaaaaaagttccatactgaacaattgtgagttgtatgcagttttcttctcccagtgcaaggttctaaccagtatgtcctggatcactggcacagcctggtggctggccttgggaactgtctgatctggtggctcttggcattttcttttgtgtatggactgtgggcccttcctttcccatgtgcttcttcacttgctattggtttggccacaagaggctcctgtctcatgaatgcctgtgtctcttcctcttttcctttggcttgttaacttttgatcagttatttcgagaatatttctctctggcttcttccccccgcccttcctttttaatttccctttttgtaccttcttgtttagcctaaaaacttctggttgtaaaaaccatcctaaagtgtctccaagtctttgggggagtaggcttgttctctggggctccagaggcagagtggagacctgaaggctaatatttccctgcagagagatttcatctcagttgtgttccacttgtctgaaccctccaaaggtgtggtgggagttattgaatcaagttggggctagaccatgacttggtcacggtggtgtttgtggagggtactgtgtcttgaatgggcagctggattatgataagcccttccaatcttatcaccaaagccctggatggacgttttgtggatgtccagagaagcgctctcaactgggagacagagccagtatatcagcatgacttttctgcctagctggcaggtcaggatgcacacatattattactacttcagttaaatcacgtatacttggaagtcatttcga

SEQ ID NO: 58231 - DNA, 1044 bp, Homo sapiens
ttcgcttcagctcagtgacatgggtggaagtgtcatggtctcttgggttgggggaaagctcctcagtggctctggggtagttcctccaggagactggcacagtgtggtcttcatggctgaggtctgaccacaccatgatcactgctgttggtctgcaactattaatggcactgctccttaggagccttttccccatgaatgccatcagacttctactctatgagtaccatttctgtccccaccccaacatcgagcacattctcatactttttgtgattatatatacttagatttctgtatttttgtttcttcttgaagttgcttgatgttagaaattcatctcttccttaccaggtgttgaactatcccagtaatttagcttttacttggcttctgcaacctttttttctctaagctccttatctgtcttgggcctaccacttgaacacacttgatcttgtctacttatctcgtcaatatgaagctaggtatggttgtgtctggttagtacttggatggaagatctgagaatgctaggtattctaagtcttttgaggtgttggtaggctttttcttataccaaatgcaaaatctttatgtcaccattgttgtcattctcatcatcatagtgatagctgggattaattgagcacttattctgtgttgggccttgtgctgcattacttctgtatctcacatcctctccaagaaaatcccaatgaagtatagatgaagctgaaactagaaacttagaaaggttaagtaagttgttcaagtttatataattagtcaagaggctgcactagaattcagattcaaatctatctcattttagagttagagtttttaaccactaaatgtaatatttttgtttggtagttaagtactctataaatgttggttgaatggcaagattgctctgacagtccagctgttctccatggtgtcactaatgatgatgatagcacacagcattttttgaatgaatgcttgcagtggtaagctctgtactaaaagatatgcattagttaacccatttaatct

SEQ ID NO: 58232 - DNA, 1071 bp, Homo sapiens
attatttttttggaatagatcaatggccgttctttctgttggacccgcctgctttctaaatattcaccctggcctctgaaggttttgaagttttcagagggagagtgatggggtactcctctcacctccaaagtatgtggcgttggagaaatcttctaagtgtaatcttctgtcttttaaggcagagctgttgttgctgtgctgcttttggagaaagaacattggcctcggaggcctatgtcaaatcctagcctgagaataatggctgtccagtggtcccagggggtttcagagagctgaaccctctaaaagagtgtaattccaacacctaccttcagtaaataaatcaaccacaggactgcctcccacccccaaagattctggtcaacatcccctcccagtgcagaggaagtattcacatcatcaaaggttttgtggaactttacttttggtatggtttcacattatgaaaacgtatcccaaatattaactgttatgttttagacagtccccagctcctctcccacccctgaatgagagtctcggccctggaagttttgtccctgctcctggcaaagctggcactttgctgaaagctcggacctgcacccaggccatgcataatggccctggtctcttttctcctctgtcctaggctgcaggtacggacgtgcccctgcttgggggataaggcagtatggaaatgaaagttcaagtcagaagtgtttggggaatcccctgccccacttgtgtttatgattcctgctgtctagatctgactcagttaagtagagcagaagtttgttgtgaggcaggaaagcgactccatttttaagtcacatggtgctaaacccatgtggtcacacagaggtcagcacagacccataaatcatcagaggcctaggttcttcctaccctagagacatctcctcctgcccacaagagcagcagcagcgtctgagggcaccaacctgtgcctggagggagtctggccaagacccctcaatcccggccatgtctggcctggcacaggctacaggttccgctgttgaggaatggagtaatgttctc

SEQ ID NO: 58233 - DNA, 1319 bp, Homo sapiens
ggaagtggccagtcagttgtatctcagcattgtatgattccaaaaatgaggggtaaacttggtatttcgaatgtttagaagtaggcctcacggaagttgtgctgtgtttccttcctgtgttcatcggcctgtttgcccagtggatggttactggacatggatgtgcaccatgtggtggcttaaagggctgtaagacgcagtccaggcccacgagaagcttcctagcagtgaggctgttttataactgttcccaaatcatgttagctctggaagctatttcaggaacgcctttggttatgaaccgtatcttatatttaattttgattctcttttccctcctgtcctggattcagtagcagcatccacactgtgtgcctggctgtgtcgtaggtgttggaagtacttagaagaattaggaggtacttggtaaaagcttgttaattaactaaagtggggacctagaaccatctccaaagaacttttggtcttctcttgtgcagtcaagactcttcatgtctcaaaaggaccctgagcttctgtctggagcgcatcagaatctgtgaaatgcctggatctaggccataaagtagagggtttgtccccctcttttccttggttgctgtatgttcttaataacagtaagagttttagcccaccgcaggaggcacttgaaggcatgcaaagctccacctctccacctacctcctagggccctgggtggcactcctctgctcctttcctttcttcttctgttaccgtatcaggtaaggccactttctactcttagttgaaatttacagttggtagccatggggaaccattagagtctctggtctttgattccctgggagagggtgggtctgacagtggccttcccacctgtgtgatgaggacagctgatttctgtctcctttgttctcagcctcacatggggtcacagggaaaaggaaaacacataaaagatccccagggctcagatttggggttgcactgtttttagtccagagccagctgtccttggcatccgtcaggcagaggggtgaggtgattgctggtgtttgtgacactacaggttgagtgtccctttgatatttgcttggggaccctttccagaagctgcagttagaagagcacattcttgtttgatacatttagatcaaaggaaggagagagtaggagaaacctcagaggacctgtgtgggtgggcagggaagggattcacatcaagtgagcccatttccagtgtgtttgttggggatttaggggttgtcatgttgacaggcctaatctagtccaatcaggcaatcagcaagtattga

SEQ ID NO: 58234 - DNA, 1050 bp, Homo sapiens
agggcacaaaaggagaccagaatgatgaggcagtggacttgcgggggacgtgggaggcagggtcggcacttcttttatttctttccctttaaagttgatcaagagttggcagttgggaagcttaagtaatctacatctaaacactacatctaatgtaactcctacttaaaattactggacaccaaaaaatccccaggcaagcttattgccctgtatgtatggtagaatattgtaacatggacagtggtagttgtaaagacctggttgcatgtgacagatgcacttgctcaaatatgagtgtggcgatttctcagtcacatgctgaaaaatcaagagcctctagtcaatttaaccagtattcactgggctgcagctgagagccctgcttaacactagatgctgggatagaaagacaaaaaggtgagattaagaagtaagagttaagcctgggctgtacctagacttacctgagttttagagaccttcctttccacagatattgggctgaaaactgagaaagtggatgcctcgtctgctcccatcttactctctgcagcttcctacacaactgctgggctcccaatgctctgctctggggccaggcaaaagtctgtactctcatgcatacgcacttctgaaaaagcggcttggtaacttcttaggtacacccacaaggttggccccagatctcaaggaaatcctcagaaatggttttgaaagataatatccagctaactcccccaaattcaggatccctagaagctatttatcttctagggattgcctagagtattcctacaggatgtaaatgaaggatgcaagcacgtggagcatgagtattctatacagggaaccagtcggatgccacccaccagtgccagaacgaaggcagagagcatggggttggagaggccagagaccctacgtgcttctgaataatggggtgtccctgccagagctaggaagcgtgaggtgtcaccctaccagcctacagctctgagtgctaaaagggaatccgggaccctgaaggaagctttgagtctctgggct

SEQ ID NO: 58235 - DNA, 1760 bp, Homo sapiens
taggcttgtctgcagctgttcacccatgcctggtgtttcctgctgcggaggagctagggagaaagatcaggaaaacctcagccaggtttaggagcaaaggtcaccttccctgtcttctcaccagggtatgattccctagaatgcagcagcatatccagccccttccctcttctcttggttcctggctttattaactgtctcttcgctttaaaaaaattttatcttttagcagcaaatttccttcttccccacataccaaagccatagcaggaagaggaaggccatcccgactgtggttttgtccttatattctctgtttctcaggttcgttgcctagggagggtggagtcccggcgatctgggggcagggtgggggtaggattcgtggtgcatcagaatgaacttcctgtcacctcagtgattccacttagatctgtgattctctggctccatctttccccccgaagaagaagagcctttcttgggtcatagttgcctctccttccaccagctgcactgaccgacctgcagagtgttgacccacttgtcgtacctcaaatagaggtttaaattaggacctttaatctgtaagaggcttacagcttgttgggtggccagctgctctggactcccttgtgggcagagctgggtttttcctggctcttttggggtttagggaatcatgggggtcagtggctttctggcaggagccacaggctctgggactaggtgggtgggatctcttatgatggagttgggtggtggtgtgtccttgtaatgatggaatggggagctgggccagcaacttgggtgctgggcctgcttctcttggacactgagcctggattcttgctgatgtgcagttagctttgctggctcaacatgtgttttcatttcacagatattcattaatccagagttgtgtgcccagcatggtgctaggtgtcatagggaacacacagaagcatgagaatcaggccctcctcccaagttgcttatttgtagcctccttttgaggctacaaggctagtccatatcaaagcattcattcatcctgtagaccgataggtatggaggggaagtattattggagagacctcagggttttctcacctgagaagggagagagccctggggtggtcagagctgggccctgagtggtgggatttagaaagaagggaagaggggagggcttggaagataggagaaacagcatgaacagcagcagggggaatgggtgagtgtcctcctgaaaggactgtggagatggccgtggagcctcttcttgcccacttcctgagatggtcatggcttagtgctagagacttttattccttgggcaatgtagacccagctctatgggttccctgttttttccttctcttcctcctcattataacagataataataatgattcctagctttcagggaacacatcttgtataccatgttctgtgtgctttacatggattgtctcattacagcttcacaacaaccttagagatagatgttctgtatcattatgtgcaccttacagttggtgcagctgaggcgtagagaggttaaataacttgcccttggtgggtgacatagcaaggcagtagttgggtgaggagtctaccagggcagcctgaaaggcggaactcagtgacagcagcagggcatgctgttaacccactgcttcccactcgtctgaatattagaatcaccttggaatctttcagaatttccaaatcccaggtcgattacatcagagtct

SEQ ID NO: 58236 - DNA, 1001 bp, Homo sapiens
agccaccatcctctctcatctgcttctttattgccccttagaggctgtagtcctccccgcagcgaaaacaatccgtgaaatgttaagtcacatcatgctctgctgtgcccaaaccctgcagtggcttttcttctctctcagtaaaagcaatcacccttactgtggtccataagacctcatagcttatctcatcactgcccaatagaaatataatgtaagctacacatgagggtcacgtaggtaatttaaaagtttttgataaaggaaaaatgaatggaaaatgaaccactcgaagttaattttgataatgtattttatttagcccagtatgttaacagtattttcacttctgagatatgttacgttgcttttgttttgtttgtttgttgtactaagtaatagtcaaagcacatctccatgtgaactagttgcatttcatgtactccatagccttacatggctagtggctgccatcttgcacaatacaggtccatacgaccttacccggctttattacgttacttctgtatctatctcctgttactgttttcaacttgcacttcgctccagcatcactggcctcctgctgttatttaggtatactaggcatttcctgttttagggcctttgtacctccagttccctctgtttggaatgcttttccccagatagccctgtggttaaatctcttacttcctttgggtctgtgctcagatgttactttctcagagggtcccccaagcccccagcattctctagccttccttgcatccctttcatgtagtgtttttttcaccagttggcatactatttatttatattagtatattttctctctctccccactggaatatgtgctccatgagagaagggatttttgtgagttttgtcccctgctatatctcagagcatggaatagtgcctgacatgtgtatataagagatggatatttgttgaagaattaagtgaaattatctattaagaatgattctttttcacta

SEQ ID NO: 58237 - DNA, 1053 bp, Homo sapiens
cagataggaagtgagacacgttggtagcaggaggaaaccacttgctggaagtagcagggggaacggaggtgactgaggttgattctcgttacacttgatagggaggaggccagcagcaggaggagggagcagacaatccataatagcaaagaagacagaagtcgagcacacctagagctgcttttagctggtaatggtaactctggctctaggagcattccttcatacctccccgacacagtttccccagaggctgttataaagaaaacattctctcttaaatatcttttcatttgtagggtttagggtgaccccatactatatggtcttaaacttatgttgagacaactgcactgacttggataaataaatatcatttatcagatatttattaaagatctattatatggcaggcgctgtgtgaagttctcaggatacagaggtaaataaaagattcacagtttgatctggaaggtttatgggcagctgaaccaattttaattccatctgcactggatcacatgcttcaagagagcatgtctgtatctgtcttgtcctttgctgtcaccccagtgctgagtggagagcttggcacacaataggcctcagatatttattggctgacccatccttgtttgatctgtcctggaaatgtgcaggaggaatctgagtgggtaagtggaggaagagaggtgcttaacgcagcaagtgtgacaaatttgggggaagatggacatacttggatgtatgacgatgagtgcctttaagtgactgcctttaaggaaaagagaagggttaaagctgtatgggcatgacagaatccattggcattagggccatgagaaggaaggaatataacctggctacaaaggtgggttagaggtagtcaggatcattgggtatagcagagggccaccagaattgtgaagaactaaccagcggcagagaagggaagagtggaaggagagtaggagccattgtgagaggaaacatggagacctcttcaggcctaggatgaaagcagaaatgacacaagtgagtctcagatgaaca

SEQ ID NO: 58238 - DNA, 1046 bp, Homo sapiens
cacacacacacacgcatgcacttatttcccccaaggtcttgtgccatttgcttatagctcggggacgtgctgtagaaatgtgccacaagtctttggcctcttctagcaagctgtttatcaccctggaggagtaagagcactggacagagtcaggagacttttgctagctacgtgatcttggacacaccacttccttttccaggcctaagtgtctagtcttagggatctagcttcttccagttctgaagccctctgatttgatgtctggaaagctttttccacctttgcccaggtttctgatgcagaccaggctttttgaacaagtagcctagatttcttagtaccttgtgggagggactagtagggatggaggcctagtccccagagtgggtccctgtcttcagtgtggataggagccctccgggtggatgggagcctctgttcctctttggagcatggaaatactggaagagcaggttttcccaatgaccagggattgcaaactgtggcccgtgggccggattcctgtttttgtaaataaagtttcactggaacagagacacgcccgttgtttgtgtattgtctgaggctggtttcatgctacaagggcatagttgagtaactgcaagggagcctgtatgccccataagcctaaaatatttactatcttgccctttaggataaaagataaaaacttgtcaacccctgctgtagactaccagaaaagtgcttggccttttactgaggatgcttatgatggctatttcagatttctagggttcttaaagattctgcattgggcctgtctttgtgatcccatgagaggatgatctggtagttgaaatagtagattattagagtcagctcaaaaatagtcactctgtatctaggaaagctctttcattttcagccttttccctggagcctggaggcctgagttcctcagcaggactgggtttgacaagctactgtccctctcattctgatttccctgggcagtacagaggatatactggactgacccaagtgttgggtcaaggatatac

SEQ ID NO: 58239 - DNA, 1719 bp, Homo sapiens
tactatgaacatcacctcatagttccacgttgctacagtttttataatttttttctttctaatgtttgtttatatgattatataatgattatggtatattaagtgcatatatcacttatcctatcataattcatttagttgttcacgtttccctcctataaataatactgtatgagacatttgtatgcatataaatctttccttccctatgtcctcagggcaaatttggtagtgggaaattaatccactgtccaggagtatgttcttgttgctgccaacaaggggcagcagggaatgttctagacgaattctacctgaagtcaggaaattgcatcaggtgatatcaccaggctgatatctttaggttctgattcttcctcctcgtttccctatagcttctgggttcatgagtcttgacaacaacggtactgctaccccagagttacctacccagggaacattttcaaatgtttctacaaatgtatcctaccaagaaactacaacacctagtacccttggaagtaccagcctgcaccctgtgtctcaacatggcaatgaggccacaacaaacatcacaggtaaaaacagcatttgtgtcagatcccggagagatgctggtgatgcttgggtaaagcatttaggatgttttcagaccgctcccctctccacagaggaaattatacaagtccctagtattaatgacttgagtatcatgcttagggtgccctgaagtaagttctagataattcttccttcagtgacagttttctcaggcccatgtcttgggagctgatcctgatcagtaatgcctccataccccttctctcatgctgagtctagcttagtgataaaataaggatcagaagactcaatagagatctccgatctcttctaaaggaaagaaggtgggtacaggtccaaactgggggtctttggcttctctaaggtagaccagcatctatttcagtttcaggacacctctaatacattctagattctagctcttgttccaacagcttgaaatgagtttggtcagggatgggacacgaagtaactgttaactccccaaactcccttttctgtgttgaagtgcatgcccatatcatgacctgagattttgtgtatctatgagcacatgcacacatgcacacccatgttttggtctcttccagaaacgacagtcaaattcacatctacctctgtgataacctcagtttatggaaacacaaactcttctgtccagtcacagacctctgtaatcagcacagtgttcaccaccccagccaacgtttcaactccagagacaaccttgaagcctagcctgtcacctggaaatgtttcagacctttcaaccactagcactagccttgcaacatctcccactaaaccctatacatcatcttctcctatcctaagtgacatcaaggtgggtgaattgggccaaaaatggcagattgcccctcacttcatatgtatgcaggcaagctgtttctttccctccacccctctcctcatccctgccagtgggatttgggtcatgtgggaatcagcacggaaatacacagtttaaatattgctgggagaagtagaaagaggaggaaaggggtagagttaggtggtaaggcccatccaggctttgggtattgcattttagggaatagagagtaaacgggattctcagagatccatccaatcctctggttctttctagtacctatc

SEQ ID NO: 58240 - DNA, 1029 bp, Homo sapiens
aagctgcccttcctcacttttcaaagggtcaggaatcctaggctatgatgctgggaagctagaccagctcctccaagagagactagaccagggtcattttctctgttattaactctgggctccagcttctccgtgccctgctttacctccaagtggttccaatttccaaaggccctgctgaccacatgtgattcccaggagagggctgggggaggggagcgcagaggtctggcttccatccttggcgtgtagctttggatcgctgtctaaccacacagcagacgttgcccggtctccccagctctagtttcttgcctgaatgcggctgacaaatgggaagagaaaagcattcagcaaaatactcaggaaacttgctgttttcattataattcacaaccagccatgccaaggccactttcttttgaaaatccacttctttaaagtttctcaggccctattagtagcctgaaggaaatactaatgactggccttccgcactaagccaaagtgtttgctcttcatagcactcaaagcttatcagcgcagagcccataatttatggagataaaaggaaaggagatataggtaagaagagtgtgaccaggagaccttatgctacctgtaaaaaagttcagcccaccccatctaacttctgagctctgtttgggtgaagattttctggccgcatggctgctcagactggcatccaggctttgctccaccaagaagttaaaggcagtcggacatctcagtagcatctctaccagcccttaactcaatgcatctacctggcatctcccagcagttacttttggagacgattcactgcccctggggcgtttccttgaaggtttgtggagagcgtggagaatgatggggcaatggccaattggagggtggagagtgaagagccggagctggctgtgagtggtttggccacatttctcaggattccatgagagacttggggaacttgggctgacaaaggaagtagcctggggcatccttaaggaaggaattaagaaaagg

SEQ ID NO: 58241 - DNA, 1046 bp, Homo sapiens
ctttccccacagcctccctctgcgcttctgggtgaacgtgattaagaacccccagttcgtgtttgacatccacaagggcagcatcacggacgcctgcctctctgtggtggcccagaccttcatggactcttgttcaacgtcagagcaccggctgggcaaggactccccctccaacaagctgctctatgccaaggacatccccagctacaagagctgggtggagaggtcagtagcaccctcaggacaggcccatgcccttgtctccctgcccattccccgctctatagtcatcactgactaaggactcagacgacggtgtctgtcatctcttcaggacctcccactcccctccctgccacaccccctgctgcgggaggaagggtggctttgtgcccgtggaagtcagatgattatcatcctaattactattcattgagcatgtgctaagcattcagcattctgataaagattttgtgtgtatcatctcattaaaatgtccagcagagttgtgaagccagtattattattatccccattttactgataaggaaactgaggtacagagagggtaaataacttgccctgcgtcacacagctagcaggtagcagagctgggatttgaacacaaagagcctggtgagagtctgggcttttaaccactctgttgggcaccgcagccacgagctctcggctagatggaatctactgaagaaactctggccttcagcctcaacctcagcatgaagcaagaggccagaggaagccacatcagaagagaaatagggaggcaggagcaactgggtacatcagtgccctcgaaggacctgggcccggggtagctataggtaaatgtttgctgaggcctccaccaaggcgcctatcctgtctctggcagatactacgcagacatcgccaagctcccagccatcagtgaccaggacatgaatgcctacctcgccgagcagtcccgcctgcacgccgtggagttcaacatgctgagtgccctcaatgagatctactcctatgtcagcaagtatagtgaggag

SEQ ID NO: 58242 - DNA, 1038 bp, Homo sapiens
aggtcctgaccctctccctcaaactactccttcaactcctgtcctgctcaccctctgtcccctacttgtagatcctgaactgcgtcaaccctgacaacgagaacagtccagagatcccagtgaaggtgttaaactgtgacaccatcacacaggtcaaggagaagattcttgatgccgtgtataagaatgtgccctattcccagcggccgagggcagtggacatggacttgggtaggaaacctggactcagagtgtgagggcaggggttgagaggtgaaggaagggaagctgccatgcacacaacccttgcaggggcatgactgtgtcctggccagctgaggcccgtgtgaaatgcttcccgctttgagcgctgcctgttcagatgtggctgtctctggggaggtctacgtgtttcctctgctgcctgggcccatggagccctagatgtctctagcctctgttattggtaccagcttgagggggccgggttgccaggtccctagagaaggtgcaatcgggagacactggctcacagccctcatccctctcacgccgctccctgcaccaccccctccacccagagtggcgccaaggccggatcgcccgggtcgtgctgcaagatgaggacatcaccaccaagattgagggtgactggaagcggctcaacacactgatgcattatcaggtgagagggggtgtcttttcccctcttcagcttcccagaatgttcccttcccgctaagccttgctctaaggcctcaaaagtctaaaaaggattttcctctccctgctttcctcctcctgctggagcatagaacagggattcttagccatggctgcccattggaattactgagggaactgataaaaaacgtgagtgaccaaactccaccctcagaaacagatttaacaggtctggggtaaggcctaggcatttctattctgtgtacctctacatttgcaaaaaaacaaaacaaaacaacaacaacaacaaaaatcaaatgcatattgcaaagccctccacatggacaactacct

SEQ ID NO: 58243 - DNA, 1059 bp, Homo sapiens
ctgccattgtcactctctcccaggcccagattgctgagcagccctggcaaatgcctgggatttactgcaaccagaggatataatttgcaccacgtgcagggagttaaaatacccctccggcatccccttcactgagggtctgtcacagccgctttgttccttcccaaatccccagatctgtagccctgggatgggaaggggaggggggccagcccttgcatgagcaaatcccctgttggcaaaacacttaagcactgctctctacctgagggctgggatccaagaccccacatgacagcaataatgacagctaatggatagtgcttagcaggtgccaggcacttttcttagcactttacaaatattaactcattcaaccctgacaacaaccactggggttggatgttattatgactgtctccatttagtgataggaatactgaaaccagagaggttaaatgacttgcccaaggtcacacagccaacgtatggcagaatcaggatttgaacccaaggaagtctaaccttgagtgtttttggaggggaagggaccaggcaccttccagataggcaaaacagggtactcacacatgcaagaaagcccagagggactgggaaactctctagttatcaccctgaggccagaagtgagttgggagaaccggttctttatagccctgtgggatagtgaggtgcctttatccacagaccctgtctcagatgcagccaaagttcagagcaccacggaccatcagggctgaaaaggccaacctctccattttcataggaaattgaggcccagaaagaagccacccctacccccaggtcacagtctagttactgggtgagctgggctgggacccaggtgtcctgactcccgccctgcgttctcccatgctccattgttctcttgggagacctcatggcaagcccaggccccaccacggagacccctctgtgaaggactgccccttaccctttgtcccttccccaggacagagtctgtggctgaaaagatgctgaccaattggttcgccttcctcctgcacaagttcctaa

SEQ ID NO: 58244 - DNA, 1050 bp, Homo sapiens
ggcagaaatgattatacccccttcacaactaagaaagctgaagttcagagagattacgtgactgatcgcaatcaggcaactagtgaattagagacatgtctcaaaccatggttttctgccttgagtctagtattctttctgataattttttaaataagtagatgaatgaatgactgacttaaagaaccgaggaagcagtgtaaaacagaacatgatgtcaagatccgagataagctaaaaagtggacaaaacgcactcactcaccagaattcctggtggaggaatttaagaacctatggaggttcttaaacctccctgggggagggggaagggtgctgctgtttctgttcctgtgaccaaaccaaattgctaatcccatttccctcctgcagattttgacggtgtctggaccgccggaaggagggacgcgagtgaccatccatggcgtgaacctgggtctggacttctccgagatcgcccaccatgtgcaggtggctggggtgccctgcacgcccctcccaggggaatacatcatcgctgagcagtgagtccgccctggccagcccttttcccatgggagcttcagagtggagactggagactctcccctctcccttcctgggccttttccatgattgatctcccattacattctcctcccatggacctgccccagaagcctccccagggccccctcctccctcacctccaccctcagggggtctcatcctgtttgattccctgttccctgactcttctggcatcagggctccggccctgaccgtccctcattcagtctttgcctgcccgccagtgtgactgagcatttcctcctaggtctcccccagcccttcccctgtcagcccccattggaatgcatcctgtatggtgggctgcaggcaacaatttgtttggtgcgtggggctctgacagcagcttaatccgagcagggcctccgctggagcaaattcatttatttcactaagggaaatgtcagctggaaattagaaaataggcatgtagttgcggacaggcaaacggggctccagg

SEQ ID NO: 58245 - DNA, 1060 bp, Homo sapiens
taaagaacatcttgtacagggccagtgttcttccaaacttattttgggtgaaaggatgatgtctcgctctgaatctgcttctgtgcagggcccagaactcaccaaagccagggccctgctctggcggcatcactactccctgcccaagctcaggcttcgggcattctccaaacggcccatgagcagctctttgtaccccgggtcaccccagtgtctgtgatgcgctccctcatccatgtgctgcccttccagacggataggaagacttccatcatctctaaccctgccaattctaacatcccatgttttagtcatctaggaagacagaggtgcagggaaacacagggaaggagattaccaattatcaagacctactctctaaaccagcatactaagaactctccagatgttatctcacttaatcttcacatcatccctgtgaggcaagcattattatctgtttttgaatgaggatattgagattcaaggtcacataacttgtaggtgtcagagctggtatttaaattcaggtctgtctgattccagaggttactctcttccttctgcagacactgtcccagcatcagatggtctttcttccctatccgactgtagccagcagcatagagctatctgaaactgaccaagacatggatctgcctaacatgctggccatactttggtttcccttctgtcattggggcactctgtatgactccaccgcagcctctcatcctcacctctgtgggagacaagctctcccctcccctgcagcctctcagctccttccagatctagaaggacttgcttaaagtcctgcaagcagtagctggggattcagccaaattgcccctctatagatccatgtagaaaggccagacttggcttccaggagagccaactttgtggaatgcaaccctgggtgccctgcaatcaaaagctgcttttaagagagagccctggggacacagtctctgtgtgtgttgggcggggctggtgggggtcgggggattgggaccctgcagcttcctggtctaaggtggtgtcctgcaagatcctg

SEQ ID NO: 58246 - DNA, 1053 bp, Homo sapiens
ctcagcacccatatatcatctcatttcgacctcaaagcaactgttatgaaatagaagttagtattgtcattagacccattttacagatgagaacactgaagcactatgaggtctgataactttcttgaagtgacattgagaataagttttagcactgaaatttgacctgcagctagctacttgactcaagagcccctgtgtttgaccagtgtcaaaccagtccttcatctctttcctgagctcacttggacaaattagaactgtcaatctgcagagccagaggagagaaaggagctggcacctagctcttcctcaagcctgctgcagaaatgggaagaaagccagtagtccccaatcccagcattgtttggggagactagacatgcacaggaagagacaaaggggcaaggccaagaggggagtgtggatattgcctgggtgaggtcagagaggagtggggatggatgctgagaagttcagggagccagagagagcaggagtaaaggcagtgaccagcaaggccaactccagagctccttggaaagcagcaaggcatggccttagccatgtcttaagtcctggctatgcacttcttgatctgtacatcttaagcctgctgcagagatgggaagaaagggaaaggggctggagtgcctaagcagacagaagcgaagagcaggccagggcatgcattctcatggtggttgaccaaggatgggggtgtcccctggggcagtgctgtgtaaggcaaaaagcagcggttagataaacctggctgagctctgccccactcactgtggaaccttcaagaagttacttaacctctctgggacactatttctcatccgaaaaatgggaatgataataacacctcacagcttgttttgagcgcttagtgggataaaatatgtaaagcccctggcacaattccttactcattataagcacttaacaaacgtgaaagcagcagccatcattctcagaatcttcaataccttggagctgaagccctgcttctggcttctttcccgctatctctatcagcctggagat

SEQ ID NO: 58247 - DNA, 1051 bp, Homo sapiens
gtattctcacccccactgtacagatgaagaaaatgaggctcagagaaattgagtgacatgcccaagtttataccgctgataagtggcagagccaacatttgaactcatatttaattataaaaccatttttaaattctttacaatattcccaagtaacataaaagaagaagtggtgcttccccttccttcatatccggacctttcatagaccagatagatgcaatccatccacaagacaccatatcccggacaatgcagggctgtcggtgggagagctcttactgcatccaggccctcattcatctgtgcagagaggagttaggagagcacagacactgcctttcaaagacagagctacttcaatcccattttattcttgatcgtgaccagggatggtgcctcctgactttctcctgtgtctttatgtctctggaagagaatgtttgcaggggctgttggtggtgccccagcctctgccctcagacagctagcttcctgagctgctcagggctccgtgccttccccctgattcgagtgatttccggccactgctggcctgagaacttgcactgttctgtaattcttgctgctgcagttgtcagtctctacatctgtgggcacccatggtgtgggggagcttaaattaggcagagacttgcttctatcagcaccacccgcctctgccagccccagcagctgcaccatccactccccaactggctggggcccctttccagccgaaggcaagcttctcactgggaaacctctgcctcagccgcccctgctcgctgaccgggggctgacgggctgctctgttcacagaggacacccaggctacgcgaggctaattaaccccccgaggtaattatgctgtaattgattttcccagtgaacatatcagcaggcatcagaggccccaatctcctgctggtacttttcaagtcaaggctgttgtgaaatgaaggagcatctttggagagagacaaatccatgctgtgtcccaagccactcgggggaggtcactctgaacaggacatgggggagggagcat

SEQ ID NO: 58248 - DNA, 1065 bp, Homo sapiens
agaggtggaggggcaggtgtccgggagccaggtcatctgcatctcacctgggcccaaggatgtccctgtcatcccgctggatcaaggtaagaaatatctgccatgagagccacaaatgaggggcttctctatactgagggagctgggggtcacaagaactaggcacacagtcttcttataccagatactaatattggcttagacaacttgtttacgtttgaaagcaaactgtcatgccccaaagtgaatttcaggaaagaaaacacttgctccactttgagttaaggctgcacagaacacagcgtctttccagatagcccgtccctcctaggaatggagtggcttccatcagtagttttttagcaggtctctccacagaactgggggctcagacctaatatttctgaaatcctttcagtaatggaacatgactgacaaaggcaaggggctccgtggaatctgcttcttcctccctgcaggcagaggaagtctgggtctgaggggtgggctggtatttacccaaagaggcttccttgggaggagaagagacgattcaggcaggttccacatagtatctacatcctaagagagccctgtggtggcttcatgacttacattttatttttgtggctgtccactgggtcccccacgttgttacccaaccccatccttttttgtttgtttttccagactggtttgggctggagctacagctgaggtccaaggagacagggaagatatttgtcagcaccgagttcaagttttacaactgcagtgcccaccaactgtaagtgcttattagaaagggtcttgctctgggtctggatgtgggtatgggctttcttcccctcgatgctaagctcctttagggcaggaaccacgttgtagtcacctcacagtttccccatggggcctgacactttgtttggacagagtacactgtacataaatactaccatattaaaccaaatggtatttactctctatagtctctgaatccttggatgccaccccaacacacctaacccccaactctcaggccaagatagtaaaaagagagtcaga

SEQ ID NO: 58249 - DNA, 1066 bp, Homo sapiens
aaaaatacaaaaattaaattagccaggcatggtggcacacacttgtattcccagctacttgggaggctgaggcaggagaatcgcttgaacccaggaggcggaggctgcagtgagctgagactgtgccactgcactctagcctgggtgacagagcaagacactgtctcaataaaataaaataagaaagaaaaaaaggaagttccagagaaactcagccaatctcttggtctctttctgtgatgacataaagtgctggacaggaagaggaagaagtggccctagcccttcaccagactcacctttccgtatcacttagtgaaggattgatttgatttcttgtgttcaagggctttgcagggactagagcttcacccctccctgaaggtgtgtttgctttggatcagggacaggcctgtttgcggacagagcatccggacacctttcgctgggtctgtgatatggtggctttgttgctctcctagacaacaatatatatggcatgcctggccagtggcatcagggaacatatctcctgccacttcttcctggagacctccaaccccaagcccctggctgacctcctccactttcacctttcagcctcgtactcctgtgccacctcagcacactctcctgctctaaaaaaaaagaagcattcaggcagtcactaaatagcagtattgatgccccatccccacatgccctggaatgataatgcatcacccgtggtgtgtatccagacgaagccagattacgctcaggtggttaaaagtccaggtctaattagagttccagggaatcaagccattgtattattaatgattctccggcaatgttctgattaaaacagtaattttaataagcacagctcgatgctaagtgttcagtgagcacctaattacatcagttatgactccaaaattatttaaaattccgctttttttccaccggacccggcatgcaccaaataaaatagagactcagacaacttggtgattatttgctctaattaatatcctaagcacctcttttaaaaaaaaaagaaaaaaaatgtatctttgtctct

SEQ ID NO: 58250 - DNA, 1012 bp, Homo sapiens
cttggtcttgtcttctgtaaagtggggataacaataatacctacctgataggactgctgagaaggtgaaatccctatacaatgcctgggacagtgtgagagccaaaccctcagccatggctctagctaagccctgtgttttctccctgcctccaaggtaatctccctctttcactaccatggagtcccccacaactaacacgttgcccatttttcatccttaagtcatctgccagttgcatctatttctagcctctgtcttatgagacaagaataaggaaggaaaacagataactgtggaggctcatttgccagttgtcagctcctgccgtcagctgggctctcttgtctgcttctccctgggtgcctggaaaaatcattgtgaccttttatttactggttgatctagtcagttcttggctccggatctctctgcccgcccctcaggctccccgcagctctcccagccctccatcagccagtgtgggttccctgactcccaggcagaatcatgctgcaagatgggcaggctgtgctgggccctcggagcctgcctgtcttcatgatcagattcctaaaaacctgtgggcacagagaggaggggcagtcagagctattgatcttccctactcgctgctcccgccaggggggatttctactgcagattctctcctgcaggcctcttcttctcaccccgttttactgagcagctaaactgagcttgaggctagcgagtggctgccccggagttactccgtaagtcagcagcatactctctctcttggcccctcatccaactttttgagctttaccaggttgttttcatccttttcccttcatcctcttctactccctacatcagctcccagcccggctggctggccatggccagcagctatttctgcttttccttctctttctccctgggaccagccatgcatttctctgcagctcctctgagccaattggactgaggtgtgcacctcgggaagtggagggtggctgttgggaat

SEQ ID NO: 58251 - DNA, 1009 bp, Homo sapiens
atacacatacacacaacagactcatacacacaccacatatgtacacacaccacacatgccacacacatacacattcacatgccacatatatgttaatagaccacaaaagcatagggtccttaggtgaacagaggtagaagcgagtgataaaggcctcttctgaagtgaatttgaggacgccagatgctgagacctgctgagagtgatgttgagcgctcaataactctgtgtcaaaagtctcatcctctccaaatgcttaggtctgagagaccaagtttctaagaaatctgagctcaggcataacaagaacagctttatatttatattacactgtacgttttccaaagaacccacatttccactcctgcattttggcttaggcctcacctcctccaggaagtaccccctcagggcctccttcaggccaggtgagatgctgctccgccccccgtgctggtctccctgggacccccatgcaaacctcttctcacaaggggtgacccctgtgttcatgaagaccagacaaattgtccatttccccatcaccgggcttcctgaggggatccttatcctttatcacgtatctgcagctcctaacgcaggcctagctcatggtaggcacataataaatcaatattggacagtactgacattcatagctaataactcattttacattcacaatatcttttttgagctaaggaccattatgtcccaccattatgggacagctacagaaactattacataaacaagtgaaatgacttgcctgaagtcacacagccaatgaaagaaaaccttgggattaaatcccagccctgcagacatgatccagtgcttccttctgtgtggtgatgcctttcaaaccaatctctttgctactaagaaacccaagaagaagattcccaattctgctcttccacagctcttgcagaaaacctatatatactattactgctactgctactactactaataataatgtgatattagagtaccaaagggctcc

SEQ ID NO: 58252 - DNA, 1148 bp, Homo sapiens
agcctgaatatcttaggaaagatgactgcatatgtttacaagtaactgtgccaagagacattctaggtgctatgggagttccaaggaaagattggtgcaggcttcgtggagtaggtagcatttggataaggccttgaaggatggttaggatctaggaggtagaataaattgtcaagcaaaggcgtgaagacgaaaaagctggggatgcaattggaaaatggtgagaaggccatgttagctagactcctgaatgacaaactgaggagtatgaactcttctaaattattaaaggggacaattgaaggtggtgtgtgtgtgtgtgtgtgtgtgtgtgtgtgtgtgcgtgtgtgtgtgtgtatgtgtatgcatgaatacatgccatgatttacttttttcattattccaaaagtagtgtatgttcatcataaaaaaattaggagactgagttaagcaagagaaagaaaattaccaacacctgaaatttaaggattttgcatacagaaaaggcaggatcgaacaagtgttttaagaagattaatctggcagtgtttggtagaatagattagaacaagaatatgctggaggcagggagatttctcaggttattgcagtagcccagataagaggcaataaagactcagccccagcgcactagcaatgggaagagagattcgatggcatggttgtaggctccatttctctcggttaccatggcttttctgcaccatggtgggcacatgccacgtgtgtgtgtgtttttaatgacttcttttaaaatctctgggagtctcctgcatttaggcacaagtccagtgtcagataatggtgcttagcgctctcgacctcccttcccatccctacagctggaaatgccatcctcagtgttaatgaaagcaaagattactgttccagattataaaatgcagggcaatctcaggccatagaaaagaaaagaatgaattaattaaagagagtaataaccctcttaaacaccccatcctttgctcctttctccagactgcaggtggccttctttgtcacagtggaggagacagctatatgatctattttgttccccaggacttatctccagaggcacccagtgctttttaaatgtagtttttagtcctaatgtaggcattgtcctc

SEQ ID NO: 58253 - DNA, 1053 bp, Homo sapiens
tggctggtgtccccagtctcctctgactccaacatcctaaatgcccagactctcaagacagaaagagcacgagctggaggacgtgggattgtgcaaagagcaggggcagccgtcttcctggagcctggtactttagcataggctccccagctgtttgcttggtgattttgagggagttgtgtgctttcaccaggactcagttcctcttctatgggaaggtacttccccccacaggatgatcatgaagatcaaaaaagaaaaattaggtgatagaaacaaacaaaatgtcattaccttcagcataccctcagcctagcagatgataatgcagtgcctgttagatggacaaaggacaacattggctgggagaatcaatgcccagctctgaggagccctccccagagcctctagggaaggggtttccccattttcctggcatttctcccactccctaggttgattggagtcatggtggttttgttgtcacctgccatatttcagtaacctttgaccatcgcccagctagcctgtgggggtagatgcctatgcggctctccctccctctcccatgcagagaagcacagtcctccctgggagcaggaaggaatgtgcttcctgggaatactccttgccccatgtgctggagatagagcccactgcagggctccaccacagggaggatcttgaaagccaagaaaagcgacccatttgttggagaacccgacagggtcagaggcagctcagaccacctgtagggaatcaggcccttttgcccaccacaaatctcttttaacaacaaactttgagaacagcctgttttcccagcgcagcttcctgcatagtgtttgcctaatctttctgtccaaaatccctctccaaacaggaggtttcctgcccagcactggcaatcagagagctaattatgtgggattagagatggagttggggggtgttccttttaattacaggaaaaaattagtccaactgatgtcggcaaggccactgggattagaatgaaagtccaggtttgggcacaggtcagtttgggaggtg

SEQ ID NO: 58254 - DNA, 2540 bp, Homo sapiens
ttcaaaataagaaagttggaggagaacatttgcctcccaaaagctatttttctggacataatttaaaattacagcttctcctcctatcgctctgtattccgccacttcccatccctggacctcatccctaccttcacagtgaactcgggcccacaacggcctggtctacagatggcggaaagaggtgggaggttttgccagagagcaggggtgagattcccctcccagcccctctctgacttctgacctctgcacctttcttgctagtgatccctaaattactgggctgtctaaccctctctagggaggagggaagcaaacagggctgacgggaggtggagcagagaaagtatgaggtggaggtcaggggtcttttcacagtgtgttttggcaaaggaagcctgtggagctgccagtgggatcagactttcatctcctgagctagccccctcactgggaaagcaaaagctgtcactggagctgtgatttggagcatgtgctctggggaactaggctgcacccctcagggtctggccccctgaaggaaagaccagagaacagacagggccttccctgcaccctcctgccaccaccctcctcagccttaggaggtgacagcagtgcctggaaaggggcttgctcagaaggaaaaggctcggtctgcctacctgggtcgggaagtggtagatgggattgtcctcagggccccagccagcatgaagcctctctgatgcttcttatagccctcagtgtgttcctatcactccagagaacctcccacatgcatttgtctcccagtccagcaaattaaaatctgaaaggaaggaagaggtcacaggctcagagcctggacactagaggtttctcactgagtgaactttggaaggcttggaaggctggagtttggggtcgcagagaagtcagcctccgccatcccctctcaaacttgggcagggggagaccccagaagcttgacatggccagggccaatagcggttactccctttccctcctacccccatttccctcatcacagtcctttttacccctcctgggatatcttccatcccagttcccctcgattgctttagggtgtggggcaatgacagcgaatactcatgaggggcaacaacttcagacaaaatctctgaagactcacccgtgtctccacacttcttccaccccttgctagctgtgtaaagttaaccactgtgactctcagtttcctcgtctgccaaacggagtaaataatagtgcctttctaggatggatgccaatgttgtttggattcaacataaagcagatgcagagggtgtaacgcggtgcctgatacatgaaagttaagcatgagctcttgggtttttgtttcccaggtttcttctctcttggtggctctttaatgaatagtgacagtccatacccaggcagccatagccactgccactgccacagccaaagctcaggctatgtgatgaacctgttttctctgccttctgcccctgctcccagccatcccggcagaggtgcccactcaggcctcctaccggagcccctctcccaccgcttgaatgcagaggcgtttcttctgctgacagcctgaagacaggccatttttcttctcctcccatataatggcctttactctcctaccactccaccccctttcccagccttaatgactttaacatacacacagttatttaaaaaaaaaaaaaaaaatacaagcccccagtgagctgctctaaaccgcctgttgtggaggaggaacaacccaagcacatgttcacaagtcactgcatgtgatgacagggggccttgtgctaatttcctcgtgtttgaagccccagggtgggggcggggcaggaggcagccagaggggagagacccagggcttgggtatttgcttgttccctttgatcctcctagaaaatgctgtagcatttggggaagtatttcatcctgggaaatctcaaagaagagtaagaaagatgccttaggcaggggttggggggtggcaggggatactgtagaaggaagatgctaccagatgaccttttctctccttgagattctgaatccctgctctggcttccctgggcagcaggagagagtacagaatctccaaggggaggcttcagctcaaggtatttatggatttgctgaagcctcctaccctaacactcacacagtttttgccttccagtttctctttgtggcttatctgagagaggctaatagagcctccagggccctcatctgccccaccctgtggatagcatctaggttgagcctctccctctgatcttgacctctagggctgacgtgtagtctgtgaaccaagggttggtctggtgggggagaaggggagtgagtgctgcctgcctcttggcagaccattatgccaggagggaggaggttcctgaccacaggacaggtccggcagaagggagggaggacaaagagccaaaagccccggctgcacctcctagcagggaaatggagctggctgtgagccaggttttcctctaaatcagaagcaa

SEQ ID NO: 58255 - DNA, 1096 bp, Homo sapiens
atccagagagctccctgggccacagacaacccgttaatttcacacacaagggttagctctctttcatgttgagattcttttccaggtaaatttgcagcatatttagtcacggggaaacccggtctcttccggcaattagcccccagttcagcttcggtgactgtcagtgccccattcaccctcagcctgagtaatcacgtgtcgtcatgcacaagggttatctaacccttttccaacaatggcacatgtggtgacctccctttatcacttagaataataatttataccagttggcacaagggatgcactagtccctgctcttttgatcttcagactgaaaataatttttcttctaaaccatcactgattgatttttttctttcattgttttatatcattgagataagacaatggtttgagttcaagtcctaactctactatttactaagtacgtgaccttggccaagttatttaacttctcagcaattcagagttgagagttcttgtctttaaaaaggtcataataataccttcttcagaaggattataataaggttcaataagcatctaaatctcttagcacaggtctagtacacctaataagattccctgccttcccctttttctttcacctcacatatacccagatacagaggacaaaagagatagctttcttttccaacatctacccccgcccttgccacccattcttctgaataccacattattttccacccattctcagggacaacacacataaaattaatttctccaaagcaaatggtgcaatggaatctgaattccaaatgccttcagtctttttctccccacccgctacaagggtgaacaggagcttcttgcccccactgccatggtttctactgtttctctttcttctcagttaacccagggtcttaggtggactgagtccattctccaattcaattctcaggaccctaccacaaactcacaggtgttcagcacctccatgaaagggagaaaggagcaagagcatctcagcaccacccaaaaccaaggctacttgaacacaggatttgcattcacttctgttgtctgccccacaaatacactgtac

SEQ ID NO: 58256 - DNA, 1025 bp, Homo sapiens
atgggcatatgtgcatttaaatattactacaattgtgacttaacttgtgaacttcgattttttttttcctgtggagtggggtagtaataagcactttgcatatttgttgtaaggattaaataaaatcatgtgtaaaaagtgcttaatatggtgcttggcatgcaagtgctttctattattactgatatctttgaggcttccccaaaaccccacttcttccctggctccctggggtagtgatgctgtcagatcaggctccttttcagtgacatgtttgcaaggtcagacggaggaagagaatcctgtcccctactcccagccctgagtcatgggaaaaaaatacttagaagacgggaccagctgagccgaactaatctaatcctgctggactttggcatccagttgcattagtcaccagtgagaggtttcccagtctcatatcaccaaacaatatgtactgaccccctccccagggtggggctgaaggaagtgtcagttgccctgttgtagcttcgcagaattaactaaaacaggcccattctccccctttgcatgtctccacaccaaccacagtatcctgtgctgcacaactctgccttcgatgaattatgtgatctgaggggacctcagtttattcatctggaccacccatgcctgcctggcaagattgctatgcgtatcagacatggaggatatataatgtctaacacagatcttgacataggagatgcttaataaatggcagtcattgctgcctaccacctctgttgctgctagagtgactcctcctactagtattactactaccactcctgtactattaccatgtttttctgccacagtcccaaattctctttgattctattagttcattagtcccatataattttcagatgatcaagaaggattggaggccaggcgcggttgttcacgcctgtaatcccagcactttgggaggccgaggcaggcagattgcctgaggtcaagagttcaagaccagcctggccaacatggcgaaactccgt

SEQ ID NO: 58257 - DNA, 1160 bp, Homo sapiens
ggcttatccattaagctatggaagatgaattaggcttattcagtgtggccccagagggcagaacagggccactgggtaggcgttacagcaatgcagctttccccttcatataaggaagacgttttttacagccagactgtcccgtgatggtgagagctgacccaggaaggaatgaggtcctagtcagtggaaatatgcaagcagagactggatggtcaccaaccagggtgctgtcaaggggattcctgcatcaaatctcagatcttctcaatgatactgccactgtttctctggctctgtcagcaaagcgtgcgatgaaggaggacaggctgaggcagagaagaggagcagaaaagggaagaccaaggtcccctgggtgtgggctttggaatgaggctggttttgagcctgcccttagtgtagcagaaagcccctcagggtcaggtaggaggggcttggcacagacagggcaaggcatggcctggatgatgaggacaggcaggcctagggccagatgtaggggagggaaaagcaggttatcctggggtctgggtccagttcctcatgacagcatccctcctggttaagaataggcagtgggagtccagatgatagagattaagtgcaaacaccaaagcagatggagatggaggaagagtggcaacaggaactggaaactcattttacatgattttccaggtttcagggcggagacaggaggcaaatcaagctcatgccatggggcaaaagagggaagaagtcaagctgagcaagtgaaagatgccaggacaatggaaggaaggactatcttgggttagggtgaagttcctttggtttcttccttccatttgcagctgctaaactgccgcctcaacccaggtttcacatccctgcagggctcctcacagaagctggggggtagtgttttgccgaggctctctagcctcttagtcccagggaccttaaacagcagcagatgctgctggctctcttttccatccccaccagaaacctcttctgctgctcaagcattgtgacatgtcctttattctgtcccttcaaccactatgcatggcaccctcctagaccccacagcatctggcaagggagcagctgttaaggtgtctacctcccttgagattcacagatctttgagggca

SEQ ID NO: 58258 - DNA, 1023 bp, Homo sapiens
tggtcctgaggaacattaaaataaatagaaaatgagttcaggcacttagctttacaaattgatcctggttctcctggcagaaaggtagatacaggtgacgccagctgagtggaaggttgctgcctgttctttcatctggcttcataagaaccaacatggaatttgtgggtgagctggtgagaagtttttgtctgcagcttgtattagggcccctgaactcccatgtctgcctctctgaggcctggtgtcctaaggctggaagttgtggatatgggtcgtgtagagacttcaccatgcctccactgttactcaccccaattccttccgcttccctccagcctgtccccatcgatgataacttctgtggactggacatcaaccagcccctgggaggctcaactccagtggagggcctgaccctgtacaccaccagcagggaccgcatgacctctgtggcctcctacgtttacaacggctacagcgtggtttttgtggggactaagagtggcaagctgaaaaaggtaagagtctatgagttcagatgctccaatgccattcacctcctcagcaaagagtccctcttggaaggtagctattggtggagatttaactataggcaactttattttcttggggaacaaaggtgaaatggggaggtaagaaggggttaattttgtgacttagcttctagctacttcctccagccatcagtcattgggtatgtaaggaatgcaagcgtatttcaatatttcccaaactttaagaaaaaactttaagaaggtacatctgcaaaagcaaaaaaaaaaaaaaaaaaaaattgctcttcattcccaaatcaagcaaaactaagtttttgattatgtgcattataaatctccaaaatcgcaaatccctccctagaacctgtaaacttgattatactggtctttgttgaattcagagaagttggttgaagcagattactggtcccaattctaagacctggggtaaacggtgggtgctgctctctgatggtatatgatg

SEQ ID NO: 58259 - DNA, 1427 bp, Homo sapiens
gaggtagcattttatctgaaaaaggaaatcttataggttgactaattcaaataccttttgttttaagatcaagaaataggctcatggaaatgccagactggtctaaagtgagtgacactataattcatgagtcacacaggcagaatgtgaacccagggttcctgagtctcccacctttcttcctgccctgtgacctcatgccttctagacatcaggacgtttctcattctcagtctaactctcaggatcctgtgtttccaccagccttcctgcagtctgcggagaggctatattgggacttgtgcagtagtatgacaaagaagatcaccttggatctatttctttccccttgccacatgcttcccagactgagctctgtcactgggtcggggaggcctagggatcaaaggcacacccacagtgttcatctcattgtgggtgggaaaggaagaatataagcaaaaagagaagtcaagagctgtggcaggatttcagaagtgccatctcctgtggagtcttcaaagacaataacaggccaggtgcagtggctcacgcctgtaatcccagcactttgggaggccaaggcaggtggatcacgaggtcaggagattgagagcagtgtgaccaacatggtgaaaccctgtctttactaaaaatacaaaaaaaaaaaaaaaattaggcgggtgtggtggcacgtgcctgtagtcccatctactgtggaggctgaggcagcagaatcgcttgaaccagggaggcggaggtctcaatgagctgagatcataccactgcactccagcctgggcgacagagcaagactctgtctcaataataataataataacaaaaactaacataagttaagtgctcactgtgtgcctgcaaccatgctaagaggttggtctctatattgtctcatttactgtcatgacaacttgaaaggtacatactgtagttattcccattctaccagaaagggacatgagacttgacttgcctcaaatcccaaatttgttcccagattctgtctaacaacaacaaaagccactcactattcaaactgtgtcttgggaggataccaagcagggaggtgaggtggctgatcttaaccgcatactaagtccttccatgttatctctgctaccagaacccccttcctcccctcgcggctcctcaaggaggaaccactctccacctggaacccaaggagattttcttcccagcgacaggggcagagaatggcctcttgcaattccccatccagctggagaatttaaggattctgttatttcctttccacagctcctcttcaggaattcacgtcctgctaccggcctcaggacatagctaaaaataacctctggtttccaaactgaaagccctgtctgttgggaggctttgccggtgtgcgcctggggccggaagggctg

SEQ ID NO: 58260 - DNA, 1029 bp, Homo sapiens
tctcattgattctcaccacaaccctgtgaggtgtcattttacagctgaggaaagcgaggctccaaaaggttaaataacatgttcaaggtcaccagactcgtaagtgatagaatgagacttgagcccaggtccgtctccaaaggccaaggtcttttctctgcgccatccagcgctgcgagtttgacctccttgttgaagaccctgttctggaaccttccaaggggacttccctcaccccactctgttcatcactttatattgtgaatttgtcattttttattattatgtgctttttatgtgatccatgatattatatggttaacggctctggagctgtcttgcaaagacttttcctgcacaagtctagattatacattcttcaaagacagagctggtatcttcccattcttctccatctttcttcccacctcacccatctagcctcacccagtgggttcaaggcaaataatagccaggatccttcctaaatcatttacctccttcttcactacctcctgaagatcagtcatgacagatccctgagccaagtgtattagttcaaatcatttcttgaggccaactagtagggacagtgtccactgagaaaaagcaaatgagcacacctgggcaccccctcgcgctgctcttgacaattcaggctgaacacaatactgagtgaaagttatcatgctagccctgcacggataccaagaagcacgagatattgttcctgccttcaaagagcctctaattcagtggggagataggaaatagtcacataaaaaagacagctcaatgctgcaatgtagtgtgtgctagaatcagtgtgtgattctagcctctccacctccaatctcctttctctcctccaaagtcaattaaaaactagcagtttttagagagaaagagaggcagggaaagacaaggaaggaagaggaaatttagcctgtgtactgaggcagacctgtatgggaagggcccagagaatgcggggctgagcctaaggagctggtatctcagcatcttctc

SEQ ID NO: 58261 - DNA, 1109 bp, Homo sapiens
catccgcgccagactggagcgggagggcggcggagggcagttgctgggaatttttcagccgagagggcgagcgatccggagagagaccccgagagcttgggagcggtagggcgtgcgagcgccgcagccagcggagcaaacctcgaaatagatctggaaagccaggctcccggaggaaatgggactgtgaacgaaccggagagcaagaagggaaggaagcgccgggattgctgatgtcagaggagcccggaaagtcgcgctggaaaaatctgaagacagccggggctctgcttcttcctcaggagagacaccgccggccgcccccacacgccccctcggcgcctccgggtgccccctgagagccggcgacagcgcccagccgggctgctgcggggcgacggaggactgaggggcgcgcggagcggagaccgaggagcgacttcaggaatacagataagtgtctggtggcttgacgtggattttaatgaatttggactccatgtggatttggtcgtctccctgattccgagctgcgggcagggagaggggcctcgcgccgccctcagcagccggcggcggccgaggtagaccgagcggggacggaaggacagaccgacgtcgccgagctgggtaagcggcggctgggccgggcgctcggagtcggcagcgccctccgccctctccccacaggcgcgcacacccgtggcggcttctcccgcgcccgcctctttggggtcccggccccagaagacccggcttggccgcggcgggcgagtccccgcgtgggctcggccactttcgcgggctggagcgcggcgtgcgcgcgatcgcaggctcactggagccgctgcctcccgccgagggcttcccggccggcagcccgccggcttcccgaatgcgggctgagggcggcagcagcgctccgcggcgcgcctccaccgcgcacctgccggcgctctgcggctttggggagctcggggcggcaaggctgtcctgagagctggagcccaaagagggcctcggtggcaccagcgagacagcccaaagccacactggccagcgatcgatttgggggcgttcactccagtgccggggtccctggtggccgc

SEQ ID NO: 58262 - DNA, 1018 bp, Homo sapiens
aacttagctgtcatttttggcctttagcacactctgtcatcaaatacttaatactttggtaaatatgactcggtggtattgggtggtgggggcaggtggggttcacaaagcttcgtgcttcgagcagcaactgtctttgggatggataaaccctcaaaggaatagcagaatttgatacctaccatagagctatggaatgcagccccaggagaaacacctaccatagagagcagcacttataacttttgtggggtggggtaagagggtggggatagaaataaagtaatttattgctggcaaaggaatgtttttcttccatcaaaagtaggatttattgtctgtataatgtgtgacatacccagattggaagagtggtattttgttgaagatggttttgcctggtaaatccactcaggacaccaaaattatttaaaatattaaaataaacattttgtcttctttacagtgaatacatgctattatagaaaattcatgcacgaaaacataaagaaaaattaaagcttttcatcatctgaccatccaagataaccaattagcattttgttacaattttagatgttttctatactttttaaacatgtttcaaaatgacacattaacattttaattctgacttttaattatgaagcataagcatcttcatgttgctagaaatgttcataaaatgatggtgatgacattacaattttctatttatttctgtgcttgaatttactaaactataataatgctggtaaacatttcatgtcacttcctatgtgccagatattgttctaagtgtttgacatacattaactcatttgattcccaaaaccacgttgtaaggcttgtactgttaatattccccatattacagagaaataaattgagaggttaagtaattgccagaggtcacttgactgttgagtgatggggtcaagatttgaacaaaggtagatagtgctctatggacaattcatagcccctctaggctgttcagccactgtactgctgtaga

SEQ ID NO: 58263 - DNA, 1050 bp, Homo sapiens
ctaaaggaaatgagaaaggtattaaagagatggaatctcagacagagcttcaatattgatctcgtctcccttaagtttgatcttatgtaaagtaagtatacagagtgaggtttggtgtaaaatttgcttttgtaaggcctaaagaaactggaacaagccatccatattcatcccctctttagcaagcatattccttcctaccactttcaaatatttggatcaatataaagatttaagatcgattttcttccagatttcagatcattgcctcatagccacattatctcacaagctgtggtttgcattcttgcacactgagctgtcatatttcacataaataccttctttacatgggacaaaatataaactgtctctttctacttaaccctgtcttgaaaaaacaaaagaagctgagttttggaaaatgaatttcaagcccagtccactggaaaatgtcctttggtcatctatacacctgcacttactgatactctcttttcatccactgcctggcccgtaaaccacattgtgtccctttatgggatacttttcatccactcctttcacttgttggctccctctttggtgagctgatataggagcttgtgtatttgcatttcctttgggagcagcattctttaagcagagcaggaaattcagtgtcagttaatgaatgctcttggtgtgcagaaactctgctgagctctgggagcacagagaagaatgagatgggttctccctctctttaaaatgattgcctctagttagaggcaatgggcctaacaataacaatagctcccatgcattgagcatttgttttgtgccaccttcccaaacgcaattaattttcatcttcacaatagtcctgtgatttagatgctgttattcccatttttcagaggagaaaatttgggctccccagttgccctggccctcagtgggtatgtgtcaaagccaacatttgaatcctggtctgtgtgacatcaacacctcttcactatatgctatgctggttgaaaatataaatactagtcgatgactgaggcacag

SEQ ID NO: 58264 - DNA, 1070 bp, Homo sapiens
taacaaaggatgacagtcccggctcttcaaagtccctggggatcttacagaacaggctgccaaggaaagtggagaaatcttcgtctgcttcaaagacccgataaattatttacatctaagagctatgcttttgtttttctggaggcagaaccacagtatgcctgaaaaggagatgggggggcagtttagaagatgggccaggagggcagagccaggtggtgaggggagagttccagacaagagcagcaaaactaaggggttagatatcaagaaagagcatgcaatgtctatgtgtgagagaagatgatcattacgtgattgttggacctgttaagtggaaatcagagctggaacaatccagcactcacatgcgtgcccatgtgccagcgctggcccctgtttcagtgcaaacacatgcacatgtgatgtgcaggcacatgggggccttgtgactagtgacgcttctgcagtgctgtgtgggtgaggcggcttggagcttcccttctttggtggtttatggtgggttgttgttaggtggtttggattttttttcctcttctaagactcttaaaattgcctctttggaagatcagctaaagatgcattcactgccacccaccagcccggaagtgaatttccatcagtcatgaaatctggtccttagtcgtcgtgtctttgattactccccttagccaaggactttatttgccacttgcttgagaaggatccgaacgagcggtacacctgtgagaaggccttgagtcatccctggtgagtgagacatggagtggactctagaccccagccctgtagttcccaaaaccatgctgactcattcatattgcatttccctggaatctgcttgtcctgatccatttaatgatgtgacaagcaaggaccatgccattgttcatcaggcccaggtagagattcaaacattatacagtggagcaggttctaatgcaagggtagcagctgggttgtctggtcaagtgcaggaggcaggtgcagccgagcgctgtcattcagcactgggatagggtgcaatgttcagtactagttattcaaga

SEQ ID NO: 58265 - DNA, 1044 bp, Homo sapiens
cacaactagtaagtgatggggacagggctggaagcattttccttgccccctcatccagaactcatccctccctatatagctgcctatgagtgggagaggcctttgtgtccatttctttcagtcctgttgaccgatttctttcagacccaagctggggctccatctttggctaaaaatacgtactgttttttgttggcctttttgaggagtgtgggctcagagcagtaggaggactttcctttgctcccaatgttcaggcagctggagcagcagccacagggcccggcggccagggacccctgatgcatgggcaccaggctgctgctgatgtggagggagccattgaccaggcagttgagggacctgccaccaggggcagtgggccggcggccatgctggcagggtaattgggtcagggcagggagtgctacactgtggtccaggacaggtgcctcggtgatggtgatctcaggggagctgggtctagaggtttctgaggcttgagtttcaggcggcctgttctccacctctgggcggacgcccgggctgtgcaggttcatgtgtagcttcctcatgtggtgcaccacagctgctgcgttgaaggcttgctaaggagacacaagagcagcctctggccttctgcaacctcagagggccttggagcttaaactttccctttgccttgtggcctcttgaaacctgggtgcccacttctcatttcagagagggtacacggagctccaatgccttctgggacatcccaaggaaagcccttatgtcagcccctgccagcccagcctccaggggcccagaacagctttcccaccccctggagaggacagcttaccctccacttgctcttagcaaagttcttctggatctggaggctgactgatgggtagatgtcccggtggagggctgtgtttccgtcaatcctgtggatgtaagaggggacacctggctactgggtggctatttacactcatccagggagtgggcagggtgcctgcaggtctaggtgagagctgggtagagtgtgcagag

SEQ ID NO: 58266 - DNA, 1037 bp, Homo sapiens
ttctgtcctgttacccagatccttcccccttgccttctcctctctgatccattgccacacacgtgggaaggtgacaacccttccgaataaaaatgaaagctttcttctttagatggaacccccaaattccctcattatttataatgtcaggctgtcctggacaagggaagctgtgcacccgctgacaccagtaagaaggttgccgccatgtcagagatgtccgcggacacctccctgggctccgggtcctcccctgcgctcgcctggagtgggaccttcgcgtgcacactggccttcccacgcgccccgctgcgatggcacccgcgccgggccccctagctcacacagtcggagcgtgctcagcgcgtggccacctcctgccaggtcccagccgggttccaccccctccttttcccctcctcttcttcctccccctccgagttcccctggctctgaccgcgctggcctgggccggagagcccaggaggcgtgtctcagagaaaagatataagcggcccccggacgctaaagcggtgccagcggcggagtctccaactgggagagctgcagctgccgagaggaggagaacgctgaggtcggtcggaccaacggacgcgctgaccgctgccaactgcagctcgcgctgcctcctgctcgcgccgtgccactaaggtagtccgcctttctatgagccctccccaagattagctgggtgcggggtggtgggagccgttctttggtggctgaagcccctctcctgctgctcctcctgcaggtcattcccgcctccgagagcccagagccgagatggaaacggtccaggagctgatccccctggccaaggagatgatggcccagaagcgcaaggggaagatggtgaagctgtacgtgctgggcagcgtgctggccctcttcggcgtggtgctcggcctgatggagactgtgtgcagccccttcacggccgccagacgtctgcgggaccaggaggcagccgtggcggagctgcaggccgccctggagcgacaggctctccagaa

SEQ ID NO: 58267 - DNA, 1013 bp, Homo sapiens
gtgaaactatcttgtctgggctgggtcgccatttcaaagcagggagggacagaataacctttggaagataccgcgatttaacaggaaggctgttaataattccctgctcctgctttgtttctaggcccctcctcaagtgtctggctgaaagatgccacccagggaagggaactcgggctagctaaggaggccattcttgatgttgcttctagatctcatgtcatcaccgagccctcagctgctggtggcagctgctcagcagacccttggcatgggaaagagacggagtccaccccaagccatctgccttcacttagctggagaggtgctggctgtggcccggggactgaagccagctgtgctctatgattgcaactgtgcaggggcatcagagctccagagctatctggaggagctgaaggggcttggcttcctgacttttggacttcacatccttgagattggagaaaacagcctgattgtcagtcctgagcatgtatgtcagcacttggagcaggtgctgcttggtaccatagcctttgtggatgtttccagctgccagcgtcacccttctgtctgctccctggaccagcttcaggacttgaaggccctcgtggctgagatcatcacacatttgcaggggctgcagagggacttatctctagcagtctcctacagcaggctccattcctcagactggaatctgtgtactgtatttgggatcctcctgggctatcctgttccctatacctttcacctgaaccagggagatgacaactgcttagctctgactccactacgagtattcactgcccggatctcatggttgctaggtcaacccccaatcctgctctattcttttagtgtcccagagagtttgttcccaggcctgagggacattctaaacacctgggagaaggacctcagaacccgatttaggactcagaatgactttgctgatctcagcatctcctctgagatagtcacactgccggctgtggccctctgacttt

SEQ ID NO: 58268 - DNA, 1032 bp, Homo sapiens
tttaagtaaatttgaatttgggcttcgttgaatagatgttggcttgatgatagttttagggtaacaataagaacaatatagtttttgttcttaaaattctccttttccttttagtcagagagttcagattcttcagattctgaaagcgactcagagagtgaaccacaacaagtttctggctaccacagactacttgctacattaaagaatgtttctgaggaagaagaggaagatgaggaggaggaagaggaagaagacagtattgtagatgatgcagaaatgaacgatgaagatggtggtagcgatgtcagtgtggaagaagagatggctgcagagtctactgaaagtccagagagtaagtgtctttactataggctcatcatctttgccagaactatagacagttcatctcatgagcatggtaccttatatactgtgtgagttggatgaaaggacatgaatccaaaatagggatttacccttgttgggtttgattgtatctttgagaatctgatggaaacacagaaccttcttagcacagctaggcagaaataacatttttgcttgtaatttcagggacttcatcagtactagtgaaagacctcctaatacagaggaaggagaacacagttctgtctttgtgactgtctgaatttattgaagaggttactgttcttctcttagggagaccaagtttgatggaagatagacataaatatatataaaaaatttcaaacagtagatttgcgattgcatggaacagctagatgtaaggtgttgaagagaggcagagtggttgaacactgccagtgtaaattagggaaggcttcagggactctgtgtcactcagacttgaaggtgacttttttctttaacttcaaaatcaccttcattgaggtatcatttacatacagtaaaacgtatccaatttaaatatacagtctgacaggttttgacaaaggtatacatccaaatcaagatacagaacatttccattacctccaaaaatttttcttatccttttgcagtcag

SEQ ID NO: 58269 - DNA, 1052 bp, Homo sapiens
tataatgatgggtaagagtggatttggagaccaacatcttcaaggagctatcacattttgacccaaggcaagttcatctgcttttttgctattcactattctagtctgctagagggggataataatacctatctcaaaatagaatagtttactaatacatagtgttcagtaaaacagtgttcattaaaacagtaggtactactgttgttcatttgtttgaaatatctgaggtaggtccacaaataaattatccagatattgggcagtttttgcttctttgttcttaccactgatgccattcatgagagttggtcatcctttttttaattgaaatttttattgagggaataattatagatatacatgcagttgtaagaaatcatacaaagacatcttgtaccctttgcccagttttcctcagtggtgaaatcttgtagaactgtagtataatgtcacagccaggaaactgacattgatataatctaccagtcttactcagatctggttttactcctgttcaactgcatatgcctgtgcctatatttatatacaattttatcatgcataggttcctgtatctactcctgccatcaagatgcagaacatttccagcaaaatacaaatccttgttgcccttttataaccatatctgcctccctctgcaccctgccccacccccatttctaacccctggtaaccactaatctggtctccatttctataattttgtcattttaaaaatgttaaatgactcatacagcatgtaaccttttgagattgtttttttttcactcagcatgattccctggagagtcatccaagttatttcagctatcagtaatttatttctttttattgctgaggttgtcctatttttagatcagcaatttagctataatgcaaaaattcttaaacttgtatcccacaaaatagaaaatagtattccttaggatttaaacaaaatggacagatttcttgtcatagaacttgtcaacacctttagtatcgagtgtacattgtcaatctccctcagaggaattaagttttgtgat

SEQ ID NO: 58270 - DNA, 1111 bp, Homo sapiens
caaaaatcaagcagcccattcacccccctccagaaagaactcttcttaattatgaattcttaccgggacctgttctacccggaaaggactgctctgaagaacggggaagagatccgccatgtgtattgcctgcatgtgataaatcacatcctcaaagccaatgcccaggtgcttggcaacaatagcagacgccgaagccagaagtttggagtgggtgatgatgatgacttcagagaccaagggttaacaaggcccaaggtgagtccagcaggaaagctttgctctcgaggaggtggctgcaaggcactgccatagaggtgcctgacacttagcaggaacttgggtattttaataattgactggcataatgaatgagcccaaatgtgagcatattaagtaggccaggtagtgtcagagcagcactgcagcagcttagtgggctgtttctgacagtggatgtagctggaaacttgcgagaaggaggcacttcatgacactttccttaaagataaacccagagtatataaataaaactccattataaatctcttctttgtggttgtcaaagctggatgggaccttaatgagccttttatccaatccctccatattacagctgtggacaaccccaaattcgtagaaattcatagagggccttgctaaagagaaccagggaaagaatagcagagatgagacaagaaccatagattctcttcactaagccacatacatacgtcagcctttgaaagcaaaaatttacatttgccactgtaaagttattgctgcttaaagtgatgcgtttgtattcataagtctaagctctagtggatttgaggccttaacaggaaatggctttcaattttatctacattattcatgatgttatagaaccaggacttgtccccctgccctgaactgcatctctccgtattgaagaagcctcatctttttagaattttctcattgagtttaataggattctagaaatttgatactaatgtggcctttagagatttcttagtcaaactcccttgtgtaatagcgggggaaaccaaagccccgacgcttactgtcaccgctggaacaataacccagtcctcttaaatcttgg

SEQ ID NO: 58271 - DNA, 1058 bp, Homo sapiens
gggggccactgctctacatggagctttttagctccacttcctcagcagtttcacctcaagatcctgttccttcctcttaccccactaaggctgctgttgctgtctgcacaggtactgatagtggtgccattccgggaagctgctttgcgggtggtgcagctcttcatcagcctcctcgagggtgacagcaagaagaaaatcattgtgagcaacaaaaagaggtttcagggagaatatggatcagatcccgaggagagaccacccaacttgaagaggcctgaggattatgaagccgtatttgtgggcaatattgatgaccacttcaggattggtaattcttccttatcaactttgagacctaaagtgtgaaggtctacatagctggagaccagaagctggaattagatattttcccagtggatcactcactgtgcctctttaacagaaccagtgtgcctttgagacatgttgtttgccatgggagagtcttgccttggctaatggggtggacattaggccagtggagtcgggaggatctctgaggccatatatgaaaggcacatgtacatttataacagaaatttatagcaagtttataacagaagtgtgaaagcacacccatagctggtagcagatagatgctacaaggggttctctaggatgttggaagtgatggggctgatggggtcattctggggaggctgaataaaatgactgtctctacataaaggtggactttctcctgtgtgctacatagatgcctaccctgaataatctccacacatgacttccacccaaattttcacatttttgcttgtctctcattcagctcccattgactttggttggttataccttttatagagtaaagttcttggggaaatgttcattagtcacatatgctcattcacaaatacttattgagtatctacagtgtgccaggcactgttaagaagctgggaatctacagataaatatagaaataaaagttatagttcccattgctaaggaaatccagcctacgacagagcaggcagtgcaggatatgtgtgcaacgg

SEQ ID NO: 58272 - DNA, 1043 bp, Homo sapiens
cttagtgaggcttagtatatggtagatgttcagtgattatttgttgactgttggactgagtgactgagtgactgactgactgactgaatagtgtggtgtgtacttcctagagtaattctctgggatataatggtattacatctgttttttacaatgaatagtgttgacacttatttttttagtgtgcttatcaagttttatccttacataatctctttgagaggaggtaaatcatattggcctctggggaggtaatcttttaacacgagattgtaatttgctcagggtcacacagttaagagacaccataagcttagctctagacattaattttgccctttgccattccaaatcaggtttaacttttttgtgaacaagattttgccacagtatcgtgatgcagtcatgtctcacacgctcatctatatcccctcctactttgacttcgtgcgtcttcgaaattacttcaagaaggaggaattgaattttacccacatctgcgagtacacgcagaagtctggtgtctccagggccagacacttcttccttcaaggagagaaacagtttctacttttcacagagcgcttccatttctacaaaaggtaaagtggtgccaggtttcaagcctcctctctgaaggggaggtgcaggacaaatcatggcctgctctgaatgcatggcaggcttcgtggtgttgagatcatccctcactctcgcactcttacaaagtagccagagagtttttggtttggacagactcttcttggttggttagttggttttctcccaaaatgggcattgctgaagaaggatgtagaaaccaaagcataccctgtctatagacctggcatgtagctgtggttatacactgcaagaaggacattacaggacaactcaaatgaatacaaggaaggggagggaccttccctgtattcacttgagttgtccctgtctagactttttccctctgtttgccctcagtgcacagacaaaagcattgagaactgtgttttctggggagatggaggctgagtacagtgtca

SEQ ID NO: 58273 - DNA, 1094 bp, Homo sapiens
ggagtgcagtggtgtgatctcggcccgctgcagcgtctgcctcttgggttcaagcaattctcgtgactcagcctcctgagtagctgggattacagaattgcatcaccacgcctggctgatttttgtatttttagtagacgaggttttgccatgttggccaggctggtcttgaactcctggcctcatgtgatctgcgcacttcagcctcccaagaagtgttggggttacaggcatgagccaccgtgcccggccagaaaatgtacatgtattttatattgtagtatctgactctgtttttatattctctatgacagctggcaatgttaggaagattagaattcatttttgagttagcaaaaattttttaacctgaagatttgttttatgtggggaagattaaactagcagaatcttagaattggatgaacatttggtcatgattgccctcccagtgatgggtcacagctcttttccagtgcgttatcagtgggtttccacagcagggaggatctcaaccaggaggcaagtcagaaactggaggtgggatttgtggagtttggaaaggctgctgggaatttctgattactcccttcccctacaggagaatcccagttctagaagtagtagacttggtctttatggaccgtaggaaggagccagtctttcaagttcattgtggttgcctcatttgtctttaacagtggctcgtgaaatagacatgtggaaggtactgtaagggtgattaggctgtgtttgtaggagtcactgaaaacaaagcatatataagggaggaggaaggcagggtaaggggtgctcaagctatggagacttgccactaactgccccttggaagaggccctggccatgttctctgttgccaggagatactcagtctctattgtggttgcattgggactgagacagattttcatgtgtgtgtgtttaatataacacttaacagttttattgttttgtttttcctgattgtgagggtatttcacagttattgtagagatattggaaattttaggttaaaaatctcactgccctgatataaatactctttttggtaatttttttccatcttttttatg

SEQ ID NO: 58274 - DNA, 1968 bp, Homo sapiens
tagctctttgggctcaagaaaaggaacatttttgtataatagattatctgactttttcttattggtataggagcaatattctcgagttttatacattctaagcagaagtagaactcagtgttgtttttgttttgagaactagtgaggtagaacagtttattcaagttcattagccgttagaattccttctttatggaaaggatgttgaaaggtgaaccacataatagatcacagtcatggtttgggaaaggaaggtctccagagagatcaggatgagctgtgagggaaaaagacaaggaaaacttaccttctgtgaaagaaataaaatccccaagggagtctaacgtcttcagtgtatgagagaaacttaacaggaaaaatcagaagcttgtcaacatataaaatcttttgttatggaatcccacaggggaacggttgacgtcagcctgactgaaccatactgcaagtcagtcccttgggtgtacaccaccccccaccacagggcggcactgtgcagctgggaaagagatggaaatgcatacgctgttgaaactaattgctttctcatgatgcctagtgggtccttgggcagggttttgtaaatggatgaacttgggacgtctgccatggagttaacatgtatccagagtggcaagaaaagactaatgggagtgtatttacaatctgtacaacttattttatgtactgggtctgaccttgtctccattcttttttgcctgattataataaggctaatgttccattttaagtgcctgctttttaagttttctgtgacagatttttaaatcctggtctactattctttcccatgatacctcagcctacccagtgtaggatcaagaaatgtgtatttattttatcattttcttaagccaaatattaggaattcgaatatgttgtcataaaaagaattcaaatatgttgccacctcaagttagaataacttttgttctgttacttgtgccactgtttttctccattagcaggaagcaacaagcatgaactatgcctctgtacaactcctaggtagtttttctagaacttgtttctcaagttgacatagctctttctttccaattctgacaggtatacaataaaaggcatcaggaacctgattttctatgaactgccgacatatccacacttttacagtgaaatctgtaatatgctgagagccaccaacagaggagaagaggccacgtggacctgcactgttctctactccaaatatgatgcccagaggttagctgccgtggttggtgtggagcgggcggcacagatgctacagtccaacaagaatgtccacctcttcattactggagaaaaatgaaattttgttgggcaggaagtggtatttggcatgatacataatgtttgattctatgccatttggacccaattctgattacttacagaagaaggactgatacaaagaaagtgcatgaggcaatgtcagtattatctgacatctttcttttcaggtcatgtgtccctgaaaagttaaatgtaaaccagattttggtaaatcccatctttcagaagtgaagagggggctagaaggactctgagaagttggtagaagaaaactcccacttgtgaatatttttgtgagacataaattcttttattacgatttacctctaatttattacacttagtaaattcttccagatttttctatttgtttgacacttccttaaagtaaggaatacacattgcttgcgagaactggttatgagacattggaatacttcttgctgctacatgtcatcttaattttggatggcatgggttttgtaaaacttattctgccccagccaaacttttttgaaaccttaaatagtctaccttaattcagcctagaagagtacattgatttactgatcttttttcatattcataatactaaatgttttagttttgttcaaatatatgcttaaaatcacg

SEQ ID NO: 58275 - DNA, 1024 bp, Homo sapiens
ccccagttcacccccaccccgaagttcttagccttgtatccaaatgaacatgtgggcactaaagcctgctctttcctccttctatctttgtattaacactaaacaaactggcctttgtttctgaccttgaagagacagtaaaatcaacatcattctccaaaatatccctcaaagatgggcctataagaattcagagagtttagagaatcgctgcttagaagctttctcccctcaaactcatcccaggaatcttctcccttttactcccactcccaccctcaacacaccccccacccacacacacacacacaaacttcccaattcactgctagactgcttgatggttctctctggtgagagaagccagggtaacaaggaggagggaatgagtctgcaaatcaggtatatttttgaatttcaattctgtatccccagcatctgtctgctgttttatcaagaggaccagagatcatttaggaatgatggacagtcctctgaggaagcaatgccagaagcatgatgagcagaaatgctgaacaagatgctggctggaagggaaatcaatctcccaggccgattagtttgggtgggagccaacagaggctgaaacttgttacagctacagtcatctttcttgctactttttttttcttctagatcctggagtaaaatcagattagccttagcgctcaaggtagctaactggtctgcacatgccatggcaatgtctcaaaacagatgactattattaaaaaattatggagaaatgacatgatgcatctctccatttggtctgtaagatacttaaggacaggggctatgacctttcttctatgatttatggagtaactagcacaatgctgggcccaaaaggtcactaaacaacttgctgaagggaataggcttaaagtagacacgaaaggaactttcttttttaaaaaaataaaacaaagagactttgtctaatctcccagctaagaaatgaaagccagatgagtccaattcattatgatgcatagagaat

SEQ ID NO: 58276 - DNA, 1159 bp, Homo sapiens
tgcaagcgcagcacaaatagtgtattattctggacagagttcttatccaatcccctctctggtttattgtttagaataagctgagagcatagctcaggtgggtcagttgcaggttttggacattttaactacaaaccaaagttttacagtttatattctgcatttatattcattatagaatacattcgtactctgcacaaaggaccacacaagcatataccgttatttaatatacaatgaggaaaatcatagttgatatgtggtatgtcagggtgagagaattcagaatataagacgggtttttcctggagcctccctgacagcactgtaaggagggataggagaagtatacatagaaatccaaattttgcccccagtttgtagggtgtttatgctcagagtcctcctgtggtttttggatccttgatgtcattgtccaaattaaaaaaaaaaaaaaactatgaccaggctccagatttctcccatctgcagagatatagctcagcacattaaatgacttcccattgaccagcaccaatagaaaagccctacatagaaaatttggagaaaataaagaacttcatctgtgattatataactaagcctcagacataaaagaaggctaaatcaaaagggaatggcccctaagagagaacagtaaaaccctttccaggaaaacaaagagaatgagagcacagaccaaggtgggttgaatacacacttcctccctcagactggcttgccctgtctggctcaaaccaattctatttaaggaattcctcatttaagcctcctcagtgaaagggaaccaggaagatgaatgaaacagagttactaacttagggctcagtttagggcccattcaattatgaagagacactctaaatataataaacataaatgcaaatatcatgagaattcttacctctgatggaaggtaggcttgggaggcatcacagaggagagaagccattcgaacctttactttcagaatatatttttatatttttaatgtcaaaacaaaaattaatattttccaattgagactcctccatacccagcatattcccaagaggcaaacttttataagtttctgtttttagttcttgcgattatcaccatatgctaaataatataattctatcagctgggcacggtg

SEQ ID NO: 58277 - DNA, 1019 bp, Homo sapiens
ctccaaaggttaagtaacaagcacaggtttgcaaagacagtactaggtgacgctgagtttagaattgaagtctgactcaattcagaagcaatgatctttatgtaacactgtgttttaaattggtgaccaaaattggtattattccttgaatggtctaattagggacaaaactaaaagatgtctagagggtagtgacgatggtctaagtggattaaattggttggggggagttgcattagtagtttcatgcttacgatgtacagtgtaggtgtctgcataaggattagctataaaagagtttataaatgtaagctaggtgatcatttaaaggctctgactaatgcatgtgctttggagaagaatctttagatgagatggaatttaagacatttctaaagtagcctttcagtgtttgaccaagaagaaataagtagaacctgtaaattgtggtgatttaggctaatgatcagaataaacatggtagacaaaaaaatacagttgattttgaaaaggactcttagatccattttaaaggaactaaattttgaggtttaattccatttttgtgtacaggcatacctccttgcacttcattttgttgtaaattcacaaatttgcattttttacaaattgaaagtttgtggcaactctgttgaatgaatctattggcacaattttttcaacagcatgtgctcaccttgtgtctctgtgtcacgttttggtaattcttgttatatttgaaactttttcattattgttatatttgttatgatgatctgtgatcagtgatctttgatgctactattgtaattgttttgggcgctacgagccatgccaatataagatggcaaacttagttgataaatgttgtgtgtgttctgattgttccaccaatcagttattccctcagtctctcttcctttccttaggcttccctattccctgagacacaacaattaataaccctacaaatgttcaatgaaaggaagagtcacatgtctctcactttaaatcaaaag

SEQ ID NO: 58278 - DNA, 1064 bp, Homo sapiens
tgtccacctcggcctccccaaattctgggattaccaccatgagccaccgcactcggctagacatcacaacttctttttacctctttgactgtttctgtctcttttgctagcctctctcccctgtcagacctctgattatatcatgtaccaggggtttggtcctgggcttacttcgtttttccatcttttactctgtttgattttatctagttctgttgttttaaatgccacacaaatttataaatccagttcttggctgtctgagctccctcatcttttatcaaatgagttacttgatgtttctatctggatgtctgttacaataacaacttgacacgtttaaaatgcaagtcttgattttcttacctgagcctataccttcctcagttttctccatctcagctaataaatagcactgtctacccagttacgcaactcctaacttaagaatcatcctgtatttccccattattattgtccacatttaatttattagtaagttcaatcagttctacctgcaaagtatattttttaatttatcctcttttttttcatcctgctgctgtcattgtagtctagttctctgtgttttttcctagatcactgtcatagttttctaactggtttccctacttggcatttttatctcctttcactaagtattagtgattttcaaaaatgtaaatcaggccaaccactttgcttgttgaaatttttctatggattctcattatacctcaaataaaagtatcttaccctgatctacaaagacattatagtatcaactcggagtccaaaatgtcatctgaatatcatcagttcaaaagtctcattatctaaatcacttacattatgtatgggtgagactctgggtgtaatccattgtggttcaaaattcctttctatctgtggacctgtgaaaatagaaaccaagttaccctcctatgcatttcttcaaatctcatttccctaagttgtgtttcaattttggttaagtcagttttcagaacttacatttttataatcaatattgtttgcagtaaagccatattatatcataatta

SEQ ID NO: 58279 - DNA, 1030 bp, Homo sapiens
tagatatcctatatctgttcaattctgatagtttcttatcctaatacataactgtattagaataatacacttataagagagtacaaggtgtgagagatgaaaatttggagacaacaggtagattactgttactaaagctaggggagaggctgaacttggtgctgcttttccaaacttatggcaattaagggaatgtttctgcatgtgctgttcttttcctttgagttggctgatgtcactttatggacaaatggaaatccagttaggtgtttatattttactgtctacaccctcggattctccctttttgctgggtagacagatttgtgctttctttctcttccccctcaagtgcatcgtgggctcttccttcttttggtagtgtttcagttatttcttttgggaacatagtagaaaagtgtctgaaatgtaggtgacaatttttcatgtagaatttgtgaaggtgtagaactatattctgactttttgggggctgggataggtacagatttcttgcttagtgaccaaacttgactttcaaggcttttatagttctaattgtccagagtagaagaacaataaagtaacttttcttttttctagtatttattagagctagtatttagtagaaagagtacatgattatgaaataaggagatatggattaagtttcccaatttgcttcatccaggctgggtaactaaagtcattaaattctttgagtctcagtttccccctctgtaaaatggtgacattattaaggcttatctgtactaatctcacaagacttctctgaggatcaagtgaaataaagtgtatgaaaccctttgtagtcagtaaactggtatgtacatattattattatcttactgaagaaggtagggacagtcttggaacttgtagactcttactagagatgaatcagatgtattttttttttgtatgaattctggaaggcatgacctgattttttctattgtttattctttcagtggtttgacactcaggactttgaatgtatgagacctac

SEQ ID NO: 58280 - DNA, 1115 bp, Homo sapiens
gtaaaataatttttctcttattgttagatcaacatgcaaattctaaaatgagaaattctaaaaattatgtaaaaattataattgtcttacttttctttctttcttgtgactaaacagtatgtaatgaataaagtgctctttttctcagtgtataatttagttttaattattttaaaaaatattgtcataatatgattctcttatttatgccattttcgttttttctggttcttagcgtagatatcttttttttatatatatatatagctcagtgacttctagacactactgttaagggatattcttgaattgaggggaccaatagatttttgtaactgccctgttggtgtacattgtaagctttttttttcttctttaacctggctcaagaaatttcaattaggttgtgaatttatagagcctcggtagtagcagagaatagagctttagctactatgattaacatgacagtttcatttacaatttagtagaaggtggagatcatggagctatattttctttgattcgttctcagcttctttgaacttcttaatgagaggtttatgtgcacccagagggagggtgcctaccgcattgactcatgcttgttatttttaattttatattccaaattcaggctgccataaattaacatatacgctaagagtaaagcagacccccagtctttgaaggggaatgaagttcaagagataaagggaaagattatattatggaggtcataggagtacaagaatctagagtaatccaaataaaaatggagagcaaatgggtgatgaagactatgagagcccatcctgtacctcactaagttctcctttactctgaaaaagccatctaaaagtgtcattttcttcttcccttatttcttcctctaatggctgtatgagttggagttttgcaagtgtaaaactaaggtgtttacagaatgatgtctgtggaccaacttcagaaatttaaagcctgtttgtttttcctaacccttctgcattattcagttgagttatggacttaataaatcacattgaaatggaacagaagttcatttattgctaccggaacagaaagactagaatgttgtttatctgcctggccct

SEQ ID NO: 58281 - DNA, 1372 bp, Homo sapiens
tatctcctcaacactcacctgactgtacagtgaccgcactgtcccctttctccaggtagtaagcttggaaaatcatagtcatacagatgatctcattttttttcttcctctgaatgatcactcctttattgcccatcttcagtgtcttgagtgccattgtttcatacgctctgtcttgttttagtgttttcaggtggtgggagaaatctgtccatgttattttatcttaactggaagtagaaaatgtgattattagaatggggtcatttttggtatttaaatagactatataaaaatctgcagcagcgatttcaggagagactgggaaattacacaggaactgagagtcctggattagagaacaagatatggtgaaatttaagaggagacagaaatttgattatttagaagaattggaaattggacaatgtaggtttatgaataaaaagtaaaaacaaaatttattaaggtagagaattagttttatcttacatttaccttaaggaaaggcattctctagctgtctgctcttcagcctttgaatcattgtcttagaacatttcatttgatttctgaatgagattacttattaagttttaacattccagaaatggtgatataaatgtagttgcttatatcatctttcttcctttaaagcttaaagttaacagtgataaaagataatgtgtattatatttacgtagaagttaaatatattttatattactttttgagcatgtcaggggaattatagtatagttatgttaactagtagatatatggtgccatctaatggctaatatgaaaatatatttagtaaatacttcagtgctttgcctagtgtgtatatatgaaattttactgtgaaattattgttgctttagatgtccaaggcgtcgtttttatttaaactctaagatatatttatattttcatttcaatttatactttttaaaattcagctatatattggtctgacttttcatcacgtttaaagccatgtacttgcagttagcacaatttaaagtatattcaatataaaattagcatataaatcaattttaataaacaagtaaaaattacagacctcctgtttgctatcttttacttctggttccttcaaactggacccaatatgtagttataaattatgccttatagaacctcagctttattgtaaacagaattcattttccctccacctttcatctgtttttgtacattttacaaaatatataaaaaatgttagaatattgtattagattggtgatttttaaatgctgttccagattgttagggcttctctagagccactcagtctgtgatggagatggctaagtttagaaaattagcatatcaatggctctagaag

SEQ ID NO: 58282 - DNA, 1174 bp, Homo sapiens
tacttattttaatatatgcaataaaaaggttggttgtgacatacaataaactaatatttgagctactgttctgtaaaagatctgttaagtaaattatgttcaggtattcttctgttgtttatgaattgctgttacataaaggtgaattgtctactatgacaaaatgacattttaatttttcgtatgtaagatatgcttttgagcctataataggagcagatacacttgaggaagaaggaggtatcttgttactttgtgtagtgtacttccattgtccaagtagctctttagagagctttttttctccatatccctagaatgcttttgaaagtattcaccctttttctttacctgctatttaattttcagctaatgggtaattttattgtttggaggagttggaggtggttttacttagtaacttaatttatatataaattccgatgataaaaaatagtgttccactccctcccttggcaccatatattatagtgttactagatactaggaaagatgagggctgtaataccattctttctcctatggaaacattttccttggagtgttttttttttttttaattactacaagagttttaaaaattttctatttccaaagactggtttataaaaatgatagcagaaacaaattggaaattataaaagcaaagtgttaatttagaagaatgtgacaaaaaatagctgagaaatctggctttacttgtctgtgtacctgtgttggagatatgcttttctcttacatttgataacttaaaaggcgatagccccattacttataagactctattagttattgaattatattttgtgacttttgcattaagaaactataaatagtattttatacagttttaatttggttaagttcagtgtttctcatattccactccagttctgctttttgatcatttgtgcagaaagaactggctaaaagtatctctttactggcctttggtaattctctggttcagcatttctggtttttcctttgtttaatgacaactttgtacttttaaattttattgagtagtcccaaagagctttttgtttatgtggattatatctattgatatgtaccatattagagttaaaactgagaaaatttaaaaatattatttaccaatttaaaacagaaaatttaaaaatattattaa

SEQ ID NO: 58283 - DNA, 1232 bp, Homo sapiens
gaacttaatttttctgagccttgtttttctttcacttattaaataggaataataatatttacctcctagaattactgtaaaatcaagtaggataaaatgtgtcaattacaatgccttgcatatagtagccactcagcaggtgtccacacttcctctcccctattcttaccactatgcaaaattgtttagatatttctctttaatatttttcttaatgtgaaatgatactgggtagtttattagtaagatagggtagttcccttacgtagactgttaataagcaaactaaaagtacataataaaaatcctttttatacttcttttttcaggtgtagaataaaaaaccaatagtatttgagggaaaaatattgtcttgctgctgttataatagctgtggagtgagaaaaaatgtcataacgtttaaaccaagtggtttgattttttttttccggaagaatctttacttcaacatatttctttcaatgcataatgtatttacagaaagattaaaagctacaatgtgaattgctaatattgagctgacgaatagcaacatttaagtaaatgttaaattcaagttccaaagtggttgatattttcagaagagaaaattccattattgcaccttttaggaacaaggaattagaaaatggcatttttcagaaatttccaacagaatctgccttcagtgtcctctctagtagacacaatcagtagtgctgtagaggatttgaccactgctgttggggaggtcagctatgctttaactgactcagttgctgagcaggtaacaagtatgatgagtggctttcgcccagaagaggaaagctctgtagcagaagaagctgtagacacttctaaacaaaaaaatgccgggttaacagaagtctccaaaaacactaattgtcagaaaacacaagccaatttagagcatagagcaaagcaaataaatacttgtaaaacttcactaaagcaagatcaaggaatacatgaagaaagagtatttaaacatgttaatgataggcaacaaactctatcagaatatcaagacactggtaatactggtgattcttctttgaaaggctacatgaataatggtgggatatcagttatcagacagaatacaagggctggatctatttgtcaagaacttgaaagtactgacagatgtaaaacaattggagtaggaatttccaataatggtaagaatgatttaaaggaggtaggatatc

SEQ ID NO: 58284 - DNA, 1041 bp, Homo sapiens
agctatagtactggcaatacttagaacttcacttgtgtgttacttatactttaaaaaatgtaaattggtattataatttactttatatgtaacatggttgaaaaatccctgtgactaacaaacattatttatataatagaatatacaaactgatctttttccaaagcttgggcttcttatgtgaaaaaattgtatttttttaaatctgaaaattcaggttgtgtataatatatatgtgtgtgtgtgtgtatatatgtgtgcatatatgtatatgtgtgtgtttatatatataacttcagcaaattttctatactttattgtgtaaaaattatcatttgacgggcccagtagggccaggtgaggggagggaatttttttttcaattaccgtttgttcttcatgtcattccaaatagataattcctacatggacaaagatgagcatggttcatcctctgaaagtgaagatgaagcgctgggtaaatatcatgaggccttatccagaacacacaattccagactaccactggcagattctagacaaaggaactatgcttgggaaacaaggcagaaatacagtcctctatcggcagagtatgatggatacagtagtgaagcatcaatagatgaaggtaagatgggctgttttattttttttacatgacacactatagtatttgattacttgtgcctgaaattctaggaatctgtggttgcagaataaacaagagagcacatacagtacagtcacatttctgggaatgtaatttattcaaatttgtatctttgggctcaggccaaaaatcaaaaccaataccaaaacaccccaaagcaaaaaccaaataatttacgtaatgtgttaattgtagctcttatttcacagtgaacatatgcttagcaagcatgatatgaaagatgtgaatctgctgttctctcagatggaattggtttctctatacctgttataggaactgatagagtttaagtctctcacggtgttgaatatgattccagtgtgtaaatgtatactgtctcattcaat

SEQ ID NO: 58285 - DNA, 1050 bp, Homo sapiens
tttgtgaccaacttatttcacttagcataatgtccccagtttcgtctgtgttacagcatgtatcagaatattcttcctttttaaagctgaataatactctgttttgtgcatgtgccatactttgcttaaccatttatccattgggggacacttgaattgcttctgtgttttagctgttgtgaataatgctgctatgcacatgggtgtacaaatatctctttgaaactcttctttcagttcttttgagtatggacccagaaatgaaattggtggctctatggcaattctatttttaattttttgaggaactgccctactgttttccacagtgactatactattttacatttcctccagtagtgtacaagcgttccaatttctctgcctcctaaccaacacttattattgtctgtttttccaaaataatagccattctaataggtatgaggtgatatcttactgtagttttgatttgcatctccttaattattagcgacactgaacatcatttcatgtgcttattggctatttgtatatcttttttggagaaatgtccaaatcttttgcccattttggaattgcattgtttgttggttggttgttgagttttaggaattctccatatattttggatattaatctcttatcagatatatggtttgcaaatattttttcccattttgggatggcattttttactctattgatagtatcttttgatagacaaaatgttttaattttcatgaaatccactttttgtattttttgttgttttctgtgcctttgatgtcatatccaagaaatctgccaaatccaatgttgtgaggctttttccctatgttttcttctaagagtttcgtagttttaagtcttatcgttatgatgtgatccattttgagttaatttttatatacgatattcggcaagggttcattttcattcttttacatttggatatccagttttcccagaacatttgttaaaaaggctcttctacattgtgtggtcttggtcccctgtcaaaaatcatttgaccatatatgcaaggtt

SEQ ID NO: 58286 - DNA, 1048 bp, Homo sapiens
attaattcgatttgtgtaaaaaatatatgagatgctttgaatgtagttaatttgtagttcatttatttcagacccttacatttcaaattaacacacttaaaaatttataagtttagtacactttaatggaggacatattctttttttgttgttgtttttgcgttcagataaaattaactttaaatacagaataatgctactagcggttttgaaggaatattctttcctataagatgaaggcattgaaaagagccgcctccagccatttcttatctctgaattaatagtatagttacattaataaataaggactttaaccaaatgaaaatgcaacttcttatcttcctgtactttcatttagaataacatttggagatatatttatcagaagtaaataggagactgtataaaaccaaatgaaatattagtaataaatgagtaaaatcatgttaaaacaaactatttttaagtctgtagggaaaatttatgtttctattctaggtataatatttttatgtcactttagaacttctaaatcttcaggaaattatcgttatatattttcattaattctcagaaatttaacaattttattgtatgttctgtttgtccttggaaaatatattatttttgtatcttgattatatttgatattataaatcacataatacaaagaaaattactttatcttaataattgctaacacattgaacacatttttcactaagtatttttaaattgctttatggagttatgttttttctttaaaatttactcatggctgggtatggtggctcacgcctataatcccagcaccttgggagggtgaggcagcaggatcacttgaggtcaggagttcaagaccagtctggccaacatttaggtgagatcctgtctctgctaaaagtacaaaaattggctaggcatggtagcaggcacctgtaaccccagctacttgggaggctgaggcaggagaatcgcttgaacccaggatgtggaggttgcattgagccaagatcacaccactgcacttcaacctgggtgacaa

SEQ ID NO: 58287 - DNA, 1167 bp, Homo sapiens
caaagtaaaaagaaattctggtctttgttgatattgagttgtcctcatagtattttaaaggtgataaaatatatattgttaaatttaattctagatttatctagtttggttttgtgaagttttctgaggaataccaattatctttttaattttgtcctcaaaaattgctgcattatttaggataattcagtgaatttaaagcaatggatttgaaatatctactctgtatattttaaaccagatcagccttttagcaggaacacttgtcatttcatttaattgtttaggcaattttgtgaataaaacaccctccagtgtcccctaaaagaaatctgaagtcattttcagaatcataatttagagtcataatatcatgtagtcagattagaaggaaatttttaaaataattgttttcttggcttttttctaacagcctggtatttctgtgacatgtttcagttggaagagttttataactgaatagtcacacctcttgatatcacgtactctttattttcttaatgttacaacagaaaatatagtgtgagttcatgacatgggaacccagaggtttcactgccctgccagtcatggttgggtcacattgaatacctctgcaacaattattttgccctttattcaacaaactgtttaaaaattgtgatgtagcaactgcatttcaagcaagttgctgggcactgcaggtacaaagataagagacagtttctgctctttcaggaagctcacattaacatctaaacagagatagaaaagttaatgttaaatgttaacatagtgcaatacattgtaaatgatggaagcaacgtgtgctgtagaaataagtacttaggaccacttaacccaacatgcatgcatagatggatgtgtttggggagagcgtggttatgtttggggatggggtgacaaatgcaactgggaaggataggagagagtgaatctttgaaattcttcaaagaggtaacaactaagctgattcttgcaggataatatgtgaacttacccaagtaaaaaggaggaggaagtgaaggatatcacaggccaagggaagggcatgtaccaaagagagcataaaagaccatagcgcattgaggaaattgccagtgtacggctgtgactggattgaggggtataagtattctgagaagg

SEQ ID NO: 58288 - DNA, 1029 bp, Homo sapiens
actcttctactctcctggtcataatagcttgctgtcatcagagcaagcttgatccttcaaggaaaagtaatatggaatattgaggcagccaaggtttctgcagagcagatcgtggcatagaacaagaattctttgtttccttaaagcaggtcagtaaatgtattcctgtccttgccaggtgaagacaacctgttaacttttattctttctggataaatataaaggaaaagagcattcgtaggttaaagctacatatcagataccaaagctgtcttaatttgctcaataagaagactccatctggagcaacaactgcagttgaagtcatcttctaattaagtttatgataatctgccatcatttttcaagccgactaatttttgcagtagccaaactagtgaaagcatttgtcaaacctgcaattctctaatctccgatggtagactagtctctgcctttcttttgagatgccgtgttactggagaaaggaagctctgttggttttcagctgtcctttcctgtaccatgcaggcactgcctagaatgccaaagtttggattccaccaattgctaagaatatacattctaattataaacccaagaactggaaaaataacaacaatgtcatttcttagcattatccttaggtatttgatgttacctgatgctattatatgtgagatttttaaaatttttgctttctaattgatcgagtgtagaaattcattttttaaaatattgatcacattgccagtgaatttgctaaatttaccaactcttagtagattatctctaaattattttgggttttctacatcacaatcatcatctgagactaatgactgttatttttctctttccaatcattttacatcttctttttctccccttattgccctggctaggacctttaatacattgttgactagaagtggtgataacagtcatccttgtcattcctgatctcagaggtaaaactttcaacatttcaccattaaatacgatgtttgctttaggactttcatggat

SEQ ID NO: 58289 - DNA, 1077 bp, Homo sapiens
taaacaaattgcccaagtgatagtagcatacactaaaatatcagaaccactgatacataaattgttttcccgaagaacattgtggatatgagtgagttgaagtatatattttggaataagttctgaggacatattttggtctgtttttttgtgtttcatcagatttttccatcttttactgcctttgttttccttttcaaatatttagcaatgtatgttccttaggtatccaaaaaaatagcttcaggagtagaattataaagaagtacaaatgaaattatagtaaaaatattaagaaaagtttcctttttagaaatcccctaccatcatttaatcatataaaaagccagagattacactgaataattatttgcatcagttaagattctgtcagtttcaagtgaatgcacaccaactcaaaatggtttaagcaataataaagacctagagagtaggcctttcttcaggcatgacagaagtaatattaccaaggtgctggtttctctttctactctcttccccgaccctgccttccatgcatcagctgcataatcaggtttcacataatggccgtcttgaaactccttgtgtctcactgagttgtgtgcccattccagaaccaatcacagtggctacagggatgggacgcactgattagcttatgccctggagctgctggttggtcggtcaccttccaaatcacattagatgaaagttagaaaggagttaagttcatggtaccaccactaaaaggaagtgatgaatggatgctagggacataaccagctaatgtctactgtaatatttatttaaactttcttgataataatgttcactaaacctttagtgattggacataatatacatgaaatcctattttaatcagtttgatgctgcatcagaattaggcagaattttctgcacattgcctttaggaaacttgaggtctatttcacacaatcagtgtctttctaatatgcttaattggctatgagctaagtaagccctgaaaacggtgattctcaatcttaattacactagaatgagttggagagtcttcaaagtaaagatgctcag

SEQ ID NO: 58290 - DNA, 1036 bp, Homo sapiens
agatgaaattgcattatggaaatatagtgatctatttttaaaacacttatgtgttagctcacgtaatcttatcacttgagaggacatgaacatgaatctctgttttataacggagaaaaatgagactttcagtagatcaattacttcccaggcttagggctagcaacaggtagaactactcctagctcttttgatttgtcaagtactttttgcactattagataataacactctattagaggagttttagtagtaaggaagagcctattttgagatactatccggaggaaaaatcaccagtgtatatctggttggtcatgtgagattaaaaaagagaagatgcccaaaagttggaaaaggtaatgcattagaagtgtaattttaaaacattgcagctagccaaaaaacaagtgccattctaatgtagggaaataaagatcaagttgctattaattcggtgaaagaatcagggaaataattactgaatatttaatcttagccagaaatgtctatattttgctaatttttcaccatgtgtcagcagcactgtaaacaatagcaattacaatagttacttggaattggatatctaaatttgttaaatattacacagttgggagtatattatattcatttgctcccgtttgtttatattttaatatcttgaaaaatgtcatatattatttagcgctatattcaatattttaccatctatattattactgtccaccagactactagagagttacttaagtgtaatactgtaagttttgacttaagtgaagactcaaaatattttggagaaactgggtcggcagggggcagcacagtcttacaatgtataaaatgtggtcatttgaatgaccattcagaaataagatataaagatagtgtagttcatggcttttcaagcttttcaagcattcagaccctttatttcaaatgaaatattatttataactcaaaaaagtaaggcagagaaaagtgatattttactaacaaatcttattttataatatttacttgtaacatctgt

SEQ ID NO: 58291 - DNA, 1046 bp, Homo sapiens
cctgcaaggctaataactgcacagcaagagcctgtggagggtacttacaattggagcaacagcaacatcacctgctccccagtaatgtggataacagtctcactgaagaccaagggggagaaagcagggacagacaactcagttgaatgggctctgtagttgacgtctgttttttctgcctagcattcatatctttcttatgcacacagtacccagattttggttgggagactaacctgcccctgtattatgctgaagcggactttattgcaaagccctagaattaaatctcatgggctctaagcagcaagttccaggatttgggtttgagcaagtaggatgctgtcttcctctttcccatgacactcagagctgccggcaactaggagggaaaagtctgccaaagaatgaagccaaatttgggaaacaaacctgagaaatggataaaggagaactggttcctagtaacatgggttgaggcctggatcaatgagtgcctgaagctgcctgtgtacaaactgtacaaagccactgctcactccagtaggctgtccctttgatacactcggtatttttacaaaccctactaaaacccagcctggctctcctttacgctagacttacagtgtggaggatggaaaggaggtgggatttggagcaatcatgctctttcttcctctctcctgaaattgcctctggtgatctcctccttacctagttccctggggctaggaaaggaccctgaggagggagccttgctgctagagatgaagctcatcattagcggcagctctaactttgcagcaggtgacttcccttgttttaacttcagcaccctctgtgatcgccccattttcagaaaagtataatggaagcatttcacatataaataaaattaaaaactgaatgctatcttccagacacagtgagaattaagttgcacagacactattcaatagataattcaattatagtaattatcattgtacagttcagtagtttcaccttaaaaaatattgaacataagtagttacaagtaagctgga

SEQ ID NO: 58292 - DNA, 1084 bp, Homo sapiens
taatttagcaaaagagccagtcattttatgaaaaatcaaaattataagtgattttaaaaaccagaattttagttgcaatacaattttaatatcaccctacatattatttataaaacatagtttgactggccagtccctggtgtttgtaatgttctttaatatgaaaaagtagttctccaactctatcataagtcatatctaatggtgaagggtttcagtcacattgaaaattgttttatttcaggcatgttccctttgtgcacttaggttcattgtgcctcagttcctctcaaaagcactaaatctaagtgcaaacaagtattcattttcatacaggaatttttttaatatgttatttttttaaaagttcatttttcatttgcctccgctttcgcctgatccaaagagaccaagtcactgtactggtcccttgcaagtcttctagacaggttgtactgtagaactacgtaactttctgttgaaagcacttcctgtattcttgtattccaatgtaggaagctaatagagcaggactttactttcaaatttctttcagtgattgactcttcaaaattgcagtagtgtgaaaatacattttttacaaactgaaaatacagtagataagctgtcgaaaatggaaaacaattcaattttaattttctgctctgagtatttagtaaccaacactgcgtaaagcaggtagcattcaaaataagaaactgttctctctctaaatcttcactcttacttcaatttatatttgtgatatgaagactatccagttctcagtttgaattggaacatcatgttaaaaacagttatgagattccttatgaagtttctagtaacttgtaactagactttatgaaattaacagataaagttcttcaacgtgatgtcatcttgtgcctttcatgtaagttaaatttgctcatacagcttgaacgttgtatttgcaaaattaagccttcgatttttataaatgtaaagattcctcagaacagtgtcgcaagatctttatttcctctgaagtatgtaaaagttgtataatgtgctaactttttaatggcaaggcactttcatt

SEQ ID NO: 58293 - DNA, 1021 bp, Homo sapiens
ccccagctgccaagtcctcaaagattataaattatctatatgagtgtatgtatctgtatacacacatgcaccattacacatacaacataaatatgtatatgtatattcatttgtaaaggcaaaggtgccctggctttttcagataactgaatagaaaaacatttcatacatttaggattatttttctcctctatgtatttactagatattatatttggtttgggttgctttctgctgctgttctccttcacacacagcaaaatatacatttgtttctgtagattgacacaacttataataattactcccaaaaagttgtctgttcttttagaaaaggattaaataaggctcaggggacccacttcactctactgaatctaatgtacgagacagtactactgcttctttgtgtgcttgaatttgcatgaaagcttaatagcaaaatcttctatctcagtaattatagcaaatagggacctactggtagggagcaggtgttggctcagaaacctgaaaaagacaacccactttcatacagttctattaaaatcccctaagttttctaataaaatgatatagtccaaatatggcaatcgactggcatttatgggagcctctaaacctggaattatggggtttatttttctcccaaatgagctgcaaaagataattattgctgcccagtaaacaaaatgtatgtcaaatcagtaaagaatttgtttagcataatattgccttatctttcagaagctttcttctatattcttgtgtcttcagtacaatccacttttgtttgaaatccatttgcatattatcttactgtgcatttagtgaattctcaataatgttgtatttgctgacaagaataataaattggaccacaattaaaaaaaaagaaaacccaatgagaaaataactacctgattaatatacacatgtttaaatgtaggacctggtaaagcagtttcatccaacctagcgaaaatgcccagggctgtttgttaaatcatttgcttgatac

SEQ ID NO: 58294 - DNA, 1398 bp, Homo sapiens
aagcatgctgcaaagcattttctaacgttaattttaaaacattgtctctgccctccaaagtgatggttaacagctataatttactaagatctagcacaataatttattacttgcttgattctcaaaacaatactgtgaggtaagtaatgttatcaacattttattgataaagaaactgcagcatgaagaggttaagcagactttcccaaggtcattcggtaagtaagtagtagaactgggattggaacccaggtgtaaattactctaaaacccatgctatgcatgttgcatttgcctccctgtttgaaaaaaaaactacttaggacattatatttatcaataatcccactcaccttgattgaatggcagaactaagggggaaaaaacagctggggaaagagaaaagactagaaaagaagatcagaaattttttttcttctcaggacacaagtggtggtacttttgtgtcattttgtagatgactttgatttgcaaagatttggaattgatttattctaccagtttagcctatacttatattccaaaagcatattaatcagttctgctccttgaccacttttaggaatccaaggtgttttaattgttacatgacccccttactactctatgaagggcataacctgtgtctagcccatatctcactcatatcagtggtgagacaaaagatttgtcttcctctgtcctctcattgcaatttatttatgttttattctcaattttattaagatttgtcaggaattacagctagtttattacatatgtctctcttccccctaggtaagtagtcaatgccttgttagtatctttctgtacccctttgcttatagtaggcagacagtaaatattgaattgaactaaattccctgtggaagaagccagtcacactattacatgagtcttagtttttatgaatcttgtgttatgtatggatttatttattccttcagttaatatatatttaagagtactagatatgtgccatgtgttgttgttccaagtgctacagatgcagagataataaattggtcgaagtctttgccctcatggggcctacattctaaggtaggaagatggccacagaatgggataatttcaggctagtataatgaagcattaagataggggcatgcatagagtaccgtgggatttagtagaagagtgcaacatggaattcaaaaaaatcttcctggaaaagataatccctgagttgggtcttaaagaacaaatacatgttagactcccatcaaacttgaggacacacgttctttccaagaacaaaatgtaaaataatggtttctaaactgtagtatccttaagaattattttgaaaatttaacttgggccaggcgtggtggcttacgcctgtaatcccaacac

SEQ ID NO: 58295 - DNA, 1030 bp, Homo sapiens
tttggaagagatggccagcctttggctagatttttactagaattttgaaataagaaagtgtataaatatgttttcagttaaattagccttgaggaagaatagttattatatgagttttaagggtcttgataaatgttgggacctactctaaaactcatgaggttcctcactgatcaatactcttgcattgtattttatttctcaaaataatgaaatttttatggaaaagctcaattagtggaatcttttattcaatattcccttactcttctttcttccttccttctttctttcctttcttccttccctccctccttccttcctagttctttcattttttcaggcaagaagcttccttaataatatagtttctacagagctttcttacttatttttctaataatggatataacagtgtgataaagtttaaatgctccgtgagcaaaactcttatcaaacaactgaagaaatacactgctgattaaccttttccttggtcttgaattgtctccagcatatttgctagtgactaaaccattaatggatcttattagtataaacacatgtctgtgtggttatcaacagtgttgtattattgtcacatttatttacatttttggtcaaaaatataaacatgcgtgtgtgaagcagtctgttttatagagtgagcatatatgtaatcgttttcatataattgaaaatgtgctgtgtgttgcattttattctcatgtcgacttttctactatgtatacaccgattgtctcggtgcctttttccttttgtataattgtattacatacagaaattgctgacctctgtgaaaacagtgtaaaaaaagttaaaattattattccgatgagattttaatggcagtttaattttccagagaataaattttgtgtgggttaaaagttatttttcttcacctttatgtaaaaaatctgtttacgttttagtactcacatggaatgggtaaacatctgacttcattgatgatgatacataaacatcagtcctaattcttgtcatt

SEQ ID NO: 58296 - DNA, 1029 bp, Homo sapiens
ttataattaaatgaaatccctggtttaatcagattttcttagtcacctctccttgcctatctaatgccctattgctgttccaggatcctgtttaggatctcacactgcgtttatttatatgtctccttaggcttcttgtgcctatgacagtttctcaaacactccttgtttttgacgaccttgacagttttgaggaggactggacaggtattttgtagactgtcccttaactgggatttctctgatgtttttggtttacaaacctattttcccatctggaaatattactctgctcagcatggagttatgagttttaaatgggttgaccgaggcaagttatccaacacttaataagtgttcatgtaattttattttcatcttttcatgattaatgaaaggacactcattatctttggcataaacagtcacttcatatgcttggggggcattattaaatcaaccatcttttttctaaataatattaatacctttaataaattttattttccagatttcctattctctagatcctttctaactagcttgacatcccttaatccatgaaatctgagcctctattcacttatttatcaagggttcaaacacaacaagggcttacaatatggctttacattttataccacttatcttacttattttttattttttagtcacaaagcaagtataaagattctattttaattatttataaactgtcaaacaaaacttattcatcctgtattactttgataattatttctaaccactgggtaatattttgctacagtagctcttaaactgtacaatacagatgatttttgtttacccaagatagtttcagtctttataggatgttaccatatgttgcataccatccatgcacatagatatccagagattttgaaagcaagaaaaaatatgttaaacttcagtgaagatattttttaaatgagtcagaaacagtatcctataatctttattatgaatgtcaatttttttcaagcttacaggtaattggatttcaaatta

SEQ ID NO: 58297 - DNA, 1018 bp, Homo sapiens
agagtggtttatggctcaagactgcccttaccgaaaacgaccacggatggccaaagaggaatgtgaaaagtttcatgcctgctgcttttaccaagaatgtggtggccactacctaaatttacccctttctgtcaatgctaatgttggaagtgcctccactgctgcctcctctccctccgcctcttcttcctcctcatcttcctcttcctctccccctttgcctttaccgagttgttcccgccaggtggattttgatgtaggtagtgcatctatttacaagagtgatggccagatacctgccaatgaaatctttgtcactaatgtcagatcacttggtgttcaggaaaaggccaaattaaatgatgagaaagcaaatgatgacaccaacagagatggtggccccctcagccacgaacctgtgggaaatgaccttgcttttgagtgcaaaggccaattttatgattattttgagaccggatataatgaaagaaacaatgtaaatgaatcttggaaaaagtccttacggaaaaaggaggcttcaccaccaagtaacaaactgtgctgcagcaaaggaagtaaaatatgagccatcttctcaccgaactttgaagcatgcacagcatgatcagttagctctcgtaaattttattttgaatggattttgtagttttgtacaacagataaaattatgccatgaacatgccatgtcgttttaatgcctggagagcagattgcgtaaaacatctgtatagcaggcatcagcgagcttcttataaatgtggtgatttttaccaaggaaacgattgacttaatgcttaaaagtatatcatagttttcttacggaaaagatcagtagatgagattgggggacaatgtgcccttgcaatatttccattgccccccaaggagcctgtcactagctaagaaatttctacatgtttgccagttaattagggagttatttggtaagcaaatcaatataaccagcaaagatacctgcttcttctatatgatacaa

SEQ ID NO: 58298 - DNA, 1035 bp, Homo sapiens
cacttgtttagattataaaagcatgtgggtttttatatatgaactttgctgttgattaagaagcacaatgttaataaatgatgtggtgatcaataaggtttatcttaaagaatgtaaagactttaggtttttgaaagttattttggagaaatgggacttaatctataatagttactatgtatttggtctacattttccaaataatatctttaacttgtacatttgaaaagtgttcagagtggccctcctaccatccttccttccactccagccaactcttcctgctaaactgtattccagtttccaagtttactaattgacttgggcctgttcaaataatacttcacagaaaccaaatgccaaacggaggaaataagtaagccctcccagtttctccaagataaagctttttttattattgctattaatattaaatataggtctcattcatacagtgtatgagtaggatcatttggacaattgtccacaaagaccaatttttaaaacattttcttgtgttatagttaaatagtctagtaatgttttgtcctttattttcaatatttgataaacatttgatgttcaaaacttagctaatagatgcttgtatatgaatgtgttgtaataaagtgaggttttcttgatatatatttattaagatgataaaaattcattaagttttttaaattttaatggctattggctatgtttctcttttccattattctctctcctttaaaaaactcaaaacatctagaaactgtagtggatagtggccacacaggagttttctaaattaaagagtattttaaaatgccaatctgacaggtgtttcagaatgatcctagttcgtaagtttaagtttctattgattaagaagcacaatgttaatagatgatgtggtgatcaataaggttatgtctgaaagaatgtaaagattttcctttctggagtgtctctgaaaaaaattgtataacacgaagccataaatactgaatcttagctgattgcattatgaactgtcaaactgtgaag

SEQ ID NO: 58299 - DNA, 1025 bp, Homo sapiens
gtctaccatcaccttttgccgtgcaatgatccccagccctgttcctccctgtcctggctagagcttagaatgggctttggaagcccaagctagaggttgcatttctctcccatcaagaatgggaaatgaagaccctctgctgctgctttttatctgcagctagagcactaagaacatggcctcaaagctggctgccaggtacacaagtagccaggatctctgctaggtcccttctgtcctggtctttggcatccgaggtagacctagcctgtgttccagccgcctagctgtttgctgccagctcagtttcccaggacttgggcctaatcccggtctcacgcctcacatggagctggctggttcccgttagcatttcagtctacccctaatggcgagcaccgttgctgccaagaactcatgaaactggattcccatttggccccttctgatcagactcttctggacaactttgcctgcttggaaacaggcggcagttatgccacgtcccttggacttgtctatggctgctcagggaagggctgtgtctggtccgtatgttctgattcatgatatcccctccccccagcctgtagtgcaattggcttcaatctggaattctaggtaatgctaaccccttttggaatagctccttatagctatgatctgtgctgaacgaaataatcttatcaagtgcagaggctttcagagaatgttatctacctttcaaagtaaagttctcaagaacattctagaagatcacatgttttgttttttctccacagcctagctcaaggaataggagatttgatagatttatgacaaggcctttttcaaatgcattgatctggctagctttggtcctcaaaagaatgttctgccctggagcaggccggtcttatcagacacagctacgcaaatgggttggttcttgcaaatggtccaactgaccatagagaaaaataattagccaagtctttagttatgcctaagagtgtactttttttttttaagataggctctcactc

SEQ ID NO: 58300 - DNA, 1035 bp, Homo sapiens
aaagacctgacccctttgacaggcaggatgcacatgtgtggtgtatgtgtgcgtgtgtgtgtgtgtgtgtgtgtgtgttggatgcaggatggagtaagttcacagggaggaggaagcttgattggggttatgtctgtatcaccttgaatagtgatgggtctccgggagtgtgaactaactgaattgatgtttagatgctgttctctagtgtcatgttcatggcttaaagttttgtctctgtttctcagaaactctcagcgtaggcatcgggaaccttcgtgccaaggagccatgctgccccgatgggaactggcactttacctacttgcctcactaggcttccacttctattccttctatgaagtttacaaagtctccagaggtaaggccccaagcttttcagacctcctatcaaacaaggaaactcctgtcaaaaaaaggagcagaggtggaagattcaagaagatgatccaatagtgtcaagatgatgtgggccttgatttgcttccccatgtcttggatagtttgaatcagtgacctgagtccattgagttttctaccctaaacctaggtcttttaggtgatgctgtggcttgtcttctataattggtgggtttgattcaaaagctattgaaggccgtggaggggatttgcgttcagaattcaaagtaaactcttaaatttctctttcatcattactcctctgagacatattagatctgggttcgttttgtcttcttctgtcatttttagtgttgcctttgtctgagtgttggagataaatcatcatcaggtcacattccagcccaaaggaaggggaatgggggccctcctttattttagcggcagtttggcaaggagcactagtcactcctgctcacacccaactggccagcactgagtcccacgggcacagctgggaggctgggaaatagtctttaggttggtggctatgtgctacctaaaactttttttttttttttttgagacctagtttcgctcttgtcgcccaggctagagcaatggtaccatctc

SEQ ID NO: 58301 - DNA, 1014 bp, Homo sapiens
ggatggggcagtgtgccctgaggatgtggtgagccttggtctcgttcttctctgtctctattcccagtctcccaggcccctgggctgcctgtgacggctggtgggttcaggggtgcgctgggtggggaggtgtctcttggacagcttgggcagctaatgggcaaaggggacagatgtaaagatgtatgggagaactccagcatagttctgctcacctgtttccctggtctttcaggcagtgtgtaaagtagaaaggtggtagctgggattatggagggttcccttcttcttcccctagatagatggcaaaaatgttagttctccctttttctctctgagatcacactttctttaattggccttctgccctgggggcctccaacattttgggactccatgtggagttccagtttgctatgtctgcccactgcagagatgttctgtacaaatcagctttcttgcatatgtgaagacttcctaagtataaagtaagttctttgagtgtgaggatcattttaggggctgtggcccccaacaggctggggatcttttttccttccacgttattgtgactcactttgtctttttgatattctgggaaagtgacactaatggtatgtgtgatttattagcatagtttgaagctgaggaatcatgattctgtgtaatttgttctctagtcatctcattctattacatttttttcatcatctccaatttgtttatcaccttttttcattgtttatagctcttttttccatatgctgtgtagaaaatagtgtttttccaatttgagagatgtggggaaaataatacagttttgtgccttcaacttcaccctgaaacttaatatttctttttaagcatttgattccttctttgctggctttaggaggaaaggaaaggtgggaatatggcatagacagagcagggagacagaatctattcaagttaaaccgaatagactctgcagtcttgctctcctgcataatccaaagtgacttctgagaaaca

SEQ ID NO: 58302 - DNA, 1042 bp, Homo sapiens
tcagaataactgactttaagccattttattagtgtccagtttacatttctcagtgaaaatatctagttgtctaaactgggatagcctcaattcattacttgtactatccctgtgaacttgggtaaatgaattgagttccttacgtctctgtttcatgttttgcaaaatggaaataataatagcatctatactacagagggccctgggagatcagctgtaacaaagacactgagttgtagaaagtccgaggtgcatttggggaatggcaatggcaatcattccggttaggttggtgcaaaagtaattgcagtttttgccattactaatagcaagctggaggggagtgtacaggtgggtggggaaaggctagaagtgtgtaaatcctcttttacagagtttggactcacactggccttctttccagttttattaactggagtttgtgttctgactcagacgtgtactgaaatccctctgataaactattttgtcctatttaggatgcgaccgactttgagtggagcttctggatggaatgggggaagcagtggctggtgtggcttctccttggccacatggtagtgtctcaaatggccacactgctggcaagaaaggtatgattatatgtgttgttaccttttaagtgtgtttttcctttgcttcttgtgaagaaagagtccaagctaggaatcggaagacttggatattagcactgggagcctggaaaaaatgataaagttgttaacaatcaatataacatttaagataaaagttcatagttcatatcctgcacttgctttctccaacttattttcaggcattgaatataaaggttgtagtgtaaaactaaccatggagggtggtggtggtctttaagatcacttctaatcaaatgatcaaaaagttgcctgtggttgagaatctggatgagttcacttgcaaattcagaagaaagttgatgatttacttaagaagtgggaataattttaaagtcaagtagtttatgctgctgtcactgttttagatgggaagtccagtagca

SEQ ID NO: 58303 - DNA, 1049 bp, Homo sapiens
ttatttattatacacataatgggggtgaattgttgattgtctgcctttccctgttggaacagaagttccatgagaatgaagatgttttcccgttttattcactgatgtacaccaacagcccaaacaatgcctagcacccagtagctgttcaatgattattcattcgatgaatgaatgaatgaaataagaggtaaaacatggccaggcatggtggctaatgcctataatcctagcactttgggaggctgaggtgggaggatcgcttgagcccggaagtttgagaccagcctgggcaatacagtgagaccttgtctctacagaaaatttaaaaatgagtagagcttggtggtacacacctgtagtcctagctactcaggaggctgaggtgggaggatcatttgagcccctgaggcagagatcgcagtgagccaactgtggcactgcactccagcctggacaacagagtgagaccttgtttcacaaaaagaaaaataaggtaaaacattcacagacatagcaaagaagccaaaatggggacctggagggaactcattctccggtttggcttaagtgagaaaggaactttccatactaaaaagtggataacagaagcaatgctttgctgaatggttcatgacaaattctgttaattgaaaagtcttaagtaacgttctttctacctgtatgtgttcattcaagattccagctcattgacacaaagtcattattttgatatcattcatttagggtacaactttatttaaatgcagtgcaagttatttctttaaaatgtgctgatttgtaaaatattgtgttgttagtaaatagttctctgctgtccctaaacagctagtagcgggcggggatcagggagtggggagattaaactggagggaagagagttgaagaaagtaactggagacagggctaagctgggattcttcaggaggagtgacagaaaagtcattctgaggctgtcagcttaatgccataattgccttacataatttaatacataaatgctgaataaacaccaattaaagccttca

SEQ ID NO: 58304 - DNA, 1223 bp, Homo sapiens
cctctagcctcagctccccaacacaggtacttccatctcctaggatgctctctttccttcccctccacccctattcatccttcagatttcagctcaaatgatatctagtttggaaacccttcactggccctcctaactcaattagatcccatttgataatttattttgggtaccttgtatatgttctcttctgctatatttatcacagttgaaatgaaatttttgacataatttattccctcgctgaactgtaagcctcataaggtcagaaatactgtattcttgacccttatcccaattcctggcacagtgcctttttgaataaaagaaagaatgaatgatattttctgacttcactcactgagggagtttaagatgaaatagacttaggcagcaacatgaagaatatagattgaataccgaaaaaaactaaaactgagagttattgagtattgggggactatcttactaagcagcagcatagatacaaataggtctagtgatggcaaaatgctgttataatgctcagtgcacaaaatacatatacaggaaagaatggggtaaggaggaattagtcttcctggtagcctgctgctttatgagaggagggattgttggttgtgactcactgaggcacagagctgtaggaagctaacaaaaggcattttcacaaagcacccaagctgggtggacgtagaggagttactgctggagcactgtgctttttctctgtacaagtactctccagggagtgaggatttctgtttagcattgaaatattttaatcagaggaaacattttgaagtgacaccacttcatgccaattctcagtttgatctctcctttgaaggaaggctccttcaggctgcttgtcgattattcctacccaaagaagagtctatatctcaaatagttcacctactcccacccctgatttccatttcattgaataatttaaatacgttctcctctcccagcctggcctccgcctctttgccccaagagtgtcctgctgagctgatttatatcctttctgaagcagtaaaatttctatttatacacttaattgaggaaacatgcctccagtgaaaaccaccgagaatcagtctgatggtcatggcagggatttgatgttctggggcatcagagagaacccaaagactctgtggtggtggtaattcaatgtattggccatgttgattagtttgattttgaagatagag

SEQ ID NO: 58305 - DNA, 1023 bp, Homo sapiens
tttctcccattcctgggttgtctttttactctgttaatagtatcatttgatgaataaaagttaatttggtaaggtcaagtttatctctttttacttttgttgatggtgctttttgtgtcatagccaagaaatcattgctaaatccaatgtcatgaaggtctccccctgttttcttttaagagttttatagttttagttcatctttttagatacttgaacccttttgagttaatttttgtgtatggtataagggtccagtttcgttcttttgcatgtgtatatccaggttttccagaaccatttgttggaaagactgttctttcctcattaaatgctctttctgcccttgttgaggatcatttggccttgttgaaaactatttaaccgtatataagggtttatttctggtctctctattctattccattggtctatatgtttatctttatgtcagtaccacacagttttgattattgtagctttaagtgttaaaatcaggaagtttgtgtcctgcaactttgttctgctttttcaaggttgttttggccagttggggccatttgagatctcaggtgaattttagggtggggttttctatttttccaaagaatgtcattgggattttgatagggattatactggatctgtggatcactttgggtagtattgttattttaacaatattcttcccaactgggtgcagtggctcatgcctataattccagcactttgtgaggctgaggtgggaggatcacttgagcccaggagtttgagacctgcctgggcagcatagtgagactttgactctacaaaaaaaagcaaacaattagccaattgcaattagccacacctgtggtcccagcttcttaggaggctgaggtgggaggattgcttgagcccaggaagtctaagctgcagtgagtcatgattgtgctactgcactccagcctggagacagagtgagaccctgcctcaaaaaaaaaaaaaaaaaaaaaaaaattcctcccatctatgaacgtggga

SEQ ID NO: 58306 - DNA, 1006 bp, Homo sapiens
caaatgcattggatgtttgctacttgcgaggcactgagaacacagagatgaaaaaggaagctcacacgaatgtgagtgccaaacacacaaaaatgtgcagtagattcagggaattgctctgctggatgtatgagtgagttactggaggtcacaggatagagtagctgactttccacagaagatgggcttttcagaagaggtggcatttgaattgaagtaataatttaggagtttgctaggtagaaaaggcaggcatatcagggaaattaacactggctgctttgtgtgaaactccaaaatcttagtaatttctcaccatagaagtttgtttctctgacagttcaatacaaatccagtggctttttctaagcagtgactccaggacctagaatctttgttttgattctccactgtcttgtgctggcatcatggaggggaagagaacatgagactggtgcaccaggtgctcaaacatgtgacatttctgcttacatgtcattggccagagccagtcatatgaccaacccaagtacagggcaggggtgtgtagggaagcatgcagatatcagtgtgcaccagctgtctatggcacagcaggagaggcacatgggcctggtcagaaatgcccaagaggcagttggaaatatgagttggagaagatggtgggaccagtgattgagatgtgtgggggtcaagggcgtaaagattgtatgtgaggccaggggagtagacacaattaaccacggagctgtgtagaatgagaagagaacaggtgggagaaaccccagggaatgctggtattgaagggggcagagagaaaggcaggaagatcaaagtgtgacttgcctgacatcctatggagttaacctcagtcacatgggattgggctctgaaaacccggtctgctgctgcctcatgggaccagctatggtctgtgactgaacgcactatttgtgtcctccttggactcaggtgccacagccctgggaactctgattctataaaa

SEQ ID NO: 58307 - DNA, 1027 bp, Homo sapiens
agagttcatttagtccccacaagggcctggacaaagagcttgacagttggcataatacttctaccttccatttaaggatttggagaggaagcttgctgaatgggatggggtggtatagtacatttttacccctgcccagccctccccacttttgaaagaggaggattccaggaaaggggctgatgtttggccaacagcagcacactggatcgaagaggttgtgggtaaaacagtccccagggattggataacaagaagaaatcaagtaagaaatgcatttccaaaagtttgctggaaggctgctaaatgggctcagctttttaaatacttgggctatcctgtagcattaatgttgtaaccttattagcataatgtagcattgcattaatgcaatgagttgcattcatgaatgcaatgagttgcattaattgtacactagacaatttggtttctcaaccaaatggtcgtctctgtttccgtcctttggctatcttgtcatgtccagtggaggagccctttgtaagtatatgggatggcagcgcccattgctggagtcaatgcccccccaccaagaacaaacaccacctcattgaccatcttagttcttagagttaaccttaaacccacccctccatcagccgggaggagcacgttcaaccagcagccaagtgacagggacaggacctaccctcttcaaagcagcctgtcaggatattctctgggaaatggagcttcaatatgaatgacattcaaagtaaagaatttagtagaaatcaaataaccagcacttactagataatggtgccacatatcatgccccgactcctcaaagaggaaaaacatacatcctgggcaaatctgttctctcttggcatactttttctgaagtctaaatgttctgtcccatacctagtaactttttgtttccctaatctctctccagccaccagataatggtttatactggaaggctcaggtcactggtatctgaggcacatggtcctggctcgggaacccagagtggcat

SEQ ID NO: 58308 - DNA, 1078 bp, Homo sapiens
tgcatggagaagattctagaagactttcttttttttgagaaactatttaaaagcaagggctgtttatctgaaaaagggaagatttttggcaaacaggtcatgagaaatgtccctaaatctgaaccattcaatataatagccactaaccacacgtaactatttaaattgaaattaaagttaaataaaaaaaattgttcctcagttgtaccagcacatttcaaggactcaagagccatgtgttgctagtggttaccatactggacagcacatagatacagtacatctcaatcatcacagaaagttctattaagcagcattactctaagtacttgaagaatttcatgaagagaaaaaacagactcatcctgtgtatctccagaaggtgcagttatgttcagtggagaagacctagaggggaaatgtttccaacacctgagctggtcagtaacagaggaagcagagttagaaggctgtctaagaggggaaatatttactcttggttaccctattaggaatgctgtaggaggaagtatgaggagatgatttctgcagctattagacctcatgagtgtgccccatgtcaagtgctatgccatggcccagatggcctactgaggcatctattcatagctatttgcaacttcctccattgtttggtgataggaagtagctggtgacctggcagaggctaatctcagctccctttctcagtctatcttaatctgatttgaaccctccttgggaaggatggtaatttacaaaactcattaaaagctttcaatgaaattatgcctagtaaaagaatttatttctggaagcctaaaaatgggaatatattttctgaatataaacttggatggatgattgatgaggataattaaaaggctttgtattttaacccctatttaggctttgagttagccaagataacttgaacttaaacagaataaagcatcagttagaagttggcaacagtattttccttggataagccacaaagcaagtaattggcctatatgtttggagaagtctgtgtttgcaggtgtctttatgacaaaatcacgctttctcaaatgct

SEQ ID NO: 58309 - DNA, 1035 bp, Homo sapiens
tcttccagtagttgcaggagaagatgcagcgtgtcatacggcaaaattgttagaggtcatcgttctgcagtgcaaagggcgtcacgttgaccagtgcattcccttattcgtggaagcagccttagaaagactgccaagagaggttaagacaagtgaactttgaactatgggtatgcaagttgcaattgcagctttacattataatgcatacctattactaaataccttagaaaatcttcacttccctaataatgttgaaccagttacaaatcattttattagtggcttaatgatgttgactgtttcttggggcttcatgacagaaggatgtgtgttctcagtctctgtgctcttattgatatggaacagataccccaaggtttaaatcaggtttctggacagattttgccagcttttatccttttatttaatggattaaaaagagcatatgcctgccatgcagaacacaagaatgacagtgatgatgatgaagctgaatatgatgatgaaaccgaggaactggggagtgatgaagatgatattgatgaagatgggaaagaatatttggagattctggctaagcaggcaggtgaagatggagatgatgaagattgggaagaaggtgatgctgaagagactgctctggaaggctattccacaatcattgatgatgaagataaccctgttgatgagtatcaggtatttaaagctatctttcaaaccattcgaaatcataatcctgtgtgggatcagggtctgactcatggtcttaatgaagaacaaagaaaacagttacagacacagtaactctggccaatcaaagaagagcagctcatgaatccaaaatgattgagaagcatggaggatacaaattcagtgctccagttgtgccaagttctttcaattttggaggcccagtaccagggatgaattgagttatctctttctttcctactgtgtgattgtagtgaagagcttgtgttcctcctagtagtggttctagaactggttcatgttatctattctaaactaatg

SEQ ID NO: 58310 - DNA, 1057 bp, Homo sapiens
gtgagactccatctcaaaaaaaaaaaaaaaaaactgaattcaattcctaactcccaactcttctttttgtggtctgagcaagccacaggctttccctgagcctcagtattcctagctataaaaacttttttttttttttttttttttgaggtgaagtcttactctgtcgcccaggctggagtgcagtggcgtaatctcggctcactgcaacctctgcctcccgggttcaagcgattgtcctgcctcagcctcctgagtagctgggactacaggcacacgccaccatgcctggctaatttttgtatttttagtagagatggggtttcactgtgttggccaggctgctctcgaactcctgacctcgtgatctgctgcctcgacctcccaaagtgttgggattacaggtatgagccatcgcgcccagcctataaaaactaatggaattcttgccaggattaaatgatgggcatatggcaattattctataaacattaaaatttgtaattatgaagaattattctggatatattcacacctttctgatttggagctttcattgggagtctgtgtggttttttttggtagtgatagttatttccaaattatacctcagcagctacaattattttttaagttaataaacatacctatatttttgccccagtgggtagatttctgagtcaatatttatttcatagacaactatatacagttcgattaggggtcttgtgtttaagagccagacttaatgctggaacaaacttgtacatgccatagcattacattggaaagcattgatctgatcattggaaagcatcttttttgtttcaggataaacactggaacaaatttcaaaattttgagaataatcacttaaacagaataatattaatgtgattttgcatggccactggtttttttttttttgaagaagctatttttatctttattttttaaacaactttttttttttattattatactttaagttttagggtatatgtgcacaatgtgcaggttagttacatatgtatacatgtgccatgctggtgtgctg

SEQ ID NO: 58311 - DNA, 1058 bp, Homo sapiens
accattgataataatgtctttactaactagatttctgattattttctttccgttgttcactagatcttcccaacgtttatttagtgcctactaactgtacttacatcatgaggaacaatttttgtgtgtagaggctaattttttatcatatgcctttaatctaatatggcataataaccttggatgaactacctgacttctctaggccttagttttctcgtttgtaaaaggttgatgatgttaagtatatcacaagattaagtgaaaattaatgtgtgtaaagtagtggttttcaaaatactttacttacatatccatgaaataattttgaaaaaagattcacgtatttttagtcgacatctgttatttgtcactgagtttaaatagttgaaaaatataatctgtagtgtattgaaaatattaagtttgataataaagtctttatctgtattttaaatgtatccaattaaatataaatactacagtgatgtgatagtactagtttgtaaaatatgtagacaagcttctaacattctcaaagtttacattgttcctttttgtctttgaagtcatttccatgcattttctccacagaattttatcatatataattttttttgtgctttgaagtgctttattgggcccggcgcggtggctcacgcctgtaatcctggcactttgggaagccaaggcaggtggatcccttgaggtcaggagttcaagaccagcctggccaacatggcaaaaccccatctctactaaaaatacaaaaaatcagctgggcgtggtagtgggcacctgtaatcccagctacttgggaggctgaggcaggagaattgcttgaacctgggaggcggaggttggagtgagccgagattgcaccattgcactccagcctggcgacagagcgagactctgtctcaaataaataaataaaataaaataaaagtgctttattgatcacctgtgagtaaggttctgagtgttaaatctcttctggcttgagttattacaattagtgcataattgattaaaactctagtagttatggtgccttg

SEQ ID NO: 58312 - DNA, 1038 bp, Homo sapiens
ggtggaaggggagaatagggaatgattgctaatgggtaccggatttctttttgagattatgaaaatgttctggaattagatagaggtggtgattgtacaagttagtgaattcaccaaaaccactaatatgtacacttaaaatagagaattttattttatgtgaattacatatattgaatactaacatggctgcgctgggaacttctggggacattctcaccagattagtttgtgacctcttcccctcctctcccagaacaaataggaatattcattcagaaatgtcagtgaaattgatatgggatactgactgtagtagtactttttagctctataattcataaaggtacccatgaaatatttttttattatgcctttactaaatagtaaagatatcatcaaaattattcattttgtttatgaattaaacttgctgatattaacatgattttttttaagcttccagataagacaattgcaagccttgtaaaatattactattcttggaaaaaaactcgctctaggacaagtttgatggatcgccaggctcgtaaactagctaatagacataatcagggtgacaggtaggttggttaccttcatatagttacattgttagggacactgcattgtattgcttacatttcctaaggcagaaaagttatcacaacacattgtaaatattccttattcttacatttatgtttctactctgacaagaagagccaagtggttagaagttttaatattaagagctctttcacctcttttaattttaatcacaaatgcttccttttagtattgatatatttaatacacatatttagaatatattaaagaatatgttctatgaaaaaggtctttttataattacctgagtaactgaaacccttattattgaggctaaatcttttgatagtataaaatcattttgtttcatttttgtctgtctttattctccaatgaaatttaagtattatgtcaatttgtatgtgttcccatttcccaaatgatatttctttttaaatccctttccca

SEQ ID NO: 58313 - DNA, 1015 bp, Homo sapiens
ccacactaggggggaaaaacagaggaaaaaagtaaacaatcctaacccttaacagtctaaatggagactaataatattgctagtagagtaaaagttaaaaacttggtatagtttaaattcaggttgtatctcctagccttaggaaggtttcttaacttctctgtgccttatattcctcatctgtaaaactgttataatataagtagagtctgttctgctataactttttttgaaaatgtggatttgtcctaatgcagttaatatactctggaaaaatttgagcataacatgaattttttgtttgtttatgtatgatttttgtcagcaaaacaaaatgtacccagctgaactgagcgcacacacatctcaaacatgtagcagctacctcaattcactgtatgttatgaaccatacatatatggtgttaaaacttttcatctgatttcaagtaaccctcctaccacttgcataataattcacaaactacaaccattttgactcccacttccataagcaaccttcaggttttttttcaaggtaaagtactgtctttgttgtagcatttatggattaaaaacaaatcatttagattgtgtaaaactgtgttgccatttttattaggttcctgtcttatgtgtcattgaagttttttaatgttgtgtcccaacctcttttaccctacaagccctgtggtttttattatgaattttgcatagcacacactgacttttctttctttctttctttttttttttttttttttttgagacggagtctcgctgtgtcgcccaggctggagtgcagcggcgcgatctcagctcactgcaagctccacctcctgggttcacgccattctgctgcctcagcctcctgagtagctgggactacaggcgtccgccaccacgcccggctaattttttgtatttttagtagagacggggtttcaccatgttagccaggatggtcttgatctcctgacctcgtgatccgcctgccttggcctccgaaagtgctg

SEQ ID NO: 58314 - DNA, 1338 bp, Homo sapiens
atagatttataagcaaagtatacagggaaacaagtgggcattattcattctggcaaggacagttagagaagacttcttagagggggaatactgcagctgaggtttgaaggataagagggatttttttgcacatacagaaaggaccatagaggtcattccaggcagagggaataatagcaatggtttagtgttgaacagtacattcaaaaatataaatctagtaggggaaaattaaaagcacttttaaaaatgagtcaacaggtattccctgagcacttattatgtgctcattattgtgctaattaatagctattgaggattccatggaaatgtaaaacagtcttttctcaaaaagcatattgtctacttaggaaggcaaacttggatgcagagaaggaatgaacatggtatatgagagatgttagcagggttgagtaggggcatctttgtgatagacatcagtgggcagggtcagagtataaagtccttgtgaaagccagaaagagggccaggcgtggtggctcatgcctgtaatcccagtattttgggaggccgaggcgggcggatcacgaggtcaggagatcgagaccatcctggctaacacagtgaaaccctgtctctactaaaaatacaaaaaaattagccaggcgtggtggcgggcacctgtagtcccagctactcgggaggctgaggcaggagagtggcgtgaacccgggaagtggagcttgcagtgagctgagatcgcgccactgcactccagcctgggtgacagagtgagactccgtctcaaaaaaaaaaagaaaagaaagccagaaagagaagtttgtcttttaaattaagtcaaatggaaagaccctttagtttctttagtacagaaggatgtaaagaaaatttttaattttagaaaagttatgacattattatacaggataaattagaacagggaaacttgatagctgctaaaatattaagcatgtaagtcgtcaatgataaaggggtatcagtagggttgggtattagttataggaatggaagcaagtagtaaacccaaagaacattgcaaggtagaaaattaatatgtctccttgaaagtatgtgagagtgttgagggtgtcgctggcatgtcttctgctttgatttgttttggatggaggtaaatgggtaggtggaggaaagattgatgaatccagaaggaagaataagtgtaactgaaaaaagagtgctttttgaagctgtaaattccccatctatagttgttttcctgcaaaggtagacgacatcctttcattatggatgttgggtggaattttcagcatcgagtagaagatttaatttggt

SEQ ID NO: 58315 - DNA, 1041 bp, Homo sapiens
acatttcagattgaactgcaatcaaccttttattttcttaccatttactataaaatattttgacctgttttaaattgatttcagtaccagttatccttgggtaccaagggccttttttatccaccttccacagccaaggtagcatcagattgcctgtgcatgaactcagtgtgaacttccttagtgtaaagttagggtctcaattaacaatatatatcccttctgaatagagttcctcctccattcttgttacttcccttttgggggaacatatgtttacctaatttttcctatctcctttttcttttttaacttttttagatttgttgtgctcttttattactgtttctttatgtctctcatagtttttgtcctattctcccctttctcttttcctttttactgtttttcctttgccttatcaccaggttcctaaccttgaggcgtatccactgtctactaccttgcctgccctgctgtccctttttaatctcctcatctggaatacagtggttcgttttaggtttttctctccttaattctaactccgtttttttactttttcatttctcctctaacaaattttttttaactttgggtttttgtttcattcttcattctgagtacttgcacctccttacttttggtgagaaagctggtgttacctagaacctctgtgtgctatagaaactcttattgctaagaccataagtgaggtaagacctaaacgccccttctcaaaggaagccctctttctgttttgcccaacatgcctcggtattacaccaagccactttatcttggcagttccttctgcaaacccctgcatgctggtgtagttatttctgtccatctactgtcaaaggtccttgatttaccactcagtgggtatacactaatgaagtctgattagatatttgctgttgtaatattaccatactgaaaatcctaaatttaggatttttgtggggagaaatattgggggtgtctggagaaaaaaatattcttaccaggatcactttctgcttcagaaattttaag

SEQ ID NO: 58316 - DNA, 1506 bp, Homo sapiens
acacagtgaaaccccgttgggaaatgggaaactaatagactttctcatgttttgatatctctaattagagcataaatgcgaatgttgttccttcttgcaaattggtacatttccctttcattatctttctgcatgggtaaaaggtaactcagaatatatatttttaatctttctaaaaatggaatcttcatgaatcagagttgtagtaatctcatgtctgtgatttgatgaaaatttaaaaaaataagcgctttggaaaatgtctgtcttcatatcctcattaggaaacttctctttaattttgtagtcaaatcagaaaattaatgcccgttggaccacagaggagcagcttctagcagtgcaaggtatattaaagataagcagttattgttgttaataattatttaatttgtcatgaaaggtgactactctagttcttcccttcctttagaaattgatcaagaaagggctcttgtgtttatcacaaagtcctggtgaccaggaattctgtgttgtatttgtggatgtgacatactcaagtctatgtgcattttgagtcctgaacagcacgtaatgcattctcagcactaaataattgatggtgataattaagcatgaaaaagtcacatgggctctctgtgcttctcctttggtattcctgcagttgggttcgttcttactatatatcattcattaataactcatagttaaaagcatcaataaactatagatgtttctgatttctctactctgcaaaatagtgtttatctgataaatgtcaggattgaaaatattaactatatgtttaactttcagtgtttcatacttcccttaagagatgtaccactgaatgcttagaaacctgattttaaataggtatattttttaaaggagacttaagagcgatatcaaaaaatcacattcagcattttcaatgcactatttctaagaatgttttgttgaattatatggtagaagactttttgtattatgaatacccatgggcaaattggaagcataaacttggattttctcatgtttaaatgacttaaagacaagttgtatatttttattcattgttacagatttgtttcctcttcatgataaatttatgtgcaggtctgattgtacagtttaaagtttggtctacattttgtttcttcctggctgagcacctctgtgttgagtgctaatagcttttttttttaatctaggttaactactgtgagatagtggggccccaatgaaacatataagcataccttttaaaatgttgccaaatagtcttcagagaacatacttaatacaaaaatgctgtgcagacatcattccgattgatcgactgatggatgactccgcagtttggattagagagagtaagaattagccagccagcatgatttgaaaatgtcacaggagggtgccagcaggatgatgtcagcccttgctttggcctatgcagcatagcacagtcatttcataaagaattgatactatgacacaggg

SEQ ID NO: 58317 - DNA, 1042 bp, Homo sapiens
tgtgttaatggtgttaatgtctgttttatttattctttggatttttttgttttcatttttgggtttttgttgttgttacataaaataaaactatataaggctatttgtgccctatataaaatagctattttaaagagaattttaaagtgtcatattgtcttatgtgcccatgcatttatatagtggtcagaagtgtgtcttataaatagtataatcatgtagtaacgtcccctgtacctgagtttcagtgcagttaaggggcgtaattgcagggtcttttaatacacagtttactatctacaagtacttaccttagcaggcaattgtttttgttttttctttttttaaaaaaaaaagtatggtaaaccttcatactttagttttacaaagtaataataaactgttttgatattaacatgttttaatttgtatagcactttatattcaagacattttacacatatatttctgatttgacacttatttgttaaatgctttattttatctggctcatagtagaagactattacagtgacctgcagaaaaaaatattgactctgggcaactagtgagatttacaactttactattaaataagcttttttattacaactcttttgaaaccaaacatattgagatcatttcctttcgtagggcttaaatatgtatttcccaccttattttcctgttccatctactcatattgttgttaactaaatgttaaccatttaaataagtttcccttctttctctcttaatcagaagagaggggaaccatgctcagatcaaataggaatgtctgtttacacttttgtaatcagtcactttattatgttaattctagttctacctatgttgtaattttaatagaattcttcaagactctccaggtagggtatcattaatactgctaatttaatcctcttaaaatatttgccaggaaaggtatttctacagtttttatcatgtgttccaaccctaagtatctaaatttttattatgaccaaattttattatgaccaataatgatctttccatattt

SEQ ID NO: 58318 - DNA, 1071 bp, Homo sapiens
cctttctagctaaacataaaaaaaaaaaaaaaaaaaagattcagattccattttcacagttgggaaataccacataaattctcctgaagttaccacaatcttactagccaaagattaaaacaaaaaaattgtatggacagactccactaattcagaatgtctgataattcagataatggctatgctaaagtctctactgctaataaaaatatctttagcaagttaaaagtgttaacaagaaatgtttaaaaaagatgtttttgtgttgggtaatatagattcctggttggaatatgtgggctttcataaaatgtaatgataacagaatatcctaatgacttatatttttatgttaattcccaaataaaactttacatattaaagattataagatatcatctgccagcatagaaagccaagttgtttcattgtaactttcaaatgaaatttagaaatttgactgaaaacaatttttttcttcctgggaaacttactatttgcctgtttattccaccaacctttgaaaacgacctcttttcctagaagtgagactttaacaactatggttcaagcataccttttacatcttcaggaagagagattgacttaatcatatttaactcccttcctgagaaagtaatcagattttatcaactatgaaaaaataatggagtgcccttcccccagggacagactgaaactcgggtagctctgatgccgtaagttgttaaagttagttgctgcttatcactaccacctgctagttgtttcagacgcctcactggagattcttttaaaggagcagtctcattgagtcagttggggtttcactagagtttgcttagatgctagcaacagtatagagcttaagagttccatcttctaaccaaagtgctcttgagccatgctgttctgagtgtgaaggtgatgaagaattcagccatatatatctaatacctcctgtggtttagggaagaacaatagaatgaggctttatagggaagaaaaatcatatttccttatttcctaagcacttcctgtgtactcagcattgtagtaatgctagtgctg

SEQ ID NO: 58319 - DNA, 1002 bp, Homo sapiens
taaagtccattgaacaagggaaaattaagaagtggaagatcaaaaggagtatagtcagaagaaggggcacttatttaatggaatcagacttggggacaacttagagttttggaatatattttgcaaaataagtgttctgaggtttataatatctttagacttggagtcagagttagttttaatgtgacttcttcctaggaatacagtctaatcctagacttatttaaggttttcacttctaaactcgtgtattcagtaggtttggccattgctagaatgtaaattaagcgtcccttatgaaaattagtaactgatagaacactatatttggtttctaattagtagttattcttcactgcagcaaactcaaatttagaatttagaaatggcacagagactcacccttataagagttgctattttctaaaatgtaaaagtagtagagaagtacttgaatatataacagtaactcctgtgaaataaccttggatttttattaccaaataaactctcagtggaatctagtcactattagaatttatacttaactgtgaagttcaaactggaaatcaacctcatgggtttaaagggagtataaattcatttatgctgataaaacattataaacgatgtctatcattgttactttattgtcatgtacatgtattttcctttgagaacacagcaaatgagcatagcttacaaacccaaaactctaccttaaaaatgggatataattagaggataataatgtcagacctcctgtccagaatgctcttaaaggaattccccttagagtcaagcccagctagtttaatgtagtcagaaatgcttatttccaaattctcaatttaaaataaagcagaatttaaaagtgggattgttacatcatgatagtgctttagggtaattgagtatttcatattaattggtattggtaagaatagcatttctgctgggtattaacatatccatatattattctctcatctgtgatcatat

SEQ ID NO: 58320 - DNA, 1031 bp, Homo sapiens
ccatctctactaaaaatacaaaaattagctgggtgtggtggtgggcacctgtaatcccagctactttcccgaggctgaggcaggagaatcgcttgaacctgggaggcagaggctgcagtgagccaagatcatgccattgcactctggcctgggcaacaagagcagaactccgtctcaaaaaaaaaaaaagttggtgactatgtgtcatttgtaagtaatgataatggtaatagccagcatatttagtgctcacatgtgctgggcactgttctaggcactttacatatatgtgcctgtatgcacaggatcgaggcatacacaagacatggagtagggccccagcgcacctcagtcattgggaagttcctccagaggagagcagcatattttccacagggttctagaataggtcaagaggccagtggaagttcctgcagccttcactcccacctccgtcagctgagaactggccagatcagacttgtctgcaccagagcaatcatgacccaatctttccagcccatctctggggctgatgccctctggccctcctggggaaagcaaacattatgagagggcctcatgcagtggctcacacctgtaatcccaacactttgggaggccaaggcaggagaattgcttgaggccaggagtttgagaccagcctgagcaacaaagtgaggctctgtttctacaaaaaaattaaaaaattagccaggtgtggtggtgtgtgcctgtagtcccagctactcaggaggctgaggtgggaggatttcttgagtccaagatgttgacgccacagtgagctgtgattgtaccactgcactccagcctgggtgacagagggagaccctgtctcacacacacaaaaggaagaaagaaagaaagaagaaagaaagaaagaaagaaagaaaggaaggaaggaaggaaggaaggaaggaaggaaggaaggaaggaaggaaggaaggggagtagagaaagccatggggataagtggggaacagagggcaggaggtggtcctgggctgggc

SEQ ID NO: 58321 - DNA, 1875 bp, Homo sapiens
attaggagacttaaacccaatatttaaatatgctattttataacactgcatcagttttaggagttgcatctctcctgctggctcttttatatttgagcaagatcagtgtagaatatgtgtttagaaacttgtctgttgtctcagtttagtgaaaaggaggtgctgcatgtgcctgaattaaaaccaagaaatttttccaagccaaatgcagccttagtgatgagagatttaattctccattgtcaccttttagcttttatgattgcttagttttttctgaaggatgtctgcattgtaaaactatggactaaaacctaaaaaacagaatcctcaaaaactttgctgtatgtgttttaacattttagagaacagtatgttgaataactaaggtatgtaacttgaataggaaaaatgtccatcaaatgcaccttggaaaatcacagtaggtagaaggctgtgttaaccgtttgtgtcttattaacatccttaagttaattttgaatttttgacagttttgagggaaaagacctatggaacctaatgtgaagtatttcgtatgttaactggtgttgagttgaagatttttactgtgtataagcagatatcatttgaatgataaaaatgtcattaacctgctgtcttaagatgttcacacaaatatggagagtaattctacaatataaaaatatttattttaatactgagtttcagttaagtcataaacagtgttaaaactcttgggaaggtgtaggggttttttgtttgtcatttttaaaattgaaactgtgtcatacagtgtttcacgtctctgaaattgggattataatagcactattttgatgtagctctaccgatactatgtggtaatgctattttgttttactaacaagctctggaatatttagcagtcattttcactggcacaagagccttttgtatgttattcaatttaaacttttaaaccaaaaattttatggtccagtgtctttggcaaaaagatgctggagggaatgtaacatacaattaatatgtggttatatatatatataaaaagacacaaattgccatgttatggttctgccttgaaacagcacaatgaagtgtatcagtatattctgtgattatgaaacttatatgttgtgttgttttgtgtcttctgttgcctgtcctttgggccagatgtgggccagttaaatgcagttatcatctcattaaatacagatgcagataaaatatctttagtgctgcaacattttacctaactttttgtatgttttcatgactgtgtgttattttccaaagctgttcctacctcaccatgaggctttatggattgttatgtattataaatgttctatatgagacagactactgtgtttcttctcatttattaaaagttaagtagaaaaataaactaattttaatatctacttcatttgtgcatatggcctcccctccgatactaggcttagttacacagagagttggatttcagataattgaaagagaaatttcagtttaacacaaatgttgcaagtgtacagagtgactaggttacaagatgggtgtggaagaaaatgtaagcaaaaattgcaattaaaaattgaaagggtaacactgcaaaggctcactaatatgaaatactcagtggctttgaattttattataagcattaagcttatagattatatagttgtggttaacctgctgcttttggcacttgctatttttttatttataagcatagttactaataaggtttattaaatattttacacctgtaaatcatctaaaattcttaacgcaatagtatattattgtggttctatgagcctcaggactatcacaaatgtagtttcataaaaaaattcatta

SEQ ID NO: 58322 - DNA, 1027 bp, Homo sapiens
gcgtttgaaaaaaaattttcaaggtcatttcatgataaccaatcatgaatggatttaaatggagctttttgagcacaaccagcaatgtttgtgctttctaagagtcactgacttgagaggaaagaaaaccagaaggttaatgcagtttggatattaaattcttagcaaaattaataattaaagcaaaattaattaagattttgtaagtcatcctgtcttcacatactcagatcttccaatagtggcttattttgcaagatgccacaatatctacacagaaaattgtggctatttcattattgctatagatttcaaatccaacacaaatatttaagggtgtttaagttatatttttcttgatagagggtatgctttgtgacaaaattagatttttgtccttgaaaggattaatattagcatcagttatgtatagctctatttttctagaaacaaggtattctgactacttttatagctgactacttttgggatggctacgttttgggatttaaaatagttcattgtttaatgggttgtaagaggaaaaagtgttaggatttgacagttactttttaaagggatgatcttttgtggtgtgtgtttttcctagtataagcctattgctggcgatgggcctatttaagaacagctgattttttccagtgaaaatatggtaattttaggaacacagtttgtaagttcacatttactataatgggccaaaaccataacctgccagtttgcaatacatcttgatcttttaatattcttatctgatattgtgtaattcaattcctaaactgatagttaccttgaattttgcgaaaaggtttgggtggttttttttaaacatgaaattgagggatctcatctgggcgaacaagaagagaaagctgtgaattgtactgtatcatgtacattcctgatttaatactttacagaacattttattcagatatcaatttgttacataaacatttcagcaatgatacaaagataactgataaaatatattacattcaatgag

SEQ ID NO: 58323 - DNA, 1665 bp, Homo sapiens
agaggaggaggcaggagagtggttaggagggtgaagaagcagtatcacaatgacttaatttagccctggctattatgtcctggctcattcccagaatgtcaatttatattaaattgctctgagcacatttttttaattgtactttctgaaaaaattttcaccttcatcaccacttaaaaagaattagacaaggatgtttatataaacactttaaatgtatttgatataaaatttttatttctttgtagacccagaaaaccccagaagtggtgatacagtggaagtacaagtgaatggaaatcttgtcagagaacctgaccatatggaactggaagaagatagggctggacaacttaacatgcgtggagtttttctgcatgtccttggagatgccttgggttcagtgattgtagtagtaaatgccttagtcttttacttttcttggaaaggttgttctgaaggggatttttgtgtgaatccatgtttccctgacccctgcaaagcatttgtagaaataattaatagtactcatgcatcagtttatgaggctggtccttgctgggtgctatatttagatccaactctttgtgttgtaatggtttgtatacttctttacacaacctatccattacttaaggaatctgctcttattcttctacaaactgttcctaaacaaattgatatcagaaatttgataaaagaacttcgaaatgttgaaggagttgaggaagttcatgaattacatgtttggcaacttgctggaagcagaatcattgccactgctcacataaaatgtgaagatccaacatcatacatggaggtggctaaaaccattaaagacgtttttcataatcacggaattcacgctactaccattcagcctgaatttgctagtgtaggctctaaatcaagtgtagttccgtgtgaacttgcctgcagaacccagtgtgctttgaagcaatgttgtgggacactaccacaagccccttctggaaaggatgcagaaaagaccccagcagttagcatttcttgtttagaacttagtaacaatctagagaagaagcccaggaggactaaagctgaaaacatccctgctgttgtgatagagattaaaaacatgccaaacaaacaacctgaatcatctttgtgagtcttgaaaaagatgtgatatttgacttttgctttaaactgcaagaggaaaaagactccactgaaattctaagtttgccaagtagtgtaattgaagtccttgtctggtcacacagtttaattctatttttgtaagaacataatgggactgcataacagagttctatattacaattttgtgattattagtacagagtacagctatgctgtgactgttttggaaagccagttttaacactatgttacatttttgtttaaagtaagttaaaccttatataacataatgacatttgatttctggatttttcccatgataaaaattagggggataaataaaattgttactggaatttctctgcttttcttttcccccagtgttatactttattagaattataattgatagaactttaaaatcatcaacagtttgtttcctttgacattttaggtgatattgccctttgagatcattacatagcataatggcagcatattttaagagtgactcatggctat

SEQ ID NO: 58324 - DNA, 1150 bp, Homo sapiens
aagaaggaaaatgccgtaggatcacagagaaggatacagatgaagtgacaggattgagagtcagtgagagagtatcttgctaaatgtagtttagaaatgcaagggcagtacttcccctaaaacagaccctagcaatgctaccaagccccagcacaagatgtgccaatcttcagggattgaaccttcttagaaaggtgaaaaggggaaaagggaaaaaaggtaagttaacatctgcattaccttgtggacccagaacctcatgagttaaaaccaccagtgaacttatttttccaagtttttaagacctagccataaaggagtcctttcttttgtcttggaaacacatttttgtccttttattttaactgctgtcttaggaggactattctgttatgcaatctgactataatactgagtattttttccccaggattaccatcgaccttctgttgaagaaattcttgagaaccctttaatagcagatttggttgcagacgagcaaagaagaaatcttgagagaagagggcgacaattaggagagccagaaaaatcgcaggattccagccctgtattgagtgagctgaaactgaaggaaattcagttacaggagcgagagcgagctctcaaagcaagagaagaaagattggagcgtaagtctgaatgggggtcaaagcaaaggagaactaccaagtgggttattttgatgtgtctgaatatctctttgagcagaatattttatacatacagatcttattagaagcttttgaaaaatacttgagaaaccaaaatatgtattttagactttttaataatcaggcttgctggcaccttcatgttggacatctttctctgagatcagttgctagttatatattattgggccttaactgtgatggccctaatacgatagccttgtattttactctagagttacttttttctttttcgtctctactgtgaataccctaatgttttcccactgtaaaggaaggtcttaaaattgctgctttccataataaaaaaccatgacttttgtcttttgaaatggccactccaacagaattccaggtctaaaaccctacagtatgtagatgagatatgttcaggcaattcttttctttttttttaactttttatttttgaaaatgag

SEQ ID NO: 58325 - DNA, 1061 bp, Homo sapiens
gggcaacatagtgggaccctgtttctacaaaaattagccaggtatagtgacatgtgcctgtagtccaagctacttgggaggctaaggcaagaggattgcttgagcctgggaggtcgaggctgcagtgagccatgatcgtgccactgcattccagcctgggtgacagagtaagaccctgtctcaaaaaatataaataaataaataaataaattccctatttgtacactggataatttatatcatcccatcttggcaatgatttttttagaagttatatgctgtataactgctttggttttaggcaatacttagatgaagagtttgttcttcgagtgatgactcagttgactctggccctgaaggaatgccacagacgaagtgatggtggtcataccgtattgcatcgggatctgaaaccagccaatgttttcctggatggcaagcaaaacgtcaagcttggagactttgggctagctagaatattaaaccatgacacgagttttgcaaaaacatttgttggcacaccttattacatgtctcctgtaagtatttcagaatttagctactttttaaaacatcttttatttttgttttcttgtttgtttgtttttgagacagagtctcgctctgttgcccaggctggagtgcagtggtgcgatctgggctcactgcaatctctgcctcccaggttcaaaggattctcctgcatcagcctcctaagtagagtagctgggactacaggtgcatgtcactatgcctggctaatttttgtatgtttagtagagacagggtttcatcatgttgaccaggctggtctcgaactcctgacctcaagcgatctgctcacctcagtctcccaaagtgttgggattacaggcgtgagccaccatgcccagccaaaacatcttttaatgttaagcattctgaagcagggaaattgagttttctgtttgtttagtaatatctagtagccaagaattgaaaatactgttatatttttccacatggaccaccagaccaataaagtctatatcagtttttgtttgctgcatgagttatgt

SEQ ID NO: 58326 - DNA, 1044 bp, Homo sapiens
gtaggtagtgtgaggggccagagtgcaaaggtcagaaggcatctggtggaagcggtgtgcaaagaagcctgaggggaggaccttagatctcggttaccttggcgatctctatcagagggttagagttgccgagaggcgccagctgccgcttcctctctcccgccctccgtttggcttagctcgccgggttctcccacaggttaaaagcagacgccgacgcggttgcctagtgacacttttcccaaaatgcctagggtattgttgtgttcttcttagccaatgagagaggcgaagcggcccaccgcctgccaatagactgcgagatcagggcccgcgacggttaaacggggcccaaggcaggggtggcgggtcagtgctgctcgggggcttctccatccaggtccctggagttcctggtccctggagctccgcacttggcggcgcaacctgcgtgaggcagcgcgactctggcgactggccggccatgccttcccgggctgaggactatgaagtgttgtacaccattggcacaggctcctacggccgctgccagaagatccggaggaagagtgatggcaaggtgagcgtgggacctaccctgcgcctgcccctgcttaggtttcgtcgcctcggggcgagcgccctgcgccaccgaagggaaccgacagggctgaggaaatgggtgcccggaagactaaaccgtctttcctgggtctgcatctgacagcctgtcctgggtggcttaaaggatgggagaccgcttcttttgatatatgtatttccatcttttcccgtttctctccccatttctctctttctcctgctttggcttgctaaggaccttccattggtgacaggtaactaattcctgagctgtttttagagctctaagagtggccctctcaggcacaagaaaggggcaggactaccagaacccgaagctttgtatctgcagtcagactccctcaaaatatccattattaggattattggattcatatttcccaatgtatataggtagaacttttacagaaagtaacattg

SEQ ID NO: 58327 - DNA, 1432 bp, Homo sapiens
atagctggttctattttttttaaacctagaaaaaataaagttgatttttttcaattaaagtgcttttaattcttagcagtggggatggggcatgtgtgttttaccagagctatttgggcattaatatctgcaggcaagtacttaaagcacactgtggcagttggatgctgaaggcaaactgaaaaaccaaatgaaaaaacatcagacttccttctttggtttaaaaatatttccccctttctccccattctcccaatccagtggtgtgctggtaaatgtttagcagttcactcttctgggagaaaattatgtattcaactatacatgtttgttataaattttgctgatagcaagaacatataacacaattaacaaataataagatacaaatactttattgtaaatcccatatagccagttgattctcacagtatacttagttgctcaggaaagaactaaaatgcttttttaaaaggatacttaattgctttttgctcaactcctacagtcaacctatgattgattgtctttcaactgtgatttgaaaaatggcagactgtccaaatctaactcatttcccaataaatttattatcattcaatctgatacgtgatctactgttaaaactgtttcttaccatggtacatattagactcattaagccgaaaccacttttagctttaacattaattgtaaatttatatgattcaattttcataaccaatgcttaacaactgcaggcaaaattctaaaatgtgaccactgggtcttgggaatcagtaggggctgtatccagcacaccactgccccatcctttttttcttaactattagtgttgaataaacttctcatagttaatctacttgctgaactcaggaaattcctatcactgaccctggccagggctttaaagggtaggaaaagcattaatgtcagtcctacacagcgaacttttgatttagaagaatgtgacagaaagaaaacatttactgaaatacatgggaagcttgcatatttctaaagttgtctttatacttttcatttctcaaagctaagtaaactgtggtataggcatctctaagatgttagcatttaaaacatcaattgttttattgatgtttaaacaattgtttaaatcccactgaaaaatttaaatattaaaatatcttgcacagtctaccaaatgagttaaatcgttacagtcgtgtctacctcttatttttctatctgtatttaggctgctgttttggtgagattctaatttctttttcccctggaactactttctgtggaagacaaggaacagactggggacagaggcctgaaaacaaattggaagcactcagagatctattgctgaccagccctattcctcatgagttggcggggggaaagccattgtttttaatttccacttaatatgaaaatgctt

SEQ ID NO: 58328 - DNA, 2958 bp, Homo sapiens
ttgtatttttagtagagatggggtttcaccatgttggccaggctggcctcgaactcctgacctcaggtgatctgcccacctcggcttcctaaagtgctgggattgcaggcgtgagccaccacgcccggcctccagttgcttttgaagagggtaaagtcaagtttctatttctagaaaacattttttagaaatttgttgcgatgtttgtacaatttacctcataagagaaccacacccttctccaaaagtgctggtactgcatcagtgagatgagtagggtttttgtttgggattgtaagactattaagatcctagtaagtcagtggtagtttactgtgatgtgagcattgtagattcccccgttgtcactaatcacacaacaattttgagaagtaggctataaaacaaaaaaaggttgctgttttctatttttaaataaaccaaaaaaaaacagaaaagatgtgaattttccccagttatgtgggaaaggtaaagcaacaccaaataaaagcccacagcagcttcatctttacgataactcagtgcatatgtgaaagagaatgatgcattaactgaaatacctcattgaatattatactactactggtaaaatgcagaagacagtgttaatgtgtttggtttggggactggttgttataaaatgcaatttttttttaaatctaagcatttcattatgtgttctacagtgtcggtgaataaatgaaaccaatctcaatttagaggtatggatgatgacagaaagcccaatagaagcttaatgatgcttctgtttgaggcccagcaagcaccactaaattactggatgaaatgaaattgttcacttgagggattagtcaaccatctgggggagaagttgctcactgtcaaatacagcatgcacggtcctagctgatagaccttttcctcattgctacagcaagccacagggtagagtgaccagttctcctatccaaaaataaatgcgaacatgcatacataaatgtggctgagggccacttttgccatcactgtgctccaaaggaacatgatattgttaaatatactgtacacattaaactattctataagatgctttacttttcaagtacggtgtcattttcacagtctccagggtgacaaatgccaatagatatgtgagttaatttttttaaatatctccgtgagttgtaaatagatgtgtatttgatctgccctatccttctttgattctttaacatgttctctctcttctgtttgcaaaatatgtttgaaagcattggtagtgctttccttatcagtaactggagttctcctgcttgcactagagaaggtaaagagagaatcagtattcttatatggcaatctggggaagcagcaatatgccactgtacaaaactgaagaaaagttcctaatttgtactttgtgaagggagatgaaaggacgtttaaagtatatatattttgtcaagaggaaagaagataaaactatgccagttttatatcaatagcttgtagaagctcagctcttcttggtcttggctagactgcctagattcccacagcagacaaggttgagaatccattgctggaatcttggtattgatgagttacagtgatggaacatgtgcttggccacaggcaggtccagtcactgcaaaagtgaccaagccagcaggtcacccttaacttcagaaacaattattggtggtgaactgtacttaaattgcagagaaacctgtaagtaatggaaggtaaagaaaaattacagaatggaaaataatattttgggcaagcaaacaaattcactgagaattccaaaagtatattaaaaaagaagatagctatgagttcagatctatcttattggtctttaatattacaaccaatccttaactttccactataaaggaaggattactagattgattactttctggatagataatctggtaataaatgataggtaaatcaaaaattacttttatttaggagtttgaattcttactctcatcagacattttttttctagggacgcttactaattaaatgatttaagttgtttcttaggggttttttgcctatatatttatgactgtgttaatgagtagtgaaatgatgcggaaagacagctatcaggaagaggaaatacagaagcctgaataatctatgggttagaaaagcatccctgaataatcaaaaattggcagtattggcattgttctcaagcctttttatgaaaatgaaatctgaaatcaccaaatgtaaacctgggaacattattctagtgttgctgtcttggattcatgttaagaagcgtcttcattctttgctcatgttgcccacttcttgtggatttgtctgagtgttttttgacaatcacttccttaaagactcttctgaactagttggacctggttaatcatagagagtagcctttaatcatggatagtcttcttggattatttttatatttgaaaagaaaatgttttatttgcactactgagtaggaagagttaattgttttctttgttctttttttgaagtcattacacaggacttcactccagagttaccattatgagtgtgttcagctctggtccacagaggatggataaaaatggtttgttatgtttttttgctctgcagtgctatgagccttatatctgttaatatgaaggacaaagtcaaaagcagcagtggatagcaggaagggtagagactaatatgtttgggaccaaaaccatctaagttagagatttccagatcacagaggggctgggcattctctggagcagtcattggttggtgctttattgtaatcattttgcgccaatccccaacaattaggaactggaccctgggaataagctgagggtgctgaactgttggggaagggtgactgtagccacatggaagataaaatatgggtttttctgcaaaatttccatctgagggttt

SEQ ID NO: 58329 - DNA, 2758 bp, Homo sapiens
ctctgtgcttctcagactttcccaccaaaagaatattgcctgacatttaactaaatgactgaacatcctgatttaactgcattttaaaacttcatctgttctaaataccatttctacttaaacccacaaacatgggaagacataattattctctgtagttattcatagatataaggtaatttaatagtatgttttcagcatctaacactggacctaaacatagtagactagtaaatgtttgaattaatgcataaattaactctcttgtgtaatcaacaatttttaataaccaagatacctgaaaagctgaagaaaccaacccttgttaaagcaaaagatgacaacacaattttattcagcttttcatcataagttgtggttctgaatgattttgacttctgaactaaatagtttttgttcttttcttctaacccttaataggatctttccaattaaagatgtacccctggagactgatgaccttaccacttggctctatcagcggtttgttgaaaaagaagacctcttatcacatttttatgaaacaggtacacagtaacctttaaatagttgctaaattatagcaacagtaatgaaagcctcttttaaagaaagctgtttgcatattagatcttgaaacttgaaaatgcactctgtaaattgcctgtgagaagcaaatcccctcatgaatcagcttaccctggggattatcagcaaggacaaagactgcttgaaatgctgatgagtgttatcaagatgaccttaggtaatattgctgtatgaagttatctagcattcctttccagaaacgaatttaaagacatctgtttactttgtatttcttttattattaagatacatttcataaagcatattgccttttaaaaataatgtcagtgttatacaactacttttttgacaaaaaatttgtaaatagaggaatcagcataaagtgtgctatttcagaaattatttcatgtcaatctcacataatcctgggtcctgatcactgtgggaatctctagggatccagcagagacaaggcagctagagtgcctgctctcatgcagattatattccagtgggagacatggcaaacaagtctgcagaaagaaagataattgggatcatgaccaattggaaaaagttccaggaaggagataaacagagatgggagggggaatatcttttctgatatggaaaggatgcacatgagccagctattcattaagtggaggaggacagcattgcaggcagagaaaaggcaaaggctcagaggcaagaaggggctaggtagtacagaaattgtatttcaaataaaatctctcctctggggcactggaaagtcactgaaggtgctttaacatgtacaaatgtagttaagctaatattcaacttttattccaggagacctaccattacagtaaaacaaactaatatttctatcttgtcttttaggagcttttccaccttccaagggccataaggaagctgtttccagggagatgaccctcagcaacttgtggatatttctcatacagtcttttgcatttttgtcaggctatatgtggtacaacatcattcagtatttttaccattgcctgttttaggaattgacgtggacttgtcaaggtcaccgtaggagttcagactttctttcataagtgtgcattattttacatgtgcaaatcagaatatatttaaaaaaaagcaaaagaaattcaatggatggattaatatttatccccctttgggatattttaaaatctactaaaatgaggattagtaatataatgacctgctaatatattttaagaacatgttttaaaaagatacactctatcacatatttaagcaaacatcacatttggagaagaggaaatcataaaatcatcctagaagactatctgagagaaattctgttgccaccagttatacttgacaatttagttgaagctcagaaagttatattcatccctcttagctgtagtctatattagggcagttctctagaacgcccacatttccaccaactcagtaaacttgaggggagctggttggcacctcgtgaagaactctttccctgtcgtttgcagtaacaaactccagtctgttgcagtaacaaactccagtctgttgcagtaacaaactctagaatattgacattctctgtgggggaaaagcagtgtccactggaccccttctggtactggatgtgttctttacaaaggctagctcagtccaacactgtgtttacatacactcgtgcttttccttatctgacttctcattttgtatcagaggcatatcataaattgataattttgcaaaatgcacttttttgagatgcagatatagcaaaggattagtaatatagcctgaaaacaaatgggagcatagcagtgtgtgaggttctcgagaactgtcttgtctctgtgtgtttatttgcctgccagtgctctccagcgccatcctgccctggacaccaccctgacgtgatgcctctattgcagctcagaggctttattttttccattttgacattggcactaaatgcatttggggatggttaaaacaaattactatagaacatttaaatgatcagtttaaggggaaataggctagtttatagaaaaataagagctagtggcttataatggtgacaggttctcatgtggcacccctaggacctgtgcagacagtagtctgttgaatcattacatcaaggagctgcccctgtcagggtgagtgtaattag

SEQ ID NO: 58330 - DNA, 1379 bp, Homo sapiens
tcagtaatttgtaatacctttcacttaagaaaaatctgatttttaaattttaagacatgcctctaatatcaaggtgaagttaattgaccttcctaaatatccaaacatttaaggacatttaaattggaggaaagagaaagaaacaattagatttcctgaatagttaatagttcctatgttgctccgagcacccttctgtctagaaccgtaatgtattagctaagaattgcggagctttattctgctcggagtctgccccatacatacatagttcagaggtcatcaattttaagaggtgagaaaatagagtttgcttttaagtatgcacccatttacttttctggacctttactttttagtactgctttgtaccaaaattattataaatataggcaccaaattccaatggtagtacttaattatagatacttatcttatgattcagaatgtttttattaatgaagattaatgttgaaatgaaaacacaatatatctgtattcttttttgaggggggttggggggacggagttttgctattgttgcccaggccggagtgcagtgatgcaatctcggctcaccgcaacctctgcctcccaggttcaagtgatcctcctgcctcagcctcccgagttgctgggactacaggcatgtgccaccacgcctggctaattttttgtatttttagtagagacggggtttctctgtgttagccaggatggtctccctacctcaggtgatctgcctacctcggcatcccaaagtgctgggattacaggcgtgagccaccacgcccggcccgatatctctattcttaaagagacttcatggatggatttccacgaatatgtccccagtcaggcatagcccagttagttaagaaacactactagccatcctctatacctaagtgagaaccttctgacttggtaattctccaatttaaaaatctttcagtaagaatcagtctcacaagttgctaatgaaaatataaattggtacaatctttataaagataatatagcaatatctttcaaaattactactacatttagcttttgacacagcaatttcacttctggaaatttatcctataaacttacatatgaatgaacatttgtataatgctatttgttgccacattgtttctaataacaaaagatgagaaactgtttatcagtagagcataagaggaatttaatgtttactgtgtattaagagattacaatgaaaattcaaaaatattgtttgcagaatgataatgaaaatattatctatcaaaagttgtgagatgtagcttaatctatgcataggaaggatttatagccttagaatgctaatattatagaaagtaagaaagctaaaaatcagtaatctaaat

SEQ ID NO: 58331 - DNA, 1991 bp, Homo sapiens
tcatcttcttttctctctttccctctcaactaagatacagtccattagaatgtcttttttagctttactttcacatttttcctaaatgtaactacttgttatcaatacaatataattgaatctcatcaaattcccttgtgtggaatactgcaagtcttctaacttatctcctgtggtcttttggtcacaggaaccagcagattttctttcttttttctttttttttttttttttgagacagggtctcactctatcacccaggctggagtacagtagtaccatcagggctcactgcatcctcgaacttgtgggcacaagtgatcctcctgcctcagcctcctgagtagctgggaccactaaatgtgccatcgcacccagctaatttttgtattttttgtatagacggggtttcaccatgttgcccaggctggtcagatttttttaaacagaaataagattataacacttccttgttcaaaactatccaaagatgtcctctccaaaactacttaccatgcataaggcttttctcatttggtctccacctccctctgcagcttcatttcctacccctgacttccttgtttatcacacttcagccacactggccttggtgctgttctttgaacatgccatactcgttcccaccaaatgacctttgtcctttttgttttgtcacctggaatattatggcttgcatcttcacatgacttattccctcacattatcagttctgctcaaatgtcacctcctcatagcagctttctctgaccctcttgaccctttctatccttttactgttttcttcctaacacatattactagttgaatttgcactccacatttaccatcttcccaaactagaatgtaagctccatgaaagtctctttatttcctcctctatgtctagtgcctaggacaatgcgtggcacatagcaggcactcagtaagtagtgactgaattgatgaatgactgcactttcaagggcaatcagaacaatttccttttccttcagaaagaaaggtttatttatataaatgctaataacttctctctttttacccctgtggtcaaaaagggcagtaagttggggtggggtgggggaatcactattctattctgtgattggattttaatttagaagctgtaatttctgtttaattttatggcattttaattttggatatacctgtacttattacgtgtgtgtgtaccttctagggaagatcttatcgtgaccaacagctgctgcttctcaagaagcacttagaaaataattacaggagcagagatcgaaaatggattgttttgtttccagaagggggcttcctcaggaagaggcgagaaacaagtcaggcatttgccaagaaaaataacttgccatttcttacaaatgttactctgccaaggtctggggcaacaaaaattattttgaatgcacttgtagcacaacagaaaaatggaagtccagcaggaggagatgctaaagaattaggtatgatggtttttagcattttttaccttgttggagttaaaggattttctggagttacagaagatgatcattgttcttttttatatttataatttttgttaaaaataatagggagaagatgaaactgtaattttttaaaaaagtttccatttacaaaagtagtccatgcttataataatttactcaaataatacagaaatgcgtaaagtcaaagatatctttctcctgtcctacttatacggagccattcccaccgctgcagtaaacattcttataaacatctttacatattggtggaactatttctgtagtacagattcctagaagtggaattgctaggctaaaagatataactatagaaataacatgtttgaaaaactaatcttttcatttatcaaataatacatattttcatttatcaaattgagaaagctttttggttttctggggtttttcttgttgttgttgtttttgttttttttctgggttttcttg

SEQ ID NO: 58332 - DNA, 1193 bp, Homo sapiens
aaatcattctattaatttttaaatgttttatttgggacactacatttttatactttgccatgaagctacactcagattttataaagccacagtgaatgttcattaaatatatagtcttgtttgataacttaaccattttattatattgtttcaaaataattttgtaagttatataagaattatcagagactttggggtagaacaaatttgaaatcattaagtccaaatttaagaagttaattgagtttcattttttatatagtgatatatgtacctgtgacttaggattcgaagacttggaatcaagacctgtaatttttcatgtagacactattagtaactgtgctttgtttgtagaaatagagttagacttaagatattttggttaattaaaagtatgcttggatgattatatttaaagcttggagactcagctcaactatagtcaggtttcttctatccaatattatttcttgcttttaaatattttaggttgttgctcagatgatgtggttgatggatcatatttttaagtacacaaactttggaattgtttctctagttcatggagacttctttataagacaggtaagtaatgagcactttttccccgcagtgatagcctggtcaaattgattcttgattataaaaagaggtataacaaaaccaattataataggtagggctgcttctaaccagtcttagggagcttttttttttttttttttttgagagacagagtctcgctctgtcgcccaggctagcgtgcattggcaccatctcggctcactgtaacctccacttcctgggttcaagtgattctcatgcctcagcctttggagtagctgggactataggcatgccactacgcccagctaatttttgtatttttagtagagatggggtttcactgtgttggttagggtctcaaactcctgaccacaagtgatccacccgcctggcctcccagagtgctgggattacaagtgtgagccactggccactgtgccaggctcagggagctctttctcggaatctttgttccctaaccatttatttcaatctaaatttgagtatggataagtattaaaatacttaaaatgcaaatattctaatctctactcttctcccatttagaaggtacatttttagtttagtaaacattccccactattcagtttcttagctatgtg

SEQ ID NO: 58333 - DNA, 1642 bp, Homo sapiens
ctaacttatgaggtagtcttagaaatatatctgaggctattcaggcctagctagtagtgtagctcaatcgagttcttgctttaatcaatcaataaaaataatttaggccgtagtctgaataaaatattaactaattagattttatgtttgtaaattttgcagtgcttcaaagcaatttattaattcagtcacctattctaatgcaaaaatttgagtgccttctctgtgtcagatattgtgctggtggctgggagtacagtggcaaacaaaacaacatagttgctgttcttaagaagtttacatgttagtgtgggagagagacaacaggagtcacatcataaccacggaatcacatgtgaaaagggctatgagaggatgagacagaggacttgagcttgagactagtggtgccagggagggatgcccttgagaaaggaacactgaaattgagacctgaggaatcagtaggagttggccaggtgaagctaggaggagggacagcatgcacaaaggcagaaaagccaggcgcagtggctcacgcctgtaatcccagcactttgggaggccgagtcgggtggatcacaatgtcaagagattgcgactatcctggctaacacggtgaaaccccgtctctactaaaaaaaatacaaaaaattagccgggcgtggtggcgggcgcctgtagtcccagctactcaggaggctgaggcaggagaatggcgtgaacatgggaggcggaacttgcagtgagccgagattgtgccactgcactccagcctgggtgacagagcaagactcagtctcaaaaaaaaaaaaaaaaaaaaaaagaaaagcatttgtcatgtttgaggaacaaagggaaggccagtggctgcagcagggagggagtgagggggagaggagtttagtggttgagggaagctggtgaggccaaatcctttaaagctttgtagtgcatattaaggattttgaaatttatcttgaggaaaccatcgaagagttttaagtaagggaatgatgaaatcagattcccatttgtaattctactctgcagctttgtagaaatggactcaagagaagccagtgtgtgtggccaggagaccgtgtggaagattctcaccttatcaggtgagggtgatggttggtctagtgatgatggcagtggagatggaaagtgaactgattggagagttttataggagggaaaattgtcaggacttgctgagagattagacatggaggatgaggtagagagagaggtgacagggatgcccctgaggtttctggtgtgagctgctgggtagatggggaagtttagagaggaggtaactgagaggaaagattttaaaaatttaaaaatttagcatagggtagatgaaaaacatccaagtggagctgtgaaattgacatggatgtgcagtctggaacttgtaagggaaacttgagctagaaagagaaatcggcaaattatccatggtgtttaaagctgctatcacctagggatatctcagtacgaagtgacgagaggcccaggattaacttgtgagggaatgccaccatttggaggttaagagaggaagatgggaagagaagaagtggaaggaatgccagccttaagagtgtggggtcacagaagtccacag

SEQ ID NO: 58334 - DNA, 1105 bp, Homo sapiens
gtcatagtctgatcataaaagaaaatagtcaagaagtcaaacaaatgtaggaatgaatttggttgaaagcctcagctgagtttaaagaagcacatctaagcagaggttgatgaacaggtgtacccataaaataatgtcaggtgttatattagcctttctttagataatatatttcacttcttccctttacatcaataggagggtgggcttgtgaagaagttcttttttccctatgcccaagtttcacagatggaaaattgaacattgccaaaggaattctgctcagcagattaagtatgttcatgttttagaataaaaattgccaaaactttgttgagaaaccacttatgaggaaaccttaaatactaattaggaagctaaaaattgaatattggtatattggtatagaatgaatatatatatatatatatatctttttccaaattatgacattccgtgtaatatgagtgaattactcagctctgctgatgaggacttatgttgattatctaacctacacagccccatatagtagccactggctgcatgtcactgtttaaatttaaattaattaaaatgaaataaaatttagcatttagctcctcaggcacaccaaccacatttcaagtgctcagtactaggtggctagtggctactgtatggacagtgcagatacagaacacttctatcatcacagcaagtactactggacaaagctgatatagtaagcatggttttcttttcttaggaaaactaaattttatttttattaaaaaatctttccttagttctaaacagattttttttgtgaaagacaagaagatttattaaagttttattaaactatctcttaactcatcacaaaaatgagccctgtaaattcatacatgcttcttggatgagtaatggtgaggccagtaagcccaagaacttaaatgaacattcttatactttagtttgcattctcagagctggggaactgtctgtaggcacagaagatggaaaagggattttctggtctgtttctgactttaagttacacattttaaaaagtactctgaagacactggggtttgttcatccccggcttgctactaaagtagta

SEQ ID NO: 58335 - DNA, 1027 bp, Homo sapiens
tgaggagactgaggtcctcagtatctgggaaatcttattgaggggaccctgtttcggtcatgtcacttgtgtcttcagtttggagatcctgaggttgtctgaagcgagtggatctatttttctaagtccaatagacgaccgcagtgagacacggtgcggggacggccaccgattactgaatgggaattgtgttatcatttgctaaatatattgtgacatacttcgtgcctcggtgaacagctcccttgaccttgtgcggctcctcctccctcgctctctgtccccctctggaatttcccctgagagatcaccgaggtactacacccggaaagcttcgaccctcgctgttttattttgtgctgggggcgatttctatgttggtgactgtttagatgtatttaatgaattttcctttttaagtgaatttttctttcaccccagaaagacaggacggagtccagtgtgagaatggctataactttggaagaagctccgtggctgggctggctcttggtgaaagcactgatgaggtttgccttcatggtcgtcaacaacctggttgctattccatcctacatctgctatgtaattatacttcagccccttcgagtgctggacagtaagcggttctggtatatcgaaggaatcatgtataaatggcttttaggaatggtagcttcctggggatggtatgctggatatacaggtaagagtgagaacacttttctttaatgcataagaaaaaatttgtcaggaaccatgattaaatgtatattacactttgggttgaggatgctttcatgtcttcactattgaaaaaaataaaaagaaaacagttctattgggtttctcttcagaatctcaggaagaccaatgttttcagaagtataatttcataattatgtattggtaaatttcttagtgtttttattgtgattgacatacatttattaaaactggtctgcaaaagctctggtagaggaataggagtgcgttgtataggactcgagagcttataaagtgaaga

SEQ ID NO: 58336 - DNA, 1050 bp, Homo sapiens
gaggctgaagagaagaaggctcttcaagctcaacaacgagcccaaggtgtttgaaaaggtcctaagaggcatctttgctgtcaactcaatccaagtcagaagcaaaagatcattgtgccaacagtcattgtggtagtgggtttcttaggaaactactgagatagaggttgtgtgcaagaagcttattgaggaatgcccttgggacccacacctatgggggagtgaagagagtgcaagggcagagggatgggttgaactgtggtgtagatgcaacagaggtctcaggccaaacccatgggacaactcttcacagttggcccaccttgagacaagggtgtaggaggttaggttatacttcctcatcaaccagtcaatggacacgggcttcacccctggaggaaacgtgaacttggaacacctgagaactggcagcagccaaccaacactgccaacagttgagggaatgagtgactggatcttgaagatgggatgtgtgggctcaccacagcaccatggcatccactgcaataattaatccaacttccttatttgacagataaaaaatgtccagagatgaaatcatatagctggtgaagagcagagccaggacatttctcaaatggtcactagcaaattcccttagtggacttggaatttggtagaggattcaataaatccatcaatatggataagaaggagaaatggtgattagatcaatggttcccaaacctagctgtcatcagcatcacatggagggatgttagaatacagattccggggctccattttcagcaatgctattactcgggggtctggggcaaggcctgtgagtctgtacttttttgtaagtaccaggttattcttatgtggcctgtctctcaccctgcacttgggaacaagtggctaagatcatagaacactggtcagatactagatttttaaacaatctacacttacagactattactgaatgatgttgctctggaaaatctcaggtgggtgcatggaggctcattcctgagttctgtcttattcaaaaacttcaaccct

SEQ ID NO: 58337 - DNA, 1550 bp, Homo sapiens
gtgtagttcatttattcattgatttttgtaatgtaatattctggaaaaaattttgttttcttaaaaattttgtctgacagctgggcgtggttgctcacgcctgtaatcccagcactttgggaggctgaggtgggcggctcacgaggagatcaagaccatcctggctaacacagtgaaaccccgtctccactaaaaaatacaaaaaaattagccaagcatggtggcaggcgcctgtagtcccagctacttgggaggctgaggcaggagaatggtgtgaacctgggaggcggagcttgcagtgagccgagactgtgctccagcctgggcgacagagcgagactccgtctcaaaaaaataaataaatacattttgtctgaaaaataactgggatcctggccagaaagattgttctttcttgttttattattagttttttctgttgccaagcttttttttctttcaagaatagtcacatgttgagatcactgaattggtaaatttgaccgctactcttccaaaatacatcatttgctgcctgacttagacctaggattctgagttgttcattgggaggttctgaccagtcactacaaggtttatccatggtagcagaacctgagtccttctgtagatggacttgaaagtgttccgtgcaacatccagccttctggattatgaaagcccacagtctaacagtattgaaacatcctgctgtattagttcaaccacatatttatctcttcctgtgctaaagcagtctttattattttcatatttaattgaaacaaagagcagctagcaatttcatagaaaattaatttgttttttctgatgtgtctgcaactgtgtataatacagacatttcacattgtttccaaaagtgaagaacactcatttaatatcttcaatgttttaagttagaaggggtggatcttttcctttggttggtgattggtttggtttatacttgatgagttatgctagactgattgtttagagagagcagtctctttattacacaggctcagtttgttgggatgctcagggaacagagttttctggttagccagaaaacccccttttttcctattttaattctggttgaaaaccatgataaaatagactttcttagcacagtatggtagatataacttaactgctttttgattggggatcatttagggcttcaggatcacgatttctaaacatcagggatcatatggttgcagatgccgatgctataagtaatttggccggatgcagctcctaaggtaaagcagggtactttccctggaatttcctttttaaataaatatctgtttctttgcttgtgttttgcctttttctcttcaaagtcaacattaattcaaaggagaatggagcttaagataaaaaataaaaaggggttgttgttttttttttctttcttgtcatgcggcctctgggactgagaagtgatttgcaacttgggtctctccaagattgcttgccttcatgagcacaacccattgtactgctaacagccagaacattctcataaaatgtgtaca

SEQ ID NO: 58338 - DNA, 1050 bp, Homo sapiens
attaaaaaaagtatatagcatttctataaaatgatcagataaagtaaaatctttttttaagagtgtaaccctagggatttgctgccttgggaactcaggatataggtaagtaataacctgaattaggctacattgttagccagagctaagatgctgaatctgtgcccatgaaatgccagtgttcgagataaagaatgttccttgctttagacatttatttccgattccctggtggtttatccacagtaaatgaagcaagggaccaagtccacagttgtagcagcgaagttactcagatgcccagattggctgtgtccaggtttattgtggcatagcatggaaggcagggtatcagtgaaggtataaaaagagagcattttattatctttggtggttttaggttaaaaagccaagggaaggtctggttctaaactattattactttcttaagccattactactttcttaactatggcaagttcctctcactttggcactctgtccactctgacacggctgagccttcattctcctcttttcctctgttttgacttctgtgccatacagcatggtaccttatgtagccactcaataatttgtgaatgatgaaaaaattatttactatatttagagtataactgttaaaattgggtatctgctgtcacagaaggttgtaatgagaatttacataatttatccctgtctgcaactctctcttcactttgaatttgaaacagtagtaaccatgattctctttgttacttgcatataatttctactgttaagaaaataacattcaaacctagaagctatggtcttctgcttgttgacctacctctcaagaggcattgattaaagtcaggaagctgatataataagccgagtaataacatgattactttgcagtgttattcacagtgagtttgcagcttaagatgcagccatccattcagggtgatcaggttccctaggcctatttctggtccttttaaggaagttctttggttggcatattctttagggaaataaaaactgtacaaaggctaaatg

SEQ ID NO: 58339 - DNA, 1457 bp, Homo sapiens
aacaccgcatgttctcactcataggtgggagttgaacaatgagaacacatggacacaggaaggagaacatcacactctagggactgttgtggggtggggggaggggggagggatagcattaggagatatacctaatgctaaatgacgagttaatgggtgcagcacaccaacatggcacatgtatacatatgtaacaaacctgcacattgtgcacatgtaccctaaaacttaaagtataatgataataaaattaaaaaataataagttaaaaaaataaaatagaaatgccttttttcacttagaaatgttttcagaaatttgcaggggttcaaagcagtagaggaaaaagaaagaaatctaggttaaacttatcccagcacgctgtgtatacagactgtcttctgaacgtgcctatgcgtttcatctccatgctttagattcatgccatttctctagctatgaatgtcctgtactttccatctctccaaagtttacccatcttacttacctactgatatgttcaagactctcttcttctgtgacattcctccatgttctgacctgttatttatatatctaacctgttattacatatctttatggatggtttggagcttatctgctggctttattgatagtccccttttcagatgtgtttatgtctctttcacctgtggcagtaacactgtcatatttcctggcaaccaaagagattaagaattacataacttgaagtcagacctgggtttgaattctggcttgccatttactagctgtatgactgtaggcaaactacttaccctctcctagcctcaattttctcacctgtaaatggaaataacttcattattttaaaaattaaatgaaaatatgttgaaagtacctgatacatgtaggcattaaatagccatgctattttgatggattaatgaatattgacctttacttcagtttccaggaatatggatctactggaacagcccatgctgatagtgaatatgaaagaagaatgatgtctgtatataatcatgtcttggaggaggtagaatcactcaatcggaaatatacccctgtttcttatatggcaagtggcatttgttttattgagcttttattgtatggatgtgggtttttcatacatttatggcacttactgtgtgagttcaacaaattaacctttctgtgcctgtttccttatccataaaacagggttaatacctacctcacagcattgtagtggggagtaaatgagataatccatgaaagtacttagcacatctctagctgctacgtagttatattaatatataaaaatctgctctaccagaatgcaaataaaattttttctttttttaacaatttaactgaagttgcaataattctcaacgcaggctacacattagaatcactttgagggctttttaaagaatacattaatatacaggcctcacccctga

SEQ ID NO: 58340 - DNA, 1780 bp, Homo sapiens
gactacaggcacccgccacaacgcccagctaatttttttgtatttttaatagagacggggtttcaccatgttagccagggtggtcttgatctcctgaccttgtgatccacccgcctcgacctcccgaagtgctgggattacaggcgtgagccaccgcacctggccgtgattatcttcttgatgatgttcttgacaattcacatattatggggtctttgtgaatgtaggcagtaaggaacctttgaatagtggttgtacatacagtttttcagagctggtgtttaataacaatatttttcattctaatattacattattctttttatcatttaggtctttatccgtcagtgtttttagagaactactgcacttgaccacaaactgataaatacttggtactgccccatctcactgttctgtttactttgtcttaaatatctcttttttttttttttcccaggcagctagtacaccactgaatcctttaagctttcagtgtgaatttgtaaaactcaggattgaccttttacaagccttctctcaacttatctgtacttgtaatagcctgaagacaagcccaccacctgcaattgccacaacaattgccatgaccttaggaaatgacctccagaggtgtggtcgcatctccaatcaggcatgtcttaactttcagtgcattttttatttacactttagaggttttcgaagttataagatgaaaagttgtaaaatataaaatcagtggtttgactcagacattatcataaatgtttattcactcaactgtctggctaaaaaataggctgatgtgttattagaaagataaagtgattcatgttatctcaatgggtgctacatatttatataaagagaaaggacagatttttttaaaaacttgagaatgtttataactaaattattttagtggaacttgaagacgctaaaatacaaatgtttttgtttctatatgtcatatataataatcttgtgaacatgtatagtttcatttgccatttttgtttttatttaacaaagtttatgaaaatgaatggaatgacagtgaaaagatggcagtattttttttgaattgttattgtttgaaggtgcttttttttgttttggtttttgtgttgtttatacaataatgatagcatgtttgtttgtcataattgatttttttttatagatgaaacagtccatggaagaatttcgaagccttgcttctcgatatggagatctttaccaggcatcttttgatgctgactcagcaactttgaggaatgttgaactgtatcccaagcttgccctagtacttcttgttctttttggaagtattcttttaaatacggactacctcagatatgcttacctacaaaatacatgttaaataaccctataaatttattatatagtttcccctttaaaatatataagcagaataatcttactttttaactttacccaggattttaacaaaaaatggtgactcgaaggtgtcttttttatatccagaaagagcatccaaagcaacatccaaagccagtgttgcttacctgtgctcacttgagctacaacagacaacacaacacattttcccaccaaagaacatgtatttcacctcacctttctttgtggccaacagtcctagtttttatcacctttattaatgatctcttcagtagcattagttgtcactttttttttttttttttttttgagatggagtctcactctgttgcccaggctggagtgcagtggcatgatcttggctcactgcaac

SEQ ID NO: 58341 - DNA, 1039 bp, Homo sapiens
ggtattcacatttctccctgcaactatgccttctcccctggggtttctctcacccactaaatagttcatctagaataacataaaaaagtatttatacttcctgtattttgggctaaagttctagacttggtttatagttgattccatttattttctctttcggaactgttttagtaaagaatttcaagcattatgttacataaaagcaactcagcatattttctctgaggaaatatttagacagagtctcagcgaattacataatatgaggaatgattgttcagacttatccaaggtttgggtttctcttttagctgctgcatcaactctttcaaatgtaagaacctcaccgtgtgctccttctattcttttttcttttctttttttgtttttagggtaatcatgacatggccaaagagctttatcagagtttgctgactcaggttgcctcagaacatttctacttctggctaaatagtttgaaggagttttcacatgcagaacagtgtctcactgggttgcaagaggaaaattatagttcagcactttcttgcattgctgaatctttaaaattctatcacaaagggattgcttccttaacagtaagtcctcttaattcacctttggtggtgatgatttatgtgagagttctctcccttctctttttggattgtcctatttcaactaacttgagaaacctgctgatatgaaataggtcatggaaataaacccttaaccttttcccctttttaacattcttagattgataaaagtttatcactttcttgttaaaaataactgggtaccacatgtgaagaggattgctgaatccatgcagaatgggtaagtggtgtgtagacaggatgctccctctacagactaagattccagcctgtgtgcatcagtaccaccatcaaacataaacccctgacctcatctcatacctggcagctactgactaagtaactaaagtttcttgctttatagataaagagaaattatcgaagattctagtgtcccactttgtatctctctgtgg

SEQ ID NO: 58342 - DNA, 1007 bp, Homo sapiens
tacagtgatggtgacatttggcctatatttgcctcttcagcattattccttatgatttccatctttcttaaaagtattttaatagtcttagattgaaatgagtggttgacgtgcagtcctaatttgttattttaaacgtagtgcacttcacaaaccctaatgtgagattcagtacctcatatttcttatgaagtaaaatgttatgcctacaagaaacctcacccttgagtttccccagtaacctgtacaaagctcttttccttaaagcttcatctgtatcttcaaaatgtaactagttcattttctttttggcgtgcagattgctctaaactgtatggtgaagttggccaagggcaggccccatcttagccagtcagtagttgagaccttgttgactcaattgcacagtgctcaagacgctgcccggattttgatgtgccattgcctggcagccattgccatgcaactgccggtgctgggtgatgggatgcttggtgacctcatggagctgtacaaggtgattggacgatcagccacagacaagcaacaagaacttctggtaaaaagcccattttgaatctcctttgaatgactaggatctggtctagtgggaattacttttaagtcaacattactatttgactttacttaaaaaacagaacaaacaataggttaaattcattacctaagaccaaagagtgtgctgatgtcaaaatagaattggctttatgagctttttacttttttcacttttgatttagaaagccgtgttttgttcacctctaaaactgctttcttccgaaaccctgtcaaatcagcctagtatagccaaagccttcaatctcatgtttttttttattgcaaaggacagaatgaaaatgaaatttttatctttcttatacagagtaaataatgaactaaaccctgttttgtactttagaaaatagaagttaaaaatctaatgataataatgaccataaattagcccaaatttatgttttccattc

SEQ ID NO: 58343 - DNA, 1257 bp, Homo sapiens
tgattccacctgtaaaaatagggtgtgttaaatcagatgatcccaaaattctttccagctctacaatcacgaattcatatgaggtataaatgtgtgtcagcaatctgagatggaaaaaaaaagcaaatttaaatttttttctcttttctctcctatcttgaaagtatggttttgtctgacaagaggcctataatgatacctgttttaatcagaattcatttgaactcttaggatagttgttttggcttttgtactgttagtcaatttttattaatattttttaagaaattatacgttgattttagatcttagtcattacgaaactgttggcacatacctatttcaagtaccttaatggagagaaatgctgatatgtattgatagtgggattgtggtaggaaattttgttgaagtttattgttagagacttttctcaaaaattaagaaaattgaacctatgagctgaactgcttttgaactatttgaattacaatttctactacttttctctgcttttttaggaaatgtgagttcttctcccagatcttctgatttagtcaaattagcccaagagtgctgttaccataataacaggggcattgcagctcatggagttagagtcctaactaatataactgtttcttgtcaagaaaagggtaagtttgatcaggactgatattacgtataaactttggtttagaccttggacagaattctgtttgatttttttttaatcccttatttttagcctgtgtgccttgatctacaaattgactcctttcaaagtgttcttagagcatgtgttcttaagactactttatccttgtgaaaaataataaagagatgaagaccttgggagtggaattgaaaggttttatggagcattgcccatttccttccactgcttacctttgcatatatggtgcatatatggtggataaagattgcttaggactctaccccttttgtataaggtggtatgttcacttatacaaaaacctagaaaatttacttaggttctccagggacttaaataacaaatagtttcacctagaggcaagtgaattcacagaccaatgtgaattaaattttcacagaatttactctaggtatatgtggcattaaactgacttgcataatcaaggaggacatgcaaggaaaataatgcacatattttgttgtctacctaacatcttttgacttgtgttcaagaacaagaaatgcattttggatattccatctgtttcagtgctgatt

SEQ ID NO: 58344 - DNA, 1046 bp, Homo sapiens
cgagttgctgggactacaggcgcccgccaccatggctggctaatttttgtatttttagtagagatggagtttcaccattcagcccaagctggtctgaaactcctggcctcaagtgatccacccaccttgccctttcaaagtgctggggttacaggcatgagccactgtgcccaggctggttgttttgttttaatgcaagttttgcggaacctctattgcttccttttgtagtcagttagtttgaattaaagaactgtaatgtacatttgtttgtcccttttatggccgcatagtatatgatactttctaggtgtagggaattccctgccacgtaagtcttaataggaagctaaaaagacctgatactccgttgtcacacctcccttccagctagtgtgcttacatgtggcttggactcaactaatcatttccatgccacagactgaattgggagccagtaacaacaagaaagtagggatatgagagaatggggatatggtgatgtagcaatgacagagcaacatttgtttccagaatatactctagcagtgggtgtttgctatgtctggtaccctgtaacagaagttaagctgtgacatgaaataatcagtaacaatggctgctgtgtcctcactggactaattccatgcatggtcttttgggctgtggtcttggttgctccctggcgtttttcttatttattttctgaccttgtttttctattagttttgcaggctttccagtgattctctgaagtacattatcagttatctattgctacataacaaaatcaccccaaaccgagtagcttaaaaccatgacctttttatttgctctaattatgtcaatcaaccattttgactgtactcaggtgggcagtcctattggcctcacttggggtcacttgtgtgattatggtcatgtatgaccaggattggatggtctaagacggcctcattcacatgctagaaattgaaaggctttctgctgaggcaccttagtttttatccatgtgactcttggtgggctaacttgggtttgttttc

SEQ ID NO: 58345 - DNA, 2036 bp, Homo sapiens
gttccatgttacctcatagtactttttacagttttggttttttatttgccataaaaaaaaaaacagggatatagttttattttaccaaatgactggttaattgtctttgtagttttgattaactggtatctttaatttaaaatgccattatcatatattaaattctagtatatatttgaatctattccttgccagtttttctggatgttttctgatttttatttttccacatgatctttaaaatcagataatctaaatcatcctgcagttttgttgacaattttattgatggtcatattaaatttattttaaccctttctgaaatgttatttttaacttttttccttagactttaagttttgcttattttctgaacctttatctttgtgggagaatggaaattaatttaacaaaacagttatttgacttgttatattacatgcagttatatgatacagaatcatgtgataaaggataaggcaagagtcactgtactgtgattatgtattcatagttcactgcattgaaagaaaaactagcatcttatttttggtaatacttcaaactacctggtcaagagtagagtaaatgccagaaatgggaggaagatagctctgttcacttagaaaccagatagaattccatattccctgttatttttaaaaattacacatatatgaaataatattcatatctctcctaagcaaaatatggtgggggtttcagaatagttttacatttacagaaaaatcgagacgatagtacacagggttcccacattcccccaccatttcccctattattgacatgttacaatagtatagtacttttgttataaatgaaccaatattgatacattgttattattaaccaaagttcattctttattcataattctttagtttttccctagtgtcgtttttatgtatcaacatagtttacatttagttatcctgcctcctgaggctcccctaaagagtttggaagtttgacctagtgctttttttgtttttttttttttgagacagggtcttgctctgtcccccaggctggagtgcagtggcgtgaacatggtttatagcagtctcgacctcctgggcttgagcgatccttctgcctcagcctcccaagtagctgggaccacaggcacgtaccaccatacccagctaatttttcgaatttttgtagagacaaggcctcactttgagcccaggctggtctcaaactcctgagctagagtgatcctcccacctcagcctcccaaactggtgggattaccagaatgagccactgcacctggcctcgatttaagttttttaacatgaaaaaaagtccttaatatataatttttctaaaagccagaaaatgtaaatggagtagacagtttagaagtatattgatgttttaacttctatattcatttctcttctgcattccaggcactttgtgagtgtgccctccagactccttatgacagcttaaaactagggatgttgtctgtcctttccacactatcagggaccatcgccatcaaacattacttcagtatagttccaggtaaggaaaagacaggagataccatataaataatgtgctaactcctttatccatatttatgtttcaggttgtttcttctataaagctttaacatcagggaaaaaaatctcatactccattgcatgctagtgatttatttgaacatgatttcttaactaatgcctatgataacaacatctcgcatccttgatcttaagtcaataatatatttttctaggtttgtccttttttttttgaattatatgtgggtgaaaatatttttgaggatgcttaaaatagttggtttgcttttgtgtatctctgactcaaagtgccctttgaatttaagtacatttcaaaggtcaagtagtagtgagttttaaaagcaaatgtcatatgcttccttttaggtgcatattatttctctggaaaacaattaaaataaaacttgactccagcccaataacactttcctagttacctattcaagatgattaact

SEQ ID NO: 58346 - DNA, 1182 bp, Homo sapiens
ggcgtgatggcgcatgcctgtaatcccagctactttgggaggctgaggcaggagaatcgcttgaatccgggaagcagaggttgcggtgagcctagatcgcgccattgcactccagcctggcaaaaagagcaaaactctgtctcaaaaaaaaaaaaaaaaaaaaggaattctgccctcaagggagcagagaaatgatatggtattgctaaagggtatgctgtttgtttgtttttatcctcggaggagtaaacttgttttttattgatggaaatgacctggtagaggggaagaattgcaacagcaatggccttgagtgggtgagactggaagggatccagtgtagaagtagataggctttctctagttcacatagaataggaaggaagaccttaagaagcctaatgtaggtgaatgagtaggtattatggtaaaaagttatagaaagtctcttgtgatggattttttttgggttttgttttgttaggtaattaggaaacatggtcattaggtatggttaaaaatggaggaggcaaagagaaaggttttaaagaaacacagaaattcaaataaactagggaaatagaggattgccatgtaagatatttgagtaaagcaatatataatgtggtgtctggcacatacaaataaatgcttttttaagggtagctgtaagttatattaaaggtaagtttattctttagtttttcctttttgaatactttgacagattgtagggttggggttgtgctgtcttaaaatgaactgggaagtttctctttctatactctggagtggttaagaagtataacagaattttctgtttctgaagatacaactttaaaagtaccacaaatttatctgaatgtagaactttttccagcgatagttgttttgagaacatttccaatcactacatgttattgtcctgtcagttttttacctcttctggaatcagttttggtcatttgtttcccatttaatttacttctcaaattcattagtatcagcataaagagtctttataacttctaatagctttgatttaaaaattttttttatcttgtacatttgtgtttatatccctttttcctttttcttctttctttctttcttttttttctttgagacagagtctcactgtgttgcccaggctggagtgcagtggcacaatctcggctcact

SEQ ID NO: 58347 - DNA, 1019 bp, Homo sapiens
tattattacacacaaaaaacctgcagtctcctagtttgaagtttcttagccctaaaggtctgtaacagatttttaaattctaagttgttatgagaagtctttatatggttattaaagaaatacttactgaatatccaccatgttcagacacttttctaagttccagaaatataggagtgaaaaaggtcaggccctgttgttatataaacacaaaataatttcagatgcttgttagtgttatgaaaaaataacactgtattgtggtaatggcctaagtgagctgctttagagcagtgttggcatagcccatttggtgctggagtttttgttttagttgtgtttcttaccacctcccctaacccgagcacctgaccttggaatattagttgcagtttggaatattgtatttcttctgcgctaattgtgttttatttcttttaagtccttagaaaatataagcaaatgtaagttttttctgttctctgttctctttttccaaagggattttgctgtaggaatctgtaacaaaatcagtgaaatgattcaaggtatgtattcttcatttagtattatgaagtgacttaattagatttataatagttgctaacactaattaagtacttattatttgctagtcaccatacattcaaataatatttattaagtatcttctatttgcccaaactgttctaaatgctgaggatacaggaatgagcaaaacaaagtccttacccccatctaacctacactctagtcaggggtggggtgtgtggggatagacaaatgtgcctatgacatttctggtgctatggtgaaaaagtgagagaagaaggatagagagtctcaaaagtaagtcgttggtgggttgagagaagggacttatctattttatatatattgatcagagaagggacttttttgtatatattgatcagagacagtctctgatgaggtgatacttgagtgagacatgaaggagagaaaggagtgagccatgcagatatagtcttgcattgctt

SEQ ID NO: 58348 - DNA, 2148 bp, Homo sapiens
aataattaggtgattacatgtcacattggaaggttatttaggatgttgactttgaagaaggttgtcattgtaggaacattgtaggttttgtttactgcagtgttttgcaaatttctaaaatgtatgcctttctgctgaaaggatttttcaaactactttctgtagtttataccacaaacaatagatttttttcctttctaaatgtatgattttattataaagtagactgtgttttccaagctttaccttctgcaccgttgttgattctggtgtgagccccaggggcgtcctcaaccactgctttcttgatcttgaggacatttgaaaatcatcataccaatatttactgatgtgggaaaaaaagattgggagctcttacttttttttactttgtgtatctgcttaacagcaaaaatgttgtattcttaatgctttgctgaaatggacttctttatgcaacattggaaaattgatattttgatgctttaataattcagaagtttccttcctgggctgtttggtacctgggaggtacttcaaggtgattgttaaaaattttgctttttagataagccattttaatttttctgacatattgaaatatgtaaaagcgtttaaaatttgagtcatggatttctaaagttatgctttattaactggagttacatagaattacctataaactttagttttgataatctgactttgccttgcctcttacttttctgaccttgactttattttatgcccgatcttcttgggtttctctgtttctgtaggatgttgggaagtctggcatcaataattcctgagaggaagaatgctcatcatagtattcgtcagagtttagattcacatgataatgtagaagttgaagctgctgtttttgctgctgcaaacttctctgcacagtcaaagtaagcttacaaaagtacatcccttttagtaatttggcttcccaagaaaaatttttgaaggaaaaactgatcaacttatataaacactgagagatacaggaaagtgtaaattacaaggtgtgttttccaagaaggtttaccttatgttggggaaacaagacttaaattcataaaatggaaaatgtaagtacaaatgttggcattaattgtgtaaatgaaatgagtttccagaaggacaggatcagcatagattagttggagaaggcttcattgggtagcagaagctttgttgactgaggagcttctcccagacatatagatctgtaatactaaattgcttacttactgtcttctaatgttaatttgttttgcattagagctgtccacagtttggcaaagacaataacttgaattaaaaccaattttaacctattcagaatgtcatgtcctacactgttgttttacagaacagtattttgttttgggcaggaggattaaatgttgaccatggttttattactatgtttgattggcttctcttctgtaaaagaaaatacagtatctccctgactgacaggaaaagtagcattgccttctggggtgcattttggtaatatgtatgaaaagccttaaacaagtacatccctttgacccaggaaattcacttctagaatttatcctaagataacagcaatatgtactgataattatttgtatggatgctggttgtagtgttacttgtaacaacaaaagaaatgagaagcaacctaaatttcttccattgagcttagataaattatgatcatacaatagaatacggtaacaacttaaaaccaatgtttttagaaacatatttggaagcaggttacataataggttatgtaatataacaggtttgttttaaaaaaccccaatagcttatataatgtaacagatttgtttaaaaaaaataaaagccgtaatatttgtatttatgcaatagaaaaaaagactagaaggatatatatcaaaatcttggtaagatggtatataatttttattttctttttataaatttctctatatctctatatcttggcatgagcaagttccagttttataaccaggtgaataataaattttttgaatcctgaaaagttaactttttttttttttttttttttttttttttttttagtatttattgatcattcttgggtgtttctcggagagagggatttggcagggtcat

SEQ ID NO: 58349 - DNA, 1514 bp, Homo sapiens
tttttaagagatgaggtctgactgtgttgttcaggctggtcatgaactcctgagctcaagcagtccttcttttcccagccttccaaagtgttgagattacaagcatgagccacctatgggttaaacgtgcttttttttttcttatttctaatttaattccatgtggtcagaaaacatacgttgtatgatttcagtccttttaaatgtgttgagatttattttatggctttgaatattcttaactcttacctttaaaaaattttttttcattattatgtatctaaaagtagcgatttccagattactatttcaatataccatttttacttttaaaagggtaatgaattatactttacctgcttcttaagaatgattatttctttactatctagtaaattatatttgctatttttgctttgtagccacaaatatgcaaactgttcttccctctctgtgcttttttttttccataggcctaagatctggcaaacttggtgaacagtgtgaagcagttgttcgctttcccagactttttcagaagtatccattccctattcttatcaattctgcattcctaaagttagctgatgttttcagagttgggtaagtctttttaaattctcgatgtcctaaagtactttgttcatatttcttgttttatattgtggtctttttctttttgccttttagtacttccacctggttagttaccattagtggacacacatgactgtgtgcagcacatcagtgtgagatttaatgacatttaaagcaaaatgaagagtataatttagacgatacttatttctttggagaacagaataaaattaagacaaccttaatattttactgtgtacttcaggaaaatctgtgtctttgtacagattgtttttgagaagtttctgatttaatttaataatttattttatagcatgagatgcatgtctgtgaagtacctgaaacatgtaagcactgaatacatgcctatttgctttttctcccccgaccattccatcttctgctgctttctgccattctccatgcactcgtgctcatatgcacacaataccacactggaaggagaaaagaagttgtggaataagcccaagagaagagaaagaccgtctgatttcctggccttggttataatatagtttgaggagatttagttctgctctaggtcttctccttgtgtcactgccattttggtgtcttgcagcaagactgtagcatagctcactgcttatgcttaatgtccacctaaagtacaaactttaactcttttagtagttaaacaaataatgttaagattgaaaaatatttgtgtgttgctaaaatttaatattattagtgttgctttggttcctaattaaatattactttctaaagtgacctaatttatttctggtttttctagaaataatttcctgaggctatgtgttcttaaagttacccaacaaagtgagaaacatttggagaagattctaaatgtggatgaatttgtgaagagaatt

SEQ ID NO: 58350 - DNA, 1004 bp, Homo sapiens
ctcaccatttctcaggacgccaagctggggctggcggagcaccgaattgaagagcatcagggtcggaggaaaagcctcagctgagagaaaagtcgtagaaatgcctccaagttcagcagaaatcgcagcttgcgcctctcacaacacaaatcgttatcgcctccaactcccgccactgtaagccccggccgccaaactccgcgccaaactgacgtcacgctctctgattggcttccgagcgacgtccgggcgcctcagagtcatttcccccttcggatccccgcctccttttctcccagccgcgggaacctggagtccaagagctccttgagcgcctgcgcagggggtagcagaggcgcggacaaaccgcggggtgaccagggcgcatgcgtaacagggcttgacagcgcgcggaagaaaaaccagcaagaaggcggcgggggaagatggcggtcctggggtagagtttgcaagctttctgactaggctagtcgagtaactattcgggtcatggcgtcaaactcaactaagtctttcctggcagatgccggctatggcgaacaggaactggatgccaactctgcccttatggaattggacaaaggtattcgaaagagagggctgaatgggtgaaacaggcgtggggggaagtggcgccaccaggtggtggttgctttgggagaagacggataggcgcatgcgcatgtcttcgctgggcggggagcgcctgtgcttttgctggggcgtgggctttgaccccttcgggaggttgcgggaaatttgcaggattgtgtgactggccttataccggctaaacaagtagcgagctctagtgagaggcccgttttgaccacttgagggagcagtcccccgattttctaagcagtgacagtggctagtttctaagagacactgcaaagaaattgtgaaattggttttcagtctgttcagttgagaccaggtcttcatgaaatgtgctgaatagtaatcttgcaccgacttga

SEQ ID NO: 58351 - DNA, 4264 bp, Homo sapiens
gggaaatgactctgaggcgcccggacgtcgctcggaagccaatcagagagcgtgacgtcagtttggcgcggagtttggcggccggggcttacagtggcgggagttggaggcgataacgatttgtgttgtgagaggcgcaagctgcgatttctgctgaacttggaggcatttctacgacttttctctcagctgaggcttttcctccgaccctgatgctcttcaattcggtgctccgccagccccagcttggcgtcctgagaaatggtgagtaacggtcccaaccgctgctcggagctggcggaattcatttcccccgaaacacacgccacctccgaccagggccgactccaattctgaactcagcttctgagttctcccatggcaagggtaaattagtgttagcagggactactaaagaaagctgtactttcatcccctcgggacacttgtaatcgtaatcgggcttttaaaatcgtaacgtaggcagggacgtcgaaataactgccttccaaggccccttacagcttacatctccattgcgcgttaacgggaaaatgcatgcatttgtgtgtatatgtttccttcaacggttatttgagatgctcaaaactcctaatcattgattaattcattcgtttgttgtagaatcttagtgagcccagctatgtgctataggtatataccagtgaatatgacccgctgttaaggaactcagtcaagcagagaagacaggatatctgcttctaacaggaacaaaatcttattttccccgtttactacacggtcataaaaatttaaattatagagtgaaagatgcctgtaaccacatccgccagagatgacccctgttaatagattgaagtatattattccagatgttttcgacgctagaggtaatacctattattttcagaaatcggatcaaaacgtccagttttttcactttaatggtataagttgaacgtattcccatgttaatacgtagaaatctaacttattttcttacgctaaaacattggcaataagagatttgaggttagatttggatgtcatcaacttaaactttttggtaagtttcagataagggagctaactacccagattaaccttggacagaaataaaatctcactcatgtgaaggtcgactatagccagaggttctttttccccttgaaactatgtggaaaacgaacctgagaagggaatttttatattcagcgatgagtctaggaaaataatattgagaaagagactgagaagtagtccctcaacttcctgctagcagtctgaaactttataccatccttatttatttccctcttagataatctttgtaattatacttaaatgctcctctttctgtctctcctgggaccttgtttgagtaacttctttgtcctctgtttaagagtgacagtacgcacagtggctaagaactctgtctttgaagttaaactgcctgggttttattatacttccacaccttactatatgtgtgttctgggggagctgttcagcctctattttgtgacagattttctcctaattctccatgtgtttacctttcccttccctctttcctattctcaagtactcattcgttgttacataatagtcactgaaattcattcgttattatatgaaatctatagaatcatctcctttcctcttcagtgttggtgttccatccttgaccccttttcttcttctacctactcctttggatgatcacagccacaaccagggcttcttccacttctacatacatacaaccttctgttacttatatagtaagtcctcacttaatgtctagataggctcttggaaactgtgactttagggaaaacagtgtataactaaactaactctaccataggctacttgatataaataagaattgtttcagtggcatattttggtcacacaaacaccaccgaacttctaaagaaagactcaaagtacttttaatattaaatgttgaaataattgtgtgctatacatatatttgagaaagattaataaaaacaggtgagataattatccaagttttggtgtatcagcgagtgacctcggtcatagtggtggtgggctaaatcaaggaataaatgtttgcaaagtgaaaattggaaggagcacctcctaccaccacccaggtcaaaaacaatcacaaatatggcagctcactgagccctttcataccaaatcgtttattgtcattcatttgtatgattattgtaaagtttacccatttttattttacaatgatttgtattcattcattttctgacacacttattccagctcagggctgtgggtgcccggagcctatcctggcagctcatggtacaaggtggaaaccagctctagaccagacactatttcatcacaggaagcactcacacacactcattgtctactgggaccatgtagacacaccagtgaacctaacatacacatctttggcatgtgggaggaaaccagagtacctggagaaaacccctatgaacatgggaagagcatgtacaaactccacacggccaatggcctcaaacaggaattgattttttcctcatgaacagtataacgaaatgacattgtacaaaattatgttattggaagacttcctgtacctgagattcatttctataaaagctgtgtgggttgattagcacctagacggtcaatcccacaagcatctcaaactcaaatacccaaaactgaactcagcttttcccccaaacctgcaatattaccaattttagagagtggcctcattatttaaacctgccagaaacctgagtaaattaaagacttcttcatcttcctcacagttacacattcaaaacatttcgttaaaatctcttgaatccatcctctcttctttatctgttatgattatgcatctttactgtatgctggatgtgttctatttttactattccatttccctaggttgggccctaatgccttcttgtctggattgtaagaagtctcccagatggcctcctagtttgtctgtcttcggtttattctccacattgctgctaatgatccttctaaaatggaaatctgattactcttctgtgtatttttaaattgatatctaaaagtttttattataaacttaaacaaatgcaaagaatataatttctgaccatattgggaatattgacattttaaaaataaaaatgctatatcactcctttaagtgtatctaatataatttaaatactatagtgatttgataatcacatcatccattttttagaaaaatacaaactcctctttatctgctggacattccatatagctgctttttcctcttgaatttatttccatttcatttctcctacagaatttctcctaatgtaatttaattttatgcttgaaaagctcttttactgatcactctgtcatacccttctgtgtcaaaaaatgtgtttaaattgctgttttctgtcataagcctccaagtattaaaacttctttatggattgaattttcaattcaattattagtactatatgattgattaaaacaatatagattaccaattttgataattattaaccaaaagtaaaattttattggaagtccatctttttaaagagatgaatttgggtgtttatggtccctttattgaaggaattatttaattatctcttagttaaggttccaccagtttatttgtttttatttaaaaatatttgatacccaaaagtttttattctttggatcagtgcaaggtttaagattggggcacgggaatgcctttcttttataaagtggaagaaaggaagtgatgaagggaaagggaaaaagtggtacctcaaccttctcagagacatcaggtttttcagacaggtgagttttagaaatgcgtatatagtcatccaattgcttataaatggagataacattttgagaaatgcatcattaggtgattttatcattgtgcaaacatcacagagtataaacacaaagctagatagtgtaactactacacacctaagctatatatttttcctaggctataaacctgtgtagcatattactgtattgaataccgtaggcaactgtaacacaatggtaagtatttgtgtatttaaacatagaaaaggttcagtaaaaataggatataaaagataaaaaatggtaacacctgtggagggtgcttactatgaatgggagcttgcaggactgggggttgctgtgagtgaatcagtgagtgagtagtcagtcagcacgaagacctgggacatta

SEQ ID NO: 58352 - DNA, 1238 bp, Homo sapiens
cctgacccactaccactagccagggctaattaaatgttttctaggggtaggtacataacacttcactttacaatttctctaatataatttaaggtactataattgctgctattgacattttagattcctacaatttcagcactaaaggaaaacagaagtaaatttggtgaatatgttactggctatagtagctgcattgacatattattttctttggctctttgaccattggattttgtatgatgttctggaataagaatttaattgaaggggatagcagttttaatggaatgcttttgtggttgtctctttggtaggagaagggggaagatctttcttaatatgcagaggcctcttgtttcttctaatctcaatgtactagtgagagtctccattttagatagtaagcccaaagctatacctccccagaagttggaagtgctctttcattttttccttaggactccttaatgaaataacagaaatggtgtcttccatagatattaatagtaagtggatctatgttaatatctaaagtttcttaaggacaaatatttacctctgaatttgttaaaaatgctgaaatgtgatgctgtattggaattctataaggaattatcttgttttaggatggtcttcacaataccctcttcaatcccttctgactggttatcagtgcagtggtaatgatgaacacacttcttatggagaaacaggagtcccagttcctccttttggatgtaccttctcttctggtaagagaattactatctaggcaaggcttggacagaaatgatctatttcacacttatagggaaaatatactagagtatttccctttcaaagaaaagtaaattaggtggatgttagagtttttgtaaaaactgttatcttctgatttataaaatagacttttcttaatctctatacatcattagcataactatatttcctctaaagcataggactattatagcactatttttaaaaaatcaatataaggaaggggttgcaaaggttcagctactatgaaaactgttttatccagtagatacataccctttgatctggttgaatgtatctttctgtgactcattggggaatatatgaacagaaatagaagtacttcagccaggctcagtggctcacacctaaaatcccagcactttaggacgccaaggtaggtctgggcacagtggctcacacttgtaatccccgaactttgggaggccaaggcg

SEQ ID NO: 58353 - DNA, 1045 bp, Homo sapiens
tttctaagtttgagaaaggtaggtttgtgcttatcttctttcatctccttaaccttctttgcagttgggagataagaacctgtaattgtttctaccctttcccctgtcaaagttactgctttacctacatagatgattaagattctttttttggagacagtttcgttctgttgcccaggctggagtgcagtggcgccatctcggctcactgctacctccgctgcctcccaggttcaagtgattctcctgcgtcagcctccggagtagctgggactacaggcgcacatcaccatgcccagctaatttttgtatttttagtagagacggggtttcaccatgttggccaggctggtctagaactcctgagctcaggcaatccacctgcctcagcctcccaaagtgctaggatcacaggcgtgagccgctgcacccagccaggtgattaagattctaacatgactgaaaaccttaataaaattaaattggttttaggcccactcttctggacattatctctagcttgtccctgaaagtcaagagtctttgataagtttttctgtaatcttgcacataaggtaaagatttataaacagctacaataccattgttcaaccttgattgttcattgaagttaaaaccttgtactgggcactcattaactatttgtaaaacagagttactttaactctgcttgtaaaatctaaatgagctataaggctgataaacaacataatttttttctacctaaaaatttatcatgtatttggtttaaatggcctgttttttgttttttgtttgtttgtttgttttttgagacggagtctctgtcacccaggctggagtgcagaggctcgatctcagctcactgcagcctccatcccccgggttcaagcaatcctctccctcagcgtcccaagtacctgggagggattacaggagcctgccaccacgcccagctaatttttgtgtttttagtagatctggggtttcaccatcttggcgaggctgatcttgaactcctgacctcgtgatccacctgcctcgg

SEQ ID NO: 58354 - DNA, 1885 bp, Homo sapiens
cccaggttcaagcaattctcatgcctcaacttcccaagtaactgggattacaggcgtgtaccaccacgcccagctaatttttgtatttttagtagagacagggtttcgccatgtcggccaggttggtctcgaactcctaacctcaagtgatctgcccgcattggcttcccaaagtgctgagattacaggcatgagccaccatgcccagcctggcttggacttttaagaaagtcggttttaatttactgtggttgcagttgaaactggaaccttgaaggggaaatatggcatgatttttcttatttctgcataactttattaacatatttaagtagttaggtatgcttgtgttctagttttctacactcttgtgtcatagttcactctgagtttgtaaacataattttaagataatgaaaatttacctaactaaagagtagtggaaaacatatcttttggtccttttgcttaatttttacaactctgcatgtgaatcagcctgtgacaatgagctgtagaagaaaaggcactgagttagagattggggcaggtggcttttttcatgattttcagtagttcataggtactctagtgtaaattagtctgatcggatactgctcccaagccctgtggtttgttttgttaaaacagaatagataatagctccactcactccatcagccataagccctcttgcagggcaaacctttgcaactaaacatggaagccctctgttttattctggcctcctgggcaaagtgattttaacctccttgggccttcattttctaattttatgagataaatacctagtctatttaggtcacaaaaatattgtagacataaaagtgaggtgaaatatgaatacttttttttttttaatctgagctcattatggtggctcatccctataatcccagcaacttgggaggctgagaaggattgcttgaggccaggagttcacgaccagcctgggtaacatagtgagaccctataagaaaacagaaaattagcttggtacagtggtatgcacctatagtccgagctacttgggaggctgaggtgggaggatcgcttgagcccaggagtttgcagctgtagtgagctgtgattgtgccatcatactctagcctgggcaatagagtgagacccagtctcaaaataaattaattaaatcaatcgatctatctataatcaatcagaggaccatataaatacttagtgttttgtgggggtttttgtaggtagtatggtagaaaacatctttggtccagttccttccaccctacataggtaggatacaaataatcctaactggacatagtcacactaatggaatttgccttccctaagtatctaccaactaaaagcaaagaaaatggactcagataagtgctttgtgtggcaaaagggcaggtattagaacttctagtggataattaaaattgattataaatttatttcctctcctacaaacttacctatatttacaccttctttctcattcttcattctcaagttttaattaaatgagaatctcttgcaagtgggccaggcatttattttttcaaagttcctcaagggatttcaatgtgtagctaaaattgagaaacattcttgatccttcccaagaccttccaccatcacatgtatccccactaccctgtatcttcaagttctccctctctattggctgtttctccttaggagaagatatttggcctattttcccaaatatcttaaccctgtgttctcttttagttgttactgtttcatattttccatctcctttaatttggtttaatctattttccacatctagccctcttcctgaaatcactcttgctaaggttattaattatctaattatcagaaagcacgaaac

SEQ ID NO: 58355 - DNA, 1213 bp, Homo sapiens
tatttaacttttcttatagtgtgagtctgatggtaataatttaccttagtttttctttacctgaaaatgtccttatttcatcatcattctcgaaggacatttttgttggatatgaaattcttttttttttttttttttttttttttttttttttttttttttttagcccagaggtcctttattttttttttttaacacctattatgccatgaattcatagggaataggttccagcagctcaggctccttcccattggttctcacaaagtgtgcttctctgggtggagcaggctggcgctttagttgaacccaggtacctttctctttggcttctttctttttctgatcattttccttcacacgtttcaggaagctatctcggctcttagaatgcttaatgtgctcaatacgcacattaattctcttggcaagaatcttgcccttaacttgtttgtttacaacaatgccaacagcatgctgggtaacattgtagactcttccagttttgccatggtaacacttgtggggcattcctttttgaacagtacccgttcccttgatgtctacaatatcacctttcttatagattcgcatatatgtggccaaaggaacaactccatgttttctaaaaggcctagagaacatatatcgggtgcctctcctctttccctttgtgtttgtcattttggcgaattactggaagatggcggttccggccgaaaagaagctggatatgaaattctgggtcaacagcttttttttcctttcattgctaaagttgttccactatcatctctgctttcattgagaactctgtggttgttaaaatcatttccctgtatataatatgctgtttttcctgactattttcaggattttttgtctttggtttctagcagtttgactgtggtatgtctagtcatggttcccttcacagttttcctgtttgaggcttgttttagctttttgtatttgtaaattcctttttactgaataggaatttttctatcatttcttgaaatactttttctgggccaggtgtggtggctcaggcctgtaatccaagcactttgagaggctgaggcaggcagatcacctgaagtcaggagttcaagaccagctaggccaacatgatgaaatcccatctttactaaaaatacaaaaattagccaggcgttgtggtgggcacctgtaatcccagctactcaggagg

SEQ ID NO: 58356 - DNA, 3541 bp, Homo sapiens
agagagaacttaaaatgttcccagcacatagaaatgatgaatacaaggtgatggataccccagataccctgacttgatcataacacattctatgcaggcatcaaaatatcacatataccccataaatatgtaaaatactatgtatcagtaagaaaaattgcatgttttcattcagtttccacagagccctcaggtagctgtttttgtgttttatcccatgtacaactaatgcaagtggattagtttaagtgctcactctttcacacaggaagcagggtttttttctggcttaattttaaagaataaaacattacagataaattgaagttctcctatagtgccttttccaatcccattgcatcccaggcaacctctttaacaaacttcatatggatctggtccatatttttatactgagccaatacagtttagaggtttggagtgtaagctctggattcatactgccaggaatacctttacaagttacttatcctctctgtgcctctcttggtacttacctaataaggttgatagcaaggattgagataatttttataaaacacgcgggatagtagctaacatttagaataagaagcactctgtattttgactcttgattgttattcttattacaactgtactatatattttatatgggttttaaaaaatttacagaggggtgattctatgaagttttggttcaacattagcatctcaagctcttcataatcctttttcctatttgttattgagccatatatttttaaatgtttgatctccagtgacagatacagtacctagcacataatagatagtctacaaaatgtaaactgaaatatatgtgtcattgactggttttgttaacctcttaataatctgtttatttccccacagctgtattctgtacgggtggaagagatggcaacattatggtctgggataccaggtgcaacaaaaaaggttatctagatctattttaattttgagagatttgggattaccctgtacttaattttgagtgaaagagttagtgatttcatctgattaccaccagggggcatgtactcataatttcccatttctgctcactgttccagatctcaggatcttcactgagtgtcctgagtgataaatacatgagtgtcactgttacaagtattacactcatgtatttatctcatattgtcttctgaattataatgccatttacccacattattgatggacttaaaaatattaatacgcagcctcactggtaaatgtctttattttggtttttaagaattttttttattttattattattattttttttttttttgagatggagtctctgtcacccaggctggagtgcagtggcgtgaacttggctcactgcactccccacccgctgggttccagcaattcctctagctcagcctcctgagtagctgggattacagccacccgccaccatgcctggctaatttttgtatttttttaatagaaatggggtttcactatgttggccaggctggtctcaaactcctgacctcaagtgatctgcccaccctggcctcccaaagtgctgaaattacaggcgtgagtcaccaggcccagcctgattttaaagaattagattgaattaaacataagctcatggttgtctcatgatgctattaagcagacgatgattatctcactgttcacttttagttaatttattaaaatttttttttgtgtctgcattttaaaaaattggtaacatagttctacatattttcaggggtatatgtgatatcttgatacatatatagaacatgaaatgatcaaatcaggataattgggatatccatcacctcaaacatttatcttttctttgtgttgggaacattacaattcttctcttctggttttttgtttcttgttttttttttttttggagacggagtctcactctgtcacccaggctggagtgcagtggcgtgatctcatctcgctgcaacctccgcctcctgggttcaagtaattctcctacctcagcctctcaagtagctgggattacaggtgcatgccaccactcccagctagttatgtatttttagtacagacaggatttcaccatgttggccaggctgatctggaactcctgacctcaggcaatctgcctgcctcagcctcccattcttctagctattttgaaataaataataaaattatttagaaaaattttaataaaccttattttgtagagcagttttaggttcacagcaaaactgagcagaaagtacagagagttcccatatagcccctgccctgcccacacacagacttccccactgacaacatcctgtgcctgagtggtacatttgttataatcagttaacctatgtcaacacatgctgtcactcagagtttataatttacatcagtgttatatattcttagtattacacattctgtggatattgacaaatgtgtaatgacgtgcgtccaccattgtagcatcatacacaatagtttcactactctagaaatcctctgtgctccagttattcatccctacctccctctaagccctggcaaccactgatcttattacttcccccagtcacatttcctccatgtcattttatggctttatcaagctcatttctttccagtgctgaataatattccattgtctggatgaaccaaagtttatccattcacctactgaaggacatcttggttgtttccaagttttggcaattattaaagctgttataaacatctctccctttttatacattatagtctcaccacaggagatgtagtgcagctggctctgctggcttctaatttcaccaacttggtcaaaaattacttaatattgaagttttatttacacatgttatattcagcatgtaagaatcctgaaacctaaatttccttggaatatctttcagatgggttttataggcaagtgaatcaaatcagtggagctcacaatacctcagacaagcaaaccccttcaaaacccaagaagaaacagaattcaaaaggacttgctccttctgtggtaaggttttacagatgtatacatgtgtgcagatcttatctgtaggatagaataaatgggaggctattgattaagtgaatgagaatcttcatgattctcatttgatatcagtggtttattgcttattcagtacctacatttgtggttctcaaattttaatttttggttcttctgaattataatgccatttacctatattattgatggaattaaaatatatgtagcctcgttgataaatatctttaaatttattttggttttaaagaattagattgaattaaacataagatgttgtctcatgccattaagcagaaagtggtttttttttttacaatttcaatatctacattttaaaaaattgataacataattttacatattttggggggtacactatgtataatgatcaaatcagggtaattgagatagccatcacttcaaatactgtgtgcatcagagttgcctgaggcacatgttgaaaattcaccttactcatcccta

SEQ ID NO: 58357 - DNA, 1348 bp, Homo sapiens
gcctggccagcttatttttaagcatttgacaaaatattgttaaatatattgagaaacacatgggtagaacatagtaccactctaataacttacagtcagagctcaaacaatgcccataatatatcctttttctttaaaaaattgccctttttctcactttaatgtaatttttttttcatattcctggtgtgtagggtacaagttaatattttgggggaagtatgactgctaagacattaagacttaaaactatacaccgtgaacaggacacaagcatgaatggaagcagatagtagaggccatatgaagttaaaacgagtagcatttcagacatttaatctggttctgagccaagataacttgttaagtaatagcaattaggaggtacgactccactgggcctctttttcagggcatgaaataatcttttattcataattcttttgatactcctatatgataatctaggtagacagcaacattttagagattaaactggcacaagaaagttaaataagtttcctaaggatacacacagcatattagtagggctgagtctaagtagatgcagtaggctcagacgagcaaaatcttttagtcaccagtttgttttttgagtataagttgaaatattaacactgtatactaaaacttaatgatccttgctaaaattacctcttggtcagcatatatatctgatcgagatcattagacaagacttcatctaagtcagtctggggagaaaagtcgttttttagcaccttgttcccttgatggtaaagattatgatgcccaagatagaatcttcttcttttcttgtgctatcaggatttccagcaaagtgttactgtggtcctctttcaagacgagaataccttagtctcagcaggagctgtggatgggtaagagtctatttcttttttcttccgacgagatcttttttatgagattgtgatgaggcagtcacatagtctcattataattgaatgtgtgtgctttcaactgtcaacatagcaagtaccccaactgaggaaaggagctatagatcacattggaaaatacctagttgaaggactcttgctggataattaaatgaaagaatacatgtgtcacgcttagcacattgtctagcacataagagcagtggtagctgctgttgctatcttagaaaagaagctggctgggtagcttgcttgccttatgcaatataatttagtcactaattctcattttgaagagtaaaatttctgttactttgggttttgtctttttcaggtttaagaatatcctaaaagaagaaatctgattctggggatgtaattgacatttctgggagtaatctaactag

SEQ ID NO: 58358 - DNA, 1197 bp, Homo sapiens
aatcacatctgtttccgttctgtcagaattataagcctgatattggagacaacagtataagatactttaatttgtttcccaatgaaatatccttactgtacctagttaatgtgccagaggagttagattaaaagtcatttcacatttagtgtagttgaagttgtttggggttggaagaaggtctacaaaatatttatttgccttggtttttaggataatcaaagtatgggatttacgtaagaattatactgcttatcgacaagaacccatagcatccaagtctttcctgtacccaggtagcagcactcgaaaacttggtaagcctttaataggtcttttgggggagataagagtttttgtttaaaaaaaaaaaaaaaggctaatttccagtaacattgatatgaaaaattctaatatgtgaagttcaaaagataaaaactcagaagaatgtttttggtttgtgtatattttggggacaaagaattctgatgatgattcttatgaaatgatctatttttgtctctacattttaacctcagatctactcaccatcatcaggacgtgctaacttaagtttcctttttccaggatattcaagtctgattttggattccactggctctactttatttgctaattgcacagacgataacatctacatgtttaatatgactgggttgaagacttctccaggtaagatattagtcattcaaattctcttaccaggaaagcattatgggctttttttggtaatgataatttaatgggctttcttctaaactgaacttattaagccatatgaggactttggcatctttgattacatccagtgataatttcataagtgtacattccttgtgatgatttcataagttagctgaattgtgctttacatggtgactttattttaatagagagtatctcctgaaattatgccctttggcctatatttagaattctctcaattttttatttaataagctgtggagtagataaagtgcttctgctcagcttttttcctctttaggggctgctggttaaaattagggggctgaaattttcatacccccaaaatagtttcagcctatctcagccttctccttaatgttagaggcccttttatttctagatgttttccccagcctcaccttttttttttcctcaaaactttaaaaatagaatctgatacttaaaact

SEQ ID NO: 58359 - DNA, 1485 bp, Homo sapiens
ccttttcatggaacaaatgtttgaggatctactctgttcaaagcactataaagtctagtgaggaaaaagtaagatataaaatttatcctcaagaggcctgaagtctaaggggaaattagatgaatatattatgcagtggaaaaaatcctaccctgggctggagagagagggtcttataaaggcattttactgcaagttggacattggctggattctttttttaaggaatgttttccctccaatttttttctcttgatattgccattttcgtaccaagtactcagactgagttcatgagattggatctaatataaagcttccttctagggttttgtttttctgccaatgtctagttcccttgtatttgatggataaagctagatcatctgcttcaataggcaatacagtgataaaacttgttagaatatatatgctgtctatatccatttgaccactagaaataacaagagccaagtaatttggtttttttcctctggcagtggctattttcaatggacaccagaactctaccttttatgtaaaatccagccttagtccagatgaccagtttttagtcagtggctcaagtgatgaagctgcctacatatggaaggtaagttgctaaacttcacccacaagtgttagactgaagtattcttgcaaatatttgttctgtccaatatgagataagtttaatgtaaccacgtgctatactattcctgcatcagatatttagtaaaggttgctcttggctcttaatatagctgaaaccttactctactacagaatgtatgacactttcagggccatagcttgtcagaaattgacaatttgtatcctctgtttcaaaaattattaggaaattgagaattcagagggtgataagaaccttaactactttgtcctgcatcctggaaaacatgctatactgactttctgccctatgttttcaaactctcgttcagaatacagtattttgatccctaggatcctgtgcttgaatcacccatggagccttgcacaaaacagaaactcaaaaatatttttatgattaatttattctttattctctccttacaagtagctgatcttcaggccactaaagtagatatggctgctttatcagatttttatatatttaatagcattatttactaatcttttttttttttttttttattgagatggagtctcactctgtcgcacaggctggagtgcagtggcacgatcttggctcactgcaagctccgcctcccaggttcacgccattctcctgcctcagcctcccgaataactgggactacaggtgcctgccaccacgcccggctaatttcttttgtatttttagtagagacggggtttcaccatgttagccaggatggtctcgatctcctgacctcgtgatccgcccaacttggcctcccaaagtgctgggattacaggcatgagccaccatgcctggccaataatcttttaaataacttt

SEQ ID NO: 58360 - DNA, 4152 bp, Homo sapiens
tatcaaatcccttctcaagagaaagttatatcattttttatcctgccaagctctagaaagtaatattgctaattttttttaggacaggggtaaaacctgtttagtatgaagcataattcttcagcttaatttcttccaatcctgagggaagtacaaaagaaaagtgatttctatataactggagttgtgaaaatgcaacactactttattaaaattttactaacaatatcctaaatagtcacagggtggaaatattgctctatccaagatgcttctatgttgggcctgcctttttctacaagcatatttctttcttttgttatatttttaaatgcctataaagtatatacttgactccatcacaagatggagtttcctctttataatattcttcttacttgagattttaagtttaacaatgttatgtcgctggcactaatgctctgtcttatatttaaaattttcagtttcaaatttggtcttaatgcttattttgctacctttttcctttcttctttgctcactgtcttgcctatgtttccttctccactttggctcccaacttaactagaggattttattcctaccacaggtctgtatcttttaaggtttgtttcttgttaaaaaaaaaatttttttttccaacatcacaaaaagcatataagaataattcaaaaaatacttatgtattgatcattcttgttaaattattaagttttaattatatgtacataattatgtatacaattacatgtgtgttgtatagtttcttgatagtttttaaattcttaataaatttttaaattatatatatacataattatgtgtataattatatattatgtgtatcttgtgtaaagttttcttgacaattgttaaagttccttcctcttctctagtgcaaaggcctttttaagattttgtttcagggaatgaaggttgtgggaatacttgcctttaaagatatacactaaatatagttggccattgtttctaagccattttcagacaaccaatcagtgtctaccacatacaagggttacccttttttaattcctaggctgggtcacatgtcagtgttgaatgacgtggttcagacgtgatgttcttctgcctgtccacacataactcggtgtacaggctctgatatttgagatcctggcaagcttgcacctcctaaatttgaatttgcctagtgaggtggctcagtttctcttttccatgattaaaaaaaggaggagtggtattttaagagcaattccattcaagctgagtatccaggctgttagattgctcttctacgtgttcaaaaagtcagaattctcttaagtattagaattttttctatgctaaaaagccaaaagcccatgggcacaagaaaacaaaatagaagggagttttgtatcttaagacagaagagaatggcctcttaatcctcactactgcccagcaaagaggaaatataatatattcgggctgatattgaggcccaagacttaaaaagatttaatattataccttttctttttaatttcctaactattgtctcacccccaccccatcctcttttctctggtttgtttctgatatagccactgaatagcatcgaagtggttataaataaactgatttggcatagtcattctaccactgactggtgaaacgttgagcctgacactttaggaagtgtaaatgatctcatggcagaaataaagattagacttggtttccaactgggcagagaagagattttgtgaggaaaagtgctgatattctttgtatgtttcagtacacaaaataactttatgacatctgtaagttagagccacttacttctagaggtaccttcttagttctaggagatttaactttgggattccttgtgccttgaattaaagtctttattttacaaaaagtagaatatgtaagagaggacagtcttctgtgtctgagcatctccaaaatgcatggatataaatgtctcttagacttaatagtcgccttcctacttaaaagggaaaggaagctttaaaaaatgaagttacgtaattatgatagtgttcttataataatgtagggacaataaataaaaatttatttgaataaaaatgaaggatttaaaagccacctgaatctcattagaaggaatgaatctttcttgaagtagtcatactataccctaggatagtcctaaactatcaaagcataaaagttcataaaaacgtgttagacattagtttctcattttaacccataacacgcccttcctcccatttttccttattcagatagaattcatataacatataattcaccattttagtcattttaaagtttacaatggagtagttactattgtaatcacagtgttgtaccaacatcaccactatctaattcccaaacatcatcacaccagaaaaaaacccgtgtcctttaacagtcactctctaatcccctcttcctccccaacacctgctaaactacattcagtctctatggatttgctattctagacatttcatataaatggaatcatacaaaatcagcattttgtgtgtgacgtcttttacttagcataatatcgaggttcatccatgttatagcatgtgtcagtacttactcctttttatgactgaataatatgccattgtgtggatagaccacattttgtttattcattcatcagttgatggacatttgagctgtttccattttttgacatgaataaagctgctgtgaacatttgtgtataagttcttgtttaacataggtttttaattctcctgggagtgtaggaacagaattcgattcctaagaatagaattgctgggtcatataattgtttaactttctgaggaaacttccccccacttttaatgctatgtaaagtgcctggcttagacttttactgtcgtcattgataccttgttaacgtattccaaaatgtttttctaatgggtctctttcttttttctctgaaaccctatagataaatgcaaaaatgtgcatatattctattggtgggtatttagggggttttttgaaacttattttaacccttggtgtacacatttaggttctcctaggtattataatacagaaactgagaaaggaccaatatcatgaaattaaaaagctataggcaataagcagggtgaatcaatggaagacaataatgtatttctaccagggatgctcagtaggacttgaggatttcctctcccttctaatttgctgctaccagacctgtttggaccttgggtgaagagaaacttaatcgactggggccatcccaaacagaggaggaaaggaaaatttctgtgactactgggatagttagagacgatcttcaaagtcttttctaaaatatgttacattgtgaaagaatgaattatctctgtgccattgtaggagtaggcagtaagtgagattcctgtagatgtggaaaaagcttcctttctgataaattttaattaactctgcaagacaagttagactctgctctttgtcttcttttgcttttttaattattgcatatgtaccatttaagccaagagaggagtattaatgattgagttgaataaccttatcagtcagtgtgtcagatctcttaaccataatctgggggaatctattaagtttacttagtcattctcacaaataatcattccagagtcacctccactttcttcatacaaatgagccatgattcagagcctcaggaaaatgaaaagagaataacttctctcagccccaacctccttgctcttttgaaacacacatgctaataatagttatgtgtgtttgtactcgttattgtgctgattaattcccatggcctatgaaagagattgacatctcttgaatgagtcagctgtatgatgctgtcaaatgtacataactggtggcatctgatgatggaaaaatatgattcttagtcacatgtacaggacagtacaatgtgacccttctttctgcattaaaatatattaaaatgcgagtgacacttacttgaaaattcaaaacttctctcagaaaattaactgaaatatagttttagaggaaaaaaatgtttttcagaaaggataccaaagtgccatgtaaaatatagtttataccccttcagaatgaaggttatccaactcaaaatga

SEQ ID NO: 58361 - DNA, 1424 bp, Homo sapiens
ttcttttggaaggaagaccatcatcttgtccgaagagagctggtagcatgtttcagaaatcttcaggtttcacagttaatttagtgttcctagaagtagctgactagggatctgaagatatatatgctgtgtaaaaacaggactgagttgtcgagttgactacttaaggatggataacatccttccagaaagtttaccacctaaggaataagggacaatgccagtcttgaattttagtcaaaatatatatggctaggttgtcctgatatgaaataaggactatccttgtgtgtaagctcatgttatttacttattttgactgttttcattgtgttttctcagattagtaacagaaatatttcattgcccattggaaatctgttgttttttttttcctaactatagctaggcaggtctagtggcctttggtaacaatcctaaagctctctaagacacacttctgaattcaaaggcctctatctgggaaatctaatattgctttgctgacttgtttgtttttgattggactaggtctccacaccctggcaacctcctactgtgctcctgggtcattctcaagaggtcacgtctgtgtgctggtgtccatctgacttcacaaaggtttgtaaatgaatctctatagttggtttaaaatgtagatcacaggtttgtaggtttttctaaggtttgttttgagaatgatataaatttttatgtttaagttgagattttaaagacctaaaggccatccaggatctatattcacattactcaggcatattctgcttttctctacccataccataatggtattatgccctgtgaaataaggatagatttctggttccctacagttatttctttcctaaatgtaggattaagttgttaacttaattaaaattttctattaaaatctaagataaaaatacaatctaaggtgagaactagtcttttttactttttagatattatcaatgtagtatattaaaggtaacatcttgacagcccaatttgggttttcacatatggctaacaaaatggtaactgtgaagtcttaacatgttaggttatctattgcttaaactatgtaagtaggtctgaaatgttttagatactccagaaagaagacaatatgcccaccttttaatttttttatagtgacactttaagaaacaaaaaaaccctaaaatgtagaaaggccagaaacattaaaaactatgtatctattggaattgcatataatagtagctcaagttccagtcattctcccaaaccccattgcctctggtctttgagttattctgggttctacaggaaatcttatttctgtggaggtctcccctttcacgtatgacgttttgaggttttgttgcctattgttcccatctgttttttatcttccagaaacttctcatggtctggtc

SEQ ID NO: 58362 - DNA, 2076 bp, Homo sapiens
tccatttgattgtggttactttgggcaaataactttattcccattttgcatatgagattatttgagtacaaagcttttagagtgtgagaattaaataagataaagaatgtaaactaccagacacatagtaggtgctctgcaaataactattgttaataaactatagaagaactgtgagattccaaacatttcatattgaacagttaaatatgtgtatcttcttttggcctcccagtaaggaaaggaaaaagctgccagtctcttgggggccaagacttaagagaacatgtattctttttttctttctctttagtgactgaaatagagaaattatataaacaaatgctggggaacagctctggtaccagtggccatttgccacaagctcttcaagctggactttctctgccataaaaggcttgggaccaagatctagaatagtcagatatttttaaagggacaaaggttattttttaacttctttcagcctagggaacttgttgttttcccagattgctcctctacctatctgaaaaagaatctcaaaaggaatggtttccttctacttgtcacagcctactagagtcatgggccaagtctgatcttgcaaatggtgccattactttagcaatgtggcacaacatgcagaattcagaagaaagttgtagaaattgaatgttggtaacatatactgattgatcatttaacagaagagtaaaaagagtgtcttaactacatattttgtatttatacagaagatgataaagagccagaactttagattagataagaaatgaccagtaacaaaagacatactagtagaatgtatatgaagaataaactaaagagtcagctttgttggaaatctggaatgattcctgaaagcaagaaatggatgtacatgatctttaagatattattttctatatcctgtttattagacaaaataattatccagtcacaaggccttaagacacacctgttttttaatgtattttgaatcttgattgaaatttcttaattcccttcttggtactccctcttagattgctacctgttctgatgacaatacactaaaaatctggcgcttgaatagaggcttagaggagaaaccaggaggtgataaactttccacggtgggttgggcctctcagaagaaaaaagagtcaagacctggcctaggtaaggatatcatatactttccaagttttttatggtttgactagtttagtccgacagtacagagtaataagctagatttgatcttgctttggtatgtttttaaagaaaagcactatcttcttgccattcattctttttgataagtatttcccaagcactactatgtttatcatttacacaaggtactacagtggtggatttattcaacaaatatttcttgaacacccagtatgtgctgggccctgttcttagttgctagggattcagcaatgaacaaaagaataaaaaatcctgaagatgtaaatagagctaacatattagtgtgagaggcaataaacaagataaaaaagtaaaatatatactgtgtcaaataacaataagggcttaggaataaaggaaataggaaagggagaagggcaagggtgaaatatgctatcaaaattttatattaggtgaccaggggggcctcaatgaaaagatggcatttgagtaaagaaagtgaagtagtaagccatatagatattttaaagaagaatattccaggcagataaaagtacacaggccctaaagcaggagcatgcttggcatattttctcttcctcagagaggctagcatggctggcccctagggctgcagcaggcaaaggaaagggagggaatagtagtagaaaatgaaattctgtgagactttggcttttattttgatagacaaaagtccaccagagggtttggagcagaagagtatcataatttgacttttaacttgatcattcttgctcctgtgttgaggataaattgtaagggggtcagggtaaaagcaaaaagctacttttaaaaagccattgagataatccaggaagtgatgatggtgacttagaccagagtagtagcaga

SEQ ID NO: 58363 - DNA, 1134 bp, Homo sapiens
gtaaaaataaaagagcaaatggcagaacatgtacagatatatatatagtataatccatttgtattttggggttttttaaggtctgatacatatatacctttgtatgtgctaaataggcacagagaaaattgcggaatgcacaagaatgtaaaagtgaaatgaaaaagttgaaaagaggatcctgtttccaccctcttcccctctgtactggttgaatttttttaccattaactttcatactgttataatgtagttactgtttaaaaaacatatacacacacttaaatttgacccagcatttgctaaccttcaaagctaacaaaatttctttgacccccatggaccacttcctctttcaccatgacatcctgaaggaagaggaaatgccccaactttccaacacatcaatttcataccagccttatcagtaaatactccagtgtgtgccatgcaagtttcagaaacctagatacctggtttgtccctgtcccagctcttccttcttccccaatcctgccttgttaatcggcatattataggactcataaaattttaggactttctgccctaaatgtacactttgacccacttaaatggaacagatgactgtggcagctgtgcagtgactattaacctgcaccgaggagtgcagcaaatgaaaacttccttttctgctgaaaaaaatagctgttatcaagctctagagcgttagtgtgagaaccataaccagaggtttcatgaataggtccctgttactaagtccttttcatggcatcttatgacaaaatggggtttttcagtaattatccttattaaaagagcagtatcattttggctggttctaaacatatggttgatgagaaaagtttaggcaaaagtcaatttgtagaatttctctctctcaaggcaagactgctttaggagtgaaaaacacagggtaaaaaaaggacaggataattaactgactaaagtgagtacttgccaatctttatttatgctaaaagagagattgcatttttatatcagcccatcctaaattcagctggatataaatgcaattaggtaattaaactgaattaaaaattatagttaacaattcaaaggctttgtgactgagaataaataaataccctt

SEQ ID NO: 58364 - DNA, 2073 bp, Homo sapiens
ttagggactttgtatggctttcacttctgatcttcatgatcctctcctctttttcagtaacagtaacgagtagccagagtactcctgccaaagcccccagggcaaagtgcaatccatccaattcttccccgtcatccgcagcttgtgccccaagctgtgctggagacctccctcttccttcaaatactcctacgttctctattaaaacctctcctgccaaggcccggtctcccatcaacagaagaggctctgtctcctccgtctctcccaagccaccttcatctttcaagatgtcgattagaaactgggtgacccgaacaccttcctcatcaccacccatcactccacctgcttcggagaccaagatcatgtctccgagaaaagcccttattcctgtgagccagaagtcatcccaagcagaggcttgctctgagtctagaaatagagtaaagaggaggctagactcaagctgtctggagagtgtgaaacaaaagtgtgtgaagagttgtaactgtgtgactgagcttgatggccaagttgaaaatcttcatttggatctgtgctgccttgctggtaaccaggaagaccttagtaaggactctctaggtcctaccaaatcaagcaaaattgaaggagctggtaccagtatctcagagcctccgtctcctatcagtccgtatgcttcagaaagctgtggaacgctacctcttcctttgagaccttgtggagaagggtctgaaatggtaggcaaagagaatagttccccagagaataaaaactggttgttggccatggcagccaaacggaaggctgagaatccatctccacgaagtccgtcatcccagacacccaattccaggagacagagcggaaagaaattgccaagcccggtaagtcagcagtggtgggaagatacatttcctaacttaaaaggggccagacacccagatgtctcaagtcaggatgcttttttttttttttaaagaaagaaatctatttattcctagtgctgccaaattcagcacataaatacaaaacaaattttgcatgggccatatttttagtaaaaatgttttatgctaagaaactatttttgtttgtctgaaattcaaatgtaactgaatgtgctgtattttatctggcaactctacttactcccattaaaatccctcctgtcagggtccatactcctcagccctgttgcctgattgaccaaagccttcatcatgctccaggatatcaattcaaaaatatctcccctctcctgttagacagtatgccatcctctttttatagataaagctgttgttcatgggaaagttgccaacatccataagtagatttccagtttgtaattccattttgtgattatttaaaatacagtgaaacttagatacttacaaaacaatttgagtgcaaaatctttctagatttttatgacttctccacaatcttttataatcattttgccacaccacagtaatacttttgacacctatatctattctttttaacattcagtgtagtgtcacttatctttttaggactcatttcattgactgacttaatatttaaattagataatatcagtcatcagtgattgatggcagaaataggtttgtgaaccttgaaaaacaagattcattacagtggtggaggcagaagtagctgagtgcattgggtgagctatgggcaccagtcagagagaataaaaagcttctgttgtttgcatgtgaaggggagatgggttaaggaagtttccactgtacttcacagtagctcttgtggtggcgggatgattgaaatagaatccagaatcatgatcagcatcatctgccattttaaagggcagaagctagataaccaaccttaggccagttttagtttaaaaagtgttcataaccccgacctgctctcatgaagacctatcccataattttagaaaaataaactgatagattttaaagacaacttagtacacaaactgcaatcaagaccttgctgtagaaagtggagaaaaaagacagttataaggaatctttccttctctcaaaattatgactgctctttatc

SEQ ID NO: 58365 - DNA, 3193 bp, Homo sapiens
agggagctggtctcagctatgtgttagcagaaaagtagtttcaatgaaaaactattttcactgatacataaatcttaaaatctttaaaaagtagaaacagtgtgctggtcttgtaatttatttgaagctaacatttcttaaaaattttttacctttatatgatgataatgtcaaccttcagaagagagtaacatcttccatttgaatacctatcttgtttataaattgggggggctgatttattcatttatttcaaaaaggatagtaattgtaacttatttgtttcttattaggagacttagctagtaaatgttttctattcacataagaagtctatgccttctttccctacatatcatctgttaagtttttactatagtcagtacaaatcagccaaaagagacattgccattgaaagtatttggagctgaaagcaggctaaacaatgaaatttctggcagcctaatttaaggtatgccttagtaataacttagtaacagttgaacttcaaggaaatctctgaaatctaaactttcttcttctaggtcaccatcacgcccagctccatgaggaaaatctgcacatacttccatagaaagtcccaggaggacttctgtggtcctgaacactcaacagaattatagattctaatctgagtgagttactgagctttggtccactaaaacaagctgagctttggtccactaaaacaagatgaaaaatacaagagtgactctataactctggtctttaagaaagctgccttttcatttttagacaaaatcttttcaacgctgaaatgtacctaatctggttctactaccataatgtatatgcagcttcccgaggatgaatgctgtgtttaaatttcataaagtaaatttgtcactctagcattttgaatgaatagtcttcactttttaaattattcatcttctctataataatgacatcccagttcatggaggcaaaaaacaagtttcttgttatcctgaaactttctatgctcagtggaaagtatctgccagccacagcatgaggcctgtgaaggctgactgagaaatcctctgctgaagacccctggttctgttctgcctccaacatgtataattttatttgaaatacataatcttttcactatgcttttgtggggttttttttaagtatgtgtaaaaatgtgatgctcagataagtacatttatatcagttcagtgttaaaatgcagtctcttgagttaaagtcatctttattttaaatgcagtgataaatgtcaactcttcggagaaactaggagaacaacaacagaaagctgtgtttgtcttttttctctcaaatatatctcccgtatgagatttcaggtccccatgttttcaccaagcaatctgctatgtcagccaacccaacatcactttctacaggaggttatgatttttgccatttactagaggaagatgttttatgaaatcaatttggggtttgaattcaggtgcagtcatcagttctttaggggctgcaatgttttaaaaaaaataagtcatcagattttaagaaaaaagtgatgatttcttattgatatttttgtaacagaatatagctcttaactgaaaatccagaaccagaaacataaatcttgagtttcttttcatgtacataaaaagcaatagccttttagtatagatagccctgagccaaaaagtaatagaattttctctagatatttaatacagagagtgtatagactgactctaagttaataatgtgcaaaatatcttaaacatccctccccttattcaacaattatgtatcagtgatcttgaaccattgttttatatttttcacctttgtaacctcatggaaagaggctttacatactttctatgtactatttacttagaagggagcccccttccagtcatgaaacttcatttgttttatccatatccctgaggactgtgtagactttatgtcagtttttgtcattatttgaaaatctattctgacaactttttaattcctttgatcttataagttaaagctgtaacaactgaaattgcatggatcaagtaagcatagttttatccagggagaaaaataaaaggaagccatagaattgctctggtcaaaaccaagcacaccatagccttaactgaatatttaggaaatctgcctaatctgcttatatttggtgtttgttttttgactgttgggctttgggaagatgttatttatgaccaatatctgccagtaacgctgtttatctcacttgctttgaaagccaatgggggaaaaaaatccatgaaaaaaaaaagattgataaagtagatgattttgtttgtatccctacccatctcctggcagccctactgagtgaaattgggatacatttggctgtcagaaattataccgagtctactgggtataacatgtctcacttggaaagctagtacttttaaatgggtgccaaaggtcaactgtaatgagataattatccctgcctgtgtccatgtcagactttgagctgatcctgaataataaagccttttaccttatctgatgtccttttctgagctttttgcattacctagaagcagtctacaaaaaagaactatagtagtcaagaatcccttctacttgttcattaaaatgtttattcccaaagttataatctatttcaagctgaaagagcttttaataaaaaacatcttgcttggatcagactttgagcatttaagatggcttggattacttgataaagcagggtggagtgatgtagttctttttctaaacaagtatttccagcacaaacttttccatttgaatacattccaagcactattgctaggatcccgtattagagtttgcttttggctgtttcaacacgggcccttaattaaattttgtgaggatgactgattagtgtcttcaaatgtctcttcatctggactgcacatttaactgatgttggatcaagaccatgtgtagctactcttgtgttgagggtcagcccattatccccatccccagccctaacagcttaaaacagctttaactcccatcttgaaattagcctatggccatgttcataacataggtagtgtgtgggttcaacaaatgctttttgagagcctgtcatagccaacacactactgctcttaagtctgtttttctgcttttcctagtccctagttccttt

SEQ ID NO: 58366 - DNA, 1059 bp, Homo sapiens
gggaccaaaggatgctcgaaaatatgactactgtgctctgaaaatctagtactatagctcactattcctactataatcaactatttcaaaccttctgcactctcccgatacctctgacactcccccaccccccactctccaccgatgtcataatctttgagttcttccttgtgttaccaaatgcttaaacccacccacacctgcacccctccttcttgcctcctgttgcaattgaagagtttctcttctgactgtctaatcaagagcagctccaccacttgtgttttacatcccattttctcccaccttttcatcaaccttctctctaaattacccagttcctctcttgtgcatttcatcattccctctctgttggatccatctcatggttatttaaaggagctgatatccctgtaaaaaaaaaaaaaaaatcctctgcctctacacactctaattcctcaaaatagttctacactctctagttccatttctcacctcccgttcacccctcaacccgctccaatctgacttttgctctcattattctactggaacagctcttgcaacagtcatcagtgacattcgtgttgtttcatacagtggtcacctttcaggcctcatcttggctcttcatcatttgacactgttgaatgattgaccatttggtctttcttatttaaagaaaaaaaaaactttccttgtcttctatgatgaaacactcttcctgcttaattcctatgtctttgcccactcttgctcagtctcatttgcaggttcattttctctacctagtcattaattgttagagttcaagtcatggcattctcaagtctgtttatgctaaagtgctcttgaacaccacactgtactgctccattaaaatgtttaaatctgccaagcgtggtggctcacgcctgtaatcccagccccagcacttggggaggcttaggtgggaggatcgcttgaggccggatgtttgagactaaactgggcaatgtagtgagacgctcctgtctctacaaaaagaaatatttttaattagccaggcatggtggcaca

SEQ ID NO: 58367 - DNA, 1040 bp, Homo sapiens
ataaaaaagatctaggtatagttttgcttagaaggtggttaagaatttagaatgcagggtgagtgtgtgtgtgtgtgtcttgtgtgtgtgcacatggtgagcccagagtgacggctgcattgttcctgatctttggcccacagccacagcagatacaaggggttgccctgggcctggtcctctcctgtgcagttctactgactgtttggcactggagaatgcagaggcacatgacaggccatcttttgcccatttgtttctgtcatgattttttttccttaaagaggaaaaagaggcttgtgttgtttgtgtaatttccttctttgctttggcctacactaggctgtcagcccattctagtcgtcttctttctccaaattaatatacaacatgtcatcacctctttttaaaaataaagatccagctcttcagcttcaacgaccttaaaaagctcttttaactcaacatttctaacctcagactcaatgtttgcttctctttcccttccttcctctgacacccctctctacctcctcccacaaaagaaaactggatcagctactggacttttgttaaaggcccccaatttatttggtcacccaattcaaaaccttggcatcatttgtaattttcctctttgacttgccacctccctcctccacctttagtcaaatctttccagtgtagtattcttttgtagtatctctcacatctattcctaaggccatttttagttcaagccactcatcaccaagaaatggaggataggatagggggaggggactggagtatcacttgggatttttttgaaactacacgttttgcctcttctaccccaagattctcatgtccactggggggccaggaagttatagcttggaaaagctccatgggtgccactgacacacactgcttagcaccactcattcaagccctggctgcctggacacctgtaatcatctccagccaatctctttggcttccattgccttcacctggtgatcttaaaacactacttcaacatgacatcttctattcaa

SEQ ID NO: 58368 - DNA, 1026 bp, Homo sapiens
ggctggcaacgcttgcctctgcgccagcagagccatttcctgctgggtttctcctgctcagttgggactggtagtgtgtgagccgagttccccacaatgccttggcgtcacctcacgccctcctccttattcaaacaggttttctgtgaagtcttggctgtttccttctaattcccacctgaactctttccatcctaggggaggccaacacccttccccacctgcgcgcttgcttaacctgcacttcctatcttgcgtcccgtgaagtagagtccttcactcctcttccaggtttgccctttcccggtcttgctttaacaaccgcacgaaccttccccgaccttcactttcccgagtgtcagctcctctgttcggccacttttagctagtcctttacttttacagttataaagccgtctgcacccaccttcttctcaacttcacttcccattgattgcccctaagagtcatcagaccaggaatccgaatgcaaacaacggttaagagttagctggcctttggatgtatttataaagaaaaagcctaaaatttgaccagtgtagtatcttattcacaggatcgttagctttaaatggtatcctttagctcaaggaatagatttaaaatattctgttgtctgagccgatacacatggtctatttggaaatacgaaggagtaggtagtgttgctttgcagtcgaatgggaacttagtttgccaggcagtgattccagggactttgtaggtttgtacaggaattcaaattggtatccgtgcctaatgccttgcaggagaacttggcactctttttggctcacttttcccactaggtttagaggattttcgatgttatttcctggtgttctagtttattctttgtgtattactcatgcttaattttataattttaatgtccttgctttttatgagatagaaatgttggaacaagatgataatgctcctacatatttagataaaatttgcaacctgacggaaatccctatcatctgatgttcagatttttca

SEQ ID NO: 58369 - DNA, 1211 bp, Homo sapiens
tctcctcactgcaacttctgcctcctggttcaagcaattctcctacctcagtcttctgagtagctgggattacaggtacgagccaccacgcctggctaatttttgtatttttagtagagacggggtttcgccatgtgggccagcttggtctcgaactcctggcctcaagtgatctgcccaccttggcccccccaaagtgctgggattacaggtgtgatccaccatgcccagcccagttaattttttgaaataaaaaatagcagtagttgcggatatacttacatttgaatggtaattgattaaaacatggatgtatttaagttcttgaaagttttagttagtattgtaggggttttcttaaaataatacatacatttatatattagaacattatcaaactggcagtgcgtatgtgttctaatttcctgaaatacgatgtctacaattttttcccaccattttcaattttaatgaaatcacagaaccttaataagtcatatttagtcacagtgctgtgaatcatttgttaataaacatttccattgttactttataatagcctgctctctaaagtttcaaataaaagctgattttagatttttagttattaatgttctaggggtattgccaaaaaaagctacatgtcctatattctgtgccagtttcttaaattagaatcttggattgcatcctcagcgtgtcactgtagtggtattgctgggttgctatgatacagtgcttgttctataatttgtagcatgaatcctatatgagatcttactttagatttcaagtatgttagcagcagtaattagggatgttttcctctaaggaaaattatagttataaaattattatttgttagaaatgattcctgctacttcaaattatttatccttaaatgtagaggattaacaatgaacaacttgaaataacttggttatcacctcagaagtttagtttatcactgatttaatgaagaagggcaagaagaggaaggctttatgataatgagtatgtatattaagatttcagtgttctacttggtatttgaaatcttgaggagagaaatgaatagagactagattttctgggaagatgcatttgaaacagtacaagcaaaaccacattacaggggaaaactacaaattatcttactgtattgtattaaaaattcggtgaactgttcttaaaaccaaccctctgtggcc

SEQ ID NO: 58370 - DNA, 1260 bp, Homo sapiens
acagagcaagagtttgtctcaaaaaaataaaaattaaaaaaaaagaagggacttacgctgaaactttgtaagtaggtagtgttcccagggtgggaatgtgggaagaagggcattccagacagaggaaacattgtgtaatcttcagggaactacagagagtatggtttaaccaaaatgaagaggcatgttggaaagggttgagagatgactcttgacagtagacagctgtactttgtatacagccgagaggagtttgaactttattatttaattattggagtatcattgaaaaacatggaacttgaacacaccgattctcattttggcaagattttgaggttgtttggagggtaagtcaggagtggtaatggttatgggaccagataagaggagcaattagcatatcattgctgtagtccagatgaggcatggtgagagtctgaaatggcagcgggaatgacaagaatagatttcaaatatgttaaagacgccgaatcagtaacatttaatgattagctggatatggtggcacataatctccactactctggaggctgaggcaggaggatcacatgagcctaggagtttgagtctatcttgggcaatgtagcaagaccatatttctttaaaaaaatttttttaatgattgattgtgagtaatgagggagagagaagagtccagtataaatccctgaatgatggggttatagatgggcacatttctcactagatttttggaagaagttttacatatgtgaatagcttctacaaaattaataaatatataaaagtaacttctgagtaggttatttctaagtttttctttatttttatttatagatgccacttcaaatgaacaacaagagcttttctgtcagaagttgcagcagtgttgtatactgtttgatttcatggactctgtttcagacttgaagagcaaagaaattaaaagagcaacactgaatgaactggttgagtatgtttcaactaatcgtggtgtaattgttgaatcagcgtattctgatatagtaaaaatggtaagcctctagaattatgttcctcagatttatgtaaatttaagatctgaggtataataatgaattgagactgattttaaataaatgtacaataattaatacatcccccaaattttagaaaatagttcataccccatccattccaatgataccatcattgcatatacaagtttgggaattgagagtcatagtggctggtggcttccatattggatagtgcaga

SEQ ID NO: 58371 - DNA, 1117 bp, Homo sapiens
atcaagttttatttcttgttatatccttaatttatgataaacacaaaatgttaggtaacattagaccagataagcatcactccttttccacagttgggcagagatacatcaagcaaaattgtatttgctcagatccccaaacttttgttagctgtagactgttactgaactcacagtagtaaaaatgtgttgttacttggtgaatgataaggcctagatctggtagtgcttttgtttgctctaaggtctattaatttaatgtagcaatctttcttttccctttttcttttctaacttctacatcaacctaactggctacctaaatgttcattgaatgactgtttttgctttgggatagaatcctccttttttatttttagggtgttaaattgatatagtattgtttaatagctaataagatacattttgggctaagtttctgctttttatacctattaggttacaataaaaaaaaactttagtcatatttgcctttctccttgaaagcaggtatgatagtgacaagctgaaccaaatatttaattctgatttgtggtagcaagtgaacatttgctattacttgtaggttgcttggcacttttatagaaggcctgctatgacttctagtttatttgctgtggttggtacacagacatttcttccctagccctgtacttacgtaatttggttcattatttctcaagtgtggataggatatgcctggttttgatttaattagttttcccactgtagttttatagaaagaccagaagtttttcttttcctttctttttaaaaattaatgatacactgcctgttttatctggaggttgttgactctgcatttaagaaactctgtagtgattaaattgaggtaggtagtagtccactgggaaggaacatcttcctagtgagtatggattacaaaataggaatatatttaattaagaaatatttaattttataggcattgtccttattttctagctcctgtaatttaacgttttgcatcaagttatgtaaagcaataaataaatctcaaagtttatcagcttaggaaaccaaatggtgaatatatagtttctaggtttgtttgtttatttatttatttattttt

SEQ ID NO: 58372 - DNA, 1050 bp, Homo sapiens
tttacacatggatctttttaagactatttgatgacttgcaatctaaaaacttaaacgattttctatgtagttttgacgatcaaaaagcattaaaaatcccaaattttaacactccaaaattgtgagcctctttagtattcaagagtaggattgaattttaaaatcagtgggaaggtaaagaaaaatccactttttgaaatatttatatttattgtaaatgtcatattttgaagtgaaataagtgagaagaaatatttcctaagcttttcctcaccttcattacttagcaagaataaagtcagtgtggtaaggaagaactctaaaaaatttttaaaagatgtcatggataatctttaagatcaaaattagaataaagctttagctcgattattttttaaaagtaatttctcaggtttcttttaaagctcctggagctttttgatagtgaagatcccagagaacgtgacttcctgaagactgttctgcaccgaatttatgggaaatttcttggattaagagcattcatcagaaaacaaattaacaacattttcctcaggtaaattaatcatttattgtatattgcaccttttcctcctacatatcttcttgtattcaagttcttttatttttatttgtttttttgagacagggtctcactctgtcatccaggctggagtgcagtggtgagaacatagctcattgtagcccccatctcccagactcaagcaatcttcctctctcagcctgccaagtagtgagactacaggtgtgcaccaccacgcctgggtaatttttttgacttttagtagagacaaggtctatgtactgtatgtacgtagtatatatatgtaacatatatatgtaacatagtatatatgtgtaacatatatatgtaacgtagtatatatgtaacatactatgtatgttgcccaggctggtcttgaactcctgaactcaagcagtcctcttatatggggcctatcatttgcttgtagtcatccctcagtatctggggaggattgattccagggcccctgctaatagcagaat

SEQ ID NO: 58373 - DNA, 1050 bp, Homo sapiens
ccatttcaaatatctgccctattatatttatgtctccctgctttaaaggcagccctaatcttggaaagctatgcagcctatatagttagaggtgtaaagaaattctgattaaaaatggctttattacatatgggtctttttctcttggatttccctataattagaggtttcttattttaaaaagtatttctttgaggaaacttatctttcttattaattattaagttgaatattccaggtgaaatgacaatctgttatcttcacatatggcgagttttggcaaaggcatatgtagttcagtaggaaacatcttcttttttaagattgatatgaattaactgtttggggcaaaactgcttataagacccaaaacatgcttgtgtgtttctaatagctgtcctttggattgatttcttcaccctcctgcctgtttctcttagttttctgaagtttgattttgattacatcttgtctttattttaaattcaggtttatatatgaaacagaacatttcaatggtgttgctgaacttcttgaaatattaggaaggtaggtcaggtttttttgttctttttaagaattaagtaagtgaatgttttatgtattaaaatcttagctggggttggagaaattatgtcatattttagagtttaaatgtagaacacatagtttctcaactgaagtcttttttttttttttgagacggagtttcgctcttgttgcccaggctggagtgcaatggcgcgttctcggctcactgcaacctctgcctcccgggttcaagagattccccagcctcagcctcctgagtagctgggattacaggtgcctgccaccacacccaacgaattttttaatttttatttttagtagcgatggggtttcaccgtgttggccaggctggtcttgaactcctgacctcaggcaatccacccccttcggcctcccacagtgctgggattacaggcgtgagccaccatgcccagcctcagctgaattcttattaccttttgccataacactttgccttccttattcactacgtattag

SEQ ID NO: 58374 - DNA, 1094 bp, Homo sapiens
aggagatgcacagactcagtacatttaggagagtgacaagaagaaattaggtgctccaggtaagtggactccaaagctttagcagagggatttaagtgaaatgtgggtaagtaatgtgttctccagtaagctgtcaaacagcacctctctttgggttctgaaataatttctgattacaaaaattttggtttatctacagagagaaaaagaaggaattggaacgtgaagaattatggaaaaaattagaggagctaaagctaaagaaagctctagaaaaacagaatagtgcttacaacatgcacagtattctcagcaatacaagtgccgaataaaaaaaaagcctcccacctctgccggataggcagagttttgtatgcttttttgaaatatgtaaaaattacaaaacaaacctcatcagtataatataattaaaaggccaattttttctggcaactgtaaatggaaaaatatatggactaaacgtagccctgtgctgtatcatggccatagtatattgtaacctttgtctaatcattggatttattgtgtcacttctgaagtttcacagaaatgaatgaattttatcatctatgatatgagtgagataattatgggagtggtaagaattatgacttgaattcttctttgattgtgttgcacatagatatggtagtctgctctgtatatttttcccttttataatgtgcttttcacactgctgcaaaccttagttacatcctaggaaaaaatacttcctaaaataaaactaaggtatcatccttacccttctctttgtctcacccagaaatatgatggggggaattacctgccctaacccctccctcaataaatacattactgtactctggaatttaggcaaaaccttaaatctccaggctttttaaagcacaaaatataaataaaagctgggaaagtaaaccaaaattcttcagattgttcctcatgaatatcccccttcctctgcaattctccagagtggtaacagatgggtagaggcagctcaggtgaattacccagcttgcctctcaattcattcctcctcttcctctcaaaggctgaaggcagggcctttc

SEQ ID NO: 58375 - DNA, 1070 bp, Homo sapiens
tcaagcaattctcctgcctcagcctcccgagtagctgggattacaggaacctgccaccacacctggctaattttttgtatgtttagtagtgttattatcaagagcccttcccaaattattgggactataagaaaaatacctgggttctgaaactgtcataactctatatacttcattcagactatacttttaatgtccatagctcagtttgaggagaaaaatactgactcctccctataataaagtgattctgaaagaaagctgtttttcaaaaaagctctgcacaaataagataggcaatatttaattttgtggcctaatccaacaataagtgaccttgctttgagatgaatttccctaaaactatacccagtccataagaaggtgagctcctcttgttcccatctcatagttaccatagtttcaagtgtttcctcatttctagtccaatggctgtctttcctcccaaactcagaggaggattcctgcctccagtcctctgctcttttccccatctacgatgctttcctcctgtctaggtttactcatccttcaaagtctcagagctttccctgaccactaagctaaaaccctttctggacttcagcagagctatttatcctatgaatgcccttcacagttccttatggtctggaatcaataatttaaaacaataggattgttctctcactaactcttgaaggcagagttgtaactctttaaggcagagttcttatcttggatttctgacttccacaacctggtaagaatactttttttttttttttttttttgagatggagtctcactgtcgccaggctggagtgcagtggcgcgatctcagttcactgcaacctccgcctcccgggttcaatctattctcctgcctcagcctcccgagtagctgagactacaggcacatgccaccacggccggctaattttttgtatttttagtagagacggggtttcaccatgttggccaggatggtctcgatcttatgacctcgtgatccgcctgcctcagcctcccaaataaaatacttctaagctcaatttagcagggtgacc

SEQ ID NO: 58376 - DNA, 1032 bp, Homo sapiens
gtcctttcttatctggccccacagcagctctgaggaaggagactgtgttcacttaccttacaattaagttcaaccccatctaccctggattttctgatagctcccactgtgatccgaaaccaaagggtgaaaactctagtgaacctgtacattaaagaaattttagcatcttttattactgtctaaattggaagtcttttgttggcattatgagctcttttgaacaaaactaaaaaatgtgttttaaaatcacattttagagtttagagtgctctcacataggtatgcccctatactgtagtgacgtaggcattttgttcagctttgtgggtggcaaagctgaggctcagcttcgatgatggatctgagcctctgggtggagctggtttctgcctttgttacctgtctgctctccgttacaccacacagcgtctttagtaattgacaaccagatctcaccaagcacacctactaagtatttacagggaatgctcagctgtgtggatctatgcagctgtgctttgtccctgtaaacttgaagggttgaaacaagcgttgaaaattcagagaaatacttgatctgaaaaccaagtactttgaaatttggaatttttattgcttttaattgtgagtcttacatggtagtttgaatatggtttatttttaatattttattttttttggagacagagtcttgctctgtcccccaggctagagtgcagtggcactatttcggctcactgcaacctctgcctcccagattcaagcgattctcctgcctcagcctcctgagtagctgggattgcaggcgcccaccactacacctggctaatttttgtattttcagtagagacagggcttaaccatgttgaccaggctggtctcaaactcctgacctcaggtgatctgcctggctaggcctcacaaagtgttgggattacagacgtgagccaacatgcctggcctgaatatggtttaattgtgagtacagatacctagtgacaaatttcagtgacaatccaaaacacctat

SEQ ID NO: 58377 - DNA, 1052 bp, Homo sapiens
aataagggcacaaagagagagttgtttttatggaaatgaagttgaatgcagctactgcccccaagtctgagtgttggttcatctcctccatcaatttcttgaagtccacaagctataaactaacagagaagttatctcctccctatccaccaagtttcctacccaaaccagcatatagcagtggaggaagaatatgatgagagcagtagagctcccatttggaaaaggaagaaggggaagggcccgcagctctgctctgcagcagtggtggaaccctgcagggtgggaccggtgagacgccttcttggcatgaagtaagctccttggtttgaacctgttgctgccctcagaaagagactcctgtgtgctctggcctcgtcccctgggagcttctgccttggtggtaatgctctgtggccatatctgaagtggacattagaaaatacgccctccctggtggctgcacagcttgtgccactcacttcctgcttgtgtgagcagctttagggctaaacaattgcaaacttggagggcggcttcttacctgcctcctgccactgcctatgtttgcagtgagatttcagaaatgtgtaggcttctggctgttcgcatctaatcaagttcatgtgaaagtgaccccagtcgagggtctcatcctgttgtatttgtaaaatcttcggaattttgctgattttctggtgctttctttcatgctctcaatttaatggtagttattttttaccaaatgctctgctctggcacaataaggtttgccacctttccagcctgcgggatccttatctatttccttactgcccgccattttcccactgcccaaatgtttggctgttccctcattttgattttttttgcaaccataaaacactccagccgggcgtggtggctcatgcctgtaatccagcactttgggaggccgaggcaggtggatcacgaggtcaggagatcgagaccatcctggctaacatggtgaaaccccgtctctactaaaaataaaaataaaaaaatcaggcgtgtgtagtggcacgtgcctg

SEQ ID NO: 58378 - DNA, 1042 bp, Homo sapiens
cagtagggaccagaaaggccagaaaactagagactgaaaccatccagattaggggtttccagattcagagtgctgggctcagtaaaatttcaaaaaattggctggggtgggattggcatagagataattagaaaaacttccttccatgttttactcttacttttgccacgtaaggatatttaaaccaacaattgctgccatatactgacaacattctttattaaaagacagagtgtgtcaactttaagaaaaacctggtaggcgagacaaaaatatcagagtcaaggcagttcacaagaagtggccagtgatcactttaaaccatctcacatgtatgcatgagtatttactcattatttcaaaaaatagtttcttctcattttgctggagaccactaaaaatggactggcctagttctgtggactgctgtttgggagctgctctacagactgctaactaatccatctgggggctaggtaaatgtgaaatccaaaatcaagcagatgaccttcattgaggggtgactctaattccaggccctgtgcccagtgctttgcttgcctgaggagggatgagctccccgtcgtgtgcaagtagaggagcctactcctgcctttgtctgatgctgatcaccacgacaaccaccacgacccaggaaagctcactggtgagttgctcttttcaaaaacatgaccactatgtgaaattttaaaactccaatataacaaagccataagcagccttttggaggctgccgcagcagaatctaaccacactgggatttgatgttcttctttcacaaagggacagaaagttaccaggtttttgggcacaagcttctgtgccgtgtgacaaagcactcctttgaccattgtgctgggcctggtctgagaccgcaacaaccaaccagttaggacaaaccaaaaatagccccatcttctaaatcaagacaggcggagaatgaccaccctgagtcacccaagttcaattgttacacattttatttttggatagctttagtgggcaccaaaagtgtttcatt

SEQ ID NO: 58379 - DNA, 1092 bp, Homo sapiens
ctctgttctctggttgccttgttggttgatcccttgaggcggtcgatacctattggtgatggagcaaaatgagcagtcggtgggtgttcagcagcttggcatgggctgggccactcaccagctttatgacctcaggcaagtcatttttacctccctggaccaatgtactcattatgaaatgagaatctgacctagatgattctaatattgagagggtgtgatttccattagatagagtccatgattccttcctttttaaaattggctgggcatgggacagggccagtggcttcgagtgtttacccagccaggggaggaggaaggacatagccaagatgcctcagaagctttccaagggagaaatggtttatatgtgagaattggttctctttcaaatatgtaatgcagaaatgctggcatcagcaaatagtggggtgaaacctacctggtctgtgaagaacttggggtcaatgagagtacaaaagaggctctgactgacctgaatgtcttgaaggttccagttaattcctcactaacagggctttattgaattgataacaacagaatgagtttttcctgaaatggagaagatggagtcacagtagtaatgactacccggtgtgtatgtaaatctcatatgtccttctcaacagccctttggggaaggcagttttgatctcaaattacagaggaagagaatgagaggcccagaaagcctaagtgatttgttggtggatgctcagcttatgagtggcactgataggcttagaaacattgtctctggcccttgatgcccagctttgcacctcttcaagaggtctgggaggaagaccaagatatgaagagttagtgaaaggccagtactggcttcctagtaacataagatggttagcaagcaatgcttagtggaaagaggatgaaaattaaaagtgaaaattcaatgtagctgtagctactaggaaataaaaatctgggagctgaatttccagttaaaggaatacatgagtaaactttcactttcttgaaaatgatgaaactgccaatgatacaacatgatttctgattggaaataatcaagcagaaacaaaatgc

SEQ ID NO: 58380 - DNA, 1072 bp, Homo sapiens
ggactgtgctaatgaccacagatccccggttgagaggaatgcccagaccacactcatcctacactcatccctatactcattgtcccttgggaaccaactgcagggaggaggggaaatggccaccactggagggagtacacagcaggccaagacttatgggggactcttccaaattggggccatggaactgtcactatttctactctttattttccttttgtcatccttttgggttcaccgagctatagaataacagagggagatgaatttagcaaatacatcactgaagcttctccctcggaagttgggcccaagcaatgggaatgagaaaggtaaccttggaccgtgggggccatttgatttgatgaccccatccccacttcatttatcagttggccaatgaggcatggcgagtcaggcattgggccaggctctgggtaaagcaatggtggagactcaatgcttgcattggaggagctgtcagtcatttaccagacacagactgggtcctagagagctgaaattactagctcaagtcactgctgtttagtgccagagccagccccagggttccctgcccccacacccagcctaagtctatccctataccacaggcctgaacaactcccccacaatacagtgcctcacttttctttaagaccttttgctttgccaaccttaaccttaagaatccacctccccatcccctgccaaagactggggtgaagaaacgcacctggctacagttacctttctcattcccattgcttgggcccaacttcgggggagaagcttcagagatgtatttgctaaattcaaggattccccactttttgcttttacttccactcactgatagtttcagcttgacgtcaagcctctttgaaaaagaggcttttttttttaagtgaaagaaactttattttgagtaatatacaaaaaaaaaaaaagagagagagagagaaagaaaaagaagctgaaaatgagattactcatgatttttaaaatggcctcactgatttttaaaaaatgttcttcctctttcaggactgtttgtggccacatttgcaca

SEQ ID NO: 58381 - DNA, 1066 bp, Homo sapiens
taatcctggcattttaagaggctgaggcaggaggattgcttcagccaagagtttgagaccagcctaggcaacgtagggagaccttgtctctacaaaaatattttaaaattgagctgagcacggtggctcaccctgtagtcccaactactcaggaggctgaggtgagagaattgcttgagcccaggaggtcaaggctgcaatagaccttgatcaccattgtattccaacctgggtgacagggcaagaccctgtctcaaaaaaataaacaaataaataaaaataaaaataaataaataaatagaaagaaaaaagaaaatgacaaaaaaagtttcacaaatgtcttcatgcttataataatatattaatgcatcatatatcacaaatacaaagtctggagttttccccttaggtttataataaactatacaactcctatttaatgtatttacttttataagccttctctgtttaggactatatgctatgcaagtacatacatgaaggtttttgccatgagaactatagttctcatctcaaattagtggcttgccttttaacccatacttatatacatttcatttccattataagacacttaatacccttctagtggtacattctaatcaacatattttgaaaatctttatttttagataaagctttttatgtatttaaataaataaaacctgttaacaatttaacaattgaagcacaatatagtaactgtgttgttttgtttaaactagttcacagctgtgggaaaatgtttgattttaagactataaccaaggtgagactggacagttgtaagcagtgaaatactagaatacagtgaatgaataaataagattttttttttaatcagtggccgttcattattttgcttttaggaacctggaagaaatggtcttctttaagtttcaaatgttctggtaaatgtaggcgtttcttagcttccttaatatcaccttgaattgccgaaataagtgactctaaagaagcaaagttctttcgggtctgaggtagccaaggatggccacattgaagatctcgccacgcaagtcgt

SEQ ID NO: 58382 - DNA, 1371 bp, Homo sapiens
caccaccgcccctctgtcagcaggaaacagttacagaagactgaccttcatccactttccaccaaagatttggggtcttggactcttaaggcaggggtaaatgttacagtaggtagctagtcaggtatgagcagggcaggagagggctccctaccacacacacaccagaaatgttgggcaaccatcaggtgatggccaggcggttgttaacagtttgtttaaagtaataattagtcacagctggtgccagggaaaggtaggctcctaatagatagaaaacacctgaaactgatcagcagcttcccaataagatcctggaagtatgccaacaaataaaaccccaagtcaagatgttaagctgtgcacttggtttctcgagtcgcctgcttggccctcttccaagttgcattttccttctttcctttcctttttttccttactggcctaaagcttttaaaataaacttccactcctgctctgaaaaaaaaaattacttagtcaaaatttatttcaaggcctgaaaacattcagactaatcaaaatggcactactgtaacttttttttttccttcttttttttttttttgagacagagtctcgctctgttgcccaggctggagtacagtggcttgatctcggctcactgcaacctctgcctcctgggttcaagtgattctcctgcctcagcctcctgagtagctgggattataggcgcacgccaccacgcctggctaattttttgtatttttagtagagacggggtttcactgtgttagccaggatggtctcgatgtcctgacctcgtgatccacctgcgtcggcctcccaaaatgctgggattacaggcgtgggccatcgcgcccggccttgtaacttcttataatagttaatataaaactttgaaaaatgtagatacagttaactaacctctacgcaccataccatccatcttaaaagcaatggctatttaacaaaatgtaaggtggctataaagtataaaagaacattcacacacttaaagagaacataattaacagcaagctagtcagacaaacaaacacaaatattttcacattttctatgtttgtttttaactttgcttcatgaagccacttataattgaggcttctttcaagtacaggatttctaatatgaaaaatagtattttctacatagctctataaagaaatgaaaagccacaagctgcattgtttgccataaattcatacaccaaagagtaaaacacaatccaactaaatttatacatgtttccctcttctccaacaactgcttcagatgtttttctatgtactttcaaaatatttttattaaagtcagttcaaattcatttatgcagattaggaaaaaatg

SEQ ID NO: 58383 - DNA, 1049 bp, Homo sapiens
ccagaggcaactgctgataacatagatcttagagagattgtcctagatctttttttggtttgcgtctaggcaagattatacctgaggtttggtttttgtttttcttttaacgaaggactctgcactgctttcagcgttccaggacttaacaacacggatgatcggcagttctttgcgtttatttttggtcctacatgttgttcttcaaacccatttcctcttgttctttccccaacagaggcagagaagtgttggcctcgagctctgcctatgattttcctgcagaactaaactaccacaccttaacctgctctcctcaggggtgaatcaattcagtgtctttcctcttggcaggtgagtctcattctccaattgttttgccactttggggcatcccctgagccttctgagaggttgagcgcaaggcatatttcttctaacaactagctcactttattgacattcacctacctgaaagcaggaagctggatcagataactttggggacttcctttcagttttgactttatgtgcgccctctcgggacctggcttaggattctgctcatggtaaatatttggtaagccttactggttgtatgactcatgagtgtggttcctaataagagtcacagaaaacagtaaaagcagttccaggaatttgctgcttactcagtagtggtggatgcagcagggaaaataatgcaggcttcctgcccatttcccagccacttctccgtatatgcacctggtcacaaagggatggtcacaaagaccataagacagaccccagagaccccaggcaacgtgttccctggcagggagtgtgtcctgcggatggtgttcctcaaggagcacaggcttcttaggggcggctttcactcaacttggaagggaggtctaggtagaggggttcactcaagtggactccttctcatttcctcgtttctttctaaggaagccacttttaagtgtgatggcattgagactgtgtattgctgcaccccagtgccagtgaacctatgaaatacagccgtgctcactctgtgc

SEQ ID NO: 58384 - DNA, 1097 bp, Homo sapiens
aatcgtgtttcctggttcctgttttctactctttcttgatttattctcttgtctttgatgtatcacatcctctaccacccacctcctcccagctcacctagccccaaatcctctattaaggcaactttcttacatcacctgtgaagatttccctctcccttcggttcccttgttagattgatctcaccctcctttgtgcctccatggcaccctctatcatagccttggtccatcatgactactgaacacctactgtacacgttaggcactctgttcaacattagggattctgagattaaaagaatgtgtttcctgttcccaagggagttctggaagctaaatgagaatgccagggttctcactggggttagtactgccctctagtggaccctttgaaaaagtgaaagaaagtttttggttgccatattaatgggaaagtgtagctggcactttgtagtcaggggccaggcatactagatgtctcatatgtccagcacaactttaggatatctcactagacattcatttgttaaaatatgtttataattattcagcctaggacctaattccattttacacacaaacccaaactactcttagcactttttacattgtcattgcttgtgcaaccgatagaaaacagctgttgttcagcaatgtgagtttagagacaaatttctttttaaggtagcatgagatattttaagaattctttatattggtcattgatggcgcttagtctctaagaatcctagtgagaggcttcacaaatcagtgaatatggttatcagtgctgttaattaaaaaataaagtgtaggctgggcatagtggctcacacctgtaatcccatcactttgggaggctaaggcaggaagactgcttgagtccaggagtttgaggctgcagtgagctatgatcgtgccactgcactccggcctgggtgacagagtgagatgcttgagcccaggagtttgaggctgcactgagcagtgatcacatcactgtactccagcctgggtgacagatcgagaccctgtctcaaaaaaaaaaaaaaaaaaaaaaacacaataaaacgcaaaatcccttaagtgatgga

SEQ ID NO: 58385 - DNA, 1015 bp, Homo sapiens
gtgtacacgcagagctctctattcatttagctattgtatatagtattctagtttatgaatattccactatccattcctttacagggggactaacttagattgttcctttttttcttgacatcttgttctaggttcctttttttttttgaggcaggctgaagccacccaggctgaactgcagtggtatgatcatggctcattgccacctcaatctcttgggctcaagtgatcttccagcctcaacctcctgagtagctgggacttcaggcatgtgtcaccatgcctggctagttaaaaaatttttttttgtagcgatggagtcccactatgttacccaggctggtctggaactcctgggctcaagtgcttctcctgccttggcctccaaaagtgctaggattacaggcatgagctactgcaccagcctaggttgtttttgtttttgtttttttttttttagtcttttcagagagtcagcttttagttttgttgccttctctaatttttttgtttgtttgttttctggttccttgatttctaatctttattatgatcctcctgtttttgtgaggttcccgttatttttagcttcttgaattgagcacttaattcatttgtttgtcttattttttaataaattcatttaaggctacacatttatctctaagtcctgatttagctacataccacaagcattgacatgtagaactttcatagttcagctctattttttagtttccaaatactatatagaagtttttgttgttgttggttttttttgttgttgttgttgttgttttgttttgttttgttttaccgttttccttttattgccttccattgtgttgagtgaattttctttttcctcttatttttctctttctcagtttggaaactgtatactgtgtttctgttccatttgtgtttcctataaattttatttaattttaatttttattttattgagacatagtctcgctctgtcacccaggctgtagtacagtggtgcaattac

SEQ ID NO: 58386 - DNA, 1040 bp, Homo sapiens
atacaaaatttagctgagtgtggtggcggtcacctgtaatcccagctactctggaggctgaagcaggagaatcacttgaacccgggtggcagaggtggcaatgagccgagatcgcaccattgcactacagctgggagacaagagtgaaacttcatctcaaaaaaaagaaaaaaaatgggggcctcagcataatgatgataaaaccatgagaggaagtgaaatcactcaaggcaagtgcagagagaggagcagatgttcttgaagtctgaaagaggaaggggagctagtcaaggagactgacaagtagccaccaatgagagagtggtattgcagaagtgaagggtggaaagcatttcaagaaggaaggagtaagcaagtgagggattccgaatgctgctgaggagtagagtaagatgaggacagagaaataccctgtatatttgacaatagaggcttctgttttagtgctgggaacagtagccagactttactgatagtaagagtaaacaggaagtgggtcagtgtaggctctttgttttccaccactccattagttgctatcattgttattttttgtgatgccacaactacattgacatatacagtccaagattagctgcttattcatctaaaataatggtgatttcttatgcttgttttaggatttggatgatgtgttggagaaagccaagaaggtaagtcaatatttgtaattgctcttttggttttttattttaactatcatttcaagccaaaacagcttgaaatttagatatactaccttgatgtttcagtagtttatagtaagtagcattttttatttttattattttatttatttatttatttatttattgagacagagtctcgctctgtcgcccaggctggagtgcagtcgtgtgatcttagctcactgcaacctctgcctccaaggttcaagtgattctcctgcctcagcctcctgagtagctgggactataggcacacgtcactgcacccagataatttttgtatttttagtagagacagggtttcaccat

SEQ ID NO: 58387 - DNA, 1121 bp, Homo sapiens
ataaatatgtttacatctactaaaataaaatgacaaagaccacacacacaaataaatttgtacatattaaataagtaatatgaattatattctactattaatttctacttatcattcttgacttgctgaaagcttccagatctattttattaggagtttgaatagtctcactgtaaatctgttttgctttttcataggtaatacatattccaagaggcatggttttttcttcatctgatcttcctccaactgtgtaatttctgtgactcaggctttctaagtgttagacatttcctgggtgatttctcctacttctccagtccctctgagatctcagagacatacagtagtttggatgtgtgatatggaaaaagctttgcctggaactgtttaacctactcagcttgttgtcaaatagcttttctgacatctagggtcatatacccatcatttttcatgacaatgttaattcttcttccagtctactagaatatatttcaagtctactagaatatatttcaagtctactagaatatatttcaaggccttaacttaccctccttcatctttgttctctctctctcatagttgtaaaatctactcctgttcctctatcatctgctttaccttccttttcttaattctctcttgttctgattatcctcaggagaaatgctttgcaatttatatatcctgaaactaaaatttgcaatgtagtctaaaaggtatctagaagcaattttccatatatttattttccctgcctaagaagggaaccctacagggcaaattctcctcagtggaaaaggtaatatcattgaaactaatggtacacagctacttcaatatttaacaagcatatatgagatactcattgtttatattgctgggcatctagaacaagtagtcaaagcagggctataaagacaaatgaaatcagtgaaaacagtgcaaaggaagtatgggattatcattataaactcaccaaccagacgaattctaaggggagaacacaacaatgcaatcgcaaagctcacatgcagagatgactccctggtggtttgcctctctttttcttagtgatttcagaatgtccaaatgcctcctaaatgtcaggaaat

SEQ ID NO: 58388 - DNA, 1029 bp, Homo sapiens
ttactaaatttcccagaagcctaccaaggctgccctgtggatttcctgagccacctggtagagctgaggataatgagtttcatgtggggccccctctactcctctctggttctcaagggcacgggcaaggccagagtccatccaccccagtggaattcagagagtggggaattgggaatcacgagcattggcctgggtctttcagatgccagagaatcccccagtataaggtaaagggttattttgggggacagcttctgtgatggttaatttgatgtgtcaacttggtgaggctacattactcagctagttggttaaacattattctagatgtttctgtgaaggtatattgtaaattagattaacgtttaaatcagtggactgtgagtgaagcatgttaccctctgtaaagtggattggcttcctccaatcagtcgaaggccttagaaatagaaaaagactgaccttcccaagcaagaaggaattccgccagcagactgcctttgggctttgcagggagccagggcagaaaaggaggaaagtgtctgtgatttagtgctactgaggaaacccatgcattgacagatatgaaacactcctgggagggggtagagagcatgtggactttctgccatttcaggtaaggtcagagtcccaatggatatattgtcttgtgacttttgagtttctggttttagcctgagactgttgtagggtgtatagaggaggataaagtagaaaatgcctaaggtggtgttagaaatgcaaaatgcttgttccccagtgcagcaaagaaatagcactccaacataaatttaattttctcagcaaggcaatttttactttctgcagaaagtgtgcccttcacagatggaacaatggtgagagcatacctggacaggggaagggaaggagttattcctgatgcaggtagctcctactgctgtgtcgttcccctattggcttaggttggacagcacagtctaagctaattccgattggctgttttaaaaagagcaggagtacgag

SEQ ID NO: 58389 - DNA, 1101 bp, Homo sapiens
ttatcgatgagaaagctgtaaaggtgagagacaggagtttacttcctcaaagtcatacagtgagctgaggcagagccaggattcaaacatttatttgtcttataataacctaatatatgtaatatatgcctgaatcacacagggacaaataacgaaattttaaaaatgttaaaatacggttttaaaatgtaaaagtagccctaaacagcaatagatttgcaacgtattcatcacaggaggaaaagtttgaatgtggtgctcgagaatattttggctactttataagactaacaccagaagtggagaataactgcttcaaataatcagttgttttattggtgcaaatttttggttgggagaagacaatagaaagctattatttttctgtttcaaaggagaaagaagaagccatatttcatcctttgaaagtagcagttaggtgtaaacaaggccatagatccatggctttttgtttctctttcttcaagtagacttaagttcgactttcctacaacatgtagctggtaaatacaggcttgatttttgccaaaagatagtttgacttcctgaaactaacagataactcttgtattcaaaaaataaatgtaatggatttaaagactggtaagaagtattttcttttcttttcatttttgagacacagtttcactctgtcgcccaggctggagtgcggtggtgcgaccttggctcacagcaacctccgcctcctgggttcaagtgattctcctgcctcagcctcctagctgggattaaggtgcccaccacccctggctaatttttgtgtttttagtagagacaagtttttgccatgttggccaggctggtctccaactcttgacctcaggtgagttgcccgcctcaggcctcccaaagtgttgggattagaggcgtgagcctctgcgcccagccagaagtcagaaatattttcatttttgcatttcagttcagatttgggccatttagatttattttgccatggtaaataaaaaagtaagagacttaagattcattaaatacccatgactaccttgtaagcatagtttttattttctgaaactttgttttataactatgtgagtt

SEQ ID NO: 58390 - DNA, 1116 bp, Homo sapiens
tcagttttttccagtatcaagtatgtcttctctggaaagccttctctaatttcctttggctgacatagactttttttgctcccacttccccaccataccttgcaattatcacacactgttatacttgtttacatgtcaaagtttccctagattggagagtcctttaagaaaaagaattacacttttcatttttgtatcattggttgctagcattcccgtatttgttcaataatgaatgacttattaattgttaacaactttagagaggtactattattttttaggctgttgggatgctattaaatatcatgacactacagtgcattaaatttgacaataccaagaaagactttgagctgctttttaaaaaaatcttcacataacagtttatagtaacttgatgcccctctgtttcagcattaatcaagtctgatctgcgaagacacaacataaatataggaattacaaatgttgatgttaaagctgtaagtaatatttttatgattatactgttgagaagtatgtatagaataaatgtgaaaccatatttttttatttagctatttttctcccgagtcaactgttgatctgttataataggatatgccagatgctatacatttttaatcttctgattgtttttatagataccagctgacagtcccacagaccaagaaccaaaaacggttatgttgtccaagcagtcagaatcagcaatttgaagagaaaggcaaagttactgtcctgtagtaattggggacaatgtgatcatccttggagagagatgtgagcaccaaggctgggtttgtatgtggtgggggaataaacacacttacttgaaaattaccatatgaactctaaatgcataattattattttgcttaattgttaaattaagggaaattttcttaaaattcttctgtttacatcatgttaacactactgtttatctaattagtatccggtttttagtctcatattgtatctgaaagtaagcttcttgacgtttactttttaaaagtcgatgtttttcttttttgtagaaaatggaagcttagaatactttttaaagtgataatatggggtgttcagtccccataagatataatagttcat

SEQ ID NO: 58391 - DNA, 1042 bp, Homo sapiens
ctcatgatctgcccacctcggcctcccaaagtaccgggattacaagtgtgagccactgcgcccagctggtcttcccttttttacacagtggccacatcatattgtacttttcatagtaactagaaggttacgcgaaaactgcttccaagccaggaatccccagcccaaatgtggacagtcagctttttggccctaaatataaagaacttaacatttctctcacattgcatcttaatggttggttctctatccccagtcctatcatggtatctcccctggtcctgacattccccaagccctgacccctgcctaggccttaacatgggaagagcctcaaaagctcccttttccaggggccactcctctcggattagagggttgtttctgtgctcagcatggcagactctttcctctggggtcaagtccttttctccatcaaccaaatcaatatcttactgaggaatttgtacagaagaagggtggtagggtggcggcggtggtaaaagcttggcaggcttcagggggattaaccatttttggccattgaatgtagactaagaagcaaaagaagtagatgggggaggttttcaagggcctgcatggaggactaaatgacacttcatttgactacaggacattcccttagcagccatggtaacttctgcctgaaggtccagatatccccatcttgcagggattcccctgctttgagatcctccttctaaatttgtgactgcaggcctctcccctggaggttgttgagtctgaagttagcagttgacgaggtcaaaggcaggatttttcagaaagactttaaggaaacagcaagagtcagttggaggataatagcagatgggaagcgaggctcagagagagtggccagcccagaagaaaacagtgggcattctaggaaaattctaggacaatcctcctgtttcttaacagcttggaactggactctccttggggcagaaaaccaggatggattcagcaagaaacagcagtcggtttcttgcagacctcacttcttgtgccttattct

SEQ ID NO: 58392 - DNA, 1054 bp, Homo sapiens
gctggaggaatgagagtggcagagaaaggatatgcgtcaatgcagacctgaactaagacagtgccagtgaaggtggagggaagggatggaggcatacatcatcaccaccactaggggactgcttagatgggaggagttattggagaaaggcagtgactccacatttctggcttgcatgataatgccacaagggaagaacttcaaggagaggatcggatttagggaaagatgagctcagatttggacatgtgaaatttgaggtgccttgtgggatgtcggaatgaggtatttgcaatgtggagctcacaggggaatctgcactggaaatgcgaatttaggagctgtgattaggaggttgtgcttactgttcaataagtgaaaggagaaaaagatcaaagatgaaatcagtattttttggtctagtttggcacaaagagcccatgaaagagacttaagaaggaaagagaggtagaaagaaaaccaggagagaaaggggatggagaggtcagtggaaggacatgtggctcagaattagactggggacaggaggattggtctagtctgttttctgggtctcctggacatctttgtgggaaggagaatctctgtgcctctctgcagtctgtggaacacttgcagccctgatctgaaaccagattgaccacaggtgccttggctgacatttgaaaaatggaaacttgaaccttactgaggcccctccccaaccctcttgtcatcctcctccctgtttcccacaaaggagatgaaacatgtgcctggggaacccagcaggaagctgggaatgggggtcggggcagcagatggctcagggccccaactctttagtggcaggagtcagccacagctgttcagcgaagcctcctgcaagtttaatgggggcagatgattggctggggatttgctggtggaagagatcaacgaaggggaacacaagcccaggcccttcatggggtagacaagctaacttcagactctttgttgaggggtgtctgagtgcctctggatttaggtcattgaaatgaccacctccctt

SEQ ID NO: 58393 - DNA, 1040 bp, Homo sapiens
ttttgcatgtatgtaattactgaagaaaatgacaagtttttctctttgtctcatatttacttggtttggatatacagcatatagtagatagtcaaacataacaagcgaatcctttataaaaggattagtctggaaaagttagatgtgggcctgctcagaggcagggggatggactcactgaaccctgagacactttcccttcctttgcatccaggcttcaaattttcaaggcctcctttctcttccttgactcagattgtctaagctacttaaccaatgggcagccttccattgagcggttccccatcagctttaaaacctacttctcaggaaactactttcaccacgttgtgctggggatttactgcaatggccgctatggctcattgggcatgagccgcagggctgagctgatggacaagccattgacttttcggactctgagtgacctcatctttgactttgaggactcttacaagaaatacctgcacacagtcaagaaggtcaagattgggctgtacgtcccccatgagcctcatagcttccagcccattgagtggaagcagctggtcctcaacgtctcaaagatgctgagggctgacataaggaaggagctggagaaatatgccagggacatgagaatgaaggtgggtgctgggaagacaaggaagccatgcaggagagctcttttcccattcctttctctctgtctcttgctccaggcctcatttttctaggatggccaaaaatttcttgaggttaaagtctctctttgcacatactactgcaaagaaagccatctaaaatcaatttagatgcgacagttaaaacaatgtctcgtcctgcaattccttctatgaaatcagatctaaagtgttagtcattttatattgaagctctagtttgttctgttttgtcgatgtaatagggtgaccagttgtactagtttgcctggaactgcgggttttcccaggacatgagattttcagtattaaaacctggaaaaccttatatgctggccttatatagactatactcat

SEQ ID NO: 58394 - DNA, 1036 bp, Homo sapiens
atgccaagaatcaaactaagggaggactcactgttaaagatgtgttctgatgtcttatattaagaccaaatgtgacatgatgtgattatcttccagtactttgcttttaggtaccatttcatgacattttaggaatgagtattggaaaatataaagaattagaaaagcagcactttttttttaatggaaaagtcttcggtccagtgttacaccttatagtgtaattcagtccctaagcacagaatgaatgtctggcctgcatatggtagttacagtgtaacctctggctgcagaccacacaggacaaccctaacagcctagtcttgtatggtgtaaatatcaagagtacagcttcaatttcatttgctttatcttagcaacaatgccaactcaggagagcagacggccgatttcagtgaagtctggtagtcaacagatgttatttcagtctcagtgcatctcctctggctttctttgactgaaggtgtttataggaaggaagttaaaaaaaaaaaaagctcattgagattctttaccaattctttacaagatttctgggggtgacagggaaagcaaaaggacttcaaagcaaaagggtgcacaagagcttacttcaccctgaaaatcagtattattaatgaaaagtactgttttcttaaagaagtcgaatgtcctttagatgaacaagaccaagtatacatctccattagattaaaatgtagcacagggttaaaaattatcagtttaatctctttaagaacagtattatcagagtttaaaatgagttagctctgtttatctacacacagcaaacccattcgcagcctcttggccacatgtattcagatgtttgaaatagtgaatcatttcattttcattctaaaacaatactgacttagccatataccttctgtttgtcaatctgaaacttgcttacatctaataagtagacctcttataacactgcaaccattctaagagttggaatttatttttgccaagtattaagtactgttacatctaaaatacagaatgt

SEQ ID NO: 58395 - DNA, 1018 bp, Homo sapiens
aattcaaaatataaaaaataaaactatgaagtgatttgaaatcggttttaaaaagttgttagtgcaagagaaattttatgtttaagccatcatggcaatatatgcaaagtttaaatgaatgacagaaatcttgattttagactgtatgttgtgctgttttgagtacactttatttcggagatatttagtattttctatacactctgaaatcatgagcatttcactttttctaagtcaattatttcataaggattttattaatagatattggtaaatagaactttggaaatcttaattcagaattcttactatacctgagtcttttgtaagctatagttttatgtacaaccttgtacagtttttttgacatacaattcagaactttgtttattctcttggactttgttctggccaatacattttttttaaatctttaagaagaactgtgattgttttagtgggtatttttctaattaaatgaaaacttgtataatggtattttagagaatgccagtaagtgcatgtttcaagttaatgtttttctcatcacttgtatgtttctaacacagcatgggactttaataaaaccatcctggaaacttaaggattgtttttcttctaaatatgtaagatgtggccgggctcagtggctcaagcctgtaatcccggcactatgggaggccaaggcgggtggatcacctgaggtcaggagttcgagaccagcctgaccaacatggtgaaaccctgtctctactaaaaatacaaaaaattagccgggcatggtggcgggcgcctgtaatcccaggtatttgggaggctgaagcagaagaatcgcttgaacttgggaggcggaggttgcagtgagctgagatcccgccaatgtactccagcctgggcaacagtgcaagactcagtctcaaaaaaaaaaaaagtaagatggtgtgatttttttttttggtcctcttattatatatttattctactgaacctatttatcgttctttcacccttctttcac

SEQ ID NO: 58396 - DNA, 2142 bp, Homo sapiens
ggactaaattatactaatttattctccattcaccttataaactgctacagggctgtggcccggtgtctctggctttatgcaactacagaatggttgctggatgagtttcttatgtagttgtcaaccacaaattacccttaacattcttaagtatttcatttatattttcttctaaagattgtttacagagctggaaatagaaaaaatatctcaaactgctgtgtgtttgataattataattaggttataattcaataaagcttagatattctaaaaactgtgtcatagtttttagtcttctggaggggcctcaagttctatatttgtttggagaaaagacttgtatgattaatttacaataacccgttgacaattttactaaatatgtgtgtgcttctttaatgtaggagctgaagttgctttggttggtggcttgaaacttctagctagactgtcacttcttacagaacaagacttatggactgttaatggacttccaaacgaaaataactcttcagatcatctgcctttattggcaaagttcagacttgagctctgactctctttgatcacatactaattttctttccaatttgtattgtttttcaaagaatgtaaagttcttaagtgtatgcatgttgtttatttttgcactgtggagattctgaagcggttatgttagatgctttgaaactccatatcagaagaaataactttataacaattttttttaataatgaaaaatattttcgtgacaagtgagctctaaattctctttattgtaaaagagatgtaaaggttttatattctaaatcctagtaaaattgacagtgatttttaaatataatgcatcttcctttgtctgcttagtaaaaaatttcatttcataattttggcaagctctgtagtggatccaaagtatctttgagttcttgcaaactacaagttgtttcctttccagaaggcttgatttcattaggagacccctctattgagttctaaatagtttatcttagaaagccttgggtcattcacaggtatccaaccagccattgtttagtttgtttttgaaggggtttgataatgctttttaagttgtacagaatgcttaatccatcttattactgtcctgagccatgtaatatgcctgcatcgtgttggggaaatgtttgggaaatataagccagcataacgtgtaaagctcactctttcaccctggaacagacaagaggtgggcttaatagaggcagagactggggatatacctttgtttccctagcatttttatttatttatttttattttattttattttttgagatggagtttcactcttgttgcccaggctgggggtgcaatggcgcaatctttgctcactgcaacccctgcctcccgggctcaagcgattctcctgcctcagcctctcgagtagctgggattacaggcatgcgtcaccactcccagctaattttgtattttcagtagagacagggtttccccatgttggttaggctggtctcgaactcccaacctcaggtgatccgcccacctcagctctcaaagtgctgggattacaggcgggagccactgcacatggcagcattttttaaaaattcagttttaagatctctggtttaggggagagattttattttactgaaccagttctatagaaatttattttattaggaaatttgtctttggaacaaagtggcagctataaaattatttttgttaagcctcagaaatatgaggaagcctgtaaaactctagtggggagatattaacttggagacctaatgctctgtaaatagtcatttaaactgttggttttagtggttttgtttctaaaatgttttcttttaccgtgatgcaccagtatgagatggtgctgacactttctatgaagtggttatgagcaggtttaataaatcctctatacaagtgtttgaatcaattttaaaacataaaaagtggaaatttccttttttgtagacagtaggaacaaggaattatatgcatttttactaagtagtaattttacactgaattgtaaatgtttttacagtgagttttattaatagaatgcttcaccttaaattggaaaacaataatagtcttggactaagtctttgtactaaa

SEQ ID NO: 58397 - DNA, 1052 bp, Homo sapiens
tttcaactcataagctatttaaaatcttttcacttaagatacctgttgaaattttgtttaggtatctggccaggaacagtcttcacggggacaaagaattttatctattccaatttggcccccaaacctaggtatctcacagaactgtgtgtatgaggtacagcaggtaccaaaagtagaaaagacaggtaagtgtttgtaatacattttggcagtctgctgggtaatcatgttccctttgaagacataaaactaagtttttaaaaagaaaaaatctcagggatgaatattcatatatataaatatgtagttattcattttttttcttaagacctctaaatttacctttttaaagttgaacttccagaattatctgtgcatgatttacttgcatgttgctttggaattgtttgcatttttctatttttcctaattctggaggccatcgaaatatatagattccagaatgaaacatgtaactaggcatctttctaacctagataagtcttaaatattgtttctagagtaagatgacgatattaaggcaaactagaacaataacattaatatattttcctctattcttacagacagtgatctgacacaaacacagctgaagcaaacagaggtcctagtgacagctgaaaagtgagttctggaaagcaaaaggagacatttgctaactttagttgaataaaaaactcatttctcaaaaatcacttggataaaaaaatgaaggtgatagtattccgtgctggtgaagggtgctggcccttaagtcagataggcctgagttccagtcctgactctgctgtgttttagccgaatgattttgagcaagaaacttaacatctctgaggttcagtttctttgtctatagtttggattgttgtgaggattagatgagacaaagcatataaagcacaatgtctgaaacatacctaggcacctaggtagtgttaggaagggaaacagcttgtctgtggacctggaccagctcaaatactctttgaaattcacatacttaaacaaaggtcaagatcacataaaaa

SEQ ID NO: 58398 - DNA, 2426 bp, Homo sapiens
ggtggaattccaggcattgtattccagtgaagtgaaaacctttgcaggatagagggagatattctaggggctgaaattttttatataatttaatcatacttagaagtccatttccaaatctgttttcccatgttcttcccatttttttgttttctcttttgaactcataaattctccaaaaattccgtgtttctcttcatggtttccatggcagtaagagcatgctctttaatgataggatgtaggagacaagatcaaaggtgaatacacacacacacatcacacacacggttatttctaagtcagggactgcctatgattgcaaagtcttgtgtttttttattcttttcatcacttttgcagaatgcatgatgtgtttgcagaatatgaacacacgcctggttgttgcatgctaggtttgttggttagccatcatttactagcattctgtagctatgtcatatttaacttttcctttgttgtacatttaaaagatttcttttgttattttgtttgcatgttccacttcagtgttttaaacactaaaacttcttccatatattgccattatatacacttctttcatgtataaactagaattctgaactaagggttgcttctggaacttggttaatcatttgacgatcttatcccactaatagggaataaaatacagtgtaaaatcatcttattgaaaagccaactttgacatacaaatttgttgttatagttataaaactgccaatcacatctgtggcagagccacttcttaactgtagagaagtgagaaaccacaacctctgtatagtcttagctttgttaacacatactctcagcctccagaatgacttgcaagattcttttaaacctgttttaaacctgttggtcagtatattgtgttaccgcatttgtaaccaatttgataacagttctaattattcagtgctatattgccacttcctagggaaaaacattctattcattgcttatgggaatttttaagaggctgaaaaatacatatatgtgggaaactgtatggtctgcttttgattaattccttatatttgtgcaatatattttaacaggtgtgataaagcggaattgggaatatatatgtagccatgataaagaaaaaacgaagatcctaggagacaaaaatgttgatcccaaatgtgaagacagtgagaacaagtttgacttttcagtgatgtcctataatatactttcacaagatttactggaagataactctcacctttatagacattgccggcggccagtattacactggagttttaggtttcccaatattctgaaagaaattaaacattttgatgcagacgtaagtgcaaaatattattgaaattcttcacataagaaaaagttggggccgggcacactggctcatgcttgtaatcccagcactttgggaggctgaggcaggtggatcacctgaggtcggtagtttgagaccagcctgaccaacatggagaaaccccgtctctactaaaacatacaaaattagccgggcgtggtggctcatgcctgtaatcccagctactcaggaggctgaggcaggagaatcacttgaacctgggaggtcgatgttgcagtgagctgagattgcaccattgcaatccagcctgggcaacaagagcaaaactctgcctcaaaaaaaaaaaaaaagaaagaaagaaaaagttgggttaaatgtttcatttgtgcatttatgaactaaatggttttatccattttgtttgtggggtaagaaaggaatatgtttaagaataatgatggaataagtcttaataaggtataactttcagagaggcatttgttagtggttgctggtatgaataatcatctaacttttcaaagagggtccaaaaagtttttaagtatgggtcagttttgagacagaaactggcaacatattaagtattcagtaaatattaactttgatttgaaatttcagtaattcatgcaaaaatgtcacctacctgatagcattcaaagaaatctgcctcttaagacctgaaagatagtaccaatgaacatgtaaaacccggaaaaatatcctgacatgtaagctaagaatatttccttttggaaataataattttgagtactaagggagctccatgtgattgagggccagagttttgagattgatcaaaattcggaaacattaatttggtagatctataacaagaaaaacaggtaagtcttttatttcaattcttatcaggtgtggaattttagaagcctgcttttagatattttaagataaaagcaccaggaaattcatgattgcatctctgtgttctaattcaagctatttttttcttccaaggtactttgtttgcaagaagttcaagaagatcattatggagcagagatcaggccaagtttggaatcactgggta

SEQ ID NO: 58399 - DNA, 1365 bp, Homo sapiens
gctagaattagtgctcttcaggttccctctggttttgttatcagaaagtagtctacaggcttcagctgggtcccaatcaactttgctaagctaatattcaaataaatgtgtaacttattgctacacagttacaaaggacctagtcagaaaaaaacacttgtagaaattcttaactgtccaaaagtgaaaatctgtttgtgtatagtacttaaccacagcatagggagataaacaagaaatatttgaatgaatgaaaggtgtatttagaggcattaaaattaggtttctaagaacaatcctaagatctataaatatagggcagtatgatgataccagattgcttttcactcataaaaatttgtccatcaggtcagcacactcctcttgtttagcctcttagaaatctgggatgctttcagatggagctgtggcatagctacataagcattgatttaggaaccactccctgctttcttttctgccccaccactaattatatgaacttggacagcttacttaacctctttgctccttgattttttcgtgtaaaataatgcctacttgaaagtctgttgaatgaaatgagatactgtatgtcaaagtgcctaacacactgttggcttcatagtaggtactcagaaaattatggtgttgttttcccttaatggatggggaattacatttacctactgataaagcttgattacaacctgactttctatatgtccattcttcctaggtgttgtgaataaggaaaatgctcttcgttaagccatatttgtgacttccgatatttcactaatacttttcaatcaagaaaacagcattgctaacttgcctatcactttaaagtggtatttgaaggatttgtgtgatacaattatgactttgtaattaggcaccctaaaaacctgatcaggcctattgcttactttctttgattcatctgtcttctctgctgtgatcaccttgttcctcctgatatggaaggtatataagcttttgtagtgtgaatttatgttgtgaagcatatgaaggccagagactatccactcttatcagtggttttcaaattgtcttccatggaaccctcatatttgaacacatttctgtaagtttattaaaagcaaatgtggtcagtataaaatatgtgttcaccccatcatcccagccccagtcccagcatgccagggattggtgttccatggcatgaaaagtaacacagaagggttctacaagttgtagaagtttgaaagccactgtagtaaccagataaactaatggtcctggttgtttaaaaaatggaattgcaaaaagagttgtttataaactttaatgaccaggacaataaaaatcttaatgcat

SEQ ID NO: 58400 - DNA, 1133 bp, Homo sapiens
gagactgctttggtgttatgaatgtatcttcagcatgtaggactgtgcctgacatataaataagttgagcaaaataaaagtatgagttaagatttaaaaggtagagtagttataggtgatgatgtcatcaaaagtcaatcccaaagccaaaattaaaatgtttgattatacctagtatggagcaatagatatacaacaggaagagtataaattcatacagtttctttggagggcaatttgaaataaaccttttctattctgtttttaattaatttttctacacatctattctcatgtctacatgggagatatatatgaatgactattagatgttttggtcttagattcttctttatattcttaaaaattattgaagacttcaaaggactgttgtttatgtaggttttagctattaatatttaccatactagaaattttagaaattgtattaaataaaaataaaaaatacactacatgttaacataaaaggatgtttttatgaaaaatgattcttccaaagcaaaaaagaaatagcaagaagagtggtgttggtttatgtttttacaaatctctaatgtctggcttaagaggagatagctggattcttatagctgtttctgtattcagcctgttgagatatgttattttggttgaagtacatgagtaaaattcagggtcacaaagataatgcagttgaaaaagggaggagtgtttttttttttgagacggagtctcgctctgttgtccaggctggagtgtagtggcgtgatctcggcttactgcaagctctgcctcctggattcatgccattctcctgcctcagcctcccgagtagctgggactacaggtgccagccaccacgcccagctaatttttttttgtatttttagtagagacggagtttcaccatgttagccaggatgatctcgatctcctgacctcgtgatctgcctgcctcagcctcccaaagtgctgggattacaggggtgagccaccgcgcccggcctgggaggagtgttttaatacctttttcagataattaaaggtattctttgatacaccaaaacttgatgtgtggtaatttcataaaggctagttgcattgtggaatcagaaccctgtaaatgaaccttt

SEQ ID NO: 58401 - DNA, 1056 bp, Homo sapiens
ctctgggtgacagagtgagaccctgtctcaaaaaaaaaaaaaaagattatctgtgataatgtttcattgtaagacatttatttatttattttgacatggcttttaaaagtttttgttattcactcacacagtcaataaaagcttgctagcatgctctgtattttagtcagtatgatagaacttgaagattcaaagaaccatgatattctattaagtgcttactatgtgcctcgcatgaaactgggaaccttaagtacattatccatttcctacattttaaaaatgaggaaataatctgcctaagattttatagctagtgaatgatagaggtagtatttgaattcaggtccttttagttatcgtgaaatagacacttcaccataagcatgagacacactgggcagagggtattttagtggttcagtttcacttgccagtcatataggcacttgccttgcctatataactaggaatctctttgtgcctcagttttctgttaatactctgcaaaggcacttaaaatgtttatgtggtgatgctacttttctgattttgtatttttttattgcaatcagtatgatatatggcatatgataaatgtcaactggtaatctaatctaagtactacaaaatgatcatattttgaaaatgtcttatcagcattcaaattttatgtatcatttaaaaattctatggaaagcaccttttgatcaccttgtaaagcagaactcactggtgccatatgtgtgttcttttttctcacaagcatgctgttatgtatgctgacagcatcacacgttgaatttagcataaaagctttttgcttcaagctgagatttttgaccccactaataatacagatgttctcataatttcctctcttcagcccctttataaatcaaaaagagtagaaaagggaaaattatatgagtaattacagtattagattactatagaaaaccatttcacttctttaaaattctcttttcatctttagtttcgaatcaccagcttcttaaatgtcaactttcttaaattgacaggctctaaattatg

SEQ ID NO: 58402 - DNA, 1016 bp, Homo sapiens
tctgttgctttttgggaatagaatttgttcttttggggcattctaagaagttgaaaaaaagttgaaaatgaggatatatattgacagggtgccaaagcagcatctaaagctgattagaaatttgagcttagtggccagtaacatgtttttaccctaacttactttatttgatatgaagtaggcaatttgaatttaaaataggggttggcaaaactatgttctatgggctgaatctggcctgccacctgtttttgtatggcctgaaaactaagaatggtttttgcatttttaaatagttaaaaaaattaaaagaatatgattttgtggttttgtgatgggaaaattataaggaattcacacttcaatgtctgtaaataaagttttactggaacacagccatgcttattcatttatatattgtctatggctgcttttgcactacaatggcagtgttgagtggtgacagagaccacatatggcctgcaaagcctaaaatatttactttctggccctttatagaaaaagcttgctgatccctgatctagaattgtatagtctaatccacttttaattttgatttagtatataatcctgaggatatcattttctttttaatttttttttcctgagaaacttggcagataatgttcagtggtgaatgcagatctcagttatttccaaactagtttttatataactctgttgtcagtcttatttaatggtatagatcactggctctcaaatgtaatcttcagatctctgggtgtttctgagatattttcagggagttcataaagcaaaactgttttgataataatgccaggacattctttgtcttttcaccatattgacatttgccctgatgatgcaaaagccatggtaggtgaaactgctgtgcttgggcatgaatcaaggcagtgtcaccaaaccgtaacagtactcattgcacatacttataaaaccaatgctaatttttcctaagtagtagaaactgttacattttgttaaatcttaac

SEQ ID NO: 58403 - DNA, 1087 bp, Homo sapiens
ggcaacatggcaagatgctgttctcaaaaacaaaaacaaaacaaaaaaaagagagctgagattcaagtgctttttcctttattaaaatgctattatttatagcaactatgtgtacaggcaacagctttctgtaaatagcttacaggatcttgtggtaaaggctctttttggcaaccaaactagataaagatttgtcttcaattttagtttgatgattaaggcaagaagttgtcttccagagttacagagagacagtaaaatgaatggactaagcctaaacaaattgctagacactgacttccatcagtaaattacagccttccaaattgacttggataatatgaaaaatgaataattagcatgatttgtattcgtttggctgattctcaatttaatatctgtttactattgtgatcatatttctaggcttctccagtgacagtgatctggtatctcttactgttgatgtggattctcttgctgagttagatgatggaatggcttccaatcaaaattctcccattagaacttttggtctcaatctttcttcggattcttcagcactaggggctgttgcttctgacagtgaacagagcaaaacagaagaagaacgggaaagtcgtagcctctttcctggcagtttaaagccgaagcttggcaagagagattatttggagaaagcaggagaattaataaagctggctttaaaaaaggaagaagaagacgactatgaagctgcttctgatttttataggaagggagttgatttactcctagaaggtgttcaaggtatggttttatgtatattatgttttggcatgctcttttgttggtatgtgggaaaaaaaagtacatacatatatcttctgtatagtcttatggaaataatactgaaaatgagaaattactgaagcttaaaagacctatatatggatatatactttaagttccttgagatgttagacattatcggaggtacttaaccctctacttttaatcaattaatccacaaaaacaggatttaaaaaaaagtcagcatgtcttgaagtctcttgtatgaataataatctttcttttctgatttgaa

SEQ ID NO: 58404 - DNA, 1057 bp, Homo sapiens
ttaagttatttgcatttaatcttagaacatttcataatgttaccacttgatggcaccagaaaaataaaaatctgtgcttcaaaatgagaattatagatgcatgtcagaaaataacaaataatgtgtcatttggttagttactttgctgattatggtggtgaattatttctccactagaacttgataccaaacctactagactgctatcttaaggaacattaccatttaaccatgtatctcctatttaatgcatgtttgtctttttgaaagcacaatatccattcctgctctggattggtttctgttattaatatgccacaattccagaagttaataactgactaaattgattttagtcttttattgtttattcataatgtgatcaatttttattcagacaaactatgggaaccacaatcatagaattctaatttttaaccagtatataaaagaacctttgtttcagtcctcctggttacacatttgaccctgtgtcaaatgtaagatcaggacagtgcttccagtccatggattctgtactagcatactagtcaccacctaacagacatatggacattgtccttcaatttctggggaaactgggggctctagttatgagcttgatttgacctttattttcagaagagatgtttccttgggtaaagtttgttctggggtaacaaaactgttagtgaaatatctctatagccagtaaaacgtatgaatcatttaaattgaactcttcataacatttgttcttgtgacctttattggcatggattggcatgccttataataaaataagtatttctggatatctgataatacagagaaaataatctttcagagctaagtaatgctttatacaaagattcttgtgggttggcaaattttgttattttgttactaaactattcatcctaaagaagtttatctgggttgttagtaggtctgataaagatggcttgatgtttttcttatttaactggtatttgcacagctgagaccacatgcaaaacacaatagcaacagctctctttgcccatccggcagagaa

SEQ ID NO: 58405 - DNA, 1036 bp, Homo sapiens
cgccatgttggctaggctggtcttgaactcctgacctcaggtgatccacccacttttgcctcgcaaagtgcttgtgattacaggcatgagtcaccacgcctggccagtattctaaaagttttagggatttaaaattaccagtattctattcattcttataacattaaatttgaatggtttacctatacttattcatgtaatcctcctacttttgcatccctgttagtttcctataggcatatctatgaagcaataatttcttaggtaaataagtatgttgagcctcctgtatagttttaactagaagaatagaaccatgaagtatatcagtcagaatttcttcaagtataacttctaatgagaataaaacagaagagatctaatataggaaagctgattacatttgattatacagtaattcattaagcatcttttaagactgtatatagaatcaaactagatatactttggagttatacaaaagatgatgacacagcctgctcttgcaaatcctgtagcatagttgaggacctgtatatgtacatagttgagcaaacaaagttacactggtaagagccatcctaatgggaaattctatcagaaaggataaaaaggagtgccttctgaatctgatttgacatgtaggattttttcggttcttaggcaaggaggctagaggagagtaggcacagtatttttcttttatggtaaacatttgctttttaaattttccttttgtatgttattttgttaagcctggccctttttggccaagagcatccttgattattttctcatgtataatttaagttaaaagtcttccagaggattgtgattagcttggtgcatttattatttcacttctttaaccatctttgggtctgaatttcaaccaacacaatgagaggatttgtgtaaatgatttctaaggcccctttagctcaaatttggtgcaaagcagatattatttctctctggaatcagtgtgcaaacatttctttctagcctggttgattaagacaataaaggaaccctt

SEQ ID NO: 58406 - DNA, 1074 bp, Homo sapiens
tatttaaagcacggtttcctaacatttttagagatagcattgtatggacacttttataataggacaacctttaagtaattttgaaataaaaggactagtttccttttacctcctagggcttgggttttataatcttaggattagaaagggctttaaggttatctgacccagtgcattacagatcttgtggtctatctacagtgccccattaaatggctcttcagcttcagggccttttatttatcaatttaacaaataccttttgaatgctgccctggggcaggcactgtgttaggtgctggacatattacagtatatcagacatggttcttctttttagtctagttggaaagatataagtaaatacataagttgtaaagcagcacagaagaggccataaaaaagcatgaaaaaagacagagccacttaatgtcacaaagtcatttcattttacacagttcaaagtcttagaaagtccttttttctcttgagccaaatactgcttctttaggtctaaataccgcccttctccagtgatcatctttcagttatttcaagatagttaagttatatttctgattggtattgtttgtatgttaatttcttttatcttgcttaaaattggcctaaattacaatttgttaaatatttttggatcttccttgtacaaaattttttctcttggggttcatatagtgcttctagggccaggtgtggtggctcacacctgtaaccccagcactttgggaggccaaggtgggcggatcacgaggtcaggagtttgagaccagcgtggccagcatggtgaaaccctgtctctaccgaaaatacaaaaattagccgggcatgctgctgtgcgcctgtaatcccagctactcggcaggctgaggtaggagaatcacaactctgggaggcggaggttgcagtgagctgaggtcacaacactgcaatccagcctgggcatcagagtgagactcactatatgtatatatatatagcttctgtggaataaatatgccaccccaaaatacactgctttggcatattttgagatggctattcagaaaagctaca

SEQ ID NO: 58407 - DNA, 1024 bp, Homo sapiens
gcctcagcctcccaagtaactggggttacaggcatgtgccacctcacccagctgatttttgtatttttatagaaagagggtttcaccatgttggtcaggctggtctcgaactcctggcctcagcaatctgcccgcctcagtctcccaaagtgctgggattgcagatgtgagtcactgtgcccagccttctgttgccattttaaaactaagagttaaaagatgcttttgtataattttctagaaaatatcttttatacttattttcttctaactacatttaaaatacattttaaaaagcagaaagcaaaaatgaagtctaagcaaatttcccgtgaatacatttcttttacaataaatgtatgccagttattcagtgttagaattgaatatagttagattcttgagattctgtttttaaaagacaccacagtattttgtttttatatgaagtattatggtaaatgtgatcattaccttaaatatatggcatcaggtttttaaagtggtattttgtggattttgttaaatctgtctcaaagtctattttctcatgttatgtttgaagtatgggtatgatagtacccagaaaaacaggcctttcaaaacaaaatactctacttttatgactccataaaaaatacaatctttattattatccatagactgaataaaacatcttacattttatgtttcattttattcaccataatgcctattttcaataaaattacaggtgattttaaatatgactagacttttttttttaatagaaagatcacataatggcttaagtatattccattaggagtagtatttctcttgtctttttgttcagccattggagtcccctgtgaccttgggtactttttccataggcgaactgatgcttcatgacgttctgtgttttctggtagcttgcctgttgcctgcctctgggttcgtcatcccccttatgctgacttaggcaatatttcttcagtctcttatcttggggctttgatgcatatgttctgaaggtggccac

SEQ ID NO: 58408 - DNA, 1070 bp, Homo sapiens
tgatttctgtagtacaaatcctcctcccatggccaatttcagtctgtggctgcttttgttctataatgacaaagttgaaaagctgtaacagagactgcataggcctgcggagcctaaaatatttacagtctggccctttaaagaaaaagtttgccaatctttgctacagtagtttttccaaaataataaagctttaatagggtaggataatttcatacttctgttaatttattttatccatcaagatgaggggtgggaatgagtagtttaggggggcaatgtgtgagaggttatgaagggtcttgaggtcattttatgggcttaagctttttctctcagtgagataagaagagtgccatgttctaacttatgttttaaaaagaaaaccctggccgctgttttgaggatagacaacagggcagcaaagatggaagcagggagatcagttggaacactgtagttacaagttaggtaagagttgatctttgcttgaatcagagtaataactgtggaagtggtaaggtgagttcagattctggatacattttgaagacagagctgacaggatttgccggtggtggaaaggggtgttaaggtgaatccagggtgaagagataccaaaaggatgccttaggctagagcctgagttattgagatcacattatagcaagttgctacataggagattttaggaagaaaattgagacttgaacaattttttttgaaccacttcctgttgatcatatatgttccaagaggaaaaactctgtttaaaatagtatttcctttacttctaagaaatacattttaaaatactttaggaaacagtaatgtttctaaaatacggcatttttagaaaaggaaaccataataaaacctattttggataagattattttgatcctataatttgctgacttaaaaaaatttattcagaaatgaacaattttggggaggggattaaatttcagccctgccctactcttaaagtttagtttaaagctaagagttaatgtttcattgtattgttaataaattattactcgtgtcttttatgtaggttttacttg

SEQ ID NO: 58409 - DNA, 1022 bp, Homo sapiens
agctgagagctcacgagctgaagttcttccccaacgatgacccagaagcagttagttctccaagaacatcagattccctcagtagatcaaaaaatagccccatggaattctttaggatagacagtaaggatagcgcaagtgaactcctgggacttgactttggagaaaaattgtatagtctaaaatcagaacctttgaaaccattctttactcttccagatggagacagtgcttctaggagttttaatactagtgaaagcaaggtagagtttaaagctcaggacaccattagcaggggctcagatgactcagtgccagttatttcatttaaagatgctgcttttgatgatgtcagtggtactgatgaaggaagacctgatcttcttgtaaatttacctggtgaattggagtcaacaagagaagctgcagcaatgggacctactaagtttacacaaactaatatagggataatagaaaataaactcttggaagcccctgatgttttatgcctcaggcttagtactgaacaatgccaagcacatgaggagaaaggcatagaggaactgagtgatccctctgggcccaaatcctatagtataacagagaaacactatgcacaggaggatcccaggatgttatttgtagcagctgttgatcatagtagttcaggagatatgtctttgttacccagctcagatcctaagtttcaaggacttggagtggttgagtcagcagtaactgcaaacaacacagaagaaagcttattccgtatttgtagtccactctcaggtgctaatgaatatattgcaagcacagacactttaaaaacagaagaagtattgctgtttacagatcagactgatgatttggctaaagaggaaccaacttctttattccagagagactctgagactaagggtgaaagtggtttagtgctagaaggagacaaggaaatacatcagatttttgaggaccttgataaaaaattagcactagcctccaggttttacatcccagagggc

SEQ ID NO: 58410 - DNA, 1038 bp, Homo sapiens
ctgcctttctgatagtataaaggtatacattgtgcttaattttaaggtttgtaagaatttgcctttgttcttatgttgtcttatttaccagagatctttttttgatcctgaaagttaatatatttttgttccttatggtttttttcccccaaagagaactttggaatccttaaggtcagatatttaaagtgaaaattttttattattttgagaaaaaatcctgtggcattagaaaactatatttatctttcaccttcttccctagtgtatttactactgattatcattttaatgtgttgtatggatcttgtggccttaaaattggcctatcattctgctatttggataaagcattatgttacttatgtgataaattcttccagcatctaactattggtttattttgagtattacataaacactttatttacaatgatggctgctttttaattaaattttctatgacttcttaataacagttccacagttgctataactttgagagtaaaaagaaatgagtcttttcatttaaaaaagcctagttaagaaaaatagtttaggagttctaaattacaatagaatttctctataagtgaaattctcttctaagaagattctgaacatactgtatttcctgctgtatcttggggagagaagatagcaacaacagaatatattgccagaaggaggttatggacttgtctctgggaatttttggaatggggatgggtaactatattgttagtaaaggtaaagtgaagaatgagatgatctatgtggtgctcctttagtggaaaaaccagggaactgagtcagatggcctcaccagtctgacggtgtgtcttaacacatatctgtaaatgtggaatatcagatttccttattaagcattttaaaagtgatgtcttttaaagaaaagtaaattctgaatttgggatattgaaggccccacaattgcttaaaatgcaagatggttcatgtttttaaaactttatggaaacgttttcgattaaagcttgagtttaacttgcagtttct

SEQ ID NO: 58411 - DNA, 1055 bp, Homo sapiens
tatatatatacctgattaagcaaggaatttgaatgttatctaatggtcagtgagaattttgagcagggaaatgatgtcattcatcgcttgttttagactggaaggaaatgtacaaaaggttatattttatgatagaactatgataaatttcccttttactttgctaacatttctaataacacacaccctttataaagtctaagagtacacttccaaaggtgatagtggctccctgtgaaatgggaatgggggtgagggttatgtatttgaatctgggaggggtagcatatgtactttgaaagagagcacccagggatatgtccttcatgagtatcattattttagagaatccttgagtatcaaatcatagagttcctagagcccctcagctctaaccctcatgttatagatgacatcaagtgaattccttgactcaacccaggactcctgattcctagttcattgttctttctcatgcattaaagttgtggaaaaaactatgcagatgaacagaagggaggattggtttacgtagtttttcttccctgctccagagtaacttttccaacaagcctgaatgttttcatatcatcttgctgtactttaaaaatttaaacatttgtgtcaattacatattcatgtaggtaataaaaaaatctcactggccgggtgcggtggctcatgcctgtaatcccagcaccttgggaggccaaggcgggtggatcgcctgagctcaggagttcgagaacatacagggcaacatggtaaaaccccgtgtctactaaaaatacaaaaaaaattaactgggtgtggtggcacgcacctgtagtcccagctacttgggaggctgaggcaggataattgcttcagccccagaggtgaaagttgcagtgagccaagattgtgccactgcactccagcttgggctacagagtgagactccgtctcaaaaaatactcaccaccccagaggcaaatcagtaaaacatcttgtcatgttttcttaccagtcttttttctaaatgtgtacttttaaaattagaattgtattgtttt

SEQ ID NO: 58412 - DNA, 1067 bp, Homo sapiens
gcattggttaaaaggctaggcacctgagtaccacttacatgttttactttccaagttccaacctaactacttataaacttgaaagtagttatgaattgtgggttacctatagtcaaatagtagggtttttttttttttcagtcaattggaaatgaaagggcaggtattggcaaggcttcgggactaatttaatgccattaggaaagcacaagataatgtaagggctaaaagcctcaaaaaaaaaaaaaaaaaaggtgaaatgaggagttgttgctgattggtgcaggaacctgaaagatgacacctgaaaactcaaattacatttcaggaacttgtgctggcgagagatagggataacacagataaaagtgtaatttgtagatattctaaaatcccttatcttagccaatagtttcagccgtggcttaaaacaatatatctatctgtactttagcaaaatgggtggatttgcatttcacatgctcctcctttggttgaaaacaactgattacataggaaagggaagatgatactataaactaggtcttcgttctcctacaatgtgacattggacaaggcatttcgtctctctggtttctaacctgcaagtaaaaggatgattaatattggtttagataatttttaaagttcctttagaacctgaagggtctttatttctacaacaaaaaaatcacccatgaggtagaattggctatacattctcaaatgtaaaaaattaagcaaaatgctgatctagtaggttcacataacttttaagtaaagcatcttgaaggtgtccctctatcaactgaagaacaaatgtctgagtttaatatatgactgcatcaaaaaaaaaaatatatgcaaccgcagtaggtgaccaaagggataagtaactttcaggaattttgaaagcccagtagtatttagtatatgctctctcagcattaaaaaggtcaccttgctaatacatgttaattttgaaagtttaattgacctttggaattttaatatcaaccttttttggtgtggttagaggttggagcaatcactgaagaaactgaagc

SEQ ID NO: 58413 - DNA, 1074 bp, Homo sapiens
atgttttaaacatattgtctgaaaccaggagagaattcttatttaagaaaattaacgtagatattaaagttaacattatctttttctcagtaccataaatttttcctatctgttctagcttaaggacagaaattatactctcagatgaatgacttttgaatatgatgtttgagttagtagactttaataaagtattgtgcagattgcctcctgggaagaaaatgaaggaaatgaaggaaatgaacagttacacttttgtaaatagtcatctacctacgtgtgtagataatactgacctaagattgctggggagtttacaaatcacctttacatacatttaaactgtaaagtgctatatatgtatgtaaagtattatgactaacaaattctaaactctgtagggtttttaaaacattaaaacattttaaaggtatcaaatctctttttagttttgcgtataatttaagcttttctataatattctgagccattaattttataactaaggacgacgggacagtagcataagcttatgatgtgatcatggtgattgtcttcatttcagttaaaagttctataggctcacagccctcatcctaaactgcttaggcggcactgtgttgattactacacttccagttaaaatggttgttgagctctctgtacttgctgtccataaatcctatgatagaacaaaatatgatgttatttgggataagaagtgtacctgattgattgtttcagactctggttgaatgccatccagcaggaataaatactcacactactttgaacatgccagaatgtgtctctgaagaggctcgctcactcattcaacaggtaatttaactgacctattggccaggtttatcaaccatgcagattagcagagcccacaactccaaaaccttaaaaagagattagtttggagcaagaaaaacccatttaacgtaaaacaaagacacgttcagaattaatactgtatattttcaggctttgctatcatcaaagtattgatggggtcagagagtatagttaaaacttcttggtattaatttttttcccaaaaattta

SEQ ID NO: 58414 - DNA, 1047 bp, Homo sapiens
gagagcctgtctctacaaaaaatacaaaaattagcttgggcacggtggcacgaacctatagtcccagctacttgggaggctgaggtgggagaattccttgagcccgggaggtcaaggctgcagtgaaccacgatcacaccactgtactccatcctgggcaacagactgtgacctagacttaaaaaaaaaaaaaatcttcctaaagtttgggtatttggttaggaatccacaagacagatgtttgattaaccccaccaagagacagatgtcaaaggggactgtagaagaattggagcctgtttcagtgccaatataatgactgaagtgtgttgttgcccttattatgtgggatatacatataaaattgatccaatggaaaacaagaagaaaaggagaggtaatgtttgcaagacatttgagataatttgtagaacacttgagtctctcaggattgttataggaagaaaatgtgttagatatttgaagggtctgtctttagcaaaaggattctaaatgactaagaaaacttctttaaaattgaactcttcccccgaccgtatgcttctactgctctctcaattcttctttctctcttcatcccctcttcatccacccctccctcccattatgggcttctctggtctctgaacaaaagatatggcacctgccttcaaggatcttataaaacacaggggaaagaaagaagcataaataataagtagggcagaatgtggcaagtgttataaagtacaactggagtatggtgagcatacaaaggagagatctgaggagctgcaggaagccttcctgtataggagcaggaccttgaagtgtagataggatttttaaacataagatttttttttcctttttttatattttgtttggagagaaggaaagttctcggggggacaaaaagactgttgtgtataaaggcatggagatgggaaaatggaaagctatgcgtattctgttttggctggttcgtagataacgtgaatttaaaaggtaggttggggccaggttaaatgccatgctgagacattt

SEQ ID NO: 58415 - DNA, 1031 bp, Homo sapiens
gccagggtggccaaacaatgaggaaatttgtcagtgaagccctcatgccattgggttttctcacacattccatgcaggcctcaacacagactatcagcatttataatatgcattaacttctatataatgtacgtctcctctctttcagagcagaattggctatgtttttttttttattcttttatttttttatttttttgagacacagagtgttgcactgttgcctaagctggagtacagtggcatgatttcagctcaccacaacctccacctctcgggctccagcgattctcctgcctcagcctcccaagtagctgggattacaggtgtgcatcactatgcccagccagaattggcagttttagatgatataactaccttccctactaagcctacttggtagtgtttgcaaaagcaacaccacccttttctttaaatattccccaaatgatagtaatatagatcatgaaagtcttttcccttgagattgttttgtatgtgtgagagtttgtggttgggaggtattgagtcctcatacaagccatttggatatgtattcttcatatttcttatggctattgcacctaagttctgttttcttaaggctacattaacattttaaattagaatatggtgctaaaagtgactttcagtaaaaggtaatgtattccctgagaacaagtaaatacttgggcagggagggatggtttgagtagaggtgaaaacagagaaatgatgggaagctgaccatatgtagaagaagctgaaaggtcatggtttcaaggccactgtgtttcctttcatttagagcatccacttttaaagatttatcattttcagtgacctgaaggcgtacaagataatctgtgtagatacctgaaactgcctttcaacaaggccagtcctaggtattgacagcatcctaggttgtcccaccctaaacattacctcaagtcccattgggtaggagtctagtggacttccaaaagcccccgagttcattctgcaatctgcctgtctttgcaatctat

SEQ ID NO: 58416 - DNA, 2077 bp, Homo sapiens
acacaccaacacataattatatcctcaactcttatgagagtttcagagcttaaaggcacattagaaatcaccaattcagtcttgtctttcacttaatggatgagaaaactaaagcccagagagaaagtggagttacctttatccattcacaccagtagtgaagggagtgaaatctggccttattcacttctgcctatttctcactggttaggtgctcagtaaatttactaaggcaggaggcatggcattggggttaagtttatatcaggccttccagtactctgagtagagaccatgatttgctttctttgaacctcagtttcttcatctttgaaatggagattcctgggctggattaagctgacctgcggtcctgcagggaccttttgagtacaggtctcaagtccagcatactcaatctctcagacctgtgtgcctcattctacaataagacgtagcaaaagaagggacaaaggctaaatattgtagtaatcttgcccagactccctgccagaactgtcttccgcttggggggacctggaaaggaactagacacggaatcatgccgtgggcagcttaagggctgtatgtgatgtggctctttgaattggtgagccaagagctaaagggtcatggcaccactttgcaacgtttgagtgaagtgagcattgggttttcccaaagttaaaaaggctgctgtgactggtcccttgatcttctgagccttgctgtggctcggagtctgcagcagcgtgggtgtctgcagtggcaggagcaaagcaggtcaggcagcacagaaggagcctccatcagggatcctggcaattcctggaagccatcgcctaagaccatggatgccaggcacatagtaggtgcttactttatatgggtagttgccagccctggcccccagtgaatgaaagatcaaatccctctggatttagaagggatgagaagaactgagagatgcttctctttagctttaagtctcctaattgtatctactacgcatacccccaaccttagaacattaatggatggtcagatgcaagttcacaaagcattcagcctggattattctgccatatgtgacagtttgctgcctcttttgttgttaaatttttctgattgacatttattagtgttactcactgttgccttgggtccctcaccagggctgcaacttgcaatggggtgttattacaacttgcaaaccacttctctgtttgatttccctgaccttatgtcaatacccgtagtttatttcctctctctccccaaagaattatttgaagtcaattaaaataatacaaaagaaataatatccatgatacttatgcaattagaaatatccttgtaccctacttcatgatttctattaaatctgaatcatttactattagtggttaggtcatctgatagattcagcatcagttcctctgtcagcaatttgtatatgacttaggacaaatcagtctgtccagatgtatgaggggaacgtgtattttcctccatagggcctcaaagtataggagtagaattctggaaatgttcatacttacaggtcaaaatctgctgcctgccccagctccacacacccaaaagaaagctaccccttatcctttcttttgccagaagtttaacataaacaatactgcttaagataaatgaatgacccaagaatttccatgtcatactaattgtatcaggatctaactttttttgaagaaaagaaaagtgatttctttaggtaggaataagtatatgctataaattgagaaataatggaaaatgtcttaagtctcaacagaatgggattcttacggtcagggcaattcagacaaaggtttgctttggggaatttttaatttgtatcacatttctcagtctggtgggtgccattggagaacatgcgtatcttgcctgaactgctagaaggcagctcctaataatattatataaagtttttccacttggaagctgtccctatcagacttctcagatacactttatacacacatacacacataaatgcacacatacacattttggccatttatcaccattttttggtgtg

SEQ ID NO: 58417 - DNA, 1055 bp, Homo sapiens
gctgggcgcggtggctcatgcctgtaatcccagcagtttgggaagccgaggcgggcggattacctgaggtcaggagtttgagaccagcctgaccaacatggtgaaacctcatctctactaaaaattcaaaaattagctgggcatagtggcgggcgcctgtaatcccagctacttgggaggctgaggcaggagaatcgcttgaacccgggaggtggaggttgtggcgagttgagagtgcgccactgtactccagcctgggagacagagttagactatgtctcaaaaaaaaaaaaaaaaaaaaaagatggcctgttgacccatagccacaaccagcagttctcaaccttgggttccccagaattaatgatggggtctgggattagttttcagtatttttcaaaacctaatggaaataatataatatacctacacaggtaaaccttcttcaaaaaagagccttttctcactccaaagtcttaggcactttaatattcttttaataagaaaaaacaaatatttatagagagaaatggaagaaaacagaattttccacattgcaaggatatcagggttccttctgccttttactttcagcacaattgtttcaacagcagcaaggagccatcctttaagacttcaaatgtgccagtaactcacgttatttttcatatgcggggaacataatttctgttatagcttataggggctcagtgaccaagctgcacgtttggaaccgatttcagatgaaagagacagaataacagcaggatatcctgaagtgaaattcaaaccctggtgagttaaaaccaccatctaacacctttccctcccgaagcaattgcacagaatcctctcaatcaaaaaaaattcgaagaacctgtataaaatggcatttctttaaatcatattgctctttgcagcccataaagcatttccagatacattcttattttgatccttccaaggatggctggtatacacagggccttattccattttacatagaaagaaactgagtgttagagaagttaagtggtttctctgaatttcacacc

SEQ ID NO: 58418 - DNA, 1522 bp, Homo sapiens
gtagcatctcccaccgttacctatttcctgacacacctctctgtggaaagaagtttgcaagcttcctccctggctctgctgtctttgcttttcctcccctgggcatttctgcacagtgcacatcacgcagcgcttgctgacgagtcacttcaccgtgattttttagtgcatttcccgagagagcaagggtctgtccatcttgtttcttctatattccaaaatgcaaagtcagagttcagtcccttcagatataccctaggggatagggggagtattttaggccagagaatacatcagctaaattagcgggttcctttttgaactattgaggtctgcaaacttggaatatttatttatgcctcaaccccaagacgcgtttttctcccacattcttcagtctgcttcttggaatccaagtgctgtcatgaaagctgcaaggcagtctgtttagttccaacagcagaatttttggaagacttccttaattctgtaggaggagtgtggtgactaccacttgctgacgagaagccgcggaggattctgcagcgtgacaatatgtatatccgtattataagatgtcagcccccaccgcgcacgcccccgcccccgtcagctctgctgggctgcagaggaggggggacgaggtggcacagggtggctctgcggcagtgtagccgcttcgtgctgtcggtatctccacaagtccagaagctggcttcaccggggtgggcaagagttcgacagcaggttttaccgattgcgctctgacttagacaatgtaattgttccccacttgggaaaaaagtaaagagttttgtagtatgtggcttaattcagtggcttttcagcttttgaaaaagctttggttcatctcacacaatacacacgcgagcacctaacagttgggaagcaacaatgtccctgtcctttatgggaagcaggaaaaataatataacaatgaataagttgaatcgaccccattatgaagaggcagaagaatagctaaatagtacactgacaaaatgggtatgtatagcaatcagatcccataatacagtattcaagaatctatttcttggtgggggcacggcggctcatgcctataataccagcactttgggaggctgaggcaggtggatggcttgagcccaggagttggggatcagcctgggcaacatggtgaaaccccttctctacaaaaaatacaaaaattagccaggcatggtggcacatgccctatagtcccagttacttgggagctgatgtgggagaacggcctacgcccgggaagtcgaagctgtagtgagccagaatcatgccactgcactccagcctgggtgacagagtgagaccctatctcaaaaaaaaaaaaaaaaaaaaaaaagcatctatctccacttgctaggttgcacttttaaacttagctttctggacaacattcgaatagtcctagcatactaaattccatctttgcatttcttgcaatttctaaataatgagagttgtcactcacatgggattt

SEQ ID NO: 58419 - DNA, 1053 bp, Homo sapiens
tgagaacaaagccagagcggaactgtgaggcaacaaagccaaatcaatggctgatactcaaattgctccctctgcaatttgacagcttgcacagatgatggaaagatgtatgtgttgtttagaataatgaggggctgcagaaagccatgaggtgcttgaggaaaaaacacaaagtagatcttctcatcccaacaagcttgacccaggcctgagtgaaggtcatacaatcctgcctatcttaaaggatgtttttatctctagcttttgtgagcatcctcgtgttttccaaaaggaaacatattttacttgaccttaactagggggactcactgcatcctctcctctcacactttattccagtgtatgtgctattttttaataatgtttttttcaatcttcccagaaagaagattggcccatgcacaagctggaatgttctcccatggttgtttttggggaaaactggaatccctcggagactgtaagactaacagcaaggattctggccaaacaggtgaggaaatgggacaatgttcaagtgcattttattttgtttttcttttaaaggtcagaaagatgagtaactgacctttggtaaccatctctcgttaaacatccttagactacatttcctatcatatccatatggacaggggtggggaaaatactccaggcataatctagttagttgtgtgccctgtgcaattaggatgttgcttaccctagaccaggagcatagccacagctctgaaattctgagctgttttcatgacaggtttacatggaaatacgtgacatgaaaagcctgacctcaaataattagagcttcctagggaaccagattggtctgagcagctttgagattttcctctctttccattctgacataaagagtgtactctgttcccctttcctgtgtaatattctgctctttcttggctcctttcttgcctgtgcataggcaggcaaagaattggatggaacagccttgactatgacatgtgcaaagaagagaaagagtggaaaagtagaaatagaggcaagggagagggg

SEQ ID NO: 58420 - DNA, 1032 bp, Homo sapiens
gagaagttggtggcagggcctctggactataaatcttttaaagctgaaattttggctgggcatagtggctcatacctgtaatcttagcactttgggaggccaaggcagaaggattgtttgaatccaggagttcgagaccagccttggcaacaaagtgagacccattctctataataaattttaaaaattaaaaaaatttcccaggtgtggtggtatacacctgtggtcccagctattctggaggctgaggcaggagaattactggaacccggaacttcaaggctgcagtgagctgtgattgtgccaccatactccatccagcctgagcaacaaagtaaatgagactctgtctctaaaaatgaaaaaaaaaaacaaactgaaatttcatccacttctcctgtatacctaccagccctcctccacccttaaaatttttctattttttaatctaagccaaatgtgatggaaatgattagcatgtatctgtccccagaccaagttaggatcctgggctgtgtaaacagaagtagaacatttcaaaactctgaggtcatccttcagctatgttcagcttgggtcaggtgcttgccgaaatgctacctcgccagccagccgagagtaacaaaggccattcatgggttgcctgtagagtgagaccaaaacatcagaattgtttccctgcaggaggttaactttcggatccttaataacagttatttttaaatttatgcagagtatttgggctgaataagtcagagggaataggatgactgggtgtgaggtatcagagtcagtaagtcatcagatgggatctccgcacatcttgggaggattgggtggccaagctggtgttttattattttgttcccctgaattattgatgatatttatagtgatatgttaagaattcagaagaggctggtagactttcctgaatgaaaagctttcccaagcgagatgacttataaatcttataaaaatgcatcccgtgaatggaagatttctgctccaaaaaagaactattgaaatatt

SEQ ID NO: 58421 - DNA, 1047 bp, Homo sapiens
agcagggggagcccaaaggaagccagctcttaaaatctgctcttggaaacagaatttgttaaattggggataaactcaaaccttccttttctcctagagtgtgtgaggaagtgcactggcctcatgcgcagttctctgtgtgagatctgtagggagagaggagcagacagacagcatcccagccctgtggttctcccagcagggccttgctctgctagacccatctttatctgcgtgagcccctcccggaagcccagctctggtcttctgtggggccgtgggtcccagggctgcctcctacccaggaatacagctagaacatgtctttttggactgactttcaggagacacagggtggaacagcctagcctttaaataaacacctcttacacacatgtaaacacacacactggctcacccaccagctgcctctgggccctgttcttagggaaatggctgtttcccaggcagaccccatcagtcagtcttcaggtacagccggagagaacacttgctgtatctaaagcccctgctggacaatggggaaagaacatccagaagacacaggaagtgttctgacttcagagcacttaactgttttgctaaaccaacccatatcatagtgtgacagaaagctggggtcttaagacacattggggtgggtgggggttgggtgggtggctgtatgtctgagtacctaaggtgataggcctaattgctgccttcataaatgggacatttacttcacaagctgttttcccagggtcttcctctgggtatgtctgaaatataaaaatctggactgggattgaagattgtgtttacaaatgcttttgaataggatttctcctgcagttgttacgtagcttttcagaaacacacaaactacaaataatgaacaacatctgcaatgattcggcagggtggcagcatccacgctctccacccaaaccctggtgggatttggagaggccgctggtgggcagaggttggccctaagcatggcagcctccggcttactgcacccagcctgtggggcggctcagt

SEQ ID NO: 58422 - DNA, 1096 bp, Homo sapiens
tgcctgtaatcccagcactttgagaggccaaggcgggcggatcacgaggtcaggagatcgagaccatcctggctaacacagtgaaaccccgtgtctactaaaaatacaaaaaattagccaggcatggtggtgggcgcctgtggtcccagctactcgggaagctgaggcaggagaatggcgtgaacccgggatgcggagcttgcagtgagcggagatcgcaccactgcactccagcctgggcgacagagcgagactccgtctcaaaataaataaataaattaaaataaaaacaggtcctggtggagaacataggctctaatggccagtttgcatcctgtgccttaaagcagagagatccaacttaaagttaccctgggtggaggtgtgaggagattggcttctaggctctcattgtttgtcttgctttttcctaggccattgcaatcatggaagtagctcacggcaaagatcatccatatatttctgagatcaaacaggaaattgaaagccactgaaactatgcagcatttcagttttcatttaaacacttagttcagaaaccttaaaggatttgaatatttcaaattgcacacgtcactccagcatctctgtaaaataattggaatgaaaatacttcttgcacttaaacactgcacatgccgtactttgaggttagtctgaatcttgaactttaataccaaattaattttgaatgcttttgtttcctaagagataatggcatggtttcatatgttatactttggacagacagagttttaaaaatggaattattttttctttcatgcctcttgtaatgttctgaacaaacttgaatgatgaaagtattaaagagatatcagtatttgaggtttgtattttcttctgtctctggggaggatttctcagtggtggtgggagcccagtcttggagtgaaagtgacacctgctgtccataattcagcaagctcaagtcttctccatgggactggggtcgggcagcctctttattctgcagttgctcttgtggggctgtgcctgtggaggaagaaaatgggaagaaagagaaaaaggtacacgaaggaaagaaaactatcat

SEQ ID NO: 58423 - DNA, 1047 bp, Homo sapiens
gatgctttccttgatctttgtttcacaaaatgttgtgaattttggtatcattcaaaacaaatgacatttattaggtttcattttgaaacgatgtacagacaagtccccaacttagaaaccggtttgttcttaaggttcttgcgtcagcccatagaagcccactgacctccaccacagcccaaatggagggctgtgatagccagatctggttggcttttgtgggctgacccagacatttaatcaccatctcttatgttgttgccgtaagaaatgcattccaggttgggacttgggatcctgagagcacattcgccccctgtggtggccgcttgccaccttgcaagatggaagcccagtctccttactaccaaactgtagttgtaagcagagggaggggtgagatgtttataggacattccctaagctggggagtgatttttatcactattcatgtcaactgtactttggtatagactccctatcaatttaataatatgaaaagcctaaaataaaactatgcatgctattctatgtgctattttatatcagtaaataagcttatgcttgccagttgtatacacagttatgaggtgtatagaactgactttgacagtattttttgcactgtttcctatctgtttttataaagtcttatttagatattggaccttgttgatgttctcactgcccttgtgcttgctataaaatgtttcatatgtgcctttacaaatgtgagatctttattctaacctttttttgtaaaagatatctattgatttccatatgcaataaacctttttttcagagaaaagttacatcttctcttttctgtactgtatatgtttgcattagttgaaagtgcctgggaaaacctgcatgctttgttttctaaagcccatttattgctacccagtttttagtcctgcataaccttatcatactgaagatttagtttgaaattcccaaggttgtcactgttagaagaaacctgaaaggggtgatcactaggcaagtggagtgaagaatacatagaaatgggtctttctc

SEQ ID NO: 58424 - DNA, 1033 bp, Homo sapiens
ctccaatggcctacagccttatggttggcacactagttggccctatagggtggaaataaagctgtaagatgttaaactgcatttgatacttctcttgaacgctgagcaaggaagcaaaatagttcttgtctttacttaagcttctaagacattttggggcaaaggaccttacagatggcgtctgttgaaagtaacagcaacgtgccagggagaaatgtgggggaaatctcatcaaattctgccacctcaaatgtgttgtccagaagtcagtgttattcagggggccctgtgaaacttgaccaccagcttgcgccatcaacactcagcctttatccagcctgctctcagcttttgtgtttctgttagaaactcagataggtaagtatttttattcagtagactacctttcttatcttttcagcttaatatagctgcatcttctttctcaaagccaaactaagatattctctattaaaatgtccatgagcctagcattgagtgtctggcatccatcaatttcatagactggaaaatgattgttgtttggtacagtaaagaagaggatgtgcatcagttcctaccgtttgcagctttgtttttagccttcccattttaaaaataaattcaaggacattgagttacaaggcaggagggctggagctactgggcagcctgaatatgacaagcatttgtgtggaaagtcattgctccttctgccacactttgggccatcaggatcattctttcccagaagtgccataaacttgctcaaaagtttctataaatgggaagagggagaggaaggatttttgcatcagtcctgaagttgctatccaaaagttctctgtttcacaaataattttctgaactctggaatgcctctcctactccctgcctccctttctgtaatgtcagagtgatggaaaccaccaagtggcatgctagggaaagcctgcagcagtgttggagtctatttcaccctagctcatagttttaaactgtcttcactgttgaggtagagcttgatgaatgt

SEQ ID NO: 58425 - DNA, 1050 bp, Homo sapiens
cccctgaataacactgacttctggacaacacatttgaggtggcagaatttgatgagatttcccccacatttctccctggcacgttgctgttactttcaacagacgccatctgtaaggtcctttgccccaaaatgtcttagaagcttaagtaaagacaagaactattttgcttccttgctcagcgttcaagagaagtatcaaatgcagtttaacatcttacagctttatttccaccctatagggccaactagtgtgccaaccataaggctgtaggccattggagaatttgtgtggtttctacagaagacccaaatttctccatttggaaaccatgctggatgagctgttgctctgctcatgaaaagaaatcactaaataagagcatgatgagtgtctcaaaaccattggcaatataataaaacacagcagcagaataattgttggtaaaacatgggaatgctcaattccctaaaagggctaccctaagagcccaacagtaattatgtggtgcttccggaaatgtcttactctaggagctccacagagttatttctgacactgagtaagaacacaggtctgactcaatcccatcccttgaatctgtgctccctggcacacatcctagaatgccctgtaccctccatccccccaacccccgcacctcaagggattgacagatcttccccaaacgaaaatcagtaacgaaatagttgtcctttaccaaagggggcaatcaaggaccctctgagaataccagaatccatggatgttcaagtcttttatataaaatagcacagtatttgcatataacctatgcacatctcttgcatactttaaatcatctctagattatttacaatacctaactcaatgcctacacatcacttcatttgtgtgaattcaatgtagtattcagcatgtggcaaattcaacttttgctttttggaactttgtgggtttcccctcttccccaaatatttttcaatctgtacttggttgaatatagggatgtggaacccacagataggggtggtcaactgtactcatctt

SEQ ID NO: 58426 - DNA, 1140 bp, Homo sapiens
gaataacttttgtgaattattataatgcagtttccctagtaatatagtacttttcatttgaaccacatcttgactgatctgtattgtaatatatgtcagcaggtaaggttgcctgctggatcattttgaggacagaggcatgagggagcacatctcttgtgaagttgcagccagatttgtaaccaaccctgaaattcatcagcttaattcatttatcagcttgattcattcatcattcattgcttatatccaaagcaaagacggtaagaaaatgaattcatcctgaaatataaagaaaagggtctgaaggaacaaacacgattctcttatattttggggctcatgagccttgatagacagtttcctctcgtcttcatttccacccctcatcctcagtagtctcctctcccccacgccccaccccaacttcccccccaagcttgagttaaagacagaatagctaaagacagtgctgcctttacaatgcagtaattgccatctttggggccgaaagacaagctctgtgttgtgcttttcttgaccaccccttatcctgggctctggagcttgtgtttccctgctggcgactgtaccttgggtatttgttgctacctctcctgtttgctcagtaggaccctgtctggtggcattgaggctctggaccagaccatctgtgcagttaaggctctaccctgattgagagaggatagcagacctagaaagagaaaggagttgggcagggcctttgaggattgtgtttttcaggcagggccttgatgatcattgttttttatttaaataagatgtgtgtgctggacagagacctaaaagttgaggtcactaagtcattggaaaggccatcaaggaaacagatggggaagctgatttatgggagctgtaaggcatttagctacataacaggggtcctggccaggaaacacatcaaatgtgacccccgctgtgctgatatcatcttcaggctttggtctgcaagatcagaattaatcccactcgggaccccatagtccaaacttggggccacttgatgaacgatggtagaattgtcattggcagagccctgtgcttctttccttttcttcataaaatccactcgctggtcagttatcttcactttgaagc

SEQ ID NO: 58427 - DNA, 1094 bp, Homo sapiens
gacacacccttaggtattccaaggatcagagattaattatagaattaacgtcctcagcattagcccctcaggacggaaacttaggaagattttcctctacagtttatgtgtgtggatctctcaatcaacaacaaactgttttacaagttttgctccgttccgtctgtgcagaaggtccgtcactgtgattggattagatggttcatataaccctgtttctcttttccttgtcctgtcatctttacctttctaaagtgtatcgcatgtaccctattttgtttttgttttgttttgttttgccctatggcagggtgtatttgtagggagtcttttttcttatttattggtctatctagctaaggagttaattaagaataaaagctcaggagtcctgtaggaactggcttccaggggcccagtgggaatagtgggaaggctgtgtttgaatttgccctactgatggtgattgtctgcattccttggctggggagttacagatttgaggagattaaaacacattccaacattctactagtattataaacaatgagcacatgccttttcttgccgcaagaatctagagaagcagaagatggcaggcctggaggcacagaagaggccgctgatgttggcagcattgaatgggctctcggtggctcgagtctcagggcgggaagagaatcgagttgatgccacccgggttcccatggacgagagggtaagtggcaggcttgtcaatgtgactcattctctgtagtcttaggatcccaaaacaccctccttgcccgaatatgccagcattgagatttgtgtgatgcattctttcttcaatctgagattaggaagatcaggtataactgtgttgcattaaatcagtccctttcagcatctcatgtttctccattccggtcttcctgctttgtccggttggcagatcattggttgactaaaaccatcagcccctaacatgctgtatgacttggtcaagtcactcaatttctttgggcccacttcctgttttgtaaaatgcacaagttaaacacttgcagtagctctgaatttctgtgatttttgtgagcaattgccacttctta

SEQ ID NO: 58428 - DNA, 1088 bp, Homo sapiens
aggcaggacaacttgaagcaaaggcaggaagacttgaagtagggagggggcttccacgtcacaggtaggtgagaggcaaatggttgcattcttttgtttctgattagcctctccaaaggaggcaatcagatatgcatttatctcagtgagcagaggggtgactttgaatagaatgggaggcaggtttgcccaagcagtgcccagcttgacttttccttttagcttagtgatttggggcccaagatattttcctttcacagtgcttttctcactttctcccagtaacctcctctgagatactcctttggtttgtctgatgagtcggctgccaccaggataggcatcctgttgtcagtgtcactcacacaggcttcattctgattgtaggtgacattgtggagacacatggaagggcgtcatgcagtcctcccacccgcaattagaataattcataaccctgtgggatggctccgtcaagacctcttcctggggagtgaatttatacatcatagaataaggaaaaaagtctctcaaggcttgaaaagaaaccaaggattcaatggctcttcatctgtgtcagtcaaatgaatctgcaaattggttgcccttcattgtgaatcaaaatcctaaaccctgcaaaactcatctgcttctatgaggaatgcctgtgttcttcccttaacttcaaagacacacttaattttaggaaaggcccttcgtggcttgcttgaagtgagcataaagagagctttttcatactcggttagtttcaaggacctgaggaagcacagcaggaggctaaaaaccagccctgcccaatccaatttcaatttagaggtgagggcagagaggatggaaatcaaaaagccacaaaccaggaccaggtgtaaacatcaaaacctttccctaagtggtctgctcagttccggagtccatgttcccccatagctcagtggcatgcagtgatgtcccaccatttgtgttgggaggcaccgtctctgttactgtgggccctctgggtgaagcctggagggtgatgcctgcggatcatcttaggtgaccccagccaggctttgctgttagtgagt

SEQ ID NO: 58429 - DNA, 1033 bp, Homo sapiens
gggcactgtggctcacgcctgtaatcccagcactttgggaggccgaggtgggcagatcacaaggtcaggagttcaagaccagcctgaccaacatggtgaaaccccatcagtactaaaaatacaaaaattagccgtgtgtggtggcgtgcacctgtaatcccagttactcaggagggaggcaggagaatcacttgaacccacaaggcggaggttgctgtgagccgagatggcaccactgcactccagcctggatgacagagcaagaccccgtctcagaaaaacaaaaaaaaatctccattgctgcttgccatgaacattttcactcctttaaaaaaaacctattaactagaactaatcaaagccagattgacttctcttcattcaccatggctgcaccataaggtagccaagcctaattttaggaactccgaaacagttgtaacttaaaatttgctttgatggattccattaggccaccttcatttccaggtcttcctaacccatcactgggattcaacctgaaaagaacaatcaaggcccaaagttttaaggaagccaagttcctggggtcagaaattgaatctgtagcaaccttgttacttttggaaaaccttaagaacattctcaacctcacagttctggccagccccactagagtagtgctaagagatttttatacagatatgactttttgcaaacctagaaggaaattgtgcaaggtgtacctttgcctctagcaaagaaaacctttggcttggaatggaagaaatgggtaggtgctgttgggagagagctttcccagcatggaataaagcaatttattggtagaaaatgatttttcaatacttcttccagaccacttaaaagcaacattagcatcaagaacctatcagtctaagcatttaatttagctatttcccctgccaacttgatacttaatgatgtccacatggtcccataacctcattttggttgtattcatcctcttctcttgttactcgtattaaacaaatagcctgtagccaaaatcttg

SEQ ID NO: 58430 - DNA, 1025 bp, Homo sapiens
ataagccactcacaggttttgcttagtttccttagaaactgcttccagaccttttcatttatcttgaaaccactacaagatgagaattcacatctactgtagtgtcatgttaattataccactagatgaagtcatgtggcggggctccgagtatatctaggatttcagcagttgatttgaaggaatgaggccagaggaaaccaaatatctcttatctctagagaccttcactaaggagcatgtagctatgagtccacgtagatgtaatctgatagaactgtaggttgtgaagcaagctgggtgcagcactattagagagtattgccccagcagaggtacctaaaaacatttagtactggtataagggaatgatgactggaggaaaggctggaaaccccaggtaaagagctcatccatccttgacatagagagtaaacatgctaagtcaggtacttatttgtgtctatattgcctcatttttaaagtaggagcaaaaatagctgccataaagagttggtgtaagaatcggactctatacagctaagagacaatattattgctttttattcttctagcagacatttattgagtgctctgggccaggtactcgattcagtgcttggaacacagaaacgaagaaggcagaatccctgcaccgggtatggggcctgtggtctgcttggtctcatcagagatctcatcacagaagtaaaaattataatgcaatgtggtgaccggtaggggactgcagcaggctcttctcctcacgtgtgggtagggggatatgatgaagggattcctagagaaggtgactcccagagctgagtctcaaaattattatccaaacagaggatggtagaagtattaatgagcagacgcatcatatgagtgaaaaagcggtggcagggaattacaggttggggcaccaggtgaagggtaaaagatggttagaaattggttccaagtaggatgggaagcagtagcttatctttcctcatctggtgcttattttggtgtatctcctt

SEQ ID NO: 58431 - DNA, 1528 bp, Homo sapiens
ccagaatggcttggccttctttttgctatgcagccttagttggcaagtccaatttattatagataaacaaatgctttttcttaaccaagacgttttgaagtttgccatggtcctcagcagaatagttcaataagacagtccatctaagtgagtaccaagcatcagccaatccggcaccttggaggtatcaaggctgatatccagccttataacaggacaagtagccaatgtcatgtgtaacattaatgaagactctagtcagtagttttcttattctctttttctcttcattgagccaatacagggataatcgtttgtgaggtagaatgaaacgtttcttgtatacaatcatgctttatttctccagctttatagggccctcccctgtgggttcctagcccctttggtgttttatggaagctatgcctcggaaactgctatagcacatcacatcctttgcagcacatccacctcctgaagtgggtgtggttgggggggtcatggatcatagtcatttatagagctgagcccatcatccaaactcattttccactctctgttgaccaactttacaaaaaatggagatttatcagaaacctaaagcaactggcacatttcagcaatttgggagatgcctgcaatttcagcacaaacatttcactccagactagctccactggctgttttataagtgttcagttccccctctgttgcacgtttgcaatttgccttaatgagaactgcccatgtgcatcaagtagaatcgagcagggtggccgcagctttcagaaagggctaaatggctcttttttagatttgtttaattttcttttgcttctctaatagctgcccttcatagggttgtaatccattttccttgccataatgccttatgaagccatctgcatcccacttacatttctgcagcccatatatagtcatattttgggtcattgaaaaatcagagtaaacttttctctgcttctagaaaactgacttctcaatctctggaagttggaggttttgttgtggcaatttgcttgtgttgttttttaatgtggactgcgagaaacaggggcagttgaggtcatgttgaaatctgctgtggttggttctgatgtgctttctagtatgttctttctttagtgggaccaacagggttataataccttcctctgagttggaagataggcgcttctgacttattgccaagctcgggtaactgagctggactgcctctttttcttctctttccccccacatatgtgtgcatatctaaggtgaccacctatagaccgcatgattcctggtgactcaaggatgagggtgggagcaacagtaccagtggggggtggtaatgtggtcagctctgcaataagtgaaaaagcagacaagaaaatatgcagggaaagactgtgagtaggactggagtctcttttgattggtacaggttcttattgacaaaaagcatgtcatgatatatcctaggaaaaatacttgaatttagcatgaacttttccgtgagtgg

SEQ ID NO: 58432 - DNA, 1012 bp, Homo sapiens
gagacaaactctagaatctctacctctatcaatttctcaagaatgcattgcttcggtctgcttattttggattattcctcttgattccatctcaccatcctaagcagtgcttccctggccagtgtttagcaagcctatttctgtgatgtaaatcctcccactgtggtgttacggaagggtagttgggaaaagatgtgtgtaatcagttcttctgagcccatagtagtcagcacatcacaggttccaggggcctggggttcagctggtagagatgctgactagtcagctacgcaactgttgccttacagagctctctggagatgttttagccgtcatggcttcctctgcccccgtgaccatcaagtaacatcagaatgagcctactctgccttcagtggttttgaattcgtttcctggtatacagaaaggcctggcacagtcccttcctaggctcaacttttgaagggatgatggcctggaaactcattggcctataccccaatcattagaaatatgtaagcacacgcaaagcattttttataaacgtacatctgagaggcaggcggatagggaagaatgaatgaaaagagctattccctggcaccacagaacttacgcggcaacccaaaatatgcctggaaataacctgttataatggagagccgtgttataacagtagaaatcataactcagttctaaaaattacaacctttaattctacagcagtaaaggagatattgaggaaatgtgactaatcaggaacatctgaggaagggagctttaagatttgcaagcaaaatagcaaatgcccacaccctcatgtgaccttaagcactttctattcttataggatttggccctggaagaggctgttctggaggagctgacccagaaggtagcccaagaacacaaagcccacaggtaaggcaggcagagggtaaggggctgcctgcacaacagatgtttacagcccatggggcaggaggcatccatctccctatcagcaactctg

SEQ ID NO: 58433 - DNA, 1050 bp, Homo sapiens
aaggcccatcctttccgaatggaaatgtaaaagcagtgtgtgttagaagaggtgtcggcctggggcttgacctcttgggcaaggaggtctggaaggggaagctgagtcacattgaagaatggtctgcatgccaggcccaggtgttgaccttgctgagtaggccgggggtagtcttagaagggtgtaaactttttccttggttccactggagctttcaaagagaatgcattcctttggtgggggagggaagataggatgaatggctgtgtttgatcttatgaagtaattgaatttgttaaatggcatttcttcagcagagaaaagaacaaagtcaagtacacaaggcgctccacaggtgtgtggctgtgtacaggcatgcattctgccatttttcattcccacagggccatgctcgcactctccctggcagggcacatacctcagggaggccccaggtgcagatggaggcggttaagttgagaacaatagcagagggggtacctttgggcttctttttaaaagtaggaaacggagatttaatggaacactttttgatcttcactttattttatattctgttgccacatgcccttcattagcttttcaaaattaatggggtttttactcaatacctggatgcacatacatagctaactttctaagccttgtgatatctttgttactccacaacatgaaactaaaaatgttgagcttatttcctatcacggacttgagtcatttcaatggatggctaaacaggaaaccgcaaattaatcagttatgtgaaaagtaagagctgccataattccccgtctgctctaaagtctctcgtgaactctagaattagcaggatgtgcagagctatagaatttttagcatacatttatgtctgtgctttccagttttaaaatatattgatttttcagattttaatgatttgagatgggatgtttttcacagttttgaggtgtacatttttaggggtagtgttttcatccatgtaaagttaagttggagatgaatctttatataagtggtattttagaatca

SEQ ID NO: 58434 - DNA, 1063 bp, Homo sapiens
gttcaagagcagaaagcaaggatcaggtcgtggcatgtctttctcttttgcaacaccttgctatcattggctttttttcactagttaaggcctgtgtgtgtctttgtatgcatttaaacaaatattatcctttttaggaaataattgcaatcctttggctcattgaaactgaaggaatcttattaagaagttgggtgtctctggcaaaatagggtatttattgatcaatgaatgttgaaaacttctagacttgaacgtttgccaagaaaatcttgtctgtgtttgggtatatgcacatgcttttcttctcatgcatgtacatgtattagcttatagtatgaaaaagcctagaagaaaaactttcccttttaagggtatctttgctagagttttagttgtagcttttccttttgtttgtttgtgttttccccctccctatggggttatttcagttttgcatagttgcaggagtattcgctttgtagtttgttagacagtgcagacttttaattgactgtcaacttgaacagtcattaaatgtaaaagcttttagatagtgcatgggtcaggtaccaaacgcattattagactttaatagtcataaactgaaattcttctcaagagttttgaggatagagggatggagggagggaggcattcaggtttatctggttgcatgcctgcatacatagtatttatctggtcctggcagacagagaacagcatgggccaccctgtcctttatctggatttacagctgtgaacacccgctggaatggatggaatgtgttggttccttcctatgggtatctctgtcaatctaagattttaaattattcccctttgctctcctgtaccccaggactctaggactacttgtctcttttccctcttttttttgtcttttatagtagagaaacgtttccatttgcagaatataacatcagccagaaaccaatgctgtctggcactttggtacatgctgcacttgggagaactgggttccagtacattctagcaagattcctctgatattgctagttatgaagaaagttttctagtg

SEQ ID NO: 58435 - DNA, 1027 bp, Homo sapiens
gaagtgataattttattattacatctttaaatcacatggttaatgtgttagtatttggtctatttggaacttttctcaaaagcaaacaaaaataatgtgctattgagctattttgaaaataagttcttaagcagaggtattgatttttatcctttgtgaattccttgattttcaaagatacattcattcatttgttcattcattcattgattccaaattgttctttattagtgttacattgcaggactgagaaagattaaacaattgaactcatgaaataataaagatttgtaatagagcatgagtcaaaatgttaaaatagtctactttttctaaagcttgagtagaatacgatgatgccacattgtagtgtttacctttaacaaaggtgtgaaaagaagggggaaaaacaacagaagctatatgaagaggtgttttgtcatgttgaagcatgcaggctgtgccttatgaatttttaagagacatccgcttcccataaaggattctcaagattgtaggggtatcattacaatgggtgggattgagaatggtgtgtcaatttcaaaaatggattttaaaaaaaatcttgacgttggaagaggtgcaaagaatagatgttttataattgtttgctctaccttttttcctgaatatcagcattgggacattcagttggagtggagtgggtggagaggaaggaagtgacagatgtgctacatccacacgttaaagaaacttacagtgtctgagcagcagcagaatctagaaagcacaagaatccaaaacctcaaaacttccccagcctgaggatattatagttctgtgtggttctgtggaaaaatgtagttgcgttccatcaccggatataatgtaacagtagtagtcatggtagcagctaacatttatgtgcaagatgctatgctaagtatctcagattattatctttttcagtcttcactagaactctataaagtgggcaccctgaaaaagaactgtttgttttttaaataacagaagttttttctct

SEQ ID NO: 58436 - DNA, 2082 bp, Homo sapiens
gatactgcatctggatactccatgtatgttacagtagtgtgtggttgtggtttcttttgattagtcccaaagttatatgtcaaagctggatcttatatatgggctggggaacccagggtgggatgcagcatgctggagtctcgtttcttgtgtggccttgggatgcttgtggtgagcatgaactgatgctattttacccttttatctagacgcactactttggcctttggtttctcagcaagagccagcaagcacgatgggtggagctggagaaacctctgaagaaacatctggacaaattcgctaatgagcctttgcttttctttggagtcatgttctatgtgccaaatgtgtcatggcttcagcaagaggccacaaggtaggtgcattttccccctgtgtgccatataagggtgttgactaactgtgaagcttccaatgaagtagatgagctggtagatttaggggtgtgtgggtgtgggtgcgggtgtgtggtgggggagagggtaaaatagttgggggttgtttactcattgctttgcagctttagagttttggttgaatccatgtagctaaccccagcagttttctgtaatgctggtaaggtagtagggatcctgagccaggcagaatttcatctctagcagcgtggaaatattcatcggagactgtgggtaaaataggcatgcaagaatttaataaaaaattaatgacctggccaggcgtggtgtctcatacctgtaatatcaacactttgggaagctgaggtgggaggagagcttgaggccaagagtttgagaccagcctgggcagcatagcaagaccctgtctctacaaaaagaaaaaaatataaaaactagctagacatggtgttttgtgcttttagttccagctcctcgggacactgaggttggaagatcacttgagcccagaagttcaaggctgcagtgagccgtgatcatgccactgtactccagcctgggcaacagactgagaccctgtctcaaaaacaaaaacaaaaacaacaaaaacaaaaacaaaaacctaattctgttttgtccacccttttcctaaaaatatccccaaacaaaatgtggtatcagacttcgaatttgaagattggaaaggtaactaaaagtgggagtaaagttaaggaggaaaatgttgcgagagcaggagttttgatgattgtccctactaaataagaggagacaagaagccatcagtagaagaggagaacaaggtattgcagctactcagtgtctgctttagcttggagaaaccgtgtgctgcctttgaaatgatgttttcccctctcatctgtaaagtgagggatttgtgtaagttcataaagcatattcagtgaatggaataagtgcatttttttgatgttggtatagttcatttattggtaagagttttccattaaaatacctgggaagtctcctcatcaaatggatatttctggtaggaaaaggaatcacataaaccctttactttttgccttttacccggaccttgtcattctgaatgcttgggaagcaatgcgggaacatgctttgaagaaggaagagtattctacctgacttttgtgtagtttttagattttaaatttctgatataaggatgctcttgaaatttttaagtgtattttaaggcaatattctgcttgcttgctttttctttttctttttcttttttttttttaatttgagacggagtcttgctctgtcacccaggctggagtgcagtggcacgatcttggcttactgcagcctccacctcccaggttcaagcgattctcgtgcctcagcctcccgagtggctgggattataggcgcctgccaccacggctggctaatttttgtatttatggtagagacggggtttcaccatgttggccaggctggtctcgaactcctgacctcaaatgatctgcccgccttggccttccaaagtgctaggatgacaggggtgagccactgcgcccggcctctgcttgctttctttaatttggcttttatttatttatttatttatttatttattttgagatagagtcttgctctgtcacttacactg

SEQ ID NO: 58437 - DNA, 1132 bp, Homo sapiens
tgatgaaaaagatttatgaggtttacctgctttgatttactgatgatgatgatggtggtggcgatggtggtggtggtggtggtaacaggagtagtagtcgtgcagccgcagcagcaatagaaggtaccacttatgatgtagttacttaccatgtgccatgcaggtgattgacaggcattatctcatttacacctctcagagcctgtgggcaaaagttgtaaccatcatctccattttgcagaggagaaaactctgagagtctagaaggctcaatgacttgtgtaaagttactgagacagtgagtgcaaaagatgggagatggactgacctccaagtctgttttctttctattcagccacatttcatttcctctatgtcatcactcaggttggaacaactaatggactcagtggagctaggaaatgaataatagggtcagaattcatccaagtaagtttgtctaagttgatagaaatataaccttggctctggttggcattttgttgctcaagaaatgcatagatttctgatgtgaacttgtcctttggaacatcatgggagaaagctaatcaaatcattacccccatctcaaagtaaatccatttaaaatatctttaaagcatctgggtctgcagctttatataggcaagggcacgtctggttttctagtaaagtcagagtcatagcttcatgagagattttggtggggttgtggcagggattgatctgtataatgttgagggggcagccagctggagtgggaacatcagcataagaatgcctttggaaattgaacattgtaatgaaaacattcttttgaaggcagatttccaggtgtgctgtaaaccattctaggctataattgagatataaaagaatcttcaaaagcagtgatctattttttggtgattgttgtgctaatcctgaaatcctagcatgaattaatataaaagatgggattgggtgcataaaagtacctgttttaatcatttagcatgttgttcaaaactaaactggtttaggcttcaagtctaagggcgaaaatctcactttcatctaacaaatcccaccataatctgccaagaacagccaccaggggctcctgcagcagctgtgaggaggcgatccttcc

SEQ ID NO: 58438 - DNA, 1007 bp, Homo sapiens
gtctgaggactggctcttctgtcttcttttctcatcattgcagtaaacttattgcagaactcatggcaccagagctgtgtgttctagttttcttaagaaaactggagcaataaaatgggattcatacctcacccagaggaggtatcatgaggattaaatgagtctggcttacttttggtgcctgagatataaacagaacagatatttcaggcatttactcaggtaatatgatgggatcctcttggtgtcatggagaaggtggtttctatttgcaatcatccaccatgctttcttcaaccatgtggcaatgtttagcagctaagctcagctttcaaaattgagctagagtttaaattggcaagttaaccacaaaccagcctggtggggtctcagctgggcttgacaggattagtagttccttggataatacacaggaagttgattggtgcacatgctagttgaaatgagagcctaggctctgattccatttcctgtgaggcactgtgtagacgtgggagaataaacatgtgctgtattggactttcaaggcagggtctttctactccagagtaggaaaatagctagaggaagaacgggaggagtagggtgggaatggaaaaggttactttgggcatagcttcaaaaatcagggtggggatggacttttcttcctgctagagaactgaatttgacagttctaaagttaggatgttctggctgtgagtagatacaaactctgtcctccagattacctgcctcccccaattctgccctgcactggacaccccgtttcttccatagttatgtaattatttcactggataattacctggtgagtcaccctgaaatattctgtgtcctctggaaggtgctgtacaacagcagtgataaatttatgccatgaattaggtttttctattagaagtggtttactttgttatttagagctctggctcaagattattgccttactatcatttctcttgtacctcatcatcctcctcaac

SEQ ID NO: 58439 - DNA, 1705 bp, Homo sapiens
gctagaataaccttggctctacttttaacttaacaagtggaagaaggataaatgatataacaaaggcacctgagatacccttcagttcattggtaaaccctatttgaggtagagaactgctgtgaggaaatccagcgctctggagaatggtgactttcataactctcggctctctcctaaggctaagcctaagagccttggtttttaaaagagtgtaaaaaagcttttaaaaaccaaactataatcatttcaaagagtaagtccttatcctctaatttatcccctttttcttttgcaaatttatattttgatctttactaaaagctgttttacccaaagctatcactacagtagaaattttccacattttgctattttcataatgactagagattataaagataagaaacttaacatgcatttcctattatcacataaaagttaacttacatgaagaatatttctgtggtttgatttcatgctaatcttttggcaattaataatttatgtgggatttggggggtactcaattaaatgcaacacctcatgccctggcagataatagtggaattctgctgtattttatagcttgtttaatcacgtcagtatatatgtgtatttgcaaaggattaaaataatcaatgctgattaagaatcgactgaagagtagactgctgggggagatttctcatctttaagttttgtgttgctttttgtctttgtaaaaatgacagtgtgaaacattattagcttaatgtcaatcctagaatgtaatggcaccggcatctccattttctaggtatagagattgtgggtgaactattcgccagtcttaacttgtacgtcttcatctttctgtgtattctaggtgagtcgtacagtctcagaagagtggtttttcttggctatgggacttgcttcttgggtctgtgttactctgcattttcttttcatgtacttttataaagagattggctaggaaaatgaagagggtgcagttgttaattatagatgtgtcagttatagaaatctcagacctacccagagtagaggttgattacacacaagttcttttctaccgttatccaactgatgtacagtggcttattttccaaagccattggaatgtaattgcatgaagtgctatttcagagtctgcttatagtcatcttttgaagtattttccatgcctcagtgaaactgttcgtgcttgtataatatgtaattcatatattttatgtggaagcacaccatttcttaatttacagctgaaatattgggtaagataggcaacctattacaacttaatgcaagatattttaaacttttgcttctggatgagtaactcttcaaaatgcttgagataagatcatggctttaatccttggtaattgccaagactgcatctaaacctcttacaaatagcattagtctgtgccattgtcacaaaactggaaaaacaaaaccctcaaaaaatatttcccttttaatagctaaggtgggggattataccatctctttacaaataaatgaacaaacaaataaaaaccaccccaaactactttttaatagattttatttctttagagcagttttagtttcacagcaagattgagcaaaaggtacggagagttcccataatgtcccctgccctcaaaactacttttaagggcccttattctctagaatctttccataataccaa

SEQ ID NO: 58440 - DNA, 1060 bp, Homo sapiens
gcaaaagcagggctgaccacttagaaagtcatgctatcactctttagaagggactttcagagcagtatgttgtttttgacagccaagcccttcttttttcagtcatacagacgtttaggacaagagacttttgtgagcaatccacacttcagcatctgtgtcttgagagctgtctgacatattgagcagtggggaaggtggtatggttgagtggttgccaatactgaatgactgcaagcccctgaggctgagacattcctgagggcaaggaaaagctgtgggtaattgtcctaggtccctgggctcttggagagtccaagtgacagcattgcccaggacctcgatgacagaagaggggtggcaatcactgttggaagtgattgcatgtggcctctctccacctgcttacaaaggaatgggggcccaggagggtcttcctctcccctttcctgctctgaaagtcccttctaaagacgtcttccacaggctggctgtttttctcagggaaactgtttcacctgaaatgcatctgtctcctgctgttcttggtgtttatactttggtttcagtgatcaggtattccttttaggtatatttttctgtgcaggagactgtcttggacaatggatatatgtattagtagcttggtaactgccacagtagaataaatatgtgaaatgttctcatcttgttgatgggtagctggctctctttttctcgttggtatcacattaggatacacacatttaaacacacatttgcatgtatgcatgggcataaaggaaaaacaaatactgattggggaagagacttgtctaagttcttatagaaaactagtatttttacttttaagtacttccagtcactcaaattagagcaactaattattcctcatatgcatcgggggacagtgtagcatgtggttacaagtataggcactggactcttggtcttgggttcagcttactcttctgtcatttattagctgggtgacaatggaaaagttactgagtcttttgaggcgtaagtttcctacctataaaatggcaataataatgct

SEQ ID NO: 58441 - DNA, 1024 bp, Homo sapiens
gagataataattttgccaaacttacattctttcctctttgtgtttttgtatatcataaaaattccaatcatctatacatgttgtttaaagtttactttttatttcactagttatgcattgcaaatgatatcccatagaatatgtagtagagattgtttttgctgggataaatgcgtaccaagccagccacattctttcctaggtgtttacagtgagacacacccaaatgtaaagtgcctggctcagggttagaaatgtggcttgtgcccacagagcaaatatttttctctgtttgaggctctctggttaatgcaggaattgaatcttggcctcttgtgttctgtgctttaataagttgaggggaattcatgagtagtaaacatctaagggctgtctatttgaattttggcttccccccactgtttttctttgggttgggggtgggtgggtcatttcatattcttttctgtacctatcaagaaatcagattggcttaccttagaggtaaacatgatactctgccaacataaagtgatttagaaatgttaatatattttaccaagccagagtttctagcatatgtattttaagccgtcataaaacatatacctgtcatgttaaggaatgtgcccacggcaagtatcaaagacctgctgtgggaggctgaggagtgtgttttgctatgttgcagggttataacctgacaacctccatgaggcatgagtactggcagggagtggtttataaatattgaagctattttatttattactttaagaattcctacaagtagtagctattcctatttgtacatccaagtgtcttggggctcagggggtaatcctgtgtcggcagatggatgaagagtgtaaatcctagtggatctgcctgagttagggaatcaagttaacaaaacaatcagatgagcaagagatagtctgttgggcttaatggagaacagaacatttggacagaaaagttttctggacatttctggcttctttgaaagacaagtttaatgagc

SEQ ID NO: 58442 - DNA, 1016 bp, Homo sapiens
ctctaatcctattgttatagattagtgtcaagcagattgtttacctggaataatttaggtgtagcctttcctaaaggtaagagatgccttaaatgagtgcctgaaagttctttccagaagcatggctctgtggctgtgcaaattctgggtgaaaatgtcatgagcttttaatgtaggtaaatgatgtgtgtgttagaggtgaaaaaaatgtgtttctagctctgaggaagtttagtgtcaaagtgtgctgatatttttaacataagctagattagtgtattaaaataagcaccaatggctgtgggaattcagacagaaaagattacctgtgatattaaggatcagagaagtccatagaaagaggcagcatcatttaaattcagcagtgactaggtatgagcatgtttactatcggcattgaggattgccttctttttaacttttgattatgaaaacttttaggtatatagaaaacctaaaagaacagtagagtgagtatctgtatactcacagattcaacaactgttaacattttgtatatttattttaactttgaatttatagatgtgcttatgtgtgtatggtgtatgtgttggtttttcttttcttttcttttttttgtttttgagagtttttgctctgttgctcaggctggagtgcaatagtgccatctcagctcactgcaacctctgcctcctgggttcaggtgattctcctgcctcagcctcccgagtagctgggattacaggcacacaccaccatgcctggctaatttttgtatttttggtagagactaggtttcaccatgttggccaggctggtctcaaactcttgacctcaggtgatccactggccttggcctcccaaagtgctaggattacgggcgtgagccaccgcacccagccgtatgtgttggttttgcaaaaaaaccattggaaagcaagttacaggcatcatgacttctttacccctgctatatccactggcatctcttaacacaattccatctattctcc

SEQ ID NO: 58443 - DNA, 1086 bp, Homo sapiens
catttgcactgcacaaaactaatttcctttctgccttcctttaaaggaaaataagagtagacatttttagtattcttttatttcccatcccctcccacctcatcccttcttttagcctttccttaggaaaatgacctagtactatcaaaactgagctgtgccctatgcaggtttatacacagcacagactagttgcatcagtttttcctttcttacaccctcaccaagattacatagctctgtgagatgtccttgggagttgtaatagtatggaatgctggagaaattccaaagactgttggtaaatataggatgcaattgaatagcagttagcttcttttggtgatttcagaacttatctttaagaaaaaaaataaagagttaagtatacatagcatagcatgggaactaaaaagaaagtgcggtgaccatgtttaggatttggatttgaacttctgtctttcatttgcctgtgcaggtaattcaataaaagactaaacacagactgtgctggtaattcaataaagaggaatacgctgcatttggttgatatttgtgaaagatctctcctctgcttatccatcatatttaaagatttacttgctctgccaaatgaccttttctaaattgtgagaaagctgtctttctttgctttgtgtttttaactttgaaattttttttaattaaaaatgagagaacaaaatactggaaatccacagttaataggtaaagatcgaaacttacactttagagcttaggaagctgattgactactcagaagtgaattttagaagtgcctgaaggttttctgtatgttctcttgcaatgtagcctattctatataaaagacctttaagatgtgatgtttacagagcaaatatctcaacgaattgctttcagcaagcatgggcacactacaacactttttatcatctcagtagttccattgtatttgttgcaaggaacgtgtctggatctgcaatctctgtctgtgagaatacccccagtataagacagatcaggggctagaaaaggaaaacttgggtggtgggaatgttcttttggaaacccaagttcaattttttc

SEQ ID NO: 58444 - DNA, 1117 bp, Homo sapiens
catatgtaatagataactagaatattttaatttctattcttttttttttttttttttttgagcgggagtttcgcgcttgtttcccaggctggagtgcaatggtgccatcttggctcacagcaaccttggcctcccaggttcgagcaattctcctgcctcagcctcccaagtagctgggactacaggcgcatgccaccacgcccagctaaattttttttgtatttttagtagagatggggtttcaccatgttggccatggtggtctcgaactcctgacctcagatgatctgcccaccttggcctcccaaagtgctggggattataggcgtgagccactgcgcccggcagtttttattcttgtgctgcatttgtttgaccctgcagttgcttctgtttcaaatgttgcatttatgtgaaataaagtgagattggatataatctttacacaaaaaaatcttacttgaagttcttattttctctttgagccattatgtacccttgtcatctccttttctccttttttacttgacacgttttgtagattatcctgagccctagaacagtgtgtggatggttgcaaattttcatctgctgcttgtttctttctcgcccttgcctctgtgtgggctcttctcttcccagccgcccagcatatctgctgctctattcatatccttacctatcacttcatacgacttggtaggcagagagggtgccttttcttgttctttggggaatattgagatcaatattatgtgctgtgggaataatggtttttgagaaaatgatatataaatataagggagtacagtcatttgatgtttgggccaagtaatgtttctgtagttaacacttggtggggggcaacagtattacatttttcaaaagctatccttagatctgcttccgaggttgaggtgctgtgacatggcactgtagctattgagagataggattgttgatatttttgatggttgatcatacccagggccatgcctaagattcacagttcacctatttgttacagactggattttgggaggctttctgcttcttagacttcctgtcacatgaagacattgagactttgaggtatcccttttgggatcaatattct

SEQ ID NO: 58445 - DNA, 1068 bp, Homo sapiens
tgtgtgacaaatagcagaaggaattaaggaatgctgcacttgtgatccatacaaaacaccaacattttaggttgcacataattaaagaaatatctgaaacactttttaaaacactgtagtagccaatacatagaggcatgccgtagatgggcacccgaatgcagtttagaaaagaaaaaaaaaaaatcacatagaaactactcaatttctttaaaatcactgagcaagaaaagcaacgttgaactttcatactgattttacacaacttctatatagtaccttgacttaaatccaagagcaaaagttaagactctcctcctctatttttggtaaacaactgcatggtaaacttagatgactcttccccctggattttacctgggagtggcctttttacatttttatttaaaagaggacaggtttggcacttttatactgatgtcaccaatgttaatatttcttgggatctcaggaagattcatattctttacagctgatacagcacaggctggagctcccactaagccaccctcagatttttccagcttactttgtgcatcaatttgtgtaacaatctcattcatgtttgtctccaataccattccccccatactatttctgcaagaatactgtgaaccttgtctacatggaaaatcaaatccagttcacagacattttcaaaacatttgtctaatgtttccacaaatacttgaatgacatctaaaatgccaagttcactttctgaagaatctacacagaagacaaaatataacgttgtgtaatgtctataaatcagtttgttgtcagatcctccaattaataatcccccttctaggaaattacaaacattttcatctctcttagataccaaatggaaagtctccctgatgatttgctgttgtgtatcttcactgtaggggcggtagaacttggagagccgcggcttcccgtggttgttgaagattaggatcgccttgatcatggctgtgccaggccgaccgggtgggcactggtggccagggcgggagcgggcgcacaagcctcgcctagtaatcttgcctgcgaccc

SEQ ID NO: 58446 - DNA, 1067 bp, Homo sapiens
gcccacctcagcctcccaacatgctgggattacaggcatgagccaccgcacccagctggatgtaatagtctttgatgcaccttctttaattctagtctggctgatctctcataaggtgttccctgcctcctcctccttccttcactttaattcctgtctttcactttaattcctgtctttccttctccttttctttctctagtcatatgtgaactacccatgaattagtgactttaggattgtgctttgaaaaataggcatattttacttgaatttgttttagtataggaattgggttaaaagaagtggatgcaatgcagttcatttctgcacttacctgtgaaaatataaaagcatacagatttttttccagtatttattattttgtggtagaatgaaaaaaaaaatagatgctttggggatctgatcaaagcgcataaattaatgtgaatagctgaaggttgatgcatctgggtgacggggtcaacttttccagatttacggagatgtaccagagttaaagcatgggatatgccatgtaaacatctgagaactttggcatgttttgatttatttttttcactgcagtattgagtttggcctatgttcactactagggggaatgggagagggttcagggaggttgtttttgtttttcaaacagaaggggaacaatgcttagcaaatgcccctgggtgtgtgcctccagcaaacacatacattgggtcaagaccctgatttctagcctcccattgcctctcatctcagtttttttccgttttgttctgggccctgggtagtctagcaactttgttcctattgtcccaaccctaagtactccgaagaatctatttctctaatgtggtaagtagttttatacaacactgtcagcaggcggtgagctgtaagttatatttccattgggagagacttactttgctgtatcccactagaatctaaggaaaaatcacaataaaggctcatactttaagatattctggaagatgggagaccatgtagcctaatggagacagtatgagctccatcactagctagtgtatctcagg

SEQ ID NO: 58447 - DNA, 2419 bp, Homo sapiens
cagagggctcttttctatatcttagctagagcaggtatctgagaagtcctttttgccattaactaaggggccgtcaagtactttgtgaaaacagcatactcgtgtatgcatttatatgagaaatatttttataaagcgattaacatgccatgtgggccatggatctctcactgattcatgtgttttcaagaaaacatgtttttattttttaaattgcattgagcttcctttaaaaaaactgttatttctccaaagataaatttcattttctacttaggaaaacagatgactctttttccctcaaatgccttctgtgaaatgacatgtggagctgttaggcattgtgaatctgttttatttaccccagtgttacagaaagacggaaggcaattttagcttctttaaagagacactggcctggggtaaataacaatttagtccaggtgggtagaaaagaatgcttatgacattcttttcatcagctccatgtgtaacctccaagcaggaggtcaggcagtaaaacatttgagtgaactggtgaaatgttttgtatttatttacaaggcacttaaacacaagactgatcccaataaactcaacaagtcagagtgatggaggaaagtatatggtgcatgcagaacagtaaaagcggggactggaggggggcctgtagattgcatttagcctgctcctctcttcctaccgtggagagatgaccatcagtgcagtggttatgggtgagtttcatgaggaaggtaatgagcccctttctgttcccacctgctgctgaactacttgacattttcttttagattccaggcatcctgaagtatttaaattctgttttgctgaaaattcttcattctttttgtgtaactttcttgaatcaaaacttctgttccaccattcttagtgttgtatctgttatgctggagttgatgacttgattccattgcttaccacagtctaatttaaaacaaaagcattctaaaaccttctcagtttcgtcatttttattgttactatatatttattggtttagatgtagtttgtagagaatcaaaagaaaagaggacagtttctttggataagacgttcataaccttttctcctcaagaaagcctgccacatagtaagctctggggtcagtaagtcattgccggcttagctgttgttcattttctcattgcatctctaccaaatgatgggcagacagactgattcatacctgactgttctgcatatattctgcatatatatatatatatatttttttttttttttttttgagacagggtttttttctgtcactcaggctggagtgcagtggcatgatcatagcttactgtggcctcgaaccccgcgggctcaagggatcctcccacctcaccctcccaagtagctggtactataggcgctagccaccatgcccagctaattttttattttttgtagagacagaactttctttgttgcccaggtggttttgaactcctgggctaaagccgtccgccccccttggcctcccaaagtgctaggatgacaagcgtgagccacgacacccagcctgcttgcttatattttgaataaaagatttcatggggcgggagggttaaaactctttgtgaatattaataatccagattaatttgaaagaactttcatgtaatatgctactcaaaaaacagtatatgcaagcgattatctctatcacctagcagaaggctaggcaggattggtttaacaagtaaataagaataatttagtgttagcctgctatacaaataagagtgctttagtatctgaaactgtccctggaatgtatcaatgtatattaggaagttacttcagtatattatggaccagcaggcattattgagaactcactgtgttgcaagtttggggcagtaactctgaaaataaataaggtgcttctagttggagatgggggtgggggaacagactcaatcagatcatttttggagtggtgagggctttgatacaggaatgcaatgctgtataaaggtgcttccctcttgattgttgagttttgttttgttttgttttttgagacagtcttgctctgtcacccaggctggagtgcggtgtcatgatctcagctcactgcaacctccatctcccaggttcaagcaattctcctccctcagcctcccaagtagctgggattacaggtgcccaccaccatgcctggctgatttttgtatttttagtggaggtggggtttcaccatgttggccaggctggtcttgaactcctgacctcaggtgatctgcttgccttggactcccaaagtgctaggattacaggcatgagctgctgtgcctggcctgtttcgttttgttctttttaattaaaggcaatgatcaaattatctaggaaattagtttaaagccaacat

SEQ ID NO: 58448 - DNA, 1040 bp, Homo sapiens
atagcacattaatctcccataaccttaggtgcctcactaagtatgattaagtcttaggagtgagaataattttcattattttggtctgtagtcagcttctgatcaccaccacaatttcaaaagatctcgatttagtgtttccctgcttctgaataggccgagtgactgccttctttctcctcagtcttatcttgccagcattttaaatgtaattgatatcacctgcaattttatgccgtcctaaacaaggagttgcccacattaagtcttttaaaacaccatggcatttattttcacaattggttgtcttttgtttataagtaaagcttttactgcttgcggtctttacttttgccctctggtggtcttcattttcacttttcttgtcctttatttaaaacggccttgaattggttaactgcacttctcagcaacctcctccacttaccaccatttggtgtaggctcaatgaatgttaactgttttttacgctggtttaaactgaatataattaggacagcgaatttgtttcagaacctgatggaaaacaggtattgcatatatatttagtggttacgttctgcgggcttggatgtttgtatcctgcttgttccttttctgaacacagatagttatttgagttgaattagctatttgttgactggccattttgcaagttactgtttttgaaaacaagatattaatttaatcaaagcttactttggtagtgattgtacctacttccaaacttgccgtaggtttccatattccattgaagctacttttgatccttaagatgctacatgactggtatgaaatctctcatagttgtggggaaaagatgatataagaagcttcaggctggacatagtggctcacacctgtaatctcagcactttgggaggctgagggggacagatcacttgaggccaggagttcaagatcagcctggccgacatggcgaaactgtctctactaaaaatacaaaaactagccgggtgtgacggtgcacacctctaattccagctactagggaggct

SEQ ID NO: 58449 - DNA, 1049 bp, Homo sapiens
ctttgccttacaagttttgcgttcacagggaaaaattactcacagttgaaaattagccacagttcctaatgcatattttcgtatgaaatgtgtactttatttctacttaatttccttgtgtctttggaaattcacctctgggggttaatttgttcacactacattcctcaagtaattggggcattagccaaggcagtagattgtcaacctccagtgagcatcacctgcagggcttcttaaacaaaggttgccgttccccatgcctacctcggtttctggattcagcacgtttaaggtaggcctgagaatttccatttccaaagagctcctgggtgatgctcttggtcctgaccaactgcattttgagaagcactgagctaagaagtcttgcttggttcacccacccctgttcctcaggcttggtatggtggtcactttttcactgcaccagtttgaatgattccattcctggttgctttagagctgcagagaggcttggttaatggcctcgtatccctagccaggttcatgtaaagcactaattagatgtttccatgttgctggatctccttggctatcgtctccagtccagacctctctgcttgctaccaaacagttgggtttatctggtgcttagatccatctgagtgtctgctatacatgccacatcctacctgtcccaacttgaactctccagtttcttgtcacaaaatgtgctgcttccaaattacctatctcagtgacattgctatctattgagttagctgctcaagccaggcatttggagttttcttcaacctgtcattcttagcaccctcaatccctttctcaaaccccagtaacaaatcccatcagtcattaggtcccttcgagtttgagtctgtaaaagtattttccatttgctcctttccctccatccttactggcctcttgagattgttccaagagcattgctgtggtttgaatgtcccctccaaaactcatggtaaaatttgattgccattgtaaacagtgttaaaaggtgggacctttacgaggtgattaggagg

SEQ ID NO: 58450 - DNA, 1560 bp, Homo sapiens
gctaggttggaattctagcgctgccattttttagctgtgtgatgttggatggacgtcatagcccttctgagcctcagtttcttcatctgcaaaatggatctggtaacatttggcctctcaggatatgtatggagaattcagtgtcatgctgtataacagtacctcacacagaataggtcaaggatggctatttatatgttcaaggacttgtatgtggccatgaatgtgctctttgtgtgtgatttttttcagcagcctgaattcacatgtgtgtcaacatacacataaagctttgtttttgacttttttttttttttcagtctattggctcaaaataaacatgttggctggcagctgccatgtggctcctcctacaagaggaaattgagaggtgggggaccaggcagtagagaagtttgaggagggaaagccactgagagattagaagggcagagaacaagatccttttccttgtatacttcttactgtaatgatggtccagtgttttatataaggatccttgtatttctaatgttgaaatctagttgattaaagaatgttaggataactctgtctgcctttaactagagtacaaaagctagctgctgtatctttgcagccttgatttccctttttgaagcccaaatataaacagtaaactgcaacacttctagtgtaatgccagccactggttatttgaactttaatgttgtctttcatctgagaagcctagagtatttgacaaacgttaaatcatagatcttcgtatcaacctcaaagcggaagggaatgttagaaggaatgaacaatgttagaacaatgttagaaaaaagggcaggtatgcagcgtgtgttcttgaaacaggatggcaaagaattggttaaatcttttctgcaggattgcgtgcagggctggagatcatatgaaggtatcctacccctttggggaatcggggagagagcccaggaaaatgcaggcctgacctggacttttgtaataggaggggagaggaaatgtatcttgcccagaccagcagtgcctttgccatatattgcatgcatgctgattatgaaaataaataatcttataattatttataattctgaattaaaggatatgatgcaatgcttgtggatgaaggacacagagtagctgtgtaaaaggtaatagtgactaagtgcctttttgtgtgataagggtagttctggctctaggttgggttataaatgacatattaacattgttttactttcctttcctttttcctgttggttctgtgtttcttgacttttcttcccccctcaagcttttgtttgattttcttcaggatccttgcaattggaaaaaacatttcatagccattcttagatcaaccttacatgtaaaatttgatatgtagttgatttagcttagtttccttaggggctaaattaggcccaggtcaagagtttcatcttgagcctcgtcaattagtttgaccccgaggactactgcatatccagagagccgtaaccctagctggccatcccgtaaatgctttatgttggtcaatagggagga

SEQ ID NO: 58451 - DNA, 1048 bp, Homo sapiens
cgcccgcggcgcccccggcgcgcgccctcccgggccgcattcctccccgcccccggccgcgcgcccagcgctccctccgcctcccggcccccagggccgcggagcccggctctggggtgggggagccgtggccgccggcgcctgctccgtcccctcccactcgcacggccccttcctccctcctctcccggccgctcgcatttcctgccgctctggctctcccggcccctcaaagttctttccaactttttctcggcggagtgagcgcagcgggcgcagactcgggggcaggttgctgtgcttctccgggctcagccgcctgctctcctggctcaggtcctcggggagccctagacagacatcaagtggccactggcgctccttcccctcccagctgagccatcctccccggcctcctcgggcgggacagccccgtgcttaggtttttctccttttctcccccggtgcgcctctgctcggactctcgcgccgggatcgcggcggaaacctccctcccctttcgcctcctgcggctccttcccttcgcccctcctccgccagtcactggaatcaattccgtggggaatcggctccgccgccgcgaaggacagcctttccgcgcgggactccggggcgccacgggggccatgtaagcaggtaagccccgtccaagccgggagttgggcccgaggttggaggccgccttggcgctccgggcgccctgcagatgacttgggcagacgctggcaacgccaacttgcgattggcgccccgggacgcctggcagggcagcctggggcgcggggtggccgggccgcaggggtgttatctcgcggtgggagctgcccgcggtgaggcgcaaagctggtcccgggagcgagctggaaggtgagcgcagtctggggagtttgtggttaaacccacaccctggtcccctctctccattcccttctgcgttttgggaacgagagagggcctcggaagggcaactagagatacctagaccttgggggctagaggatgaaagacgaacgacgtcgcggtcgct

SEQ ID NO: 58452 - DNA, 1087 bp, Homo sapiens
ggtatttccaagccgccttcccagtcccgtaaccaaccttattgaaattcaggccctggtcctttgttttattgagtagatgtaagcttgagttttgatctggttggcgacgtggggtgcctatggttagttacgcgagcatttctctttcccctctcttcttcctcccgtccacatttttttttttctttttttaaatagagataggcctccctatattgcctaggctggtctggaacccctgggctcaagggatcctcccgccttggcctctgtaagtgccaggattacaagcatgagccactacgcccggtcctcccttccacatttatttgaacgcgcctgtgtgcccggctcggctgtgtaatgaggacccagaaataaaaggcatgggtcgtgtccttgagcctgacctagaggagaaggcagggttatcattctcagacccagccttggtacagtgcacggggactctggctttttggaggaggtggggaattctgacaacgggaaagcagtggtggaggtggggcaggaggaggtcacacaagagcttccttggggactaagggactgggtagttcgggcatgaagagtgccctccacgtatttaagagataaagatacagcattttctggaaaggacaatagtcctgcaagtcctccatgcaggaaccttcatccagggcttttcttcactccccacctcgattccctgttcctcaaaagtaaacttctgggtttatttttttgttcttttgccccaatggcccaatacaggtggctgatagctgatcccttaatgggccaaaatctgctctaatcacagttagcttggtctacatctatattgttctctatcttagactttggaatggaaaagcattcagcttgccagtcttctttatgtttattcccctcattttctaatcatctttctaaattgctcctttttatattctgttggctatagcatcttgatgtaatgatttcagttgctggctgaattgtttagggcaattacagttgtgtgtctctgggtacagttctttgactcctgacaaactagattggaatggaggatatt

SEQ ID NO: 58453 - DNA, 1214 bp, Homo sapiens
tgcagttaaatggttgtggctttcttagactgggctttttaccttggtattcctcaaccttttcaggtctagaaaatgaaaactaaacagtactttttaaaaattacctctctattagccaactaaatagtgatacagtcattgcttctaaaaggattttgcttgtgggagaattttctggtttctaacaataactggttttagcagccaaacttgaaaatgaattgttaagggagatttataggatttatttcctattttttaatttttgaaaggatagtaaagactccctttctaggatgggtgtgtctggccaaagatgatatactacatggcttcaaagaagtttcctatctattggcttcaaagtgtgatcatctaaaatttctgtgttcatatggcttattgcagctgtatctcaggaatttagtagtcaatgttagactcaggtttaccaataatacttggtaaattcacaaaataagggagttattgtcttctgaacaattctcattaggttgaaaatgaaaaaaccgagggtacaaacctgaaaagggagaatcaaagattgatggaaatatgtgaaagtctggagaaaactaagcagaagatttctcatgaacttcaagtcaaggagtcacaagtgaatttccaggaaggacaactgaattcaggcaaaaaacaaatagaaaaactggaacaggaacttaaaaggtaatattttgggatggtatttatagggatgatatttgtatgtattaatcagatgcgtttgtcttttcctttaacaatataattattatactttgcaattttttttcctggtagaataagtaatgattcggtctctgtaccgtaacttgaaagagtggaagattaaaaacaaacaaacagtgatttggttttatcattgcatagctcagtacgatataaatttatcaaatgtttgctgcattactcatgtattcattcagtatatgtttattaagctgtaccatgattcagacactattggtcactgagtaatacaataataaatagtactatcatactatcaaattgatagtatgataatactagttacatagcattatttgatagtatgatagtacttgttaaaataaaactatcgacagctgttaccgaaaagatggaaattagttgaagcatactgatggctcgtgttttctctgggtggaaaagctgctgtagag

SEQ ID NO: 58454 - DNA, 1632 bp, Homo sapiens
ggagaagaatgagaaccaagcataggaggaagccccttataaaaccatcagatcttgtgagaacgcactatcacgagaatagcatgggaaaactgcccccatgattcaatcacctctcaccgggtccccaccaccccaccacacatggggattatgggaactacaattcaagatgagatttgggtgggaacacagccaaaccatatcactgtcatagtggttattatagatcttccttatagcctttataacattgtacttactggtttatgtttctgtttcttttactagactgagttcctttgaagacacaggactgggtttatgtctggcacataagttagaccttatgaaatgcctgttggataaatgaaatggttaagaattcttagtggatgggtttctttgtaagtttattactctctgggaatgtaaggcattgatattctgtagcctttgctctaactgatttgtctgcctcttgggtccttttctaacaggtgtaaatctgagcttgaaagaagccaacaagctgcgcagtctgcagatgtctctctgaatccatgcaatacaccacaaaaaatttttacaactccactaacaccaagtcaatattatagtggtaatgcattttcttccttggtatagacagctttttgtttagcttgagattttaattctgcaaaataaatgaattaattcaactttgaattaaacttttaatgtatatgtttaaaaactgcagccacttgttacatatccatttgcatatctgttgaattatgttgagctactggattgagcttttaagctttttactttatccttctgtggcatattttcaaagaaattcaatttcagaatatttaaaacacttatgtttttatgtgttttgatatttgagtaatttgatcaatagtttgatctatttccctaaccaaaatgttgtttctactaagatactcatttctagactatcaaaatcgttgttgatctgtgaattccttcatggaatcaatgactgaaagaaaactgtatttgattgtctgtttctaggttccaagtatgaagatctaaaagaaaaatataataaagaggttgaagaacgaaaaagattagaggcagaggttaaagccttgcaggctaaagtaagttaattatgggccctataatagagtatgcagttatagaatactttgatatagaatagaacaaggttagagaaaaatctgttttacatagagctggcctttttgtgtgtgtgtgtgctgagaaaaggttttgggctcagtggaggtgattattttttagttttaaaaatagggtggaatgaataaaatagagtggggaggttagtttatccctaaatattaaatgttcatataatgtacacttaattatttccctattaagacctagcgatcagggctattcttggagacagtggggccagagaattagtcgtgatgctccctgcctggctttatcacctggaggcagttgcttcctatatagtccttttgatctattgaattttacctctaccatttttgttcacgtgttatttgctgaaaacagtttccagtttggcacttactggtggctttccactaaacataaggacttgatgag

SEQ ID NO: 58455 - DNA, 1105 bp, Homo sapiens
tgttaattttggcagtatgggaggttcacactgtcttgatgtttactggaggtaaaactaccagagaatataggagggtgaacttttcactgcttagcactgatttgcattgatatgggcaaaaaacaaatatagtttgctgttgtgtaaaactaaatggtaattttaacaaagggtgtcatatgtgatgtacttttcacagtctcaataagaagatagcgttcctgattttagaaaagcattccccccaccaagtttctttgttaaaatgtaagaaaatctgtttctcctgctttctatagagtatttgaatgcaaatgacaatagaaactaactattgaaattaaatccaattaaagtagcttctgtatttagtgtaaatatttgtttcgtcaaagatttcagaaaagaataaaacaaatgataagttatgaacattttgggaaagatatatatgaattggagtgtgatttttgtttgtggttcaagagctaagaaacaagattaatgagttggaactacgcctgcaaggacatgaaaaagaaatgaaaggccaagtgaataagtttcaagaactccaactccaactggagaaagcaaaagtggaattaattgaaaaagagaaagttttgaacaaatgtagggatgaactagtgagaacaacagcacaatacgaccaggcgtcaaccaaggtacttgacttttcgtgaattactggagaaatcttcatcttttcatacaattatttagaaagagtattttatacataagtttatgaaatgtcagtaatgttctttgttaatatatattaggtactcttgatgcaactgaactagaaagctgttttaagttgggcagatccgggatcaagcctggtgccgtactttcccagctgagtgacgttgggcaagtcactgatctcttttatgttgcagggggtaatagagaataaagaaaatgtatatatagcatctagcatgatgtgtgccacattaaaataggcacttaatggcactttaaaggagttttaggacatttgataggatttaattaatctgctcttgggatcgtatatatagttggtccattgtacccatgagttctg

SEQ ID NO: 58456 - DNA, 1205 bp, Homo sapiens
aacagactatcatatgagggtaatgggcaccctctgatgattttacagcttttaaattacataggctaacaccattgcattttaacctctcatttccatgcaacaaaatgttagatgaatcgttagacatgccgatcttttttttcatggcacaaattaggaagtatttatttaagtgggctaatgctttacatccttgctaatagttcctaaacataaattgtgtgctaaaacaattatagcagtttttctaaaacacaaaatatttgttcatttatgtgagtaatatttattttgtcttgaacatttttattcattattagtatactgcattggaacaaaaactgaaaaaattgacggaagatttgagttgtcagcgacaaaatgcagaaagtgccagatgttctctggaacagaaaattaaggaaaaagaaaaggagtttcaagaggtaaggtaaatggattcatgaggtgtttgtctgaaaggctttttatgggcttttcatagtttgatcacttggaaaggggagttgttatcacaatttgggaaattctcttagaggagaaatgctttgtgagctaaaggtcatcttattttctttcacatcttcacttttgcgctttttttaaatctttcagtttttgattagagaagggaattagtattcagaattcatccatgttttctgatttgtttgagatttgatattcagtaggaaaggatcacttttcttcttttggacattttctctgctgtggaggaaattgtattacattttccagtaggcttttaaaatttttttttctttcactctatttcctttataactccagtatttttttttttgagacagagtctcgcagtgttacccaggctggagtgcaatggcacaatcttggctccctgcaacctccacctcccaggttccagcaattctcctgcctcagcctcccgaggagctgggattacaggcatgcaccaccacacctggctaatttttgtatttttagtagagatggggttttgccatgttggctaggctggtctcgaactcctgacctcaggtgattcacccaccttggcctcccaaagtgctgggattacaggcatgagccaccatgcctggccaactccagttgtttttaaacctgtgggttggtaaataaattaggagggtagttgatgtggtggggaaagtggttgg

SEQ ID NO: 58457 - DNA, 1040 bp, Homo sapiens
atgacttgtattaagaatatgtagtccttccttaaagattgttttagacccccagggaggtggaaagatgggaaaggaaggaagggattttttaaatggaaagaaacaaaattggaagtatcatctaaatcccttttctaactgttggcatttgtgtctttcaatattaaaaacacgtggaaagtcatagatttaaataaacaaaagtagtgacagataaagagtttctagattaaaaattcttataaaaacatcaagcaattgtcaattatatgactctggcttcaaaagtggacactgaccttaatgttcagcctgtgcatgccctggttgacggtgtctttggagactttgttttgtccacaaagtggtggatgagggttcctgaatggcatggatgccctgatgggattttatgcatacatacttcaatttggcttctctctgaatttatttagtggcctggattttattttaaagggcttaattaagaaccattcagtgacagttaatagactgaaacaatttgaagagagccataaatcaacattgtaattttaagaagaggaacaacacaagaatggtagaaatttcttctccatcaaaccccacaggaaagaatgtttttctgtttattctttaaatgttctatgatcactttttaggctgtaaagattaagaaaactttgtccataaagaacagttatttgttcaggtgaggaaagtctaaatgtatttatccccaccgctttgcagagtgtatcatgatggtaaaatcagaacatctgtcagtagcagacaggtgattgttaaatcagctaaccccaaaggggcaatactgctggagatagggggctgcagctccagccacaaagtggaagaaaacttcaaatcagatgatagtttcatcagcaaacgttttcaaatggaagtgtttgtttcagcaaaacaaatgtttgccttttggccagtggggaccaaccaacagatgcttctgctaacatttccacaggcagactggcatcgaactcttccctctg

SEQ ID NO: 58458 - DNA, 1001 bp, Homo sapiens
aaatgatgcctcccttgctgctcctaaagcgaagttgatctgggtggaattgcttgctaagctctaatgctggcttgtggttatagggatttttgttgtgcttttccagcatagtacccaattttgcaaatcatgtgaggatgcaggagatgcctaggaaaatgtatctttgtatgcttaactcattgttgataatgagatacccaatcaagtcttaagtggctgtagcctcgtggaaaactaattgctgatggatggcagcttgcacatccattttcagatgttcattttctaaattctggccttttaaaattcttgggttggtcatagccatagcattataagcctgctgggtcccaggattggctgaacatttcttcgttagacacaaatatttacggagctaatgccagaatagagaaagtcatgttaatctttccattgagcttactattcatttaaatgtctccagttatggacagacatggatcgagaccaacaaacacataaacataaaattccccatctttccctggtgccctctctctcttcttttttccttccttcctattgggacgcacctagttttgcacagtgtctttccagctttcttgtcaagcctccagatgcaggtgtcatttgatttgattaaaaaattttttttttagagtaagaaaatattttttcatttgcaaaataaaaatgctaagtcgacccaggtaattacattctagttcctcttctatgttgacctcattcagctgatcttagcattgattacagagatctggctactgttaaattttgggaggaaatactactaataatgctacattgcccctgtcaaagtgctttaagatgtttgtcctttcacatctgtgatctcatttgaggggtgattattctgagtctgaagaacaaaccagtcattatacgttccataatttaatgatgctaatttaaatcaataacattgttgcaccttaatgatcgtgctttgc

SEQ ID NO: 58459 - DNA, 1080 bp, Homo sapiens
tttattgaaggtaatttttcccacagaatcattcctgtaacagcaaaccttaagatggttttgcaatgaaaagtaaacatatgtgctgagatttttttttttttttggtttattaacaaatcaaatgtttgcaaaggtatatttggccattcaggtgtgataggaacttggaggttttgtcttgaggatcttgtagataggattttccttttgagcttactctttaataggcgtatgaacaatgagaaagttcaatgaaacttcttgaaagaaaaaattatcttcagatttgggtttgatgctgttgtcttctgttcataacattatttaagtaagaatgtctgacttcattaggtactcaaacggggaaattgtgattctttccctagtgagatacacaaacagttctgctagggacctttattaaggcagaagtcataacttacttgagcattcgttttggctataaccaattaaaatgtgtgttttaggaaatgaagaaggaaaacaacctccttaagagtcactctgagcaaaaggccagagaagtctgccacctggaggcagaactcaagaacatcaaacagtgtttaaatcagagccagaattttgcagaagaaatgaaaggtaagtaaacttagtattttagagttacctttctaagctgctattcccgtgagaggggatggatggcattaacatattagagaaactctttggattttttttcatatattccctcaaaaagatgtgcgcagttgatgtggaagagttttccctcttctagtttttagtttccagagtgagagtgggactttttttaattggaacatattgagtcccaaacgcctgatgctcagcactttgaaatcagaagggtaaatattttccacacaaagctaaattgtcagtgctgtctctcacccccgagtgctattctctgtgtctctagtgtgcttgttagttacatccagacagctcatctcctgactcattaccatttcccttataatggaaaaaccctatattaaatgcatgttttccaagctcctaatgaccattgttttttgatgacttact

SEQ ID NO: 58460 - DNA, 4080 bp, Homo sapiens
tctacttaagtctaatcctgtggatgttttagctaaaatggtggagtacttatttacttttctgagacatcagaattactctacaataaagtgggatgttcccatttcagtgctgttcttgtcccagttttctctcttggaataaatatttgaaaagatggtaaaaatatacacatatgtaaacacatacaaagaaaagaaacagtgcttaggaaaatcatcccttggtattttattcaataacatgttcttaagctgctagaaagaagatgaacaaatgtgttactctccttaagataaccatttttctcatttttatataagataattaccaagtgatccactttctaggaggtacccaggcaataatgccagtttttccagggcttgagtagttgttagtttgtttggattttgccagggggcggggggaggggttagcgtttctgtagaataaacatttattacaaacattgacgacttttatttatttttaaatagcgaagaatacctctcaggaaaccatgttaagagatcttcaagaaaaaataaatcagcaagaaaactccttgactttagaaaaactgaagcttgctgtggctgatctggaaaagcagcgagattgttctcaagaccttttgaagaaaagagaacatcacattgaacaacttaatgataagttaagcaagacagagaaagagtccaaagccttgctgagtgctttagagttaaaaaagaaagaatatgaagaattgaaagaagagaaaactctgttttcttgttggaaaagtgaaaacgaaaaacttttaactcagatggaatcagaaaaggaaaacttgcagagtaaaattaatcacttggaaacttgtctgaagacacagcaaataaaaagtcatgaatacaacgagagagtaagaacgctggagatggacagagaaaacctaagtgtcgagatcagaaaccttcacaacgtgttagacagtaagtcagtggaggtagagacccagaaactagcttatatggagctacagcagaaagctgagttctcagatcagaaacatcagaaggaaatagaaaatatgtgtttgaagacttctcagcttactgggcaagttgaagatctagaacacaagcttcagttactgtcaaatgaaataatggacaaagaccggtgttaccaagacttgcatgccgaatatgagagcctcagggatctgctaaaatccaaagatgcttctctggtgacaaatgaagatcatcagagaagtcttttggcttttgatcagcagcctgccatgcatcattcctttgcaaatataattggagaacaaggaagcatgccttcagagaggagtgaatgtcgtttagaagcagaccaaagtccgaaaaattctgccatcctacaaaatagagttgattcacttgaattttcattagagtctcaaaaacagatgaactcagacctgcaaaagcagtgtgaagagttggtgcaaatcaaaggagaaatagaagaaaatctcatgaaagcagaacagatgcatcaaagttttgtggctgaaacaagtcagcgcattagtaagttacaggaagacacttctgctcaccagaatgttgttgctgaaaccttaagtgcccttgagaacaaggaaaaagagctgcaacttttaaatgataaggtagaaactgagcaggcagagattcaagaattaaaaaagagcaaccatctacttgaagactctctaaaggagctacaacttttatccgaaaccctaagcttggagaagaaagaaatgagttccatcatttctctaaataaaagggaaattgaagagctgacccaagagaatgggactcttaaggaaattaatgcatccttaaatcaagagaagatgaacttaatccagaaaagtgagagttttgcaaactatatagatgaaagggagaaaagcatttcagagttatctgatcagtacaagcaagaaaaacttattttactacaaagatgtgaagaaaccggaaatgcatatgaggatcttagtcaaaaatacaaagcagcacaggaaaagaattctaaattagaatgcttgctaaatgaatgcactagtctttgtgaaaataggaaaaatgagttggaacagctaaaggaagcatttgcaaaggaacaccaagaattcttaacaaaattagcatttgctgaagaaagaaatcagaatctgatgctagagttggagacagtgcagcaagctctgagatctgagatgacagataaccaaaacaattctaagagcgaggctggtggtttaaagcaagaaatcatgactttaaaggaagaacaaaacaaaatgcaaaaggaagttaatgacttattacaagagaatgaacagctgatgaaggtaatgaagactaaacatgaatgtcaaaatctagaatcagaaccaattaggaactctgtgaaagaaagagagagtgagagaaatcaatgtaattttaaacctcagatggatcttgaagttaaagaaatttctctagatagttataatgcgcagttggtgcaattagaagctatgctaagaaataaggaattaaaacttcaggaaagtgagaaggagaaggagtgcctgcagcatgaattacagacaattagaggagatcttgaaaccagcaatttgcaagacatgcagtcacaagaaattagtggccttaaagactgtgaaatagatgcggaagaaaagtatatttcagggcctcatgagttgtcaacaagtcaaaacgacaatgcacaccttcagtgctctctgcaaacaacaatgaacaagctgaatgagctagagaaaatatgtgaaatactgcaggctgaaaagtatgaactcgtaactgagctgaatgattcaaggtcagaatgtatcacagcaactaggaaaatggcagaagaggtagggaaactactaaatgaagttaaaatattaaatgatgacagtggtcttctccatggtgagttagtggaagacataccaggaggtgaatttggtgaacaaccaaatgaacagcaccctgtgtctttggctccattggacgagagtaattcctacgagcacttgacattgtcagacaaagaagttcaaatgcactttgccgaattgcaagagaaattcttatctttacaaagtgaacacaaaattttacatgatcagcactgtcagatgagctctaaaatgtcagagctgcagacctatgttgactcattaaaggccgaaaatttggtcttgtcaacgaatctgagaaactttcaaggtgacttggtgaaggagatgcagctgggcttggaggaggggctcgttccatccctgtcatcctcttgtgtgcctgacagctctagtcttagcagtttgggagactcctccttttacagagctcttttagaacagacaggagatatgtctcttttgagtaatttagaaggggctgtttcagcaaaccagtgcagtgtagatgaagtattttgcagcagtctgcaggaggagaatctgaccaggaaagaaaccccttcggccccagcgaagggtgttgaagagcttgagtccctctgtgaggtgtaccggcagtccctcgagaagctagaagagaaaatggaaagtcaagggattatgaaaaataaggaaattcaagagctcgagcagttattaagttctgaaaggcaagagcttgactgccttaggaagcagtatttgtcagaaaatgaacagtggcaacagaagctgacaagcgtgactctggagatggagtccaagttggcggcagaaaagaaacagacggaacaactgtcacttgagctggaagtagcacgactccagctacaaggtctggacttaagttctcggtctttgcttggcatcgacacagaagatgtaagtacctgggatttaaatgccatttctcggtttacatgactagtggacactcagtaaatgtttgtctaattgaaatgtacattaaacctaagttaaaatatttttagggttcaaggaaataaaatacaccaaaatattttcaaaacaaaccagaacttgaggaaaatgagta

SEQ ID NO: 58461 - DNA, 3513 bp, Homo sapiens
gagagaaagatgtagtgggaaattcaccactttaagagatgtgtttagcagaggccacgcatcagtttctaaaaagtaataactaaatctattctattttgattctttttgaaaaataaaatgcatgcttgttatgtattataattacaggctattcaaggccgaaatgagagctgtgacatatcaaaagaacatacttcagaaactacagaaagaacaccaaagcatgatgttcatcagatttgtgataaagatgctcagcaggacctcaatctagacattgagaaaataactgagactggtgcagtgaaacccacaggagagtgctctggggaacagtccccagataccaattatgagcctccaggggaagataaaacccagggctcttcagaatgcatttctgaattgtcattttctggtcctaatgctttggtacctatggatttcctggggaatcaggaagatatccataatcttcaactgcgggtaaaagagacatcaaatgagaatttgagattacttcatgtgatagaggaccgtgacagaaaagttgaaagtttgctaaatgaaatgaaagaattagactcaaaactccatttacaggaggtacaactaatgaccaaaattgaagcatgcatagaattggaaaaaatagttggggaacttaagaaagaaaactcagatttaagtgaaaaattggaatatttttcttgtgatcaccaggagttactccagagagtagaaacttctgaaggcctcaattctgatttagaaatgcatgcagataaatcatcacgtgaagatattggagataatgtggccaaggtgaatgacagctggaaggagagatttcttgatgtggaaaatgagctgagtaggatcagatcggagaaagctagcattgagcatgaagccctctacctggaggctgacttagaggtagttcaaacagagaagctatgtttagaaaaagacaatgaaaataagcagaaggttattgtctgccttgaagaagaactctcagtggtcacaagtgagagaaaccagcttcgtggagaattagatactatgtcaaaaaaaaccacggcactggatcagttgtctgaaaaaatgaaggagaaaacacaagagcttgagtctcatcaaagtgagtgtctccattgcattcaggtggcagaggcagaggtgaaggaaaagacggaactccttcagactttgtcctctgatgtgagtgagctgttaaaagacaaaactcatctccaggaaaagctgcagagtttggaaaaggactcacaggcactgtctttgacaaaatgtgagctggaaaaccaaattgcacaactgaataaagagaaagaattgcttgtcaaggaatctgaaagcctgcaggccagactgagtgaatcagattatgaaaagctgaatgtctccaaggccttggaggccgcactggtggagaaaggtgagttcgcattgaggctgagctcaacacaggaggaagtgcatcagctgagaagaggcatcgagaaactgagagttcgcattgaggccgatgaaaagaagcagctgcacatcgcagagaaactgaaagaacgcgagcgggagaatgattcacttaaggataaagttgagaaccttgaaagggaattgcagatgtcagaagaaaaccaggagctagtgattcttgatgccgagaattccaaagcagaagtagagactctaaaaacacaaatagaagagatggccagaagcctgaaagtttttgaattagaccttgtcacgttaaggtctgaaaaagaaaatctgacaaaacaaatacaagaaaaacaaggtcagttgtcagaactagacaagttactctcttcatttaaaagtctgttagaagaaaaggagcaagcagagatacagatcaaagaagaatctaaaactgcagtggagatgcttcagaatcagttaaaggagctaaatgaggcagtagcagccttgtgtggtgaccaagaaattatgaaggccacagaacagagtctagacccaccaatagaggaagagcatcagctgagaaatagcattgaaaagctgagagcccgcctagaagctgatgaaaagaagcagctctgtgtcttacaacaactgaaggaaagtgagcatcatgcagatttacttaagggtagagtggagaaccttgaaagagagctagagatagccaggacaaaccaagagcatgcagctcttgaggcagagaattccaaaggagaggtagagaccctaaaagcaaaaatagaagggatgacccaaagtctgagaggtctggaattagatgttgttactataaggtcagaaaaagaaaatctgacaaatgaattacaaaaagagcaagagcgaatatctgaattagaaataataaattcatcatttgaaaatattttgcaagaaaaagagcaagagaaagtacagatgaaagaaaaatcaagcactgccatggagatgcttcaaacacaattaaaagagctcaatgagagagtggcagccctgcataatgaccaagaagcctgtaaggccaaagagcagaatcttagtagtcaagtagagtgtcttgaacttgagaaggctcagttgctacaaggccttgatgaggccaaaaataattatattgttttgcaatcttcagtgaatggcctcattcaagaagtagaagatggcaagcagaaactggagaagaaggatgaagaaatcagtagactgaaaaatcaaattcaagaccaagagcagcttgtctctaaactgtcccaggtggaaggagagcaccaactttggaaggagcaaaacttagaactgagaaatctgacagtggaattggagcagaagatccaagtgctacaatccaaaaatgcctctttgcaggacacattagaagtgctgcagagttcttacaagaatctagagaatgagcttgaattgacaaaaatggacaaaatgtcctttgttgaaaaagtaagtggctatatctgtttatgtttaaatatgtagtcatgaggcaggaaaccatattttcttctagacactgtgaattgtatttacttctagaccgtgtctgctatattggaccaaactttgtaaaggctttatgtttactgggtcttgaattgcagaaacactgagttggctctggcagtagtcactattctggctgattctttgggacatgttcatggattggaccaggtttttaatgtggcacctacataagggcaaagctttggtttatgcacagttccttgttctagttatatttccttttcttagagtacatcagaatagtggcctccccatatccagttgagactcactgctatagagagtataacagacattatctaggatcggaaaggatctgcctgccttactgtgtcttttttgccttcaggacaaagcacttttaaagatactgatagatttgtaaccaacagagcactcatggcttctagggtgtgttttggggatttcgtgctt

SEQ ID NO: 58462 - DNA, 1761 bp, Homo sapiens
ttcagatgctttcagagtgtttttttggatttgcctggtcatctgttagaatcttgtctcccaaagccatacaacagaagcttcataatctttgctgacttctgttcatccacttatggtagacagaatggactggggaaaataaggatgtaaaaaaatgaatttatttgattggatataactgacgctgcaagaacgtttaatgagttggctgaaatatgagtttgagactttggtggattttatttaagctgtcccaatgagtgtcacaggactagaatatctgccttgatatgatatacctcccgaacaagagttgtttgaactataagaacatatacagatatatctccccaacctcttaaaaaaaaaaatcaaagaaagaacacgtctaagattatctgcttcacgatgcccattgttaactagagaagcatcaagttgcacatgatgtgttgctttactttggacaggtactgttatggataccaaggtcgatgaattaacaactgagatcaaagaactgaaagaaactcttgaagaaaaaaccaaggaggcagatgaatacttggataagtactgttccttgcttataagccatgaaaagttagagaaagctaaagagatgttagagacacaagtggcccatctgtgttcacagcaatctaaacaagattcccgagggtctcctttgctaggtccagttgttccaggaccatctccaatcccttctgttactgaaaagaggttatcatctggccaaaataaagcttcaggcaagaggcaaagatccagtggaatatgggagaatggtagaggaccaacacctgctaccccagagagcttttctaaaaaaagcaagaaagcagtcatgagtggtattcaccctgcagaagacacggaaggtactgagtttgagccagagggacttccagaagttgtaaagaaaggtatgcctaatttaaagacaaaattatttgtgttcttttgaaattccatataatggttcacatataaaaagacaaaagtatttgcttttttacattattgtgcaataatctcattgacgttcataagcaatagtctgcttttaaatggatgaggcatatgttttcctctaggatctaattacttgtgtcacattaacaaaagagctggtagattggaaaaatggctgtctaaaatctgtttggaatttgttatttgaatgctgaaaaaaattattaaattaaggactcccgtcagcgtttcctacccgttggtcatgtctgacctagctagcaggtgagctggagggtgcaccctgtgatgctggccccctgactggagccactgactacactttgttttgtttttgttttgttgttttaatcttggttttcccccaagtctggcccaaggactggtgccattctaggaactgtttgttattggttcccaactgaaacaatgtattgtaattaagtaggaatttagaaattttcatagcaacttgatatttttgtaacatccaagcacatatcatgttttctattgatttgttctcattatattatacaaaaatattattccacagcacattggaaattcttcgaaccccctctgcccccaaatatcaaaactgatgctttgccattgatggtttgaaaagcattgttctgagtaactctagcccaaaaatagttatctatctctcactggtaatttttatatgtagttaaagtgtgaaaaaaacaaaaacaaatgctgctttagttagcc

SEQ ID NO: 58463 - DNA, 2514 bp, Homo sapiens
tatataaatttcaatttttttttttttaaatcttgctctgtcccccaggctggagtgcagtggcactatcacggctcactgcagcttcaaactcctgggctcaagcgatcctcttgcctcagcctcctgagtagctggaactatagatgtgagccactaagcctgacccaatttcaaaaaatcttcactcaccagttaccttactctctcatctacttaaagtctcaaattttctgagatatctctttcctttaaaaggcaggatgtttgagaggggatttattctttccggactttattgttagatagctgcccttctgctctagtccaaattcaatatggaaacagtcagccataaagggagaatgattaaaataccctgaactggtccttggtcattttaaaattttccaccctgtggaggtagtattactcatttgggttacacttgttttaaacaacaggaatggctagttaggacaacagaggcaggtttttcacttaggaattcactggatgtgtaccatgtggtcaagcatgttgtgggctctagggatacataggtaaatagggcatagtctttgccatcagaggtgccaagggacgtctgatgactggttagaggttgtacctggtatcctcctaagttctctgttagatggggcctgttctcaaggaagaggaaatacttcaattatatataactcctagagaagaagaacttaatttaaaacttagtgacatagtgctttatttttcatgttgtggaaatgtgaatgtgattgaacctctaacagagatgtttgtgttgcaggtcaaagttgctcagcggagcccagtagattcaggcaccatcctccgagaacccaccacgaaatccgtcccagtcaataatcttcctgagagaagtccgactgacagccccagagagggcctgagggtcaagcgaggccgacttgtccccagccccaaagctggactggagtccaacggcagtgagaactgtaaggtccagtgaaggcactttgtgtgtcagtacccctgggaggtgccagtcattgaatagataaggctgtgcctacaggacttctctttagtcagggcatgctttattagtgaggagaaaacaattccttagaagtcttaaatatattgtactctttagatctcccatgtgtaggtattgaaaaagtttggaagcactgatcacctgttagcattgccattcctctactgcaatgtaaatagtataaagctatgtatataaagctttttggtaatatgttacaattaaaatgacaagcactatatcacaatctctgtttgtatgtgggttttacactaaaaaaatgcaaaacacattttattcttctaattaacagctcctaggaaaatgtagacttttgctttatgatattctatctgtagtatgaggcatggaatagttttgtatcgggaatttctcagagctgagtaaaatgaaggaaaagcatgttatgtgtttttaaggaaaatgtgcacacatatacatgtaggagtgtttatctttctcttacaatctgttttagacatctttgcttatgaaacctgtacatatgtgtgtgtgggtatgtgtttatttccagtgagggctgcaggcttcctagaggtgtgctataccatgcgtctgtcgttgtgcttttttctgtttttagaccaattttttacagttctttggtaagcattgtcgtatctggtgatggattaacatatagcctttgttttctaataaaatagtcgccttcgttttctgtaagaatgattcctaagtgtaaaggcattcgaatattggtactatttcttgctaattacaacagcctcttatacacgtgaaaatgtttgaacaaatgatacagatctttaaacaaatgatcttagcatctttagttgtattaaaagacacaatttggaatacgggtcataaggagtatatgggaatataagacgtccagcccagtgcctcctacattctgtgtccccattaaaccacatcatcaaggatacaagtatgtggtatttcccagctcacttgatgatgatatagttttgaaagcatgcaggcattataagccatgtcagatccaaaaacatttgaacaagttcttacatccttgaatcagggtaaaaaagtttcccagggcatgcgctagtaaaagatcatttgttcttggctttcagtccaaattgatgcacaaattccgataagcaccatcatttatatttaaaagttgtccttcgcaaggtggcctctgttgttggataatgcttcaataatattaagctacttaatattcatcagctgaaagtgatatcctgactttcctcttgtttcttcagttgcttggggttgaggtctggtgcaatatccttaccgtaaatcatcccagggcccccatgtgctcaagggcatgaccccgagcagacattgttgggatcaggccatcagctttattggctgtctccagtgattggaag

SEQ ID NO: 58464 - DNA, 1057 bp, Homo sapiens
tcaacttttactacctctaggattagtttttcctttcccaatccatgttgacaaagtgggtcataaagatccgtagatcgtttgcccagatctgccctcaatctgcgaatcagcttcctcgttttagaaaatctgaaatgtaaaagggaaaggggctgggatcgcgtggggaggaggaacgaaatggaatcccgcgtgggcaggcggctggccaggagcacattcccctagcctccctacgcgccagccccgcggcgttgggaagctcctccctgacctttccttcctcctcctcctcctcattctaggcggcagtggcgggcgaagcgtgagcgctgcggtattttgtcccgaacggtgacccctcctcccaggcaggctgcggcggcgtcggtggcagcggagcacggagaagaggcccgggcggcccggcggcctggaggccgcgaaaggtggaggccgggccgcccttgtgcaccgcaggattgacccgggaaggggcagaagctagcgagccccgcccggccgccgggaaggtgggggaagccccgtgcaccccccgccctccggccgccgccgccccgctggccctgcagccgtcgccgctgcctcgggctacagccccgggctcggcggtcccggctggggaaggagggcggcgagcgcgtccggagccgccggagatggcgggagggcactgcggcagcttccccgcggcggcggccggcagcggcgagatcgtccaactgaacgtaggggggaccaggtgagtcggcgggtagcgggcttgcagcggggatgccttggcggcctcctcctttggtgtcgacggggaccgagagtcgcaggaacgagggcgagcgtgggaggccaagcctggaggggaacgtgggggcctccaggcggcaagaacgtcgggcggattttggagctggtgaagcatctgctctgggaagggagaggcagaagggacgcttggaattaccgaggaccaggcccatgtggcagagtagctgctgtcctagaatgccaacctttgcccctcccaacaggcaag

SEQ ID NO: 58465 - DNA, 1108 bp, Homo sapiens
cccagctactcaggaggctgaggcaggagaattgcttgaacttaggaggtggaggttgcagtgagcccagatcgtgccactgcactccagcctagatgagagagcaggatgctgtctcaaaacaaacaaacaaacaaaagttaccaattatgtattttacatttttaagcaatttgttttcctcttatgtattctgtggtgctttagtttaaaaaaaaaaaattgtcattacctttccccagctctgaaggaaattgagattagtaaaagtattatgagaatagtattcttttccacttttgacagcagtgtgcagtatttacttttctcaagtacccctgtgtgcattattaaagtacattgtagttttaatgattgaacagtataagaaagtattatttattcatgttttcgaagtattaattgaattctagactgtttcagataaaaatgtttcctcaggtgtcacttttaccaaaggtatcaatacaagtgattttattagacaagattttttctatgtattaaaatatcagtttaataataactattcagaggaagaaaaagacaccatctcaagaaaaagacaccatctcatgaaatgcacacagactacattccaattttagaaacattaaagtttaagagtggaaacaaggaaatgtagtatttaagtaattaagacttcattccctattagtgttacagatattaaagttaaaagattaatttgtaatttgaaaataaaactgttctcttttttacagatatttattgatagagatccagcagcatttgcacccattttaaattttcttcggacaaaagaactagacttaaggtaagaaatgcactctttttaaagtaaattcttactgataaatatgtgtttttaatatgttttatgaaataaaaggttttttttgtttgtttttttttttccttgagttgcagtcttgctctgttgcccaggctggagtgcaggagtgcagtggcatgatctctgctcactgcaacctccgcctttcaggttcaaacaattctcctgcctcagcctcccgagtagctgggactgtaggcacatgccaccatgcccggctgatttttt

SEQ ID NO: 58466 - DNA, 1083 bp, Homo sapiens
ttttacctgtgttataatggacttctgagcaagatttcattttaaaaaatgttcccctgtcaaataaaaaatgtttgaaagtatggggaatttcagttctaaagcagttaaattattacatagtacctaacacataatacctgtaccataattgtaaagagtggctggcagactgaattaattacccattaattcagtaacctaaagcttatttattgtaaacagtatgacaataccagaaatctgttgacagaattttgtctttgtctttgtttttttcattttcattttattttttaattgtaattaaattatttgtaataatttgctatattggaagatgtatttcggctttaatgaaattcacatttttgtttctttgtcacaatgtgatatttttaatttttgaaaggtgaacttaggaatgtatttgttttcttcttctctttataggtattcctagtcgtaaaataaacaacacagtcagatctgctgattctaggaatggtctaaattctacagaaggtgaagcccggggaaatggtacacagcctgttctctctggaacgggagaagaaactgttaggctaggtaagcaaagattacagaaatagaaaaagaaaaatacgtatgtttttagtgctgggtgatattgagtaattacttttaaagatttttgcctcatctccttttttatccagatttatcatttatatcttggaaaggtctcatttaacacttaatttttatttaaaatgttgtgtaatcttctatcttctctgaatctttagaacagggttgccaaaatttatctggtaagagccagagattaaatattttaggctttgtgggccacgtgttctctgtcagacctactcaactttgccattgtagcatgaacacataatggacaatatgtaacaagtaagcatggctgggttctaacaaaactatttttttttttttttttgagacggagtctcgctctgtcgctcaggctggagtgcagtggtgccatcttggctcactgcaagctctgcctcctgggtttacgccattctcctgcctcagcctccggagtag

SEQ ID NO: 58467 - DNA, 2889 bp, Homo sapiens
gtgctaatagtagctggccatcacaactggattgtagctgcatatgcccattttgctgtgtgttacaggtagtgtataattaataatgctttgcttttacaggtggcagtttgaaaattaattgtgattttatatttttagattgaaaagctatttttttttagtcatcaagttttttccctgcatattttacccatgtctgtatcatctgattaagatttagtgtacttttattttcacagctaatttggtaaatgtttctgatagcctttatctgttgtaaacatttagcagacaagtgtgaattgtcatgtaactgagatatcctgatgtattatttattgcttatacctagcttctgagactgtagtatataatgatgttagacaggattattaatgtgagctccctgatggtctatctctaatgattcagtgttttgtattctatagcaagggagagtacattggtcataaataccacattttgggaagtgaggtagtaaagcaggacagttattgcacaagtggtatagtttaatatctaatatgtgaaacttacaaagaagtagtttggttttactaatgcttacattctcagagcctgagaagcaatgaagaatagtgtagaccggtgatttttttttttttaattgggaaagtgataggactcttagttcaaaatcactgtactcattgagaaatgttgatgacagagaatggtgtagaagcacaaaagtggttggaatatactagcttagattattatttcatttaattgcagaaaaatcaaagatacataaactatttgtttatcactgttgagttcggttaagaaaaatagtcacaataagctgaaaaatatctaaaatgtcttctaaagtttacagatatagtttaaagaatcccagatgtattttttttttaaaaatctgaatttatgaaaggtttggcatgtctggtaagtgctgtttatatcagtaatctcaggtttatattttccttgtagtaatgattaagtgcagacttttatgttttaagagtgttttggctgggcacggtgggtcacgcctgtaatcccagcactttgggaggccgagatgggtggagttcaagatcagcccgaccaacatggtgaaaccccatctctactgaagatacaaaaattagccaggtgtggtgatgcatgcctgtaatcccagctactcgggaggctgaggcaggagaatcacttgaacccaggaggtgggggttgcagtgagctgatagctcaccattgtactccaacctgcgcaacagagcaagactctgtctcaataaataaataaacaaatttttaaaaaaagtgttttgtggatttgtaattttaattatgaaatagcatggaaattgttttttgcataatttctttggggatggttttgtatgaggcaagactaatttggtaaagtaatttttttttaggaagcattgttttgaatttatcatcttatatatttgaattgaggtgacttgtagacccttgtttacatattatgtacatatttttgtcaataaggaattccagaagaattgtgaaatgataagtgatccaagtgtaacagcataacttccgttttgttactgtacacaatactaaagattgctcttttccagaaccaccacattattacgcaaaatttaactcactgggtaataattgtatggaggatgatgctattacattttccagtctttgcgtttgcattgatcacgatctttctgtgctttcaccaagtgtctgacatttcagagcaatatactcatgtaaagtgacgaaggaagacaattgaggacatatttggatttcctcacatatagttaaatcattcaacacaatggcaataaaaagatttcaaaagaaagaaaaatatttaaactgtttaaaagtgtaatcttttttacaagttatttttcctcaagtttttgtatcagtaagttacaaaacctttaaaaaaagagtagtacagtgaagacctgtatgatgttctcctagcttcactaattttctacatggttaggttttatgtttatgtccctttttcttgctgagtttatgacagtgttacttctattaacgaagagtagttgtgtgaattgctgcccccttggggcttatattccactttagatctttaatccttgtggagtttacttttttgtatgtggtatgagatttaaggatttattttcttctcagtgggtaggtaattatgttctgacaatttattacgtaaatcattctttgtcagtgaatctgatagcccattttatcttgctttatgtgtgtgtatatacttggatctgtttttcagttctctcatttccttaagacatatgtctattctcatacaacttgaggtgaagtatgttcataataagtttcaaaatctcacagggcatgtcctctctactgtattttattgaggtcttcatgtaggaaataactagacgtaactctattcttcgcatagctgtcttaaccagagggttggttcactaggcagcagtaagatgatggagaggtgaaataacagagcatattcttgttttatattttgttttatttattattatatattttttgttttgttttgtttttgagattttgagacagagtcttgcactgtcacccaggctagagtgcagtggcgtgatctcgggtcactgcaacacctgcctcctgggttcaagcaattctcccacctcagcctcctgagtagctgggactacaggtgtgcaccaccacacctggccaatttttgtatttttagtagagacggggtttcaccatgttggccagactgttttcaaactcctgatctcaagtgattcacccgcctcagccttc

SEQ ID NO: 58468 - DNA, 1226 bp, Homo sapiens
ctcctgacctcaagtgatccacccgccctggcctcccaaagtgctgggattgcaggcatgagccatcatgcccggccgattataacatttttaagctcaagtgatcattgaaacatttagcttagaccctatttcgtagttgagataagaaccaaaaaagtggcaaacaaaggtactctgagagccaggatcccaaccctggttctcctgactcctagtgcagtactctgctaaagagagacaagtgtataaggccaatatgccgcaccaaggtgagcctagaattctctgcttaggcattgctgggtcttttgctactgatgtgtgataggtgctgcttacaacctctctcacctacacttactcttctgtttgctctgattccctgagcttgcccatattcagtctcccaatttgatggactcctattaacctttaaaaactccaactcagatggcttcttttctaagatatattttcaaccccctttccataccctttttaccccatagatactattataccctgtgcatccttctgttattattgtatcaaattataattggttgcagttttttctctactaaagtgtaagttcttagtaatgtcttgtcttctcgtgttttttaatcctaaagcctgatatagtgtcttttgaattaattaaatggagattgcagtgctggaacacatggggtttaaaaataagctctgagtaaaaggcccgaatgtttgtttttagtatcatgtgacttcttgctgcttttttctcctttttgcttatttccagaatttagacacattctagatagttaaggctgccaagtctgtgtgttcagatcactagttcttaaatatcgggtccatgagcaagctgcatataactcacctatggattttgtaacaatacagtgggttttctgatttagtgagtctggcatggatcccaggatcctttttgttttgttttgtttattttaaatctatcaatcaggttattttgatgatcagctgaggttaggaaccaagcttcaggataaggtgttatacagcagtatgagatggcttggagcagactcttccttgctttagtagttctgtaagctgcttaagagcttgtgagtttcttatttctagtccccaacacgtatagcacatagtttgtagtaatgagaatataaattagtcacctttaagatgtttttaatccaggttttgattaattc

SEQ ID NO: 58469 - DNA, 1030 bp, Homo sapiens
aagtctcactctgttgcccaggctggagtgcagtggcacaatccccgctcaccgcaacctctgcctcccaggttcgagcaattctcctgcctcagcctcccgagcagccgggattactggcatgcgccactacgcccagctaattttgtatatttagtagagacagggtttcaccgtgttagctaggctgatttcgaattcctgacctctggtgatctgcctgcctcggcaggtttcttttagcacaaatatgggaaggtattaatttgtaaactagattgattttcctggaaaaactaatttttttattcctatactttaaaaaaataaatacaaatgagactttgtttcccttgccatttcctagaaaagaagtaacctttagcaaggagaatgaaaaatagagaataccaccttttcagagaaataataaattatcaagggagcaagtactttctggaaatcagttgctttgtttactagttctgattctgtcacttgcttactgtgtaactttggacaggtcatttaatctcttgtatgagaaagggaaaagagagggacctggtcagactcggccttccagttctagtgggctgcaatctagtgatcacatgcaaaaaaagaggagacaaccaatcgaaattgagaaaggaaagtactgctgtgggaaatacaatttaaaaaaaatattttgaaggaagtatattgatggttctcctctgtagcatgtttgtgtatatgtgtgtgcacgcgtgcacctaaagaaagtttatttcctaagccctactaaaattggatattggttgcctctttaccagaagaatcaaagttttgaggaaattgaccagaaaatagaaattataattactatctaacatctgataatactctcactacatcaggttcaagatgttgttcctataactagttatgacactgctggatcattccttctgcttggatgtaacaatggatcaatatattacataggtaagtgttcagtcacttaaaatgctcctgcttaatg

SEQ ID NO: 58470 - DNA, 1051 bp, Homo sapiens
acgagctctggagcagtacgagtgattgtacaacacccagagacagttgggtcaggtcctcagctttttcagactttcacagttcaccgaagtcccgtaacaaaaatcatgctatcagagaagcatcttgtatcaggtaaaatgatttcattatactggtaaggaacttggctctgtgtgttattttcattaaaagaatgaaaacgcagtgtttatgtgagaaaaatatactaaaagaagtactagaaaagtttaatgactgaagaaattatgattgtcttttaaagatttctttgagctggtcgtggtggctcatgcctataaatcctagcagtttaggaggccaaggcaggtggattggtttagcccaggagttgaagactagcctgggcaacatggtgaaaccccacctctaccaaaaaagaggaaaacaaaaaaaagatgttttttattttacctggttttaatatacttaaatttaggagatgtgatttttttttttttttttgctctcttggcatatcttattgcaaaatatttattatgaccctgctaagaggaatttttattaaatttttcaagttttacttttaatataaattgggttgattatattatggtttaatgctaaaactgtagatttaaatgtgtattttgatattttgtcatctcaaaaataataaaaattacaattgtagagattatttgaagaaaataagcttttcttgggtttgtagttcttcataatataaaatttttaattaaatattaattggatacataaaaaattaaatactaattttcaagtttaacgaatagtactttctgattacaaagtaaaattctattgaagaaattcattgtgtatggaagatgatttctaaaaggctttgtgaaaattgcattgtgagttgggtgtgtcagtaaagcttgctttctagaggagtcttacattaactccttttgtagagcagttcttgcccaacttaaaatttttacaaacatggttttcatgtgtcagatttgtttttgtgaaggctggctagaagat

SEQ ID NO: 58471 - DNA, 1528 bp, Homo sapiens
attttaattaattttttgacatttttgttttctgatcaaggaccttttggagagcgagacgatcaacaggtgtttatccagaaagttgttcccatcaccaacaaactatttgtaagactctcatcgactggaaaaaggtaacactttattgtaaaaatatttgtattcagaagccaccttttgtcttacaaaacatatggcataatttgacatattgaccaaagagtgctactagaaacaaattgttgggacagaagtctgttatctcataatcataactcaaaattaagacagtagactttatgcttactttctgggatttaagagtttcactgatgctgtggacagttaggagggactagtgatagaataagaacacagtgaactttttttcatggccaaacataaatacttattaattttgttattataaacagtttctatctttaaaaaacctggaacttaaatattttccatcccatataaatctgtatacattattgatgtttctcaaataaaacattacagatttcctgattcagtatccccttttaaaataaaaatgatattaataacactaatttgcataatcttggcacagcttacaacatagcacacattttttttttctattttagacctatttccatctactttaacatggagagaaattgtctgtctccgtgagagtaggattcctgtctttatgcagtctcctcagtatttgtttgtgaatgctgcacttatgcttccattatatggcactggcagtattcctctgcttttgtcttcagaaatgatttctattcaaacttaaagaacatagtgaatttgctggcagacggctgaactaattctggcacttcctgttactagctatgtaaatacaactcaagttattttatttcccttatcccagtttctttataaaataaggttcaacgactttggcaggatttcataggataaaataaatttcaaaaatgaaatatctctcatagtacctaaccataatagatgtacagtagaagttaatttcctcttccttttctattgactgaaattttacttcttttaaaattattatttataacctcagattttgcttcaacattcctctgcattaaacaaatttttttgacgatgagaacacatggacacatggaagggaacaacacacaacaaggagcctgttgggggtgagcggggccggggagagagagagcatcaggaagaatagctaatggatgctgggtttaatacctaggtgatgggttgatctatgcagcaaaccactatggcacatgtgtaacagacctgcacatcccgcacatgtaccccagaacttaaaagttacagggaaaaagttttttgcatgtcaaacaaatgaaaaaagtaactttcctgttaatagtccattaggaaggttattgttttcattttatttatttatgaatgagacggagtcttgctcttttgccaggctagagtgctgtggtgtgatctcagctcactgcaacctccagac

SEQ ID NO: 58472 - DNA, 1051 bp, Homo sapiens
aactttactgaatttcagtacattagtttttacactaaaactttacaagataaaattggacttcatttagtatctttttaacagaattacttggaataatgagatacaataatcatatctcttttgacattttggaaatttttttaattttacaagtacatttaacagatcatttataaagcaggagtccattttaacacttaccgactttttttggtttggaaacatattaccacgtcttaataggatggtgcccatataggtgagcatccctttagatcatgggaaccagcagactgcattcctaatcttcattatgcctgagacttgtcttacaatgttacctttaagtgaatcacataattgtctttggaacttggtctcccaacacttattgtgattgcaaagtgtttaccagatatttgatgaggtgctatgtttgtgaaaaacatatcatgtaattcaaaaacactattgatattgaataccagataccactatgtagtaagtcttttaggatgattttaatttagtcgtgcgtcattttctgattctcatcattgggagatcttaaatcttagcaagcattagcaatattaaatgccaaaattccattgaaactttcaagttggagcaattgtctgtgtttgaaaagatgaaataaaaataataatcaagggcaaagctttgagtgcccagaagggaaagctgtaccagttgctaacctgtcttgtttcaggagccaccatgtttttttttcagtgttaacaacaatcatgataattaaattaaaacactagtttgttcacttgtaggactgcagttctgaattttgggttaaaggttttggctgctgtaagaatgtgaatttgaatgtattttgaattgtaagagcaaaagaacgtttttgtacaattttttttcatttaattggaatgatcttcaggtttctacaaatagggtaattgtaaatttaaagcattagcatttattggtgaataatgtatatatccccattccaagaaatataagtgagtgaagttgaaataaa

SEQ ID NO: 58473 - DNA, 1046 bp, Homo sapiens
gtaaaataaaagcaatcggactctttagagcttttgtttatggcctgtctgggccctttgttgtaaccctgtcatgcccttatgctgattaccttcttgtagaacaagaagtattgactagagaatgaatgatgtgtagtccctagcccttaggaaactctctcaaagagcaatgtctttaacatatgaattctgtttttttcctccttttacctttccctttccctttctctatttttcaccatctcttttgtttctacctcttttggtctctgtgcttgacactctctcctctttctgtctctctttgtatctcctcaatctcaggcttctctgcagaatgtcaaacaaagatcgacacattgattccagctgttcgtccttcatcaagacggaaccttccagcccagcctccctgacggacagcgtcaaccaccacagccctggtggctcttcagacgccagtgggagctacagttcaaccatgaatggccatcagaacggacttgactcgccacctctctacccttctgctcctatcctgggaggtagtgggcctgtcaggaaactgtatgatgactgctccagcaccattgttgaagatccccagaccaagtgtgaatacatgctcaactcgatgcccaagagactgtgtttagtgtgtggtgacatcgcttctgggtaccactatggggtagcatcatgtgaagcctgcaaggcattcttcaagaggacaattcaaggttagtgtcggacctgggaatactctccccacttccaacctcacatgatgggtttttgtttttccttattcttattctcataagtcaagtatcatagttttaattctctcttgagtagaaaatggaaatagattacaattgatagtggaagatttatagaataaaatccccccagatatactccatatctattaattttcctcttactgttaagctttaatggtgcaaggataataaactttgggtagagtttacaagagcatagttattattagagcaatgtgggtctatatagcaactgta

SEQ ID NO: 58474 - DNA, 1073 bp, Homo sapiens
taaccatatcacctcagacctgtaatctcgttctttccattctttcctccatagtcccccgacacacacacacacacacacacacacacacttgaacacacacaaccacacatatatatgcacatacagccacagacacacaaacacacacggctctctttgtctaagtgccttttagcttaaaaaagatcttggcccggtgctacaagagtcatgatctttcaaaaagcactccatgaagaataacatgctgggtaatgtctcctgtagtcatttcccatgacagggattccctgcagtgcagcattatgtagcactggcagtctatgctagatggtataggcctgggacacacaaaagactaagagaataacagtgtacacgattccaggtatgttttgcaaagctctgagaaacatgtatacacatacacacaaacatgaaaacaaacacatgtatacaattatgcacaggtgttcccttaaaattgggctatgaaagtaaccccaggactgtgcttttcacacaaaggccattcataaatgcttgatgaaacaatgacagccttgtactgtttcaacaagtaggaacgtgcaaacaggatggagttcagttggctagcagtcactgtgaaccacaggccaaatgtgtcaacagtaaagaactgccactaaaaaggctggcagatccaatgctatgcatgtggtcatgtagtagatcagcatgttccatgaggtagtgcagcctaggaactgagtgtcgtttcagccattagtgttgtgttcaacatggagctgcatagccatttcaaaagctcttatgcttccttagctggtggaagtctcagaagagatgggactatttaccagctcactacagaactctcaaagatgctaagaatgggtccagcattgaggagtatgtgggcaatatgtgggagcatgaacagaagagacttcgtggtttctctcctctcttttgtcatggaggtagaaataattctcattattttccttttccttttttttttttcttttttttcgagactctgttgcctaggctggagtgcagtg

SEQ ID NO: 58475 - DNA, 1028 bp, Homo sapiens
tccatttggccaattggatggatccagaagggcatctagtcagcaggtagagctgtggccgtcacacaggtgacaggtcaagctccttttatgcctccaactcagacaggaattaaatcacgagttgcagaaagttgtgtggggctcagtaggccagatgagaggtcgggcaactaaaggcaaggtgttaagtcaccatgcacgggtgacctcagtggataaaagtggggcaaaggtggtcctctgctgggggtcatgggcttagttcttatcattttacaagaattttccttttttggctatttcttctctcatctcaggccatgtattattccagatagtaataatgtataaaagagacaatagaaaaaccaaatgaaaatgacttaccaggactatggaaattaaatggtagtgtaactatataaccatatgttagatattttccaagatcttcctaggacattggcagggcccttcctcttaaaaacaatttattaatgtaataaacattcacccagtagttttcaggacatttgactttgattatgtcctgatcctgagtttctataaagtagataggggctgtgtttggacccataagggtttggccaaagacaaggggccaggcttacagagattatgctttttttctggcaaacagctttggcaggtgggaggaagaacattagcatgctaaaatgactaaaatagagttttcaatgatctgtggacattctttgatttccccactgtctttgaaaaagagttaaatttcttgtgcatatacttttttcccaattgatttaccctagaagttagaaccaaaagccctggacagactttatttctttagtgtagaggtacagaaaatagccaaatcagttatcttttatcaaaccattactttttttttttaaagcagaaatttatttttggctacaactatttgaaatagatgtcaccctactaagcgtttatttttaatgactgacactggcaaaatcattctgcagaaacatatgcta

SEQ ID NO: 58476 - DNA, 1053 bp, Homo sapiens
ttgatctatgaaattggtttcaattagacaccgaaggtgtcattatcctagtaaaggggatttgtgatataatatagaaattctgtatttgtttcaaaattgttggaaaaatgtgggaatagaaagattttgagggaaatgccaaaagccacattaatgaagaaaaacactgttgagatacttttgaataatagataggttatgtaatggtcaaccacaagataaaatttttacacggtatttttatggctttaaattggctgcattgtaaactaagcttactactctattaagtcattatacttttcaattatttaacatttctggccaagctatcttctgtggtctttttctgtacacatcagaaatgatgcgtacagtagtagttgtttgttgttagtgcgaggactttgtgatggagcaagctttaatttaaacttttcaagacaatattatgaagaatgcacagaggaaaaagcatgttatggatataatttgagccctatgaaatggggatagctacagcattgaaatgtacctaatacaatttgagttattctcactaagaaaccttgatggtatctgccttctaggtactgtgcttttggaaatactatatatccatttaaatgcagatcttctcttttctccagggagcagttggtgaatctttcaattgaaccacgggtatgataaaaccaactgaaaatttttccatgaacaatagagtctgtcgttttgaagtaatgattatcaagtttcataatattgtgatttttaaaaattcatttaaaatatcttcataaagtcaaaataatgtaccgggacttcttgtgcaaaggaagaagttttctcttgtcactttgttgtcagtttgttaaagctgtgaaatcatacggctttgcaattcagtttttaggttggcactgccatcccagtagagtaagtaggctttaggaatcagagcaaagaattataagtaagttctatgtgttctcaccctctcatgctagtggatgagcgtgtggtgctgtaggagagtttaaagatctt

SEQ ID NO: 58477 - DNA, 1053 bp, Homo sapiens
tctgtaaatgagaaaaaaatgaaacaggatcagagagaacaaagaaggagagaaaatgtttgtgtttcctacaaccctaaagacctggcttaaggttgtcagatgttctcttccaaaaagacaagaggaatctcacctggaatgtggaggaagcaacacttctttaggagaatatgacctccttccgtaggactggccttttacattattggacaaaatatattattggacaaaatactgaccatgtgagccaaacatcttattagcaaacagacaaatcagagggtgaatcattcacattacacaaagatttttcatgttgtaaaagagcacagggtccttttaggtagcactttctgaagtgcttatttacagatcattaaatacttaacagagggaaaaagtaaaagctgaagtgcttaagtcagtatttattaaatatccaccctagattcagataacacaaatctaaaattataatgacagttaattgtccagtttttcaatttttatgttagcagacaagaagctaaaataacagcctgcccaggttaatacatcccgagtgttctaacacagttgtaattcttttctgaggtcttattctcaatcccataagacacccccttatcttataatacatgtccctttttttttacaggctaaattaagaggctttctgttacttccatataatactaattatctgctggatgttggctaatgcttaaatgtattgtaaaacactgaaaagtgctatgtttgaccaactgaattttctctgtgcaatcatctcagaatttataggagctgttacaccttataatgttttaataaagttctatcttgtggcaagagaggattttaagtgacatcattgcctaattttctctttagttctctttgttttggtgtcagagggtggggacaggcttttcctctattgctcaggctgatgtgcagcagcccaattactgctcactgcagctccaacctcctgggctcaagtgattcttccacatcagcctcttgagtagctggaactacaggtgt

SEQ ID NO: 58478 - DNA, 1128 bp, Homo sapiens
agacaggaaaagattgtgttttatatcatccctatctattgtaacccaaaagacctaccatcgcatcagtgaagtccgaacacatctttgtttgaaaggcttgtcaatttcatattccttgaattggcttcttggtgaggattttctgacagagtgatacccatcaattttctatccttagacaatgtagtgtgaagttcacagttgacaaacaacaattaatgtttcccttggatgttttgacaaaaataaacctcatcgttgttatcaccagagtgccctctaccttactttaatgcagattttataaattttacctcatttagaacataaaataattattgaaagaaaaatgtattttttaaattcaccgtgattgaactgtaaattctattaatccagatgtacttctacctctgttttcccaaagattgatattatttttaagatcaactcaagtgtagtaaacggatttaaaattttaatcattggagtaatttattacaatattgaatcaatttacatgaaaagttaaatggctctcccagaactcagatttctggcaatgacccaacccatttagaaggtgaacaaaagaagtaaatggtactgatttgccctttctaggacccaagatgttactttaaaacctagcaaaagaggtcgtttgtattacgtgcctagtattgagctgtttctgagtcatttgcttcatagtatcagaaattctaaattgcttttagtttagaagatctttatttattatcttcattattaacaacttattatgatgatgattattatcattctatttataatggcctttgctggttgagtaaagactgagataacacatgtgaatcacctttctaatgggtttttaaaatcttgtcactttccaaaagagtttttttgtttctttttttttttttttttttttgacagagtctgcctctgtcgcccaggctggagtgcagtggcgcactctcggctcactgcagcctccccctcctgggttcaagtgattgttctgcctcagcctcccaaatagcagggattacaggcacccacgaccatacccggataatttttgtatttttagtatagacggagtttcaccatgttggc

SEQ ID NO: 58479 - DNA, 1047 bp, Homo sapiens
cacttctaatgcagttgttccatataagggactagattataaaattatgcatttagatgcatacctgatcatcttctggctgtattgaattttcaagattaggaaacacctgtgtgtagagtgcgtttgtatttgtatagaataatatttgccacttgttgagtacctactgtgtaccagaaactttattattttatctttataacaactgtatgagggagatggtgttatcatcaccttacagatcataaaatgaagatgcaaagaagtgttaggttagctacctaagatgacagaattattgaacgcaagggaaggtttcaagcctaggtctgcataacacctaaatccatgctctttccatagcaatgtacttacagcctctttgtaagaatatatatattttctttatatgcacattacatatatataaagattgtcctattgcatatgctgacttaaacgcactactatatgccttaagttttatagaagatttatctaactattactatgtagaaatgcgaatattcatgaaatatttctaatatatctcttcatacaggaacatgtagccacattttggatgaaacacatgtcatcagtcttgcaattcagatctttcataaggcaggtataggattctttaacatctgcattccagttgaatggtccctgaattttcttatctttcattgattcaaccattagcggcagaaacagtacaagaacaatcttaggaattctactaaagcaccttagtggcagcaataaggaaaagaaaatactggggtcacgtcctaacactccgaacatatgtgaaatgagaaggaaaatgcataatggttgaggagcggataatataattatttctgcaaggcgattttgacgttacaactcagtaacatcagaagaaatcatttatatggcatatgggtacaaacattgaactttagcctaaaacagttttttttatataagcttacaccagcatataccagattttatatttcaaaattgtgattttcttaatattcaggatgttgg

SEQ ID NO: 58480 - DNA, 1583 bp, Homo sapiens
aagttggtttaaaaagcaaaataaaacaaaaagacttctttttgagttctgcttttctaatatttaataggaaaattttcagaagtaatacttgggaaaccatgtttcaaatcgtaagtgacagacccgtaacaaaaatgcaccatttctttatcctttccacttcagaataggttggttttgatttgtctcccttctcttcctccccatgcaaatatcccaactaaaacacatatctagttgattggtgtttttctgatacaccttacaaaaggatcttaatattgttctttaataactttgggtctgttcctaggacgttgcattgtcattctcaaaacactgcagaagaaagaaacagaaaatgccgaccatcaccttgagtagtattccaaatgttctgctttgcaaagacaaatgactcatttagactgaagaaacaaggctgcctttgagacattcattgattttaaattaaaaaataactgctattgtttacatgaagagtgacaactaaataacagagtagaccttacttagtgtcatttgtagcaactccactgcacctgtctgaaagaaggggggtgtggggcaagcctaaatggggtgatcttatggatcaataatccagatctctcaatgctgtgtagcagacagtcaattcttgatagaattactgaaatatacagctagctgtttttcttatggctcaggtcttcaggtttggtgttgctgagtttattaactttattctccttgaacatttttctctttttctttatgtagctatgttgggggtcggggaagggagttgaatgaaaatgttatatttcatttgctctgtgaagatacccaaaatgtttggcccagcagatggaaaaaaaaaggtttagaagagggagttggttgttcctgaagtttgtttttcactatctttgtaaataggcctacataataaattttaagaagtatgaaaaaatagttataaaggcaatattgacttgggagagttatttttaagcaattagaatactccaattacatataactagtgcaaaaacaaagtaaatagaaaccaatggtattaatagtcacagtgagcatctaatatcaggcactcaagtatttcttctgattatttctaaaaatgtgtttcttaagaaacgtgccctggctaataattgttttagcttagtttgagctttaaaagtatctgaaatcaataaaaccagccttaattcttttaaaatttttattgatatttaatatttgtacaaccaagaagtttcattgtgcagtaacttgcatcattctttagttattataactgagatgaggaagtgagtgtctgaactatggcaaacctagttggtctcctccctcttcagtctcaaccgtgtccaactcgagctctctaccagcatccatgcatctggtctactttaatgactccacatcgctgttaagtccaaacatcttcatgggacaaaggtggcatgtatggccccatggtccagccgcagtgctcttttccattcgtgttatacagtcccttctgccaacactgctctgcaggcatcctg

SEQ ID NO: 58481 - DNA, 1037 bp, Homo sapiens
aacaggacagatccatctgaagcagtgagaggaactacacagtggcaggcagatcattctatctaaggggtagagcctcagactacatgtggtggaaggttaatcaacatagagtcaagagttgccaacaggtaggcagtgaacagggataggagccaggggcagctgatgcttggagaagggtaggcaggcagcattagaaagagcctccatcaccagattccatttcatggccaggaattgagcatctaggaggtcaaggcaattaccgagttctgaaagaactaagttactacaaggtttgtggtaaggtagggtaagtctagaataaagcttggatccaattactgaaacccaagtactaacttcagtgcactgagctaaaacttaaaccacctcttgctaagatcaggtttgaggcagaatgtgtagtcaaatgaccaaagccatcaagagagaagaccagagccaagaactggtcaggctgtgatccacgataccaaatgcaaagggttgctatgaatgtccaaagagatcatgcacaaaaagctgctttgaaagaaaacaccaccattaaaaacaaggatttggtggggtgcagtggcctgtaatcccagcactttgggaggcagaggtgggcggatcgcttgaggtcaggagtttgagaccagcctggccaataaggtgaaacccccgtctctagtaaaaatatgaaaattagagggcatagtggtgtgcacctgtagtcccagctacccgtgggggccgggagggtgggcgtggtgctgaggtatgagaatcacttgaactcaagaggcagaagtcacagtgagcagcgccactgcactccaaactggggtacagtgagactctgtctcaaaaaggggaggaaaaaaaaaggaaaggttttttttttttttttttttttgagacagagtctcgctctgtcgcccaggctggagtgcagtggcgcgatctcgactcactgcaagctctgccttccgggttcacgccattctcctgcctcagcctcccga

SEQ ID NO: 58482 - DNA, 1990 bp, Homo sapiens
ataggtagtaagggacagaagtttatgattcattgtgagcagcctcccaaggctcaggaaagctgcctgggactgatagtttcctccacacatgcccagtcgcaccacagctgagggatccagaaagttagcatgccctgggttatataccttagtggtgaaagaacttgctgtgctaaagagttgaagggcatcctgtttctaggggggactaggacaatgccaaagccatttcagccagttcctctctctgtacattctttctccacttatccttgagcactacaggtgagaaaacgtggagaacggttctgcaattttcaatctctttttttcttggtatttctgtatttaaatataattttatgcttctcaaaattagaaagagctttcccactgctatcacctcattttagagctacagctaaataatgtcacattgtttctcatgtcagaaacctttggttagcaccagaaagttcaatatagcttttccaaattgaaagtctgttggactgggcacggtggctcacgcctgtaatcccagcactttaggaggccgaggtgagcagatcatgaggtcaggagatcgagaccatcttggctaacacagtgaaaccccgtctctattaaaaacacaaaaaaattagcccggcgtggtggcgggcgcctgtagtcccagccactcgggaggctgaggcgggagaatggcgtgaacctgggaagcggagcttgcagtgagccgagatcaggccactgcactccagcctgggcaacagagcaagtctctgtctcaaaaaaaaaaaaaaaaaaaaaaagtctgttgaaaacatgcactaagcgatgcctaatactaagtgatacgtcatttttgaaaagatcttgctgttttaacacatttttatgcttatgattagtctttattgctgtaagaatccatgcaacaaacttgatcatttgtggcagctttattcaattgtttagattcaaagccttttcttacggatatggcaccgtttttttgaaggaggagggtttgaatttgccatgttttcttatatgatttttgtcctttactgttatgaagcacaaaagccaaattatttagtagtctgacatgtagtttgaaatcaagtaaaaacatttttattgctgacattattaaattgtacttaattttttaaagtgtcttttagaaacatctttaatttactttcacttagttgctaaacacattatatttttcactttttatctacttaatgtcaaatgatttgataatccatggattctatgtgacataatttcttaggttgtctattaatagtgagaagaaagaaactttttttcctgtcattttgcctgattagcactacaaggagtcttctaaaatgaaaaaaaaagtgacaatagatttaatcagagaaacaaaacagatctcatcacattcatgtcagccctcttccatcaagttagaaagaacattcctatttacattaatacagaacacgtttgtttttatatgatacagatcactgtattttgttgcagatgtaacagatagagttacagctgctctttatttgaccatctaaagatccaaagatgtttaaggattcagtttgctcagtcttccccatactgtcatttgttgtttggaaaggagacataatttgcaacagatacaaaactatttgtcattttgcaggtttgccaaaaataaatgaaactattaattatgacatttttgagcagctgttaataaattaggatagggtaactgttcattagagtaccgcttaatgacatgggctatatttgtttaatgctgcttttcctagaaatgtattaacaaaattaagtatatcaacaatagcaagtgatgctttattttaatggtttaagttgtctatcctaccttagtaaatttaggattttaaaacaaattctcttttgtcatatttcaaagcaaattctatcactcgacatt

SEQ ID NO: 58483 - DNA, 1352 bp, Homo sapiens
gggattttgagttctttgtttgaactgttgtaacacaagcctcaggaatagtgttcaagtatctgtcttttatcttagaattagaaaacataattaactattaactattattattaatttaatgtagaggtagagatttcatcatcttacttctagctatctgtgtcacaaatgttggtttgtatatatattttttaaaaggcactagacttagaaatgccaaagtaattaattttctttattttcagaaacaatttagtgttcatggtacgaagtgtttctaaattgaaacactttcagattaatggatttaagataactggttgctcttttctataagtagtaataatgagatatggcttcagctacatatcagataccagatctcacttcctgttcctttatttcattcatccattcattcagcaaatatttgctgagcactaaaatgctccagacacagtgcatgaaccctgaagatataggcaaattgcataacccaagcaaagggccagagatgagcaacagcatggtacataccccaaactaagaacttcactatggctaggatatataatttagaagaaagaaggttaggttggggtaggaggaagcataataaattatgaatttagagatgtaatcaaattatgaagggtcatgaaagccttgtacaagattttgagtttgatctccatagagtcatataattagattaattttagaaagctcatagtgtctgcagtgtggagagtagattagaaggaagcaggcctggaagcagggagatcatttgggagacttttccaggacagagaaaatggtggtctaaactgggatggttgcaagggggatgaaaagaagtagatatttaagagaaaatttaagaatacttatttagttcagacgttcctgaaagaatgagcctaaccatattcttgatcatctaaggaaggtctattccttctcaaggacagctaagtaaactaataattgattctaagtgatgtaattgaacagttcaaagcagttattcgtcattagaaattattgatactggtcagataatacctactgagagctagtcccattaattttcatcataattataatcatagcatttaagccatattatttctcagcatttcctatgttccagttttatagcactgaatattttaaatggtttatattacttaatactcacagtagctttacaggtagatattattgttatttccattttacaggtggagaccaaggcttagagaagttaagtactttgcctaaagttacacaggttgtaaatggtaaagctattattggaacctagtgactttttagttactggc

SEQ ID NO: 58484 - DNA, 1100 bp, Homo sapiens
aaaatgaaattatgcctctgactccaaaaacagaaacttatctctaacaataaaaatccatattataagttgcaatagctctttccttctgaaaagtacatttttaggagacctcagttaagaatcttgaggttgattttgtccttttgtctacatataatattaattgacttcccatgaaatcctatacatttctgctacctgtagttcaacactgtgggtgagaaaagggggaattaaggaacagtgagaaggaattagtgtggaactctgcatctgcagagattttggttttaaaacctctttcctaaaggtttattttccagtcattcttaaaaaaaaaattatttctactccacagggttaccaaccacaactgctctactgtacttgaaagagcactgtactgagggctcaataggtgataactattcttgttatcagcagtgctgcggtgaggattaaatgaaataatatgccacgcttagttcctagacctctctaaactgcgtctatgtcctagggggagaactgaatttggaaaccacattcaacccttatgaattgtgaggacaggcaatctgcctgtgtctctgagcctagccattctttacagttgatcagttttaaactcttctgtgctccctactcccagatttttctaccactgttagtctctccatgaagcccgtgtggaaccttggctccagtgtaaatacacataaataaatacccattctctttcagagcatttttttcttcctctgcctttgcataaacttgactctgactttcaaggatgctacttcctgtgtttccttgtttgctcatttttcactaaaaagttattaagcaacttttattttccatgtattatgctggattctggcaacaccaaaaagaaagaaagaaaagaaaaagaaaaccaacccttccattatgcccccaaaacatgatagtacttgaaggaaatgaaggggaagtatatggttaaaaatacaagatatggaatcagacagactgaattcaaattctgattccagtacttgctagctgtgtgagcttgaatggtgacaggactatttcataaaatcgttgta

SEQ ID NO: 58485 - DNA, 1270 bp, Homo sapiens
ttcctttctttttccaatcacttatgagatacttgcttttaaatagagataaatatgatttattaatcgattgtgcaattgatatattttacttttatttcagtttgaagtagaggatatttacctgaggaattgtatgtaaatcaaacttattttaaatgcacatgggtaactcattataatcctatgatgaattcctttataaagcaaatactcaccccttattttatcttttgtgtaaatatcgagtttgcttaaagcaagatttgcctggattaaaggttattttcattgggaatacttttacactttgaaatttagcatctattgctttatagtgaaagtgtctttaactctagactgagataaataagaaatacagatcgattcctcctctgatttattgtgattcccatgggtgagtcatttagcttacgtgtcttaagtttatttatagaataaatataatacagtaacagtcctttcttatatatttttacaaggtgcttaggtgtaaaatacagaaatattattaaactaggtatgaaacatttcaaaatgatgataatgatgacatactttatattgtacactgtattttattttttcagataattttcatatgcaccactgtttttagtatttttactacctctctcaagtagtcatagcaggtattagaccccattttataaataatttgacttttctaaagttacacactacacatcgctcaaccaaaagtcaattaaaaagacaaatgtattaagcctctattaattgttggttaacatgctaaacctgttagggtataagtaatgccctttagcacttgtttctttatagacatttagaaattaaaaggtaattattgcatgttaaaacttatggaataaaagtttacatattactatattccactgtactgttaggggaagaaaattaatatttattttaaacaccatctgccaatttattagtgttgttttaagtcttacaaatactgagagtggttaattttattttatgcatgaggaagaaactgagactcagaaaataaaataatttgtcagaattcacctaaccagtaagttccagagcctgtatccaagcttaggtctttctgatttagtaaccacatcaggctgaacttcctgaatttacattagcagtttaatacaagaaataaagtttagcagggcctcttgagcataattttagagttgactttttgttacatacaacatgttattgagtgaggaataccgtt

SEQ ID NO: 58486 - DNA, 1050 bp, Homo sapiens
gtttagtagttgtttaatctttatatagttttatgttttaagtctgcaacatattagctagtagggttgatattgtgcaattcattagaatcttccatgtagcacctgagtgctggacatatgaagtagttgttcactatctcctctcttattagtgaattcctggtccaccaaatgacttgttgttttctaggactaaatgtagaatttaatagatataattggcttcattattattaaaattagggattgagcttggtgtacataataaagtatccaaataatggtggctcgaacaagagagggttttgttttgttttgttttgttttgtttgtttccctcctgacatagaaaggcacgtagtggcttggttatccagataaaagatgccatggtggaaacctttgattcttttggtctttaactcctagtcaaaaaaaaaaaaaaaatggatgttattggccgtatcccaggcaccatgaagtacaaagaagggcacaaggcacatgccaactgagtcagtcacttaaagaactttccttagaagcttcacctggtgactatacatacctcttattgtccagaactcacctcacaggaagtgagttatctctggctacctgaccgactttataaaccagtgctttccaacctttttgacaccagagactggtttcctggaagacaatttttccacagactgggggtagggggatggtttggggatgattcaagcacattacatttatcatgcactgtatttctattattaatgcattgtaatacataatgaaataattatatcattattacattgtaatacataatgaaataattatatcattattacattgtaatacataatgaaataattctacaactcaccataatgtagaggtagtgggagcactcagcttgttttcctgaaactaaacagtcccatctggggctgatggggacacagtgacagatcatcaggcattagattctcataaggaacacacaaccttgatgccttgcaggcacaattcacaattgggatcacactc

SEQ ID NO: 58487 - DNA, 1376 bp, Homo sapiens
atagtagtgagaggatagttaggagagacagggttttagaaagagaatacctgttgtcagtgcaaagcacttataatctttataatatataattataacctttatatattataaagccttataatctttcctatctcatacttaagataattaatttcaatgtagcaaacatatattgaacacctaccatgtgccacacactgtcttaagtagcccagatacgaagtttattaattgaaacagactgtattgtcaagggatttgctacctagcagggtagacatgtgcttaatataatacggtaaagtgcgttattaatggaatgaacaaaaagctgacgaaattcagagagacggaataaaccgaaaaggactccttttctttgatttctaatctgtatgaaaatgatctaagaactcaacatagaatcaccaaatgtttttgatgcaaaggattttagagaaaatactgaatttttttaacagattcaaaaatctaggtccaatgacttaaagtgacttatcaaagctcatatgtctgtttgtttggctggtttgtttgttttgttttgtttgagatggagtctcgctctgtcacccaggctggagtgcagtggcacgatctcggctcactgcaccctccgccggttcaagcgattctcctgcctcagcctcccgagtagctgggattacaggtatgcaccaccacgcccggctaatttttgtattttttcagtagagacgggttttcaccatgttggtcaggctggtctcaaactcctgacctcatgatccgtctgcctcggcctcccaaaaagtgttgggattacgggcatgagccaccgcgcctggccatacatctgtttttttaagaatatagttattgattacagatttagtgtacttgtagaggttaccatctaggtaaaacctttctaattactagaaagcaagcaattaagttcagaattatatagtattcaccttaattgcgatgggatttccaaaaaattagaaataggctaatagaaatggagaatacactatagaagaaatcagcaaattatttggataaatggagagtatcagtttgaatgaaagaaaaataaaataagaagcaaaagaatggcagtttctggcacaaaagtcttgataaaatattcagtgcatgtatgcctcttgtttgccagagtgttgtacttataattttttctatgtattttctctttttaatccttacagaaaatctatgaaatcagaattagaatcaatttatggctgagattattgaggcacagagtgagttaattaacatagctaggttgcatagtaaaagagattgcttcatctgactacaaagcactcattctttcttcc

SEQ ID NO: 58488 - DNA, 1038 bp, Homo sapiens
catctgcttttagataagcagagggtataagaaagtgatttgataaagggggcagtgatgggagtcagcacaaggcatcagcatgaatctatccctaaatgcccatgctgtttgacagtatagcattcataacagtgtgaaaaattaggacccaacactgttaagtgtgacgatgatggacataacttggcccatagtaacccaaagagtctattggtgtatatatttaaaaaagcgtacattgtggattaggatttatgcccatcttaacattaaggttcagctcttctgctcttcatggtgattaaccttccaacccaagccacagtcagaatggagaggccagggtgttacccatttgctaagtttcaatgggcagactggaaacgattacagtagacccttgatatttgcaagagatttgtcctgagaccttcatgtatctgcaaatgggaaaatgtaattacatattattttccccataaaatctggtgaagtatagctaaaaaccattttgacccttcagactattaaggtttctataaacacaagagtaaattatttataaagttgttaaagaaaattctgccaataaaataaactccatagcacataacatcattttagtgacattaactgaaatttacagaatctgcaaatcttaaacaagattgatgtaatgacatttaggtgtacaaaggtgtattgaaatgtgaatgctcagctaacttgtcatgaacctgcttcatgtatgtgagtcacatcattagaactgccacaaaagcatgaacgaatatatcatgccttttggatctcttgaatatttctcttgtaaaatttcttgggttcaaactttatttttttaaatggatgtagattttttagttgatacctacaggaatctatctaagttagaatcaatttgttttttgatggaaaggtagggctgagagaatagttttgtacttatttcatctttatacaatctaaaaataaaggatcctggtaaggaggaggtaaagtctgtgtaattaaaaa

SEQ ID NO: 58489 - DNA, 1057 bp, Homo sapiens
ttcaaatcagtactcagcactgagcaggtaggtttctgtaagcatttggcgaataaatgaataataatgatcttttattgggcacttactatgtggtaggtctttggttaagaatgtacatactttatcctcatcatgccctataaaaattagatattattaatcatagaggaacctgagcttacagaaacctaccatgtgtcacagctaacaagtggtgaacccttgtctttctgctatagaacccagagtctcatcactaaatcatgctgcctcaaagtcttatattctgtgggataaaatagaaaaatatatagtatttaggaagtgtagatattggtatttaggaaaataggaaactaaaaatggtgaatagacagttattccttacagagttctcccgttaaagaactaatgagaaggaaatgaagtatgattttgtttgtatataatttaaagcaattgtcatccaagtatggtgtttgcacccaactaagagcaaatctaaatgtgaacctaaattcactgaaaatttttagtcttaggcttttctttttttctaattcctatgactttgcataagacctgttagtttatggattgatttgctgattaggaagtctttctatgttttgatagtctttcattcatttaactaaattggtcaattcttcgttttttctcatacatggttcttagtagatatatcttaccaaggaatatgagttatcagcaaatgcttgttgaatgagtgaatgaatgaatgacaagagtctctaagtatttcattacttttgaatggtcttctgtgagatgtaattcagataaaatgggccatttgtttgtgtcataagggcaaagatggagaggtaagaagatactacatcaaataaacttttctcatgggatactaatctttctatacacagtagcaggaatatcttaaatgtttctggagcattttcattgcaaagcagtatttgccatcttcatttcccaaatattagctacaacagacaatcctgacataacagatatatggaacatgagggagaag

SEQ ID NO: 58490 - DNA, 1117 bp, Homo sapiens
tgatcacttcatgctgtgggaccatatggctttacactgtttggttctctcttggttgttcaatgtaacatttctaccctgtttggaagcttttggttacttttcagttatgtaaaaatgccattgtatttcacaaaactgagctaatgatattttccattgttgacaaatgatttctcaaatgagaaaataattttaatgcaacttgactcacaatcgaaaccttgaatcatgtgaggcttttgtgttgaataagaatgcatttattgttcctttatacaacttaccacttttaattttcaaaacaataatgtagactatacaaaaaattgtgttggaactttaattttttcttaaaatattacttaatgttccctaaatactttgctattgttaatatatctagtatacatattcttacaattacaataatgatatacctgtgacagttctgtcaaaattgaacattgtttgacttaaagccatattcacatgatccttcaacattttagtcctgtgatgaaattaatcaataaaatgtgatgattggatttattgttctcccttagatgtataccaaattttttaaagtgcagaatagagtctgttgagtattcatttatgaagcccctataattacgtattttgtgattatgaggttcttaaaatgaaatattgcaaatttagctactgataggtagctgattttcctggtgattaaccacagacatcttgaatagagattataaactaagcaaccccttagtttttttattactttttttctgttgattttctgtcttttaagggaaatgatcgtataactattttttaacattctagatttggtgtttccccttaagaaaaatgaacttgttaataataatgaaactctgagtacttttgcttttgattaatgattttcccattattatcacttaaatatgtaatttagataaaccaataattatataattcaaattcacactcctgagatgattaaaaggtaagacttctgaggttttcatctctccaaaatgcaggttcacttccagggttcaggccaactgacatgccatcattcattttgtctttccttcataatgaatctttaagc

SEQ ID NO: 58491 - DNA, 1091 bp, Homo sapiens
ccattatataaatttagtatcattttaaattcaagattgatgaaattacatgaaaatgctttgaaaaagtcagggggttaaaaaaattaatggtttgaaaatcgtaagatgtggatcatgattcagaagcgttttacagattaacttgtgtcttcagcttattaacttgttaaatggcaataaagtttacttctgcttattttacggtatgatggtcatgtactgaaaagttttaggaattcaaaatttcatcttatgaaagatacattaatgggcagtatagtatcggtgcagggatagaaaaataaacaagtggaacagaacaaggagtccaaagcaaaagcactcaaatagtgtcatctgacatatgacaaaggtaatattatagatcagtgggaaaaggatagactttttaatcaaggatgaagagataatcagttatccatgtagggtgaaatgaagttggaatctctatctgatagcacatacaaaaattgattccaagtgggtttaatacagaaatgtgctacaacatttttgaacaaatatcggagaacaactctatgacctcaaggcaaagaatttttaagtagaacaaaaaagtttatagaggaaaagactgttaaattaaaccacattaaaatgaacggaatttttttttttttttttttttttgagatggggtttcactcttgttgcccaggctggagtacagtggtgtgtgatctcaccttactgcaacctccacctcctgggtttaagcagtattcctgcccaagctacctgaatagctgggattgcaggcacccgccaccacgcccagccaatttttgtatttttagtagagacggggtttcaccacgttagccaggctggtctgaaactcctgacctcaggtgatccacccgccttggcctcccaaagtgctgggattacaggcgtgaaccaccgcacccggccaacttgacatttttaaaagatgtaaagagagagaaacagcacacacataccgagccacagactgggagtggctttttcaaatgaaaaataaacacttagcagaaagatgagcgaaagtaaagaacgaatat

SEQ ID NO: 58492 - DNA, 1034 bp, Homo sapiens
caatttacacaaacttatgttgaggtcagttttcctttcctctagaacagttagagaaagagagagtgtgtgtatgttaaaataaatgccagtttaatgtccctattacatttcttctttttagttgaaggctggatttcagcctgtcaagactttcttttgaatcttgattttgtcacctaacacggtctgatataattaaacttgagaagtatacattctatttcttcattctgagactttgaagcgggattgattaaactgaaggagccaagaatagcacctggtaggctgccattggaaacatctttacagatttattccaattcattaatcagttttctttgcctaagtttgcttaaatctctattgtttcacctaactaaactcttggctagccatagtttactttcactgttgcaaataataccattaaagactgtcagatacgcttttgaagttctaatacatgacatttcttaccatcatcctttcaggatagtaaccttttcagtaaaattaaatgacactttttccagaatttattcttagtgaacctatgccagctctcagtgattaatcgtctctgttcctaggtcttcataaactgtttaataatatgatgcagaattctaccttcactcgccatcgctttgttggttattagtttgttggtgtcttgaaattttatagctacaaaggaaatataattccaggattatatttgaattatccctgaatatctacatgaacctagaaatttgaactaattaaaaaaaatgttctctgtcttgggccgcaagatacttatagaaagatttatagtaaaagcagcatttgagttgggaaagaaaacaggaacaaacacgaatatcccttttaaatacatattttggggccaggtgtggtggctcaggcctgtaatcccagcactttgggaggccgaggcgggcggatcacttgcggtcaggaattcaagaccagcctggtcaacatggtgaaaccccatctctactaaaaatacaaaaaattag

SEQ ID NO: 58493 - DNA, 1108 bp, Homo sapiens
acctggcctaaacttctaatatttcacactgttctcttgggaagcactccagagctgggcagacctaggttttcacatgtgtgcacattcacctattcacaaggacatactctcttacgtacatcccagtgagaagttgggggaggtgggactcagcaactctggctttgccttgcatcgtatattggaatgagcattgatctttggagtcaacatgagacacagtttcaccatgcaactaattagctatagaaaccgtctaaatccttaacctcttttagcttcaacttctctgtcatcttgcctttgtcttccaacttgtcttttattaagggccttttcttgtaaggtcttgtgctaggcattaaagtttatttctagtttatctgtaaaatggaagttttgaaatcaatagtttttaagatgcttactaaccttattaacctgaggaccaatgaaaacatataaagggtaagaacaagagacacagaccgtgaggctagaaatcctttccaccaagtgtagagcggagatgcttaaatttaatctcccagcggatcttggggctggtgggagtggatcttgttaaaatgtcaattctgatttaataagtcgtgggaggaacttgagattctgcctttctttttttttttttttttttttgagacggagtctcgctctgtcgcccaggctggactgcggactgcagtggcgcaatctcggctcactgcaagctccgcttcccgggttcaacgccattctcctgcctcagcctccccagtagctgggactacaggcgcccgccaccgcgcccggctaattttttgtatttttagtagagacggggtttcaccttgttagccaggatggtctcgatctcctgacctcatgatccacccgcctcggcctcccaaagtgctgggattacaggagattctgcctttctaatgggctcccagaagatgctgatgatgctggcctgggacccactcttagtaagtagcaaagcttgagaagatagttggggaaaggaaagattttaaaggaggaggatgataaaagtgaaaggattgagattaccgaaggtaatgctgtacactaattataa

SEQ ID NO: 58494 - DNA, 1059 bp, Homo sapiens
ctattatataaattttaaaaatgaaagtgagaagccatctactttcccaccaatttaataaaaatgtgtttgaaatcaacgtgttttgaggcttggtgttaagcctatactttttgagttataccaattaaaattctaaagtagaaagtgacattaactaatttgactcaaactggtaacttattggcaaattgatgtagttgctataatacaagatgccatatgattaagttagcagttaaaaaatataacttgtgtagccagaatagacggagtagaattaattatttgggctacgtacatggcaaggaaaagatacattttctaaggcaaagatcagaaattaattccaagtctttcttgttcatcaaaaaatagttctttctttaagttgtgaacttgttcattttttttgatatacgaagtctttaatataaaatatattactcatttggacttgccaaattaatttctacattaacaaattataggttttaatacatttagctagctgtaaaaactttaaaaataatctgacttatgtgtacttcctgattgtttttcccatcacattaaatataaaagtaaatcagatcatgtttctttaaataaaaaatgataaactaaaatgcttatgcctttcttttaaaatactgataatagatttcggtgatttcttctagttatcttatagaattggttaatacagagttcatgtattgctaaggtttagggttttctctattactgtcaatagtgtagactaacaataactgtaatgtcacagttgtcacctttgcatggttagaactcagttttttgaaggacaacagttttatcatactcacctttcaaaagaggaagttatgatttggacagaataagtaactcacataataagatattagccagggtttagttatttctggtccttttgtctgtctccttcatctgtcttgctaatctttctagctgaatgtgaattcatcctagagacagaaattttgtcaatgcttttaactaggcttttaggaattaccagggaaattttactatttt

SEQ ID NO: 58495 - DNA, 1076 bp, Homo sapiens
ccagtaggaagtccttccctatgcccagtcccttccatactcatctgtacaaatagagcttctgtgactttaaccttgctttttacacttcgaaaaaatggcggagagattctaaatcatacctatattttcattcgtttggcagtataatatttcattatagaatattattatttttcatatcagcttttgtgttaaactaatataaaagggcagaaatatttgattactattcattataatagctaacatttattgagttcttattaattgccaggtgttattctaatctttttatgtatatcaaatcatttaatgttcacaaaaagcctaattaggtcaatattatctcctctccatcttatagaccaggaaactgagggacaaatgccttaaatgacttgttcaaggtcacaggattttaacgctaccctgtggccaatttcccaaggacttaaccatcaagctatacagaattccttgtaagggtaaaatatatatttccaattaattttttaaaaattggatagacctaattgcctactaaaataatatatctcagccagatattttggtcaatttaatgaatatactgggcaagtcattattctgagtttggtttatgaaattaaatcttttgaactgtaagtgtgttttatttttcaatgttatcatttttcataatgtaaagatactcttcatccttccttctatcaattctttcttctaccacttcaccccacttaatgttttctctcctattctttggtatcttttgatttaagttatgttaaaaggtccttactgtgacatgtaggttttttctttctcaagtttattaaaaagtaaattattctgttacctgtcagttttcttttttatatatatattttaaaggttagtgacaacagtaaatatttgaataacacttaatgttttctaaggagcacgtttataggatccattttatgggttcacaaacagattttcaaagagttacctacattaagaaggatcggccgggtgcggtggctcatgcttgtaatcccagcactttgggaggctgagatgcgtgg

SEQ ID NO: 58496 - DNA, 1666 bp, Homo sapiens
tccatacaattctgaacttgcaggagtgtttatctttaagtgacatgtaactatgtagtaacatttaatggtatctacttggtttttttgaggtgttttagatttgaatcgattttgaagtattcaatctagaaactgttctttaaaaactaaatgtttattacttagatttcatctcattttatctcatttacatatatccttaataaattcttctaatttttcaattcacaaaaatactttataaaaattcacaaaagtattttatatcatttgtcagatgaataaataagtatatgttacatttgactcagaaacttgatgtcttgcctaattgtgttttcaactataaagtttttggttcagctgtaagcacatgtcatgaagacttaggatgtcttcattgttcaaggggctggggatacaaaatttgtcctcaagtaccttacagtttggtaactgaaaattaattgagaaaaggggagcaaagaaagagacctaacatttgttaagggaagcattgatcctaagtgggttttggtccttcagtgtaacatttggtttcatgtgttatctttgtctgcctccactcttgccacatctagacaagtctgagccttatttctttatctgtcatagcagccccttcttttcaatttcatctgtcactaccctggtgtagtatctcatagccttacatttttatagcctcctccctggtctgtcttttgattttcctgcctgtaatccatatcacacataactgcaagtaaacatttctaaagtgtggttatgctcatgtcactcctgtgccaagaaatagtttccattaccgtcttaataaaattcggatttgttcttttctattttcactcttcacctatgacctataatacttcactcctttccagatggtgttatgttctcagtgcccccactctttctccagccttctcatattcaaccatatccgtgtattttacacctctgttcacaacagtgtatccctcacttcttcctgctagattcgtgtccttcaggtatcagttcaattctgtacctttttttcaaaaccttccccaactcttcacacttttgaggtcactctgttatctgaaatggcattatatcttctgtctctgccactcattaattaattcacagataacctagtattttatactgttaaccatctgcttactttaactatgtctacccaatgatgggagtcctgttagcacatacagtagctccaacgatgggagctattagcacattgtatgtgtttaatatttttttaggctggaagcagtggctcacgcctgtaatcccagcactttgggaggctgaggcaggtggatcacgagatcaggagtttgagacgagcctggccaacatggtgaaaccccatctctactaaaaatacaaaaaattagccgggtgtggtggcaggtacctgtggcaggcacctgtaatcccagctacttgggaggctgaggcaggagaattgcttgaacccaggaggcagaggttgcagtgaaccaagactgcgccactgcactccatccagcctgggcaacagagcgagactctgtctcaaaaaaaaaaaaattttttttaatgttgatggttatttaccgggtatgaccttatggttttttgtttt

SEQ ID NO: 58497 - DNA, 1016 bp, Homo sapiens
ggaggcagaagcaggagaatcacttaaactcaggaagtggaggttgcagtgagcggagatcatgccactggactccagtctgggcaacagagtgagactccatctcaaaaaaagtaaaaataaataaataaataaataaattctctattttgatgtcatttacaactgtagattcgatatcataaaaatttaatatccatagttatttgaaaatatgacttgaataatttttcattcagttctattaaatgatgtctgtcttgatatttttattgtattatgctttattaaaagagcagatatttacaaatttaaatagtgccaatacagtagtatatttgttcatttaattaacagtattttaatgtgtattatattctccatatttagtcttgaaaaccctttaggaaaaactatataaacaggtgttcaatcttggtattttaatgttaccaaaattgacaacatatttttccatatatttaaaatattggttcttgcttctctgataacttagtcttcgaattggcttgacttcatagacttcattgtcatttgggtttgtgatgcttcagaaatatggaaccttgcaaagtgaatgttagtattttggtaattagacacaatgatgcttacttactatgtgccagacacttttctacaggctatttatatatattttttcattaatcttattaacatatctataatatacattaatgtttacaacttaaacagtttattacatgttcttcctttgacaagccaaaattaatacgatttggaagttatatttctgtcatgttgctaatattaataaatataaataaattctcttcataaagtagtcttcatttcttggtcacaaaatgcctggttacaaagtgtgagttatttttgaaatactcacaagcattctttgtatcttgaatggcaagcacaatcaagatgtgtgccataataaaaatgataatgaaatgttttactgcttctatcagattaatcactggaaccca

SEQ ID NO: 58498 - DNA, 1338 bp, Homo sapiens
ccttgttttgtttatgtttgtgtttagagacatttaatatatattgttgacttactaacatcgaactcatggccaatagcactataacttacggctgaacaaagcttatcaagtcttttctctataaggcacatcccagccttcttgcacttaggagcactagacggcatttctcagcactatacaaggggctatttaaaacagaataatcacccacaaaaagcacaacaattcaaaaaaaaatctggtactaatttagactacaaaagggacatatgtttacagtatgatagtttaaacgagtaggaagaaagtcacctgactgacctctggtaggaatgcacgtgtatgtcgggcaactcaacatttttcactgctctgtacatgttactgaatgactacaaaagtcagaaattgtgagtattgattttggggttaacaaataaattttagcaggcaggccgacttaaaaatatggaatccacaatgggaacgagattgactgtatttagttttatagagagcaaagtgatattgcagaaaatttatagattttgaagtcagacctttgtgaatccacactctgattcttctttttagttgtagttagattttgaacctccttccctccttttgtttaataccaacaatacttacttttgcataagtgtcgtcaggtttttaaatgagattgtgtatgcataatgggcccagcaccatctctggtgcataatatatattaaataaatgattgttactattattagatatattaaacacaatagctgggacttagagaacatttgtatcatgagtcaaagtgcagaattgtggaccttaaacttttctggtatttctttttttttgagatgggtcttgctctgttgcccaggctggagtgcagtggcacaatcaaggctcactgcagccgtgacctcccaggctcaagcaatgctcccaccccagcctcctgagtagcagggtctacaggcgtgcaccaacatgtctggctaatttttatatttttagtagagatggggttttgccatgttgtccaggctggtatcaaactcctgggctcaagcctctcagagtgttgggattacaggcgtgaagcaccgcaactggcttgttcatattttatataaaatttgcctttacatttaatatttaaagcactttatatggcattcttttatgtttcttttatacctcttttatatttgaactggcctctttctttaatatggtctgtgaatcatagtttcaaataaattttaggttgacagccactccactaaatctcaaaacttaattgcaaactgagaaactgctcta

SEQ ID NO: 58499 - DNA, 1030 bp, Homo sapiens
aactggggggaaaatgtaatgtttctattgatggtataatttagacactataataagttcagccatttgagttcttcaaaatggttatattaaaatgatatttttattaagcttcaataatgaaaaacaatgtgatttaatatgtgtatttttatattattgtatggattaattgttaattcagcatttaatggctaacttaaatatgattggaaaagaaacttcaagttgccattgcttttacctaaagtttttaaagtctgaaagatttcagcaaatgcattaaacaggaatgtgtgacatcttcttttagattgcttgtctaatttggagagattaaaaatggtaaaatgcaactttgagtctctttacctttgcatatttaaaggtacaatagtgtggtgttggtaattgtaagtaagcttttctgtgctatgtctttggagtgaaaattcatgttttttttctgaattacataaatgcttttgttttattttgtataatgactgtcttttagatctgaataagtcactttaaaaccttggcctatgaactttgccttatcaatcatgaatctagatgaatgctatctagttcttggttcagttttacctatttttatttttggttcactgcttgcttgagcatagctgggatttgtagcccattttctaggcttattgcaatctcactgtggtattttatagaagctattacaactgataggctagcttcatggtattgatgatacatggcttaaccatactaaaagctgctttccctctctaaattgtaaaaaggtgatgaagtttcacttgatggagacatactatatatgtgtgtttatcatggaactagtgcattaggccataagctgtttttctggtctatgttttttgtatttaaaactttactgaagacaatggactccttcgggttttctttctttcaaccctgaattgtccttgtttgaatttttaagtactgtaatttttttttttcaataaaatctctgacttgggcaagaaag

SEQ ID NO: 58500 - DNA, 1626 bp, Homo sapiens
caggtatgtcccatgcagtacttagacatatttccaccaaaaatttagtgcaagtatataatacttatattaaaagttagtcattgatctcaaattcaaatttaactgccatcttgtatttttattacctgacaagactaattgtgtaactggatgataaaactgagtctttggtgggggggggtttcttgtatttgcacaggtgatgatgaacagagtgactggttctacgaaaaggaatcaggtggagcatgtggtatcactggagttgtgccctggtgggaaaaggaagatcctactgagctagacaaaaatgtaccagatcctgtctttgaaagtatcttaactggttcttttccccttatgtcacacccaagcagaagaggtcagtagcactggctccctggtagatataatgggtttaaggtcagtctaggaatattcattcaaggaggataagataaagtggaaattagagaatgtaaacacaagatgctgtaaagaaacatattggccactaatatagctactacatttatcatgctttcaaattattagaaaaattgacttgctttcttgctaggctcattgagaaaatgttgaaatgataagaatgttaattcggaaaaaagaaaatgggtatttattactctagtgattgaacactggttagttaagtgctgactgccttagtactttgctaggcattgcttcagtttttttaagtgtgagttttgcattttcccaaataatattcgtggcattcaccgccaccaccaacttacttttctttctctattgataggatcctcttcttcttctatgcttcagtgatcatagaaaacttctaaattgagtactttgattttacaggtttccaagctagactcagtcgccttcatggaatgtcttcaaagaatattaaaaaatctggagggactccaacttcaatggtaggcatactttttctgtgtaattgtcatgtttggaaatgtttccatttctatggaataaaaagccacatcctcatcctttattcatattctaatgttaaacttaaaaataatccatttttttgtaggctacaaactggaccagtgagattcccctataaaccaaatcttctaatgctaataaattagttacgttttgaacatctggggaatgacattcgagggaacctggctcctgtcctcttccctggaggaatatcattgaagtgagagcctctttgatgaaaagatggggctgtttttgctggaggactggtattcttccttttagtcagaagtgaacctgactggggaggctttctagggatttaggttggcccagggtggatagaaactactgtaaattatatatttttctcttttatggttttttttttacattgaatccatttatgtatacttgctttgccaaaatgctaacaaagctagaaaattttaaacttccagatcgacaagtattccttaatgtttatattgtgactgattaagaattaatttttacatatctgactgttgtaaataaaaatcatgatgcattgacatttatggttcatttttagagaagtcttatataaccagcattatttaaaatatttgcattttactcagggta

SEQ ID NO: 58501 - DNA, 1092 bp, Homo sapiens
aaaaaagtaaaaaaaaactttgacaagcctgtcaatctttgataagtatggaaaggcttagaatgatatgccagcatttattgtgaacttactatgtttcacgttgctaagtgttttccttgcatttaagtttttaattaattcttaaaatccctttgagattcccaagtttttaaaatgaagaaactgactctaatagagttgaagtaactttcctgatgttacagacactagaattctaattggtctgtctgatttcagagcaagttcttaatcaatgactatttgatttccctattgaagaataaagttgtgtattacatcaaaaataaaataactttatttttctgtaatagtgttggaattcagatatatggtagtcagtttcaagtgaggccctgttttttcttatgcttaaacctgatctgtgtaattttaatgtaaagctcagtaaaagtcctgatatctaagtgctgttaattgtgtgttttgaaaaatttttttaattaattccccagtagaaacgagctgatgactctaatttttgaaatgcctttaattttccattgtgacttagttgaaatatagctatttctcataaaataattttcaactgaagcttaagagtatttttagttttcctttaaagatgtctgttgtaagagattttagaaatcagaaatatctttctgtaaagggaaaagtttatgacaattacaacgaccctcttagaaaccagaattagtggtggcttctcataatcaagggaaggagactttaatgaatcgcagatcatcttaaaaatgctgtttgtttctttctgtttttcttttcttttctctatcttttttttttaacacaaggtctcgccctgtggtccaggctggagggctggtggtgcaatcatagctcactgtaaccccaaactgctgggctcaagggatcctcctgcctcagactcccgagtagctaggactacaggtgcatgtcatcatgcccggctaatttttaatctttttgtagagacagggtctcgctttcttgcccaggttggtctggaactcctaacctcaaatgatcctcccactttgg

SEQ ID NO: 58502 - DNA, 1640 bp, Homo sapiens
gctcatgcctttactcccagcactttggtaggctgaggctggtggatcacctgaggtcaggagtttgagaccagccagaccagtatggtgaaaccccgtctctagcaaaaatagaaaaattagccgagtgtggtgatgtgcgccgagtcccagctactcaggaggctgaggcaggagaattgcttgaacctgggaggcggagattacagacatccaagatcgtgccactgcgacagagcaagactctatctcaaaaaaaaaaaaaaaaaaaagtttccagagggctttgaaaagtttatggtatctgtttttcttgcaagaaaattgtcattcttatatggaaataagtattatttgtattaggccattgtgacttaagaccattcaaccttacttgaaagtaattgtctgactcaattaccgggagggagagtatgtggcagctgatataacatactcaattctggattatttacaattagattacctgctttttggattcattgtgcaagctcccccccttttttttagttctccttttattgatctgcttttttataggacatgtaactggtaatggatatgagatcaaactctcatttttcatttcttttcattgtaaaaagtatttgagtatctactaggcatgaacaggctacctagcagtccacaaacagcccaggtacacgttttcagagtatgtttttactcttgaataaatgttaaaaaatatattttctctgatttgaaacttatttataaactattttctgttgtcacttaaaagttaggtgcaaattccttctgtgcaaagattgctaaatatttaaggtattttggtaacaagtataagcgttttcaagactacttccaaagctttcctactacaaaaagctttatatttccttggggttgatttataaataagagaaacttcagtgtggggggctgtgtgtgtgtgtcagatttaacaaacattgatgattaactacaatttactcttcactggtggcacctggactaataatggagactctgttctcaacagctgcatagtctgggatagccaggcaagcaaatgatgaaaatgaaatgtgctgagtggaaagtattagtgagggaagacttgctaagggaactgtgctttaaagcaagtagtaagacttgttcaggaattgaggaagtcaagagaagagagggaaatggcattcataggtagagagggagcagcttgtgcaaaggcatgaattgtgaaatgaaaatacatactttgtttttaccggcaataaagtgggatcagaattacagcaaaaagcatttctcagaggtctatctgctatggtaaatagtttggattttatcatcttatagtcaatgggatcagtgaagaatttttaacagtgaagaaactcaagttgatttacattttttcaagatagtgtgatctttatagctgtattttggtattttgtttatctttgacctccaatccatgcttaagtgggaagtgaattacgatatgatagcagagagaactaagtatttgagagtatttgagaccaattttaagagttagaatcgatgggaggttgactgactatttgggaggatgaatgagaaagaggactctacggaaaata

SEQ ID NO: 58503 - DNA, 1825 bp, Homo sapiens
ttcattgctcataagcttattctatcttggaagtaattcctatgtttaataaaagaacttatataagaagaggcctaaaatgaatcaatatttaaaactgtaatatcttggataggaaaattagctttgaaacattttgtaatcattaatttttgtcgaatttagaatgaattgtctgttatagaaaatgaggttactgtggttaagactgactattttcttttttctttctctaaaaaatgaaggcatttcagtagaaccatggaggagctggttcatgaccttgtctcagcattggaagagagctcagagcaagctcgaggtggatttgctgaaacaggagaccattctcgaagtatatcttgccctctgaaacgccaggcaaggaaaaggagagggagaaaacggaggtcgtataatgtgcatcacccgtgggagactggtcactgcttaagtgaaggctctgattctagtttagaagaaccaagcaaggactatagagagaatcacaataataataaaaaagatcacagtgactctgatgaccaaatgttagtagcaaagcgcaggccgtcatcaaacttaaataataatgttcgagggaaaagacctctatggcatgagtctgattttgctgtggacaatgttgggaatagaactctgcgcaggaggagaaaggtaaaacgcatggcagtagatctcccacaggacatctctaacaaacggacaatgacccagccacctgagggttgtagagatcaggacatggacagtgatagagcctaccagtatcaagaatttaccaagaacaaagtcaaaaaaagaaagttgaaaataatcagacaaggaccaaaaatccaagatgaaggagtagttttagaaagtgaggaaacgaaccagaccaataaggacaaaatggaatgtgaagagcaaaaagtctcagatgagctcatgagtgaaaggtgacttttatattctctaaatataaaaatatttatctccagtgtttgtggttgaatgttttatattttaattaattctattttaaaataattataaattgtaataatgatagtgatattactgtttagctatggttatatttccttatactttatgatgtttagcacaaagcaaaattgcttgtttgatttacacaaagtcttttgattgtattataatgactcaattttcagctacaaggaggaaaggaaatggattttcagtggaaaagaatgtgcttttgaataacagcacgtttgtaactcagaattggatatataattatatgtttaattatagacctttagcttttggtactttatagagtgtcacaattcattaatctatcctgattcttgaacatcaaaagtttataccacttcgacatgtctgtggcttgacataaaaaatctggagctttctaggaattctgatcacttatgaattttaaaacccaatttatagtctagaaacacctggttttgtcattagaaaaataggaaaaacaatggtcctgtggtagtaaatctaatctgtcaataattgttaagtactattttgacagcatcaaaaggtaagtgatcatttttcttttatactgaaatgatgaagtgatgctacttgcaagaaatgagaatgtattaacactttttccttttaggcatgggtccgcaaaaccgaatgctgaactatgagccagaaaaaaacagtctgtaaatatggcctgagaaagagtaattgatttttaatttatagggctgctatctttttttttttttcgagatagagactcactctgtttcccaggctggagtgcaagggt

SEQ ID NO: 58504 - DNA, 1046 bp, Homo sapiens
aaaaagcaatagtcattgtaaaaatagttgactgtttatttctcggggaatctgtttttggggctttcttcactcttgctattcccacttatattaatatattgctaactgacatttaagagctcatgggccatcaatcaactcccagttcttagggtagattaagcaataagttaggactaaagcatcttcctgattcttcttccttgaaccagaaatatttgaaagaaaaacactaaactctgttttctacattgattggtcttattcttaaacggattccacttttaggaaggcctttttctgaatttattagagcctgaatttattagaatagatcaggaacccaaggataatagttcactcatttactgggtatttggtagaggaagcgaaacaaacaaacttgacctttggcctaacatttttaaataaagcttgcatatcaaatcttggattgatcatacattttatattgctcagcataatccaataccacccgaaaaaacaaagtactcatctgcccaaatcatttcctttcataaaatccaactttatgtagatgttggggccataattttgttttggggtattctgttcattcggactattttaataaaactattgatgaactattgttatcttagatattacccaatattaactgttcccagaagatttcatttccaaatgagttccaaatgaagaaaaatggctcttacaattatgaatataaaaatctcaaattagttaagtggtacattcactgaatttagtataattcaaactttaaaactggttgttcagtaagtacagatttgtatagaaaagtgctatatttccaggtttcccctttaataggaaattcttatttaagaaactatctctaggataaagtgttttaatacattggtcttctgatgcatcagtgtaaactgccaaggcaaaggaaataaaagagctgttggtcatgtgatggtctcttaggatcactttgtttttgatgggccagtaggagacaagagtctctctgcctcccgggctgg

SEQ ID NO: 58505 - DNA, 1035 bp, Homo sapiens
tttaaaggctcgcttgtcatacaactcaccatttcttatggcaccagagtataacaaagtggtagcacttagtatttttgaatgaaattctaaagtcattcctgttctgtcagaatgaatatgttccagaaaactggatctttattttctagtctatctgtatgactatctgtatgactatctggaatgtaaaaattccagatttcttaatggaattttcttcttcattaattgaacagatatttactatataagtatgtttgatcccagtaataaattccagtcccactgggaatactgctactaagcagttaattaggtgccaggttttacaaatatgtgtcatctcatgtaaatcttttgaggtaggtgtatcattctttgcattttagataaggtgacacagaagcaaagatggtttaagtaactggcctaagtatcatatttgcaggatgattccagtatacccccccaaaattcttaaccacttttatatgttgcctatgtgtctgaatgagatataatatctcaaggaatatgtaacctagcagttagatgcccaaatttgttaaccagtctggattttctgacttatttagctcccatcttgactttttcaacttctccagtgtggacgttgctgtttcaatttttaggcaccaaatgggtaaatgtggataatttctgtattcaactatggtattcttttttttttttttttaactttattatgtggctttgcttaaaaaaaagccattaaaataaactatattgactctggacttttgtttctgcattttcattcctattaggtattttgattttattgaaatccagaaaactgcatagtaaatggtgtgcatttttttgaattgcttgttttttggagtttgttagtcttgaacttagttgcatactggcaggtttgagtcaggtttttgtttcaacaattaagaatcaaagcaataaacagtatgattttgttcaagtaattcattaaatttgttatagcttcttagcatccatatttatgtc

SEQ ID NO: 58506 - DNA, 1009 bp, Homo sapiens
agtttacatctgagtcaataatgagcttgcttctatttagttccatcattaaatctaccccctgtcagggacagcggaggaaaactaggcctatccctgtaaatctgaaaggaagtgagagcaaaggatatttgcttcccataaataggctggctttcaagaggtgcggggaaggggctaaattaggttgaatcaactcctttcctgatgcacaaactgcaaacccactccttcttccttgacatactgaagggcagagagaagcccataaaaacatgaggaatgggaaatatgtacttcccactaactagatttgtagggttggcaaggaagcaaggttagaggagagttttagaatggtagaagcttgtacatgttcgtcagagctacttgagggagaaggcctgaaaatacagaagagaaaaaaataaccaaataaacatggaccccgaaaaggtgaaagaggatgcagtgaagatcattacgttgtaggcttaaacaagtggaagaagacctgaacttctgggtcaagaaggaataaaattaatgtaggatcatgtaaggatgcttttgtgggaaaggtcagatgttaaagtaattaatgtttgaatacctcaatattctggttgatcttccagagtaatccttacaagaatgagagagggtggaatgtttagtggtactgggggccagctagatttgaaatccacaaatagcagtctgcctggttatgtaatttattccagcagttatcaacaacctgatattgtaggcatgcagaatgatagtagtaataacagctaatatttattgaatgcttactgtgagccaagtactcttataagtgctttacataaattatttattttaatcctcacatatcctatgagatagactattacttccaattatcaatgagacacaaagagattaataagtagcccaatatcagtgttagtatttgatggtctagaacagagccacatgtacaatgactacatgacactat

SEQ ID NO: 58507 - DNA, 1039 bp, Homo sapiens
tgcaatatattttctcctaaacaagttcttcatggaattatttagttacacattcatatttattcttagaagagcctggaagccatacttccaggccatacttccaggctgattagagaatgctgccatttgtaacatctgtcatataaatgccagattgataacggtgttattaactctgaattaatttacaagttactttttaggtgactgttgtaaggttaagctattagagaaaaatttaaatctgtttacaagttaaaaggttaacaaatgtgaattgccaaatgactaggaagtgataatttgatagcttgggcagcaagtgactttaagaatattaattaaatattataaaggaataaaaatagtgaaaatagtttgcactattggttttaaggatacaaatgtttaccttactttcttattaaatctattccaggagctatttgcaaagggtttgctcataacaattggagtatttaataaaattggcttttcctctcctgtaattcctcagttagaaaatgtagtcctttgatgatgatctagggctttgaagaagaaatggattctaaagagaaaattagatggtagttattatgctgtctaactagcaatgcattgtcatttgtccattgtgttacaaatgtcttactttgcctaccttcttcatttaatcatgtaacttgcctgtaagcagcattagagaaaagaatgttgccatattactctttcagctgttttctttgcttatcccagagacgttcactcttaatatgctcaatatagaactcttcatctcctccctgacacctggtctcttctaaattccttgcatcgacacagttggtcaaattatgccaaatactagggaagcatactcattttctctatctccttccttaggaatgcctctcctaactgcatcttgctcaagctatatatgactagcaagtttaattagtatttaaaagatcaaatccctttataaaaaggcctactccaaaaatatattttcttatggcaaataaaatat

SEQ ID NO: 58508 - DNA, 1509 bp, Homo sapiens
tggaagaattaaggtgtctggactacaacccagttctctctgttagagccgtgcctctcttccaaccacagtgctgcttccaagggcagcaggcttccttgtcccttacctctgtgtgccctagtgctggcacctaaggtggtcactcaccctctccgcagatgccagggaaccctgggatggccactgctccaccagatcaacaggctcctccagctgagtcaacagatgctcctgatgcggctctccatgagtgccttccctgagcttttctcaaaggacagacatttcttatgggaatgtgcctgctttgcttgggccgcccagcagatgttgtatggcaggggtgtggtcaacagtgaaggatcacattttaggaatgtagaagttacagcccaggattcaggagaagtcatggctgaaagatttatttgtgtgtataattctgattagtaaatttgaccagaaaatgaaatattgtttacatttccctgcatactctggataagtcttgaatttgcagtcatcctcagtgaaacatagttaacaacttttgagagtcgtgaagccagcattcattagtggcaccatggatgatgtaaagagcattgactaaatgatattagaaaactacagaaacagtccgggtgaggtggctcacatctgtaatcccagcactttgggaggccaaggcaggcagatcacctgaggtcaggagttcaagaccagcctggccaacatggcgaaatcatgtctctactaaaaattcaaaaattagctgggtgtggtggcacacgcctgtaatcccagctactcgggaggctgaggcaggagaatctcttgaacccaggagatggaggttgcagagagctgagatcgtgccactgccctccagcctgggtaacgggtatctcaaaaaaaaaaaaaaaaaacaacaaacaaactatagaaacaaagatctacgttgtttcagtgcaagcagattctgaagagctatagcattttaagccataaaagtagcatttctacttttttcttatgaagggagacataaaattagctgagaaaggagcatttgatgttaaagaacacaaagagatggttcctggacttacacaggcttgatgatacctatccatgaagagaatttccatgtgctctgattgaacaataaacaaatatgtgtctattctctacccatctattctaaatcttcattaatataccactatatctcacatgggctcatttaatttttaatccaattgtttatatagacaagagccccataaaaaacatttgtcacaggtctcctataccctagggacatcctgatatcagattgctaactctggaatggctagatgccatgaaagagacgtatgtatagacatatagatagataatttctgaagctggattatccaaattgtgtagtttacaaaaggtcagaaatatgcatatatatatgtatatatatatacacatacacatacaaaatcatgacac

SEQ ID NO: 58509 - DNA, 1076 bp, Homo sapiens
tttttaaattcattagactagttcaaacactattgttcaagaagggaagagtactatatttgctatatttggagcaaaatgtcagtactgcttacaaattggatttttctttttctttttgagacagggtcttgctttgccacccaggctagagtgcagtggcacaaacagggctcactgcaaccttgacctcctcccccaccgccccccaaagcgatcctcttgcttcagcttccccaggtagctaggactacaggcgcataccactgtacctggctaattttttttttcttttttttttttttttttggtagagatgggattttgccatgttgcccaggcatgtctcgaactcctaggttcaagtgatccacccgtctcggcctcccaaagtgctgagattacaggtgtgagccagcacacctggccaaattggatttttctattcaaatactggataattccaagttggaactgttctgacttttcagcgtattattataaatgctgattaggttttaaggttctcttgctgttatagatcagccacattacgggttaaaaaggtttttggccaatatggaaacctaatttatctaattcaattcaatgaacacttgttgtgttcccttaggttccagtcaccctctaggtgttgaggatacaaaggatgaatatatttctgcattaaaatttcagttttaggaaagatattaaacacaggactgtaatatagtgtattagtataattaaaaggtagttttcaagatcatggttcaattttggaaaggtaaggatggagacagagaaattcatatcctctggaacccagcctaggcgttgcttacttatatcttacgtgtattattgataatatactatgttattatattttaacatatctctctccttatagagataagttccccaaatgtcaaaagtatgtcttgtttattttcacagggtcttctttgcatactttagtattcagtaaattgttttgttgaataaatgtataaggtggcattctatctaggctttagaaggatgaatagttttcctgacctgggagtata

SEQ ID NO: 58510 - DNA, 1033 bp, Homo sapiens
ccttgcaaaaatggggacaggcagagctccaggaagggttcggggggccttggcagcctctgcctaggatattaaagtttaatttgcctttactctttggttctataggaagctgtggatcggaaaaggaccacttttattctgatgatgacgcaatagaagctgacagtgagggtgatgctgagccctgtgacaaagaaaatgaaaatgatggagaatcaagtgttgggactaatatgggctgggcagatgctatggctaaagtcctcaacaagaaaactcctgaaagtaaacctactattctggtcaaaaataagaagctggaaaaggaaaaagaaaagttaaagcaagaaagactagagaaaataaaacaggtatgttccaccagttctcttgtagattagattgtttgtctaggctagctcttatcttgaccgaactgtttcttgcagtgtttgaccaattaacgttccagtttttaacttgttttttatgtgaaggtggataactaaggttatgtttaggaatttagtctaaattattccattgagcatgttcactttttaatcatctatgcaaaggcaaagtaatagaaatgtaaacgctgaggaaacatctttttaaaatcaagtaattatacacatggtagtgattcctgagcctattttatttgttttagctgtctgtttgctgactttattaggttgtgaactaagaagcatgttagttactttttttttttgccaaaacttattttacaataggaatctgtgacaatgtcgtaactcaaggattggttgtagttctgaaaacggattatttcagtgttagatacaaatcagtgttggataaatttgaattcattatgcttttgttgaactactgatgatagttgttagactaggtataatctattaattaaaggccaaaagttgtacataaatttgtggtttattataaaagctaaaaatccatgataaggctttcatatcacctgtacttgatgatctctgtctaaaatacttggttacta

SEQ ID NO: 58511 - DNA, 1046 bp, Homo sapiens
aaatacagaacatagtttttaaaataagtattttttaaagtaggattttacaatggtttcataacacaagagttgcagataacgtagctaaatactttttaagctactgaggcattatttttccaatttacagatgaaattgagatccagaaaaatctttcttggagtgaagcacaaagttatgtaccaatccacatttgttatctgtttagaaatttatattcattcattgaaatgtatattcatttttcagttgtatttatcaaatgtatttaaccacttatcccgttctttcctttgagtacttgttaaatgcttgcctcttttctagacagtgaaaatacatttttcctatcctcagagtttgtattctagggtaattatttaatacatcattctggtcattttatattctacaggggtgtggtgcaattatttaatgctgttcagaaacatcaaaagaatgttgatgaaaaggttaaggaagctggaagttctatgagaaagcgtgctaagttgatatcaactgtttccaagaaagatttcatcagtgttttgagagggatggatggaagtacaaatgagactgcttcaagcaggaagaaaccaaaagccaaacaggtaaaaacttttctataggattcagtgtatcagactttcagctctaaaactagtcttgagatggaaaaccagactatagaattacagagttttgtgtttttttcctaaattttattaaaattcctccatgcccgcaacctttagagatagggcttgcctctctcctatctgaaatcctgccattttgcacattttggagaatagaagcctgtgtgggccacagctttaatttcagactttacccatagagggtgtgtaacttacaaaatatgaagagtcagagagttttaggaaataatggtagaaagtcattcttgcattgaggcatctttagtgatgtttggttgagagattaagagcataaatactttctatgacctttggcatgagaactttgcttctccagctgcctcagtagtttcttt

SEQ ID NO: 58512 - DNA, 1640 bp, Homo sapiens
aagggaaaagaagaatcagattggagaggcaattttaaggtatagattgacttgatttgtgattaacatgatgtagagggatatgggagagggaggatttattaataactcagaggtttacaacttgggagactcagaaatggtgacagctttcaccaaaatagagaatataaaatatggaacatgtctgagaggtaaagatttttggaggcagtgactgctccaggttataatcagaaatgagaaggatgacagtaaagatcaggttaacagcagcagtgtggcagaagcatttggttagtgcgggaaatagcatggccagaaacaaggaggcaaccagaatagcagagtatggtgaggccacctggggcaggcactaatgagtcctgtatgtcttagtagggttcctgaatctttaagaatgattaacttgtttactgagtcagggaagatgaatagtctattttagagagttttccacatgaataaatgtaatatcttctaggtttagataactaattttcagttatttggaaggaattccctaatccagaagctgtaattcttcgatcaaatacaggaagcatcatcccaattacataccaacatgtggcaaggcatattgaccaatatcttgatgttgaccccgagtgatttttattttattttattttattttattttattttattttatgttttgttattttattatttttaaagagatggaatcttgctatgctgcccagcctggtctcgaactcctgggttcaagtgatccacccacctaggcctcccaaagtgctgggattacaggcatgagccaccatgcctggtgaccctgagtgatttttaaaaatattacattgtatttagaacactgtttaaggaagcaacaaaaacatattttttaagtaaagttttataaaaaaattaagctttaactcttaaaggattaatacctctgttcctctattcaaaacatgttcttatctagagtgatttgtttctcagtatgttaatcaagattttattaatgtagaggcattaattttttttcttagctttcaaagttgtaattattccttttaatgttttcttgaaaagccaactaaaattcaatcagatttcttggaatgtaattctgttactctaaaggccgacagaagcggatgtgatgttaaatctgtgagtctctaaggagaatatattggctgctcttaggaaagcattggctttacttgtactcttgaattacagactttctacaaggttttcatttatttgaaattgccaatatatcaatttcaggtttttttttaataatgaaactgaaattataattttatagtaagggaaaatgctagctggtttctgttagaaaatgattttttggcgggacatggtggctcacatctgtaatctcagcactttgggaggccgaggcaggctgatcacaaggtcaggagatcgaaaccatcctggccaacatggtgaaaccccgtctctactaaaaaatacaaaaattagccaggcgtggtggtaggggcctgtaatcccagctacttgggaggctgaggcaggagaatcgcttgaacctgggagatggaggtagcagtgtgctgagattgcgccactgca

SEQ ID NO: 58513 - DNA, 1038 bp, Homo sapiens
aggatcaatgtgattgacatttatctccactctgcatgtcactgatatggtatagacgctataagccctgtagatattatgggtatgaagactatttgaggtgaattggcagtgagagcaaattttggaaacaggagagagaactacttcgtgcctataaaaagctctctcactccttccccaagaaaacaggagtctgaattttggccagctgggtatttgaatcttactgactgttgcagcactggtagtcctggtaaattttttcagtgggcgagcttttctgaaatttgattaaacatattagtcaagggaatctgtgaatagatttagaagtagaatgtttgaggtggttgacaagacatttagaattgtgattaatgttttaataaaatgctaagttagaatgaataatcataattatatagatggaagatatattctaacagttcttaaataattttagattctctaaatttagagtgttttctagcttagagagcaatattaatattttttacctagtctactgaacataatttcagggagttagtatttaggactttttacctagagatgcggtaaaccttttaaatttaaatttgctttcttaaaatacctgttccaacattgctcacctttcttctccctcctttttgccctctccttcagtgggaggagcacatattcagctttctgttaaacactctttggttttcaactgagtaaggcaagcaaggatatatgttagaagagtgggcataatactttatattaaaattatagggactaaaagtctaaatcattgctgtcaataggactttttttgatgatggaaataatttatgtctgtgctgttcaatatggtagccactcgcagaggtgactactgagcatttcacgtgtggcttgtgatacagaggaactaaatttttaattttacttaattactttaaattttaaaagttacacgtggctagtgggtctatcccaactatgaagagaataaagctacagagcatctatctagtctaatga

SEQ ID NO: 58514 - DNA, 1866 bp, Homo sapiens
gctagaatcctactttatcttttaagttttgctaattaccctgcaatgaatgttgaacataaaaaatttgactccctttccatgtgtccactgtttccttgtgccttttgattaataaaactttatttttaagtgagaacctctgttttcttgatttttaaaaaaagccattgctattttgtttttaaccatcctattttgcatagttctatcacttattcaagtaaaagttggaacagaacatgtaataataatagcaaacatttaaacaatattgattttatgccagacaatatttaagggtttcataatgccccttaattcatacccttttccttataaccctgttaggtagatgttgttattgtccccattatacagatgaggaaacaagcagtaagtttcagtaacctgcccaaggccacacagatagtatagtccaatccaggtttgagttacagagctgctatacacaatagtgattgctcacattgtagatattaatgtcttatagaaaattagattctagaaattgaactcttctctggaaagaaaaatgggcattcagtattttggtctcatttaaccatgacgtaaacctatggccaatggaaggtagtagtagatgccatgctctttcgggtcctcacttccaaggtgacaaaaggaacaatgatcatgccaaaaagggtggcagccacatgtgtgcccaaggacagggctattaagaatttctttattcaaaacacagtagaggctgcagcaagtgtcttcaatgcatatgtgcttcccgagctgtatgtgaagctacattattgtgtgagttgtgccattcacagcaggaagcctgcaagaactgaacatctccacttctatttagacctgcagatgctggcaccaaagctcatgtaaggagctgagtctttaaggactgaagcaaaactatcctctggagaaaagtaaaatggaaatagtacttaaaaaaaattaatagatgccgttaatcagaaggtgaaaattttcctggctgtgtcaatttagagttaacatatcaccccaggctgttgttgtcagtttattctgtaacttgctactggataattcattataggtcttgcctgagcatgtctgataattaaaactttatatttgaattatctggatgctgcagaaatggaactactctactgaagtggtatccaataatttactatatacagctattggttttttattcctaagatacaatatattggctatttgctgctctgttacttaatgacattagatgactcataaatgtaagtggttgacatttttgctattaagaatttagatattcaaattatgctttataaatgaggattagatttttatcatgttattgcctaggagataacaggtaactaaaacttgataattaaggatatcccattgctgttgatctagcatcttttctaaaaatgcatgttttacaatatttatgtgaaactaatttttatttgatgtgcagtaacaacaaatcaatgcaaaattatacattaatgaatttaacagtatgaagttttaagacataccacagctttcctctaggtggcatgatttcagctatcattgagtcaactgataaaaatcctttttccctacaagcacacgagtatgtagtttctgaacaatcagtataagtgtgacattgattagatttaattgttacaactggttaaataaccagattgaccttataatagtctattgtttaatgatcttaagtaacttaaaattgtaagacaaagtcctcttaaagaaacagatacaaaaaacttgttacctccaataacccagcaggcaaaattatttgtctcttca

SEQ ID NO: 58515 - DNA, 1055 bp, Homo sapiens
cacacacacacacacacgcacgcacacacgtgtgcgcttctctgctccggagctgctgctgctcctgctctcagcgccgcagtggaaggcaggaccgaaccgctccttctttaaatatataaatttcagcccaggtcagcctcggcggcccccctcaccgcgctcccggcgcccctcccgtcagttcgccagctgccagccccgggaccttttcatctcttcccttttggccggaggagccgagttcagatccgccactccgcacccgagactgacacactgaactccacttcctcctcttaaatttatttctacttaatagccactcgtctctttttttccccatctcattgctccaagaatttttttcttcttactcgccaaagtcagggttccctctgcccgtcccgtattaatatttccacttttggaactactggccttttctttttaaaggaattcaagcaggatacgtttttctgttgggcattgactagattgtttgcaaaagtttcgcatcaaaaacaacaacaacaaaaaaccaaacaactctccttgatctatactttgagaattgttgatttcttttttttattctgacttttaaaaacaacttttttttccacttttttaaaaaatgcactactgtgtgctgagcgcttttctgatcctgcatctggtcacggtcgcgctcagcctgtctacctgcagcacactcgatatggaccagttcatgcgcaagaggatcgaggcgatccgcgggcagatcctgagcaagctgaagctcaccagtcccccagaagactatcctgagcccgaggaagtccccccggaggtgatttccatctacaacagcaccagggacttgctccaggagaaggcgagccggagggcggccgcctgcgagcgcgagaggagcgacgaagagtactacgccaaggaggtttacaaaatagacatgccgcccttcttcccctccgaaagtaagtacttattttgacttccatcccctgaggtttagctctgcccggagctctcaaaaccgcagcagctcc

SEQ ID NO: 58516 - DNA, 1053 bp, Homo sapiens
ccttggccaagtatactatataaatacagtaaatatgaatagaactggccaggtgccaatctcctaggatgaattttagtcaagaatgtatttatgggatataaataatactgtgtcaacatttaaagaaggggtctgattagttttgaatttattcatattgatcttttcacgtgctgttagtttaagactcgaagtggagttatgctaaggtttaccgatagtttgcccactgggaattagtggacctctagtagtttaacaatccatttgaagttcgaggcacatctattcgaaagatgctgcacaaggttttagaaacttagaaagggtgattcagttatacacaggaagaattcaaataattgacatgtaagaatctgtagagagtccgacaatcaaaaagaggaagagacacaacgtttcattttctttcttttctctccctttttcattgtaaccaatcagcacatgttgtggttctaaccctggtgattttgtactccccccaacacccgcacccctactcccactggaacgtttggcaatgtccagagacactttgggttgtcatgactggaggtggaggggtgctaccggtatttagtgggtcagccagggatgtttctaaccatcctataatgcatagggcaaccccccattcccaacatcaaagaattatcctgaccacaatgtcagtaatgcctctgttgaggagccctggtatttgttgggggttactgaattctgttaacagtaccatttagaaaataataacaaaaataaaatatctttatgatcaaagcatattcaaatgagaatactgaataggaggatagtcagacagttatcttaattaaatggagtgtggattagaccattgtatacagtatgtactttattttttgtggtcttaaagcccctaaattagagacatcaaaacttcccatttatttagcttaagtgatggtgttgacctatccattactagcttcagtcagcagcagtgtgatgttagaacagagaaaaaagaagtgaggaattatcatggat

SEQ ID NO: 58517 - DNA, 1141 bp, Homo sapiens
ctccagaaaagtgtgaatgacttattctgattctactttagacagataaagaaacaatcacagatggaggacttttctgtgcaaaggatgggtggtttggtcaaggaacggtccccccagaggtcagtcagggctttctgtggggaaaatgtttctacattcaagttcatccttggcattttgggctctgcaggttaacgagagggagacagaggaaggagtgcaccaaacctctgactcctacctggaagtagccaagcagaagcaaagctgaataatagccatgacctcaggctctgaagcaggaggttccaccttcagatggatctgttaaacttcaccaccctgggtttcttgtacctgtcttcactgttttctgtctgagatatcttgaggcatttttaaaacattaagttgttttggatagtaatttagtcactcatttgtatctcttcatagtattaagccttaggttattatgtgtgttaactaaaatcactgatcggatctctaaactaagtcctgaactgccatgattccacctactaaacttacacttttcttctacgtagaatgaggtgaccggtgctagtttgtcctggagagagaggtatttcagaagaattccactgtcagaaaatatcaccatcaataatgaaactatgtgtgtaaagtcatgtctaattttattaactgtttgtcacaagtactcagattatagaaagagggtcttgatctaagctgaccctgaattgttatacatttggatcagttttccctttcttgctgagaattctctaagaagagtagaaactcattgtagttcagtgttgggaggaatgattgtacccacttacagagttgctatatcacaagagagatgcattgtttgtttgtgtggagaggctggagggattagggcaggagcttatttgatagggagtttagttgtacatttgtaagacatctaattttacttaagatatcattgcagtaagaatggctttatctctatcctatagaccctcacagtagacaaaaccactacctactcagaacaaatagcccttatgagggaataatttttccttgattcacctgattggattgttttgaggtcaaatgaggttctgtaaaaggc

SEQ ID NO: 58518 - DNA, 1134 bp, Homo sapiens
atatcatgataagtctcatgatatgatggttttaaaaagaggcattctgctacacaagctctctctctttgtctgctgccatgcacttaagatgtgactttctcctccttgccttccatcatgattgtgaggcctcctcagccaagtggaactgtaagtccaataaacctttttattttgtaaattgctcagtctcagctatgtctttatcagcagcatgaaaatggactaatacaccccctcagcagctgtttacagcatagcaatcaaagtgattcctgataaaatattggtcagatcaaagtcttctctttaaagctctacagtggcttcgtatctcaccctgagtagaagccaagtccttaccatgacttaggaggctggctctgacctgttccttagtcacccacccctcagccataatttccccctcattcatagggctcccccatttgtcaatgacctctttgctcttcctcagacactgcactcactccttcctgtggcttgtggccactgttccctccacccacagtgcttttcccaactacccatatggttggttctctttatttctttaggtctttccttagagaccacctgctcagggagaccttctttggccaccgtacctaagatctcagagtcgcttttcccaacacatcctagccccaatgtctactgtgcttttctccttgataatcttcattatctgccatatttgatctattccatctttatgttgtttataatcttatctctacctctagccataaactactggagatgtgtctggtccacagtgggtgttcaataagtgttttttaatgaatttaactaaaatgtcaaaataagattcaactataaggaatgtccttcaaataagtatgtaacttataaaggggattctgttgagaaacatcactcatttattcggatttggaaattctgctccatttgttttaaagatatctaaatattgatgaagaaagaaatgtatataactatgcatcttctgtgacttattcagagctaattctgatgaagtatttaatattaatagataataaccatgtaggtaaaaaaataaaataaaattatgtaataaattaatgaaactgatattcttgggta

SEQ ID NO: 58519 - DNA, 1041 bp, Homo sapiens
ataaacccttttgtaatgtattatcctttttatatgtatctaaatttgttttgctaatactttggtaaagaattttatgtctgtgttcatgaggaatattgttctgtgattttctttaatgcctttgaaaaacgttatcatcggggttatgctagtcacttaaaagcattgggaaggattcccttctctgtgtctgagtttatgttatttcttccttaaatatttgataaaattcactattgaaattacctggacctgagatttccttttatgaaggttttgataatgaattcaatttctttcatagaaccaggatattcagattttatatttatttttaggccagttttgataatttgtatttctcatgaaatttgtatcttttttctgatttgtcaaatttattgacaaaaagatgttcatgatatttccttttaatgcttttatgatttgttgttgataacttttatttcattgctggtaataatttgtatattttctcttttttttcgtggttcatcttaccaagaagttaccaattgtattaatcttttatagaaccagctttggctttcttattttctctcttatttgctttctatttcatttatatttattcttatgtttcttattttcttctatttacattaaatctatacatttctcactaatcattactgtagctaagttccactaatttttttctttctttttatttatgttgaaatgttttcaaatctaaatggtcccattgctgtacttgtataacagaccaccccaaataataatagttttgttatgttcacaaattttgtgggctaagaattcagaagggggatggtggttatgacttgatctggggcctctcctatgggaaaacttgaagattggtaatgactcgtcgtgtgattgccaggaactggaatcatctgaaggctcactcacatatatggcataatgctggatattaactgggacctgcctttggtcttattaccgtaacacctatgtgagacctcaccatgtagtatcttggcagca

SEQ ID NO: 58520 - DNA, 1034 bp, Homo sapiens
gtgcctgtgcacgtatgtgtgtgtattttttttaaccaacatagtatcccagagcatgaatatacaatgaatggattaagattcactggtactgtaactgttctccctcttaaaagatggagggagtaggtaaagaggatatgaactggcattagtagattttaatggattagatacaagtatgggatagttaatacaatatacatgagagtagttttaatatgcatttaacttataaaacttagaagaaattgaaatcatttattcaaaacactattattttggtaattaaagcatccattttcatattcccttttcctttctttttttttgggggggggcggttgttaaacagatcatatactcctatgaaaggaggaatctccaatgtatggtttgacagatttaaaataaccaatgactgcccagaacaccttgaatcaattgatgtcatgtgtcaagtgcttactgatttgattgatgaagaagtaaaaagtggcatcaagaagaacaggatattaataggtaagacctttaaatgttggtaatttatcactgttcacttttgtctaattctatacatcaaatcttacttggaacattatttagaagcacttgtatatcattcgatgcattcatagtttcagataaactttacatattgaggatttcaaagatattagaattataaacagcagcgcatgaaactttaattgattttctttttgaataataacggattttgagactcttgtggcagttaaaatttttcttctagtttaattttcagttaagaaattattcatttcaatttttaaaacattttacttcagttaccttaactcttatgaatataagtttaaacatctattgccattaagatatacagtcaaaatataccactacatttatgaaaattataatcttcagagttaatctcacaagaatatttgtaaatttttgttagactgtctttagcaagccctgttcctaagggaatataagtagctttatataagctctttattctgctt

SEQ ID NO: 58521 - DNA, 1279 bp, Homo sapiens
aaaaatgcatttgagattccaaacaatttttattaagcacacacaacccatagtgaggaatgaagttaggtaatttttttttgaaacagggtcttgctgtgttgcccaggctgaagtgcagtggcgtgatcatagctcactgcaacctaaactcctggactcagtgatcctcctgcatcagcctcttgaattgttaggatgataggcacttgccaccatgcctggctgtttttttttttgtttgcttgttttatgtagagatggagtctctctatgttgcccaggctggtctcaaactcctgacctcaagtgatcttctgcttcagtctcccagagtgttggtattatacctgtgaaccaccatgtctggcccaggctaggtttcttttaaaaatgaattataatgggaaaaactagcaaaatgtaagattggaaaagaaatatgaaggggataggttcaaaagttgttaaccttttattttgtttaataatctgttcagatttctgatttaatgtaagacagtatgtcctaatgggacccaatctctgagagtgtagttgtgtttgtgtaactttataaaacaaaactactctctgtatttgatgtagataggagcccattctttgcggttttatttgattagtggtactttgttatgttgaactcagttttacaaactttttttttttttttacagtatgtgatcttctaccttttctaggtagtgtgtctagcttggacaggtcaaaaatgatacttctcactaaattttattttcaaattgtcaataaaatgttatgtgctggagtataaaagaaactgagaaatttacagtctagtaaggcagagagggaagtaaagtattctaatactgtacaggtattattgaagaacaatgtcgaaggtatagcgtaagcagcaaggagagaagtaaatctttctgggagttgggaactgctttgttgaagtggcaactgagtcttaaagaataattgagaatgtgactggtaaacaaggacagaaacatgttcatgaaagaaagcaagggacacattaaatccttccaggaaatagtttggtgtacatcccaaatcctagtatcattgaattatatacagggagtgaatgatgtgatcaaatgggcattttagaaagattatgctgacaactctggagggctgactagtcagtgtgaaggtcagaaaaacagcaagaaagcaaatgcaatagatctagtagaatgatgaagtgctaaactgacacactattttaagactt

SEQ ID NO: 58522 - DNA, 1108 bp, Homo sapiens
cactatgatctctgccccaactcaaatttggacatatcctcgccctatgggacccagtaggatgataactcacgtgctagaatccaacagagccacaaaagttggaatcctttccctacctgacattcttcaaaatattcaatagatgtatggcttttaatccctcttgggagcagggagatgttgtcctatatcaaatcatccttctcatgccacttaaggcagtgagaggaggagggatggatcaaagggctctccatgaaggagagtgacactatgcagtaagcaaaccacatttcaattttgagttaatgtggcagctgcttgcaagaatttattttgattttgaggggtcagtttctcacacttcagggcatcaacctcttcagctttgtaaactcaatctaaaaaataagaccctgaatactaatcaaggcccattttttgtttcccatgggaaattgtttgtctcagggaaatctccctgagagggccaaagcttcttgaaagcaggcatgcgtagttgtaaagaaaacaaaacaaagttctgaggtgtttcactgccatcttcaaatggatcaaagttcggcatgatggactttaggagaagtccctctgttgctggtttttccttagtaaccatcatgcacaccacccccctcatcttccagttgtaccagccagctgtctagcaacttgcttggtttctgcttaaaaggactgtaagtttccctccttttacactcaatgcaagtgtgtcgctctttaactgtcttagtctgttcccattgctataacaaaataccatagaatcattaattgataaggaagtccaagagcacagtgccagcagatttggtgtctggcgaaggttgtctcttcttcaagatggtgtctttttgctaaattctcatatggcagaatgttatatccacacattgtggaatggagaaggcaaaaggcactaggggggttccttcaacttctgttataagagcactaatgtattcttgagggcagagccatcatgacttaatcactttccaaaaggcttcacctcttaataccatcaccttggggtttaaattccaacatgaggatcttggag

SEQ ID NO: 58523 - DNA, 1031 bp, Homo sapiens
gcattcaaccaaaagggtactcagggtctttgagacacctgcagagggaattatccatcaaccaggcacataagtggaggggacaagctcatgaaagaaaaacatcaccctgaagacgggtagctgggaggcaggcgagggaagctaacaaaacacccttcttttatgagtcacttttttaaggtcttgcttaaattttttgtttaaaaaaattatgatttaaaaggttcaaacagcctagggaagtaaatccatgcatacttccaacattagttaatatttactaagaaatcataggttacaacaaattaaactttttggctctcttactgagcttttctggccaaccatgttagggactgttcctacagatagtttataactatttttttacccctctaagcaactaaagtgcaacgaatcagaagaactctgggtccatgtggttcttaagccagggtctttggaaaatggatttgaggttgaggaatggatcaatgtgaacaggcagacactagacgtgcccgctaataactgggaaaagtgagttagatttctccttgtttgaggtggaattccttcatataaacctgggcaccctcagagagaaattctttatagtccaaactgatgtttattttggactctgtttctctttcagctttcagttgcgaccttaggaatgagctcacaattggaagcaaatctgtcttctgtttctactgttaaagaattacctacccactgacaaaaacacataggattaacaatggctttgtcccagatagatgctttttggaattgtacaaactgtatttatgatgcttgtacattttggtccaacttttaaatatttcaataagactgattgaattcttagtaaatagaatacttcctctgttcagttttgctctgttgaatgctggaagtttggtgagtctgacccactacacgtatctcagatgatttaaaaacaaaggcaggccatttggttttgatgctgtgtctgttttgggcagtgtctcagattg

SEQ ID NO: 58524 - DNA, 1267 bp, Homo sapiens
ggaacattgtggcataaagtgaaatttgcgtgattgttaattgttgctgttaacaacacattaaaaatcagtttgctatttttgatgttccttttctcctcctgataactatttagataggtagagcaggtgtagtccaggtttgaaatgagggagatataactggagttcaacttcttttcagccactgtgttttagccagtttatgggagatttgagggtactgcaaagatgtctttgttgtgtcttgatgtgctgtgagcgtaggttttggatagtggaaaaacattctttcctatcttttataactgagcaaagttcctagtaggtttgcaaaggtatcatagcctgaaaaaaggttgggagacctatcctttttgcttgccagtttaatatagaactcaaatgttccttctgcagaatagaattgaaggagttataaatactgattacttttccttttcttaattagattgttcagattccattctgtggggaaattgactgtgaggactggatcaaaaagaccactgccaggtaaacctaattaactggcaaaacttttgaaaaattgcaatggaaaggaatagcaatttgcagcataaatgagtggaattcttatttgttattaatttcagggatcaagatcttgaacctggtgctccatccatgggagctaaaagcctttgcatccccttcaaaccactctgtgaactgcagcctggagccaaatgtgtctgtggcaagaaccctgccaagtactacaccttatttggtcgcagctactgagggatgaacgaaagccccctcttcaactcctctcactttttaaagcattgatattagtatcttctcagatacagaccgttttatgattttttaaaaagtaaaagttctaaaatgaagtcacacaggacaattattcttatgcctaagttaacagtggataaaagacttttctgtaaacaactccagtaataaatatcatgaactaatatggtttttgtattcatttgtttctgaaaaatgtgcattatgtactatgaggaaatttctacaaagagatgaagacaattgaaagccagatatctgttattgatctaagcactcccaacatgtctcagaccctgaaccgccagttataccctacactgataggtctcgaagcactttctttccatagctcctaatacagaatctgaaattgtcctaaatctttctgtttaaaaaacaaagcaaacccacaaatggaaaaagcaacaataat

SEQ ID NO: 58525 - DNA, 2013 bp, Homo sapiens
ttttgagacgggagtatcagtctgttgcctaggctggtgtgcagtggtgcgatcttggctcactgcaacctccgcctcctgggttcaagcaattctcctgcctcagcctcccgagtacctgggactacaggcacacgctaccacgcccggctaatttttgtagttttagtagagactgggtttcaccatattggtcaggctggtctcgaactcctgacctcaagcaatccacccacctcggcgtcccaaagtcctgggattgcaggcctaagccacaatgcccggtggaattcaagttttatggagagtttggaaccctgttatatgttgtttttcagtatagtcaggtctgttttacttccattatgacctcccacattaaggggatgttatcaacagtagaagcctccagatttgaattttggttatcatactcttgccacttatactagaattttggttcaatgtaagctttaaagactatttttcttttaaaaaggtcatcacaaagtcagaaatgattgaataccatgacataagtggctgttatattcttcgtccctgggcctatgccatttgggaagccatcaaggacttttttgatgctgagatcaagaaacttggtgttgaaaactgctacttccccatgtttgtgtctcaaagtgcattagagaaagagaagactcatgttgctgactttgccccagaggtaagtgagcttgcttttttattttttgcaatgttctctgacaaactggaaaatatattttcaacttttaacaaccaattttgaaaaatataaagccatttttattaaaaagttctgtttctacctttatagcaagtaatgattttgttacattaattaactgacttttaatatttagaaggtcagtaagtgcgtacctttcctcacagtgaacagcagcgactattttaacttgcctaaattgatatagcaaaaattaaaacagaggaaatttgcctgcatttgtactgttgctccaaaatgctattgaaaaaaaagtatgaaaaatgattttttcttactaggttgcttgggttacaagatctggcaaaaccgagctggcagaaccaattgccattcgtcctactagtgaaacaggtgagaataggcattggagtgcaagagaatgctcactgaacgttagagacagcctctaaagttgagtctcagcttttgctttgtgatagctataatctctgttgacgatataacatttcatgaatgttgatgaagattgaatgcaaacttaagttgtctagagttttattctctaatattcattgtagagctccttatcattaaattataggatttttaatttaaatactcatttttatgctgtaaatttttaggacttttcaaggagttttattcttagaataatttttattgttggaattgattataatattgcaaatgcaatttttatgccataattatttttaaattttaataatacatttaggtttgcattcatgtagggtgttcataggttgctaagtacttttacgtcatctcgtgttattcttacaacagtgttgtgaggaaggcagggaaagttactgtgatttccattttgcaggtaaagaaaagtctctgaaagattaaatgatttttctgaaattacgtatggtaaatggaaatgctgttggaaaatttgaggttttgggctttacagtgtctttcaaagtgatcattcatctgtagagttcaggattgtctgttcttattgatatttctagtgatacttttgtataatacattattaatattgtgataccagtttttttctctcagactatttggcaaagttttgtttgttttggtttactaattatagatcatgagcaggctattctaagacaggtatcttcactttgcacttcattgcaagagctttcatactctgagtagatgcatcagatataaattaattctgcttctcatacataactgctggattcagcaaattgtttagcttctat

SEQ ID NO: 58526 - DNA, 1259 bp, Homo sapiens
tgtgtttgcagatctacttttaaactttggacagatccttttgtagttcctaagtgtgatggttgggttttcacactcatatgtgagatatgcctccctcaaaccttatcaccacctgggcacattccccgtgtgatattggcggaaaaaagaaagctttgagcattgtatttgtttaagtgtgcttagacaatgacttgagttaaatactgtcttctctttttcctcttttgttaaactaaaggatcaagtagatatagctgttcaagaactccttcagctaaaggcacagtacaagtctttgataggagtagagtataagcctgtgtcggccactggagctgaggacaaagataagaagaagaaagaaaaagaaaataaatctgaaaagcagaataagcctcagaaacaaaatgatggccaaaggaaagacccttctaaaaaccaaggaggtgggctctcatcaagtggagcaggagaagggcaggggcctaagaaacagaccaggtaatgaatcgcagaaacttcatttgaagcaaagcagtgaattaattcaattcttaatagtttttaaaacaaattttgactggtttaaccatcacattaagttagagaacgctaaagctacaatgtcagcagatagcatttattgattttccatttagttttaaaaataggtaacacgtttgtttggttcaagaatctcagaatgtaagaagttcctgtgcatgtttcccatctttccggttttccccaccaccgtaatcagtcagtagccactgttaacagtttcttctgtatctgttgagcgattttcatttattattcaagtaaatacagatacacacacacacacacacacacatacatattttctctcctcctttttaaacatgattggtagcctaattatacacattgttttgcaccttaagcagatttttttcagatgaagatcttttgtggggactaagtgagagcttcattctcaatttaaaaattgatagtttaaatataagacaaaactgactaaagacaaaatggttggatagagggctctttaaggatcttccaatctgtataaataatgtacggtcatacaccacataatgatgtgtcagtcaacagtggactacatatatgacattggtccataagattataatggagcatgtatggaaacctgatatatggcacttgatattggcatcgcagatcaagtgggggaaattattgatattcagtaatgttgctgggat

SEQ ID NO: 58527 - DNA, 2376 bp, Homo sapiens
agttttcctagcatgttactaggattaaaatgcacatttagatctttgttttctgtaatccttagcaaaccgtagtggtcaagatcacagcctctggaataaactcgggattcaaatactagctctactacttattgtgtaactctggggaaggaacttaatctttctaaacttgacaacttctctaagggttgttttgagagttaaataagataccacgtaaagcacttagtgtagtgtctggcacagactaaatataccataaaatgataatgatacttttcatattataattcaaattctctcaagaatctttaggtaccttctaaatcatcagggaagattgcatagtggtgattagtataattttactctttttggaagaataacctgagtaatttacttagttatctagaatattccatttcctaatgggaggggaaatatatgaatacatagctttattaagagtatctcattgaataacagagtggtttgctcaccttaattttctcctttataacgtttcaaattataatcttggcgaacggggttttttttttttttttccgtgtgaaaagtgtgccatctgactttaagctctaatgaatacctgcttatagtgtaaaatggagcttctttcaaatagtcatcaaatagtcatttttctagaaatagttgcagggaagttccttcttttccatttttattttagctggtggaaatttcccttttttccccccttgattctcatatgtctgattaacttggccgtttttcttgagataaagtagtttctgctgtgaaaactctttcctaaaaacagaataaacaagagacacaacaggagtacaaatcagacaatctactctcatcttctctttgtacattttctcttaattttactacctttgtgtggtacctggtatgacactctaataggcagaaaacgttataaagtagctggacaaggaaatgtgctttgctgcctcatagatgcaaattttgtgaaggtataccattggtatcctgcattcctctgatgcccatttgagtattcttcatggcttctgcctggtttcatttagctatctggagcattattcgaatgtagcagtaaaaattggatagggtgatttggagacacttttcctatctattttgattgatacctccaagttcccagtggtacactggtttgtggtgagatagtagcaccatttcaggtaaggtgtccagcttgggccctttgcctgtgttgctatcattctctgctagagagtcacaagtgtctcggtggggctgagtatatcattcttttttattattatgttgaagtatcagattaaaatatataggtaagtgtctaaaaacttcaacatgctttctcatctcattgtcagtttttaaaattgatataactattcattagttggacccaaacttcctttttttccccaaagttgtatttaatttctgtttaataagctgtggaaagtaaggtttgtataggcaaagccattgatctgatctttgttctgattttgtaaattctgacttcactatttatagacctaggtcttgacactgacagtttacttagatgttctattatttgtctgtttacttaagtaaaatagaaagttacactgttgtatgttgaattgtatttttgtttattcagcttatatataatttatgtttttaatttagctttatcacttattgtaggctgatgatttaacataggtttccccatgattaacttatgggaatgatttgctgataattaaagatttttaaatggcattgaaatttccagaaatttccaaagttttataaatatctctttctctcttttattttaggctaaaataaatgaagctgtagaatgcttactgtccctgaaggctcagtataaagaaaaaactgggaaggagtacatacctggtcagcccccattatctcaaagttcggattcaagcccaaccagaaattctgaacctgctggtttagaaacaccagaagcgaaagtactttttgacaaagtagcttctcaaggggaagtagttcggaaacttaaaactgaaaaagcccctaaggttagtgtgttattttgtttatatgcttttgttttttatgtttcagggtattgtctttgcctcaagtgttttgtgccccatcaaatctggctaacttctactcatatttcagttcttaattctcttaccttgccttttagagaaactttgttgattgtttcttacgccaactagatttgattggatgttttcatatgacaccgcccatcactgacatagtacttaaacagactgtattttaattgttaaattgtttgtttccctccaacctgta

SEQ ID NO: 58528 - DNA, 1538 bp, Homo sapiens
gtgaatatggataagattattctgaaaaattaagtggcagatcatttaaaagaaaaaagctgaaagaaaggtataatgtgagctgggttttaatgttagaagggtttcagtagggaagaatgcagtctaggcagcagaaagcatgaataaaaatagtatctttattcactcttcagggttgattttagtgaacatagctctagattttatacacaaatagatacctgtaaatttataattttacacaaatgaaactgttccacaacaatgagttacaattatatcacagagtttgatggagctcttgccttatcaacaatctagatgtatttcatctctaaaaaaattaatagtgatacctaatgcttattgatattcactttttctcagcctttgtgactaagggctttacacagattactttttattttcccatcaacttgatgggttaagtatggttatcccccttttatagtaaggaaacagcttaaaataactcaaagttgcacagtgagtatgtggtagagcagtgatttattctcaaacttgatggatatgttataatttctttagtcccctaatgacaaagatttagggtattttcaggtttttactatagtaaaaatgcttcagtgagtatgtaggtacctctatctttgtttacgcctgtcatttttcattaggataaatacttaggagattattcatttaagctttttaagggattgaagtttaaagtttctgtttttaattggaaacattataaaacaatcagtttgaaataattttgtgggaaaacatttaatatgaattaattattttacttttggttttctctcttggtagacctctgctccttttaaggaaagaccaacaccttctctgaataataattgtactacatctgaggattccttggtcctttacaatagagtggctgttcaaggagatgtggttcgtgaattaaaagccaagaaagcaccaaaggaagatgtagatgcagctgtaaaacagcttttgtctttgaaagctgaatataaggagaaaactggccaggaatataaacctggaaaccctcctgctgaaataggacagaatatttcttctaattcctcagcaagtattctggaaagtaaatctctgtatgatgaagttgctgcacaaggggaggtggttcgtaagctaaaagctgaaaaatcccctaaggtcagtatgttagagaaagtcaagaccacattttcagtgtgtgaattcaaactgcttagagtagtctcatcttcttataaaacatcgactgctcatattttgatgtaataatcaacattgattgatacctgctatgtgccaagctctgaaaatatatataagaagctcataatctagtggaggggtgacttactggggaaggaaacatacagactcagtgtactcttatgtgatgtgactgtaatcctttgtgatatgtataagttgctatgtaaagggtttgtgttcttaagtggcaacaaaggtggaaaccatttataaaggatatttaa

SEQ ID NO: 58529 - DNA, 1003 bp, Homo sapiens
aagcattaactggacaggtgcagtggctcacacctgttatcccagcactttgggaggctgaggtggccggatcacttgaggttaggagttcaagaccaggctctactaaaaatacaaaaattagtgtggtggcatgtggctggtaatcccagctacttacaggctgaggcaggagaatcacttgaacgcaggaggtggaagctgcagtgagcttagatcacatcactacattccagcctgggcgacagagtgagactgtctcaaaaaggaaagaaaaaaagaaagaaaagcattaacttagtgccattgaatttatctaggaattcagtgtttattgctgttcagataattttgttcaaataaactattttgtccctttattttctttttagcccatatagttgcaaggaagccccgtgtgttttgatatacattcctgatgggcacacaaaggaaatgccaacatcagggtcaaaggaaaagaccaaagtagaagccacaaaaaatgaggtaatgacttttacggatatgtgtataaaaataaatggtctttctatcccagggtttagaatatatttctttacagatgattatctttcttactgtggagactgaagaagacagttaagtcttgctctttgcattttgttgttatcctttcatgtaagattttaaaatctcactctcacccaaggctggagtgctgtggcgcgatctgggctcactgcaacctccgcctcccgggttcaagcaattctcatgcctcagcctcctgagcagttgggattacaagcgtgcaccatgacgcccggctaatttttgtatttttagtagagacaggcttttgccatgttggcctggctggtcttgaactcctgacctcaggtgaaactcccacctcggcctcccagagtgctgggattataggcatgagtcaccgtgcctggccagaccccttatactcttaagaatgatttgcttatgtgggttatatttatcagca

SEQ ID NO: 58530 - DNA, 1546 bp, Homo sapiens
aatggcaacaatggaaaaataaaaacaaatttaattataccactgttttctgcattcttctaatgagaaaaaataacttccattacttagctgtttgactctgctttcatctacatttttctcacatgtgctttatatatagtgtctaaacattgctcttgtgattggtcatcatgactaattttacactgaacagtgaagtgagaaaaatacatcagctccagaaggggatgctactgatgatttggaagtagaataggttagagcataatgtgtatgaccatttattgaggcaatctgcaaatatttattgattacctatatgagacagaccctagctaggtactgggaatatactgagaatatactggtctatatatactggcctctacatatagcatgtaaaccagtagaaatgtcatttatacttttaatctatagaattgccttattatagtgaccgaatgctattctgcttttgatggtgatgtgttaccctaacactgattaaagaaaacaatactgaaacaaaaatatccatattctcttaaaatgggcttgtccaaactataaaattgaatatcacatttacctttaggattaagatataaccccactggaaaacttttccttgccttctaataccagattttaaaattattttcaaaataactctaatattatgctttaattggtttcttttcacctgccagtagctattcttgtgaaagaagtctaaatccttcatgtagtcttggtttacagttgttctcttttttctgcttaatggtaaatatcagaaaagagttaacagttgaaaaaaaattagtaaatgcagtaacaagaaagccagttagtattcctgtgctattatttattttgcttatggcgctctataagatatcgcagtgttttaacatgaggatgtatttgttgcaggttattgacccagtggctccacgatatgttgcattactgaagaaagaagtgatcccagtgaatgtacctgaagctcaggaggagatgaaagaagtagccaaacacccaaaggtcactcttacagtttcaccaatgtgtttctctctgttaaaagaaggagcaggaaataaaaaggaaaatgtgctttcatggcagtggcatgattttgagatgattttctttctttctttctttttttttttttttttgagacgtagtcttgctatgtctccaggctggagtgcagtggggcgatctcggctcactgcaacccctgcctcccgggttcacgccattctcctgcctcagcctcctgagtagctggaattacaggtgccccccactacgcctagctaattttcgtatttttagtggagatggggtttcaccatgttggccaggttggtctcaatctcctgacctcgtgatctgcctgcgtcggcctcccaaagtgctggaattacaggcgtgagccactgcgccaggctgagatgattttctattcaacattgtcaggatttgatactaatcgaagtaaatcttttttggattttttgccttaaaaaag

SEQ ID NO: 58531 - DNA, 1597 bp, Homo sapiens
tactgcatacttactgaggtttgcagatccctgcagaatattaatttcctacatatatttttgttttattccaaagggctttataaagtatattcatatgtgaatgacaggataccatcttttttctgattctcatggtcctatgtggaatagggaccttgaaaatgtttgataaataaaaatgtatgaatgcatgggatttccatatttgaaaatgtcaccattgtgtcttttttttcaaatgtgcttctactgtttccagtagtgcatttattttactgcagtatttgacaggtcagcagttatcctgttccttgaatttgggctcactagtattgcatactacctaattagtataactagctcttagacaaatgtttaacaagctgaatatgatttattattgattaagtatcttctactctccacatctacacattacaaaatttccttggtacttaaaatttacatatttccagggatgacccaagatttcctacggttcgtggtgtactgagaagagggatgacagttgaaggactgaaacagtttattgctgctcaggtgcgttacagtttcttttccagcttgtctgtttgaaatttcaggtacttctattactgtccctttactctttattatctctgttgttctttctattccttgtttgtgccttatgatccaagggcagattttttttttttttttaaaacaaacttttttttttttaaagtttatcactgcttataatagtgaaaaattgaaaatgtcctaaactcctaagctagatttggagaaaggcagctgaagtatttttagcagtgaattatatgacttgactgtgagcagtctgtagactgaacctttacagtgaactgttaagggtaaccaaattagtttgtatacactgagttttatatttcactagaagtaaacttgaaagtatttatcgagttttttttttttttctaaacatgcttagcatgaaataaaggcaaagttctaattaatactgcttgcccttaaaatcatgttgttattgttttttagggctcctcacgttcagtcgtgaacatggagtgggacaaaatctgggcgtttaacaaaaaggtatgtatgttaactctctgccttcttttctcatgcttaagtcccaaataatgtacaagtagaagtcattactgtgctcatggtagagaaaagtttgtgaagaatattaacattttgcagactttcaggaaaatggaatgttttccttttttaaatacacgaagagcattaattaagcctattaactattccaaataagtaacaatgattgaaacaaacaaacttggaattatggggaacagtaatatttttttccttaaattttttatgaacactctgcatttcatttttctgctttcaagctgcgagctctctgtaagaaggtattacttaatgcttttatttgccttaaacatagcttttagcatattacatgttaaaacctgagatgttatatggctttgaagcacaatcacatttatataaaagacttgcttatacaaacgcattgaaaatgcattattcctagtgttaaaaaccatgtcct

SEQ ID NO: 58532 - DNA, 4653 bp, Homo sapiens
caaggtcaggagatcgagaccatcctggctaacacagtgaaaccccgtctctactaaaaatacaaaaaattagccgggcatggtggcaggcacctgtagtatcagctacttgggaggctgaggtaggagaatggtgtgaacctgagaggcagaacttgcagtgagctgagatcacgccactgcactccagcctgggcgacagagcgagagtccgtctcaaaaaaaaaacaaacaaaacaacaacaacaaaaaaaactgtaccactgctgccatcattataatttgaaactaatacaagttggtgaaagctgattaaacttccttgcttcatgccttgtcagcccaatcaactgtatttcaacatagtggtgtaacatattttcttttactcatgtacttgatagaaggagggtgttgatgtgtgatattatcaacagtgtctctgatctgtattcttccttacaattgtcagctgctcacaggaacagcagaacagtgtttttgtagattctgattcattgagtgttggtgctgatgagacctttgggattatttagttaaaattcttttatttttaatctccgtgacatgagtttacctatataacaaaacttcacatgtacccctgaacctaaaatagaagttaaaaaattaaagttaaaaaataatcttttggctgggtgcggtggctcacgcctgtaatcccagcactttgggaggccaaggcaggcggatcacgaggtcaagagatcgagaccatcctggccaacatggtgaaacctcgtttctactaaaaatacaaaaattagctgggcatggtggcgcgtgcctgtagtcccagctatttggggggctgaggcaggagaatcgcttgaacccaggaggtggaggttgcagtgagctgagaacgtgccactgcactccagcctgggcgacagagcgagattccgtctcaaaaaaaaaaaaaaaaacttttattttggcatctgagaaaaccaaagcctagagaagtaaagcggcttttactaattgtcatgtgctcttttcatttagtcatcacagtgacagtctcagaagagcttctctccagtggcataggtgggcacccagttctcagtagtagtaggtcttattaaagacaaacagtggaaggtagcgttggaaacaattttgaagcagctttactttaattaaatgatcattctttttgataaaaagaaaaaggagaatctccttaaggttgcaatgtttgtaaataccttgtcccctctgtgagattttacatttgaagttgtttcttataattgttttatatatggtatagtcttttttttttttcctgtcagggtcagattttctatcacagtactttttgttagaaaataaaatatgacttgggtaccaattagaaggacttttgtttagttctcatctcctcaaaaaggttaagtttaagtatttagttaaaacatgttaatgagtttctttgtgaaatgtttttgttttagttacttacacattgggcatgcaaaagctgctcttctgaaccagcactaccaggttaactttaaagggaaactgatcatgagatttgatgacacaaatcctgaaaaagaaaaggaagattttgagaaggtaattaaaagtgtagtgatgaccctttgccagaaaagtgaattaaagttacaggattacctaataccttcatggtatgaaaataaattttgttctcatagctgcttttttccctatctatatattccatatctgagacctaagccaagaaatgtcgagctcccataccaaaaaacttaagagttatttttcctttccccagttatagagtttacctgaatgatatgttttcctataataccaatttattaaatggtcactggaggcaggttttttggtcatataatcttaagtttatgaatgaaataaacactaagtaggtattggaaaatgtgaaggtttcctagcctcttatctttattcagaagtatggcagtgtattcaaagagagggcaaatgattgtcagttctcccagtaatgaccagcttttccaaagtaaatggaaaactccatcgtgagatcagctttctcagctggaaatttggaggctaatataatgagtatctatctgttttttcttttttgatctaatatcatgtaacttccacaaccattttcaggctaaataagactgatggtctatgttacatttgcttaaatgcagtatcaagggttgaaaatgcacgaaaaaatgcaaaagatatactgatggttattttggtttcttactacaggttatcttggaagatgttgcaatgttgcatatcaaaccagatcaatttacttatacttcggatcattttgaaactataatgaagtatgcagagaagctaattcaagaagggaaggcttatgtggatgatactcctgctgaacagatgaaagcagaacgtgagcagaggatagactctaaacatagaaaaaaccgtaagccacattgttttatattttaattgatattcttatattgtgcttctttagtagaacgtgatttcttttttgtgaaagctgctagtttttttgtttgtttgtttgttttgagaaggagtctcgctctgttgcctgggctggagtacaatggcgcgatctcggctcactgcaacctccgcctcccaggttcaagtgattcttctgcctcagcctcccaagtagctgggatgacaggcgtgcaccaccacaccttgctaatttttgtatttttagtagagacggggtttcaccatattggccaagctggtctcgaattcctgaccttgtgatctgcctgccttggcctcccaaagtgccgggattacaggcatgagccaccgtatctggcaaaagctgctagtttaaatacatttgggtatatgactcatttgtcttagaaatcttttttcttcctctatctttatgttcttgttattttattaacatcacaactgcatgtgaatatgcccttagtatctcacttattatgtgtagtcttttgcattgtattcattcaatttgaaggattccttctgcaacattttacagttttcttactttaaatacttagcctttctataatacaatgtttgatgataatgttgtcacccaagtcttccttttggcatgtgggtaaatatgaatataatatatagtacaagctcagtactaacctgtatctctgaaatatcacttgactgaagagcatatctttcttattcatggcttctctcctgaacttctaaattgggtgattttcattctgtaattatgttgtcagaacttcactataattaaacctggagtgccacatttgggaagtattagtaaattaaaatagttataatgagtcttttttattttgaaaaggttttctacattttcagaggtggctaaccaatggacttttagacctatcttgattatttgagggcaagtgtcttacatttctagtagcttccacagaaaattattgtttaacagtttgtatgcatacagggcaggtttttgctagatattgtgatatagagggagccatagccacttggaatgtagagtccttttttctggtattaaactcttttctttcctgtgtcactgttttctatcacctcttattttcttggatccaagagtatcctgcttctcattgggatgatgaaggggctttcagggagcccatgagctcagactctcaacctgagctgtgttctttagataggcacggtctgtagtgccaatgcctgtgggaccttagggccggaccaaaccattctgtcccttaggcatgaggtggcaaaataagaatgcttctgctttaaaggcagaatgttaaatttcagggagatgagaagagaaggggctggcccgttgtgccatgatgggaagggaaacactaggtgagcggagccttcaggccttgtactttttcttatgcttaattgataccacatgagtggaatgtattgatgttaccttttctaaaacgtatttgtatttgctaaatgtattgtgaaacttctttaattaaaaaatgacgcatttgctcttggtactggatactggaaatattacagtgtttttaaactaacacagggtggttataaaacaagaacatgaaaatttatatcaaattatagcactatgagaataatttgaatttaaccagattagtgaaccgtaatgtaattatcattttatagctattgagaagaatctacaaatgtgggaagaaatgaaaaaagggagccagtttggtcagtcctgttgtttgcgagcaaaaattgacatgagtagtaacaatggatgcatgagagatccaaccctttatcgctgcaaaattcaaccacatccaagaactggaaataaatacaagtaagtatatctccttcaatatgctaggtagccatctgtgcttttgttttgatcttctttaaacatggagtacaagcaaaatagtcaagaaacctggccttttgttcatccatgggttcactggctggtggccttctgtaaaggcatgtagcctttcacgggccgtttactcacctgtcaattaaggttctaccacattatttctaagatcacttccatctatgaaagtcctg

SEQ ID NO: 58533 - DNA, 3242 bp, Homo sapiens
tttttttttttttttgagacagagttttgctcgtcacccaggctggagtgcagtggcatgatctcggctcactgcagcctccgtctcccaggttcaagcgattctcctgcctcagcttcctgagtagctgggactacaggtgcacgccgccaggcccagctaatttttgcatttttagtagagatggggtttcaccatgttagccagtctggtctcaaacttctgacctcaagtgatctgccatcctcggcctcccaaagtgctgggattacaggcatgaaccaccgtgcctagcatcccatatactccatctgatacatttctacttatcttcgaggtccagcttggttcttaactgcttttaagcttttcctgataaacctaggtattgctgattaatttcaactgagtgccctaacagcaccctgaacatatctgtattactggtatttggttttatttatattcttaaccagattttgtaccctcaagtgtagggatgatgttctagtcatcatatttttcataaccagtgtgtgtagtgcctggcacatttgttgaatgagtgtgttcttagacatttaaccataagactttttgttgtgatggtggttgtgtttttcaggcacctgagaaaaagcaagatgttgggaaatttgttgagcttccaggtgcggagatgggaaaggttaccgtcagatttcctccagaggccagtgggtaagaaaatgtaactcacatttataattgaatatatttagtgggaaagctttaaaacagtgattaaatacttaaagtattaataggttaataatatagaagaacataagattttaattgtgagagttaaaattctaaacgttttaacagtttttatgttattaatagttaatgttgatttaatttgtagttttagtttgtcaacttagtaaaagagacattttagttttatcctgacagaactttaattatgtaattaacaaaatatccaaaaataagaaaccttaaatttcatttttatttttagatttttgggctttcatttaattggatttgtatttgtaccctgagcaatccttttaattagcagttgaagttataatagtattggtctttaagttattttttttccccaagtgaaggggagtcctgaaaagcctgttcctattcctttctttccattaggtttcccaaccccttcatctcttggcacccatggaaagtagtatttgaatagctcattagagaaaaagactgttctgtatggtgatcaccaggctggggctgcttcagcccttgcccaccattccccaaggctgagaaggaagtctttgtctttgcacacctgtcatcctatttgaagtatactggacaagctttataatagcgtccttccaatgatgttaatataataaaatacctcttattaaagcagttagcctcacttagaaaattaaccattaggaaaatgttctgccatgttttgtaattgaggtgattattttttccaaatttaagatttccaaatttaattttttcagattttgtattctatcaccataatgaagttctcacctttctatagtacacagtagaaactggaagatacagaaacaattttcttttagcgatgtatttaatacttcttcacaaactatttcataagcatcattaacagtaaaattgcttttagaatttcacattttgtctctgcttttctatgtttgctgattcaggaggtgaaataaagggtagatagaaggagatgaaacagaagtgatgactgtggaaaattcacagacttgatcgttaaatggttgattggtaattgactaagtggattcaggcataaataatacttaccttacatggtttaatatctatagacatcttgggttcctaccatctagtattctgctactgtgcacttggtatgagaggtcatgattgtcctgttggatagtgaccttgatcgtctaaaagccacctttttttggcagtggccatttttagctgcgccacttgaacatttgtcttttttaaatcttttcatattttgcgtcactgtcacttctgggaatagtgagttccccatgtttgtatatttacagtataatatatatttacctgttgtaaattatgtcagagactacgctcatgagacagttttggggtcaggaatataaatcagtatttagttttttttactatgcatagttttcatcatctcttcttgtactgttaaagagtttttctttaattactattttttcattttttcttttctgtgtcttaaatgaaaggccagaaggcttggcttagtcttttattcttattcttagctaacatatacatagcacctattatgtacaggtgctaccacatgctttacttatagtaacttattaatcccaacagccttctgaggaggcactgttgttatctctgttttacaaatggtttcggaaacagattcatatgttgtagtaacttgccaagctcaaacctctaccatctggctctagaatccatataattaaaaattgtactacatgtatctgttaacatatggcagaagcccaattcagcatcagttctaactcatgcagcatgattcttttgtgtgtgtgtgtgtgtgcgcgtgtgtgtgtgttttagcgattctgatatagagtcactctttaactgatgattttagttgtcttgtgacttatagtcctcttagctttcttgaggtttggaattgttagacctgcagatttagaaataacatttttgaaataatgttttgatctcatcacctttcttaaattaatttctgtattttaaagccaagcacattaactgtaaaataataggtactaattgttaatcttttcttgacaatggttataacatgttattgggtgcaacgccctcaagttaaaagtacaccacaatatttttcttcctgggaacttatggcccttcatttagttttatttttaataaatttttaattttagaatagttttagatttacacaaagttgcaaaaatagtacagaaagtttccatgtaccctgcacccagtttttcctaacattaacattttacattattatggtacatttgtcacaactaatgaactaatattaatatgttattaaactccatccttttttgggattttgttagtttttccctagtatctcttttctgatctaagatttcatctgggatatcacatacagcccttttttt

SEQ ID NO: 58534 - DNA, 1022 bp, Homo sapiens
ttattgaatagtttaaaattatctttgctcataggaaatgctgcctggcaagaacagttgaaacagaagaaagctccagttcatgtaaaacgttggtttggctttcttgaagcccagcaggccttccagtcagtaggtaccaagtgggatgtttcaacaaccaaagctcgagtggtaagcctttttttctttttttttaaaaaaaaaaacactttgggaggctgaggcgggcggatcacaaggtcaggagattgagaccatcctgaataacacggtgaaaccgcatctctgctaaaaatatacaaaaaaaaaaaaaaaattagccgggcgtgatggtgggcgcctgtagtcccagctactcgggaggctgaggcaggagaatggtgtgaacctgggaggcggagcttgcagtgagccgagatcgcgccactgcactcctgcctgggcaacagagcgagactctatctcaaaaaaaaaaagatgacatttcagtctgtctgaggccctaggtctgaaaagacaattattcctactcataaagtttattttcttttaataaatttaaaaggatcttcttgcaagaatctgacatttttaagtcttggtttcacatttaattgttcatctatataaagccctaatctttataattatatagctaaatattttgatcatccagtgtatgtcccttaggcaatccaaactccatataaataaaacctcattaattttacacctttgcaattttttctttcttctgaatctcctggtttttgaaccattgagcatcaagtcctgggattctgcagcactttttcattggttctgtaggaaaatgtgacatagtgtacagtacaaaagctccttttctctaccagagttgctccactttgatctgttttacactttaggaatgtgttgtaaagttttgatttaattaaggttttctaatgtaaaatttgaaaactactgtctacttggataaagatagcccagtccactcagttgttttggctacaaat

SEQ ID NO: 58535 - DNA, 1340 bp, Homo sapiens
gtattctgctctaaccttcctaaatctcataaaattcaaagtacacagaatggtttctaagtactaacttttaaatttttcaagtaaatgaatctgtttggctaggtaccatcccttcggttcattcaggttggcttatttctgccaccaattctcaaattcttattttcctgttctttcctgaagtgccccgccacactcctgtaaaaaaaaaaaaaagcagaaagcatagcaaaataaatgtggcatttatttaagttctattttagattttaggcaatcagaatttagtccacataatgataaattgtataatttgagaaaggaaaagcatagtaagagtgtactgttgctctagttaactagaatttttttatggtctttctttttataagttgaaatgttggaatgcatttcttttctgtcttttatgttgacagattgatcactggttggagttcagtgctacaaaattatcttcatgtgattcctttacttctacaattaatgaactcaatcattgcctgtctctgagaacatacttagttggaaactccttgagtttagcagatttatgtgtttgggccaccctaaaaggtatcaataattcttaataatcctctgttttaatcgtttaatattttgctggataaaaattatatatatttctgtgtgtatgcatgtatgtatatgtgtgtgtatatatatgtttagacagtaacttaggactttattacaggggaatgacctccctggctgttttattcctatccagctacgggaattccctgtgtttttctgccgtcccgtcgtctgtctcacaaccccaacttccttcttgcctttggagctgatcttattcctgataaagaagtccccatcccatttatgttagcacctctcctacttcagctattattttactccagacacttgtctctgacttgaaaaaagccattattgctcagtgagtgtgtgactgggaggttagggagtagtgggatgatgtggagttgtggtttttcttggaggtcacttccttcttctacaactagtttggaacaagtaagaatatgctttttccaacttggaaagacagttttttcaaaaacaactttcttgaggtataattgacatacagaaaatcacacttatttaaaaatgtatattttgataaattttgacatatatatgtgtgtgtatatatacatacacacacacacacagctgtggaactatggttacaatcaagataataaatatatccaccacccccaaaagttcctcatgctgctttgtaatcatccaccctcaccaggtcccaagaaaccagcatgccc

SEQ ID NO: 58536 - DNA, 1210 bp, Homo sapiens
gtctcaaactcctgacctcaagtgatctgcccgtcttggcctcccaaagtactgggattacaggtgtgagtcaccacacttggccagccttgatttatattaaatcactgttattctcaacatcccagttatattttcatatttgcacctctgaatagacatgtaaagaacaaattagcagactgggcgtggtggctcatgcctctaatcccagcactttgggaggctgaggcaggtggatcacctgaggtcaggaactcgagaccagcctggccaacattgtgaaaccccgtctctactaaaaatacaaaaaattagcctgtcgtggtggcagccacctataatcacagctacttgggaggctgaggcaggagaattgcttgaaccctggaggcagaggttgcagtgaaccaagatcacaccattgcactccagcttgggcaacaagagtgaaactgcatctgaaacaaacaaacaattaacagatctattttttactatagtagaaaatacatggtaaatataataaagtttccatttttacatttcttcataagtctcatgacttactgatttgctagagcagcagtaatattttatctcgtgcttatattctagaaatgtgatattcacagatgtgaattctatacttcgctacttggctagagttgcaactacagctgggttatatggctctaatctgatggaacatactgaggtaagcaatgaacattttgttgtgtgtgttttgtcttatgcttctgtttttttatgggaacctcatcatttattgttggcttatgaactattctacttaaggatattaacagagtgttaattatatagaccaaggtacagaatgctcatcttgtttttttgtcacaaaaaaattctttttttgtaattcctaagtttgaacctttagtcccctaccagctgtacttttgggagcatttagtgccatcttggccttcacagattcctagcatttcatagccagatggggctgtatagatcatctcatccaactttcttactttacggataaggcagcaggcctagaaaagttaagtttgaacagggtaacacgcatagtttggatcccattttcttttctttctaagtgtatgccttgtttaattaattatttcagtagtaaattagctttatatacaatcatgtgcctcttaacaatgggatgcgttctgag

SEQ ID NO: 58537 - DNA, 1024 bp, Homo sapiens
ccggctaattttgtatttttagtagagacggggtttctccatgtcggtcaggctggtcttgaactcctgtcctcaggtgatccgcctgccttggcctcccaaagtgctgggattataggcatgagccaccatgcctggctggcactatactaatttctttttgtctccgaagggagaagcagattaatttcagtgtctctaactgaaagctgaacaaattcaaaaccagttggatatgctagtgaatggattctggattctgatttgttgctgctctgagacaaaagactacattttctgtctacagactactgagaaaaaagttcactccttgtaggacttaatattggtttgttgactcatcctgattgctttatgattcaagttataaatactgcattgcttttaaagataaaaaatcttttcatattatttataggagctttgctggcagtagaacacgtgaaagacgatgtcagcatttccgttgaagaagggaaagagaatattcttcatgtttctgagtaagtgttttcatctttttattttcagtactgattggctttttcttttttttagagtttttttagagacagagtctccctcttttgcccaggctggcatgatcatagctcactgtacctagaactcgtggactcaggatcctgccatcccagcctcccgagtagctaggactgcaggcacatgcctccacacctggctaattaaaaaatgttttttgtagagatggggtatcactgtgttgcccagcccagtttcgaacccctggcctcaagccatcctccggcctcagcatcccaaagcactagggttaaagacgtgagccaccacgtttggcctctgaatggcatttaaagaaatattcggcatcgccgggcgcggtggctcacacctgtaatcccggcactttgggaggctgaggcaggcggatcatgaggtcaggagatcgagaccatcctgggtaacacagtgaaaccctgtctctactaaaaatacaaaaaat

SEQ ID NO: 58538 - DNA, 1053 bp, Homo sapiens
tgccaggaccacaggtgtgagccaccatgcccagcctcctgatacattttttgttacttagaaaatcaccctgaaggtggcctgtttctgtagtgtattacagaactcagaattctgccagtattctgtgaaactcttgtcattttgaactgtatgccagttatcaaatatatcatttttctaattgctcctctccctttttaatttttgatttaattattcccagtttaattcaattacattttatctttaagtaatataattagatgaaacattttaaaataatagttgcattgctagaattttcctattttgtatgcattcatcatgttatatatttaatgttaatttcaaacttaaaataaagacctttttcccccataccacccaagagcatactgtagatatgaggcttcagtatctcagcataactccagtgtacatccccaacaaacttggaaactccaggtgatctcacacaagcacccaaatcaggaaatacacttggatacaatgcttccatctaatgcacagaccccatccttgttctatcattatttgttacaaccagaccctccatagtgttgagatcaaaatcccgtattatgctttgtttgcatctgattgtcacctctctccagtttctttcagtctggaatggtttcctagtcttcccttggctttcatagctttgacctttctgaagataacaggccacttaacttgaagaatatcctctgtttaagttgtctgatatttcctggtgtctagattcaggctctttgtttttggcaggaatagcgtagttattccttgttcttcattgcagcccatcagttggtgcatgaatttaattttcccattactgattattctaaccttaattttaatgggcagatgcattggaatcatgtaaatgttccactttgcatcagatcttcacccactagtttcagtatccattgatacttcctgcctaacttgatttttatgattttatgatgtttgcgagatagtgactttcccattctaccattccttctgtatgtatta

SEQ ID NO: 58539 - DNA, 1379 bp, Homo sapiens
tttctcagagggatgaactcccagtcaactcacctctccctttttcccccggagagcgagagttgctcgtggaaataagattttaaaacttaaaatccaatagtcgtcgcttctcttttagcatttttcccccaactccttttcttacctcctttcctgtcctgtccctcctctcaggagaaatcctcagttcacttgagtcaaattttccttacgttttatcgagttcagaagaaataacccagacgagcatattagcatttaggatttcaactgaggctgcatttatttttaattaaatgtggtagggtaattggggaaaacacccaggtacactgtagactgatgcggttgcttttactgcaccctgtggatgtgtagtaaatttcagagtaaacattggatctgtcaccttactgacacatcttaagttctgtttggaattattttttcgacatgaccaagattattgttggtagattgcttagaatttctgctttttcattactttgggaaattacacagaagaatttaagtagtttgccgatttttttttttcttttgagagtcagggtcttgctctatcgtccaggctggagtgcagtggcgctttcaaggctcactgcagcatcgaacttccgggctcagatgatcctcccacctcagcctccttagtagctgggactacaggcgcgtgccaccatgcctggctaattttgtgtttgtgtcttttttggaaagatggcgtttcactgtgttgcccaggcaggtctcaaactcctgggctcaagccatcctgacttggcctcccaaagtactaggattacaggcgtgagccacagtacccagcctgacctaatatttgttaatgcatatgtatgataatacacacacagtactttctaatgttgaagaagcccatacctttatatacagttgaccacgtggggctgatgaaattattcattatattctcaactttggtgatgttttaaggttgttgaacaaaaacacaacttaatagccattttaaacatttaaaagatggtaatgttttggcatattggttgcagtaatggactaaccgcacaacaaatcaatgaactctaaaaggaatgggtttgattcctgagctggaaaggcattagagtgccttcatgattgagagcaaagacatttggtttctgcagacctgagtccaatcctggctgccacttactagttgtgaaaccttgacaagttccttatttagcttctcccatagtttccttgttttaagaaagggagaataatgtcttccagataggattggttgccagagttaagtgagactatagttaaagctcctgatactgtttttttttttttttttttttttt

SEQ ID NO: 58540 - DNA, 1040 bp, Homo sapiens
catacagttaatttaatttagcccttatttatagcctttttttttttttgacacagggtcgctattgtctaggctggaatgcagtggtgcaatcatggctcactgcacccttgaactcctgggcttgtagtgaaccgaggttgtagtaactgagattgtgccattgcactccagcctgggcaagactccatctcaaaaaaaaaaaaaaaaaaaaaaaagaaaagaaaatgctaaataaaattaatattaatcagagaaaaaataattttatatcctttagttagttaaaattgttctgtagtcttaaatttcaagtgaattaaaacttaacctttatggacactcattatttcatccagaatttattggctactattggataaggaagcaaaaggcacttaaaaataactagaaaaaccacaatccaattagccactaacttgattgattgattgatgtttttctataggcaagttaaccgatatccatgggaatgttcttcagtaccacaaggatgtgaagcatatgaactctgcaggagtcctggccacactgaggaattatgactactatgcaagccgagttccagaatctattaaaaatgcacttgttccttaaaggaaagtttcatttggccgggcgcggtggctcatgcctgtaatcccagcactttgggaggccgaggcaggtggatcacttgagctcaggagtttgagaccagcctgggcaatatcgtgagaccccatctctacaaaaatacaaattaactgggcatcctgtcatgcgcctgtcatcccagctacttgagaggctgaagcagaagaatctcttgagcccggaaggcagaggttgcagtgagctgagatcgtgccactgcactccagcctgagtgacaggagttaagccctgtctcagaaaaaaaaaaaacaaaaacccaaaaagtacttaaagtttcatttacttagctaggagaaagacttggttctcaaaataatacattttaagattaattgggtagaattagagttccacctttattc

SEQ ID NO: 58541 - DNA, 1047 bp, Homo sapiens
agttctttgaaactgttaaccagaacagtaatgataataatcagcagattctctcaggagaagttctttgccagtgatattgttcttgtactttataacattatcatgttttttgagacggagtcttgccctgtcgcccagactggagtgtagtggcgtgatcttggctcactgcaacctccacctcccaggttcacgccattctcctgcctcagcctcccaagtagctgggactacaggcacccaccaccatgcccggctaattttttgtatttttattagagacggggtttcaccgtgttagccaggatggtttagatatcctgacctcgtgatccgcccgcctcggcctcccaaagtgctgggattacaggcatgagccaccgcgcccggctatcatgtttttattttttaaatcatgatgctaatataactgaatattccatttatgggctaacgttcttctccaaataaccacaagtcttgttgtttcactcgtttacacaggcaggaccagatgctgtgttggggaggacaatctggggagttttaggtttaggcgcctttgggtttcagctgaaagaagtccctgctgggaaacacattatcacaactactcgatcccatagcaacaagttggttactgactgtgttgctgctatgaaccccgatgctgtgctgcgagtaggaggagcaggaaataaggtatgaaaaatgtctgtcatctgctctgaagtgcaagtgaatcattgaaatactcaacttctaaaaacatgaaataagagtttagccatcccattactgggtatatacccaaaggactataaatcatgctgctataaagacacatgcacacgtatgtttattgtggcactattcacaatagcaaagacttggaaccaacccaaatgtccaacaatgatagactggattaagaaaatgtggcacatatacaccatggaatactatgcagccataaaaaatgatgagttcatgtcctttgtaaggacgtggatgaaattggaaatcatcattctcagtaaacta

SEQ ID NO: 58542 - DNA, 1117 bp, Homo sapiens
attcacctgccttggcctcccaaagtgctgggattacaggtgtgagccaccgtgccctgccaaattttcttttctatgccaatcttaaaaataaacaatcatggcccggcgcggtggctcacgcctgtaatcctagcactttgggaggcttaggcaggccatgaggtcggaagttcgagaccagcctgaccaacatggagaaaccctgtctctactaaaaatacaaaattagccaggtgtggagatgcttgcctgtaatcccagctactcgggaggctgaggcaggagaatcgcttaaacccgggaggcagaggttgcggtgagccaagatctcgccattgcactccagcctgggcaacaagagcaaaaactctgtctcaaaaaataaataaattaattaattaattaaaaataaaataatcatttctcattgttttagtttgcatttctttcataattagtgaagctgagtatttatgtatttaatggccagtgcttttctctttgtaggtgttgcccgttcttgtttatttgctcatttttctattggattattcagcttttatatactgatcttttacaaattaagtcatttgtctggtatgtgatacaatatttttttctcattttgtcaagtacctgtttatttagtttatggtattttggccatgtagaagttttaattttatttttatttattgattgattgattttgagacggaatctcgctctgtcacccaggctggagtgcaatggtgcaaatgatctcagctcactgcaacttctacctcccaggttcaagcaattctcctgcctcagcctcctgagtagctgggattacaggcgcgtgccaccaagcccggctaatttttgtatttttagtagagacagggtttcaccaagttggtcaggctggtcttgaactcctgacctcgtcatccgcccgacttggcctcccgaagtgctgggattacaggccaccgcgcccagcaactcttagttttatagagtcaaatttatcaatagaatattttatggattcttggttttatgcttaaagggcatttaccaagcttatgaagtttataatttttatttccatgcttttatggtttct

SEQ ID NO: 58543 - DNA, 1046 bp, Homo sapiens
gccctctggtatctaaaatgaatttaaaaaggtaaattggttctagaactatacctaatgaagaggtctactgttttagtaagggtttgtcaatgacagagttaaccacaatattccattctctgagtacactgtaagttctgcaatggtttgatgatatttcttagctcaatataaataatattagactatttgtgtcaatagtttttttatgagttaatttatacgtttcctttcaaattgcagttttaaaaatggtattaagtttaaaaaaaagaacataaattgtaggccaaatattttatgtatgaatgctaattatcattttatctttgcagattttgaaatacatggccaaatattttatgtatgaatgataattatcattttatctttgcagattttgaaagacatagccaatcgattccatatgatgaatggctccaaaatacattttgtgcccggctgggattgtcatgggttgcccattgaaataaaagtattatcagaacttggtagagaagctcagaatctttcagctatggaaattagaaagaaaggtaaataatctgtatttctgttttaaaatgatatttgtaaacactcaggtccttgaaatagtcagaactttaccaaaggaaccttttgtttgggtttcgtttgcttataataagatctattggaaacgcctttctgtcacagaaaattcagattttatttcattgatttttgtaagaacttatgtttggatattgaaggaaagactttgtgagcatttctgattgcattctcagtttcttaatgttcatattttaaaaaactattttttggtaaattcttttttctgctttcctcaagggggcttgttgactgattttaggtgttaagccaaaattcaattctaaaatacatatattttacattaatcttttatttgatcctttttcttcagtcgactgggccaagggaggattctctttttcttatatgttatactattgtacatttggatgtaactgtgaagatttttttacttccttgtgaaa

SEQ ID NO: 58544 - DNA, 1059 bp, Homo sapiens
gctactatacatttgatgggaagtatgaagccaaacagttgagaactttttaccaaatgtatgataaggtaaagaagtattttttctctttgagtaggttttagtatgcgttacaagattctacttttaacatcatatttttgtcttttatagggcttggtttatcgatcttacaaacctgtgttttggtctccgtcatctaggtatatatgcatttttcggtaattaaaagggagaaatttgtgaggcttccaagtatttatgtttaatatttttaacccttaggactgcattggctgaagcagaacttgaatataatcctgagcatgtcagtcgttcaatatatgtaaaatttcctctcttaaagccttctccaaaattggcatctcttataggtaagatttattcatagcttgagtgtaccaaagttatagaattatcccatttgctaacatatttacaattgtattttcacagatggttcatctcctgttagtattttggtctggaccacacaaccttggacgattccagccaatgaagctgtttgctatatgcctgaatcaaagtgggtatattattgcattttttgttttatacacaaatagaatgtattccattattaacattattttgaatttattttatcctgtttattattgtaaaatttaatgaattataacttagttattatgttcatatagattttattaacctttaggtgatcctttttatgaccttatccagcttttcgggaaaatgaaatagaagtataagttacaaagtgttttgaaaatagtacagtttgatcttgaagtcagttttttcttttttctttttttttttggagaccgagttttgccttttgttgcccaggctggagtacagtggcatgatcttggctcaccacaacctccacctcccgggttcaagcaattttcctgcctcagcctcccgagtagctgggattatgggattacaggcatgcgccaccacgccaggctaattttgtatttttagtagagatggggtttctctatgttggtgaggctggttgca

SEQ ID NO: 58545 - DNA, 1100 bp, Homo sapiens
tatattttgttacttttgttattaaagtttatggatatgcttcaataacacattttggctttggtgatttaaatgtataaaattcacaaattcctatttccttttcttttcttttctttttttttttttttgagagggagtcttgctctgtcgcccaggctggagtgcagtggtgtggtatgatctcggctcactgcaacctctacctccagggttcaagcgattctcctgcctcagcctcccgagtagctgggactacaggtgcacaccaccatgcctggctaatttttgtatttttagtggaagtgggtttcaccatgttggccaggctagtctcaaattcctgacctcaagtgatctgcccacctcgacctcccaaagtgctgggattataggcctgagtgccgcgcccggccaagtacctagaatttcaatgtagaaaaagaccaggctatactgagatgtttttatatatattgttttgccagatattgtcataagagaaaatgtcttgatattttaattgttcaaaatgatactttataggattgtctagtggacgaagatggagttttcacagatgttgcaggtcctgaacttcaaaacaaggctgtccttgaagagggaactgatgtgggtgagcatcatatctgttgatatcatacatgttttctgaaaagtaggtagcagtaacctttgctacctattttccctccttatactttaacagaaacaaaaaaataaattatgtcttgttttgccatatgttttaaaatggagtttgggactttttcatcttttgctttgaagctgctttatttaagcaagtcagggcagtcaacagggagtgaagttattttagggctatggagataataatcagcagtattacttttgtggaaggatacaatcaagatcagggctggatgttgactgtaaattacacattccctactcactttttaacccttgtaaataactgacctatatggcatgatttatgtattagaatcttgggaatcctccagccttgaattgtctttctgtcttcctttacagattcagagaccaagtgctatgaaaacctttctttgcccaca

SEQ ID NO: 58546 - DNA, 1064 bp, Homo sapiens
tcccaaactgttgggattacaggcgtgagcaaccacgcccagccaagttgactactcttttattttttgagacggagtctcgctctgtcacccaggctggagtgcagtggcacgatctcggctcactgcaacctctgcctcccaggttcaagcgattctcctgcctcagcctcctgagtagctgggattatgggcacacaccaccatgcccggctgatttttgcatttttagtagagacgaggtttcaccatgttggtcaggctggtctcgaactcctgacctcgtgatttgcctgcctcagcctcgcaaagtgctgggattacaggtgtgagccactgtggctggcaaggtgactactcttattgccacctgttgctgcagatttagtattttctggaagtttagagcatttttaggattttcacagtactttttaattatgtctaatttggtgtttttttttttaaagttataaagatgcttcagactgcaaagaatttgttgaaagaggagaaattggtgcatagctatccgtatgactggaggaccaagaaacctgtggttattcgtgccagcaagcagtggtttataaacatcacggatattaagactgcagccaaggtataaaaagcatcctgttttaacaggtcgggcatatcattccctcagtataaaggggctgcatgtgaggttgaggtggggtttcaggagtaatagggattgctgctattatgatttagtttcataacattgtagaattttagatctggaaggaccttggacttccattttttcattatacatgtgtgagaaatgaggcataaagaggttgagtgatttgtccacatcacactgttagtagatagactttcttgcccagtgtagtcaaagttgcatagaatttggacagaactgtgttacctagtttaacctcccactgcctctgtttcctcatctatataaagtggtaataatgcgtatctcatggagtaaggaaattcgagtttccagaatatggtctgatacataataagcagtcagtaaaacttttttaaaccctttg

SEQ ID NO: 58547 - DNA, 1067 bp, Homo sapiens
ttaggaaacacaaattcaagccctggttttaactgttacttgcttagcttcataatttaaggaaccctaaggtgcagaacaaatcatttctcaagacccactgtgtatttctgtgaatccaattagcaagtgcttgtaaagtgcttcgaaaaagatatgtggtgtacgtatatacatagttttgtatacatacaaatactctttatcttttatacatacaaatacataaaatactctttatcctaacatttctaccgtatttgctaaattaatatgaaatttgagacatttacttttacttcgatattatttttatgtctttttccaatacatttaaagctgttttactgttttattttactctttacctaaacttgccagtctaatgataacattgtaaaaaaaaaaaggcaaaatgacacccatttttagaattattcttttttaatgagaatttcattagtatgaacagtgttatcaattgtaattgtgcgtatgtgtccatgtaaatgtactttactagtatctctcttttatggttgtaatctttttgttttttttttcttttggtctttagatttattcagatttttctattataccatattcatattttcttaactgaaaatgttctggacaaactatataaaatagtaatatgtaactaaatactattgtcatataactaggtagttattacataaggtttttatggtctgataacataaaagtttatctttactgttaaagtccatctaaaatgattcactgtcttagaaacatgcatttatgcccattttcctttctcattataagttcttcaaagtacatgatggtaacattatacttttaaaatctatccttcatagaataccaacttactgatatccagcttttataaggtatttcaaatttaaatttgtagagcatatttatttatttattattttttttgagacggagtctccctctgtcacccaggctggagtgcagtggcgcgatctcagctcactgcaagctctgcctcccgggttcacgccattctcctgcctcagcctcccaggtag

SEQ ID NO: 58548 - DNA, 1106 bp, Homo sapiens
ggacaagtaggtgattctctaaaatgtattttattttcgttttaaggatcttaaattggcagccaaagcccttaatatagttacttcaatgtaaaaataaaaactatcttttatactctcaaataacacatgattgtaatgaagaaggcagaggctgggattgtggtccttttaacttatttcaggcctgactctccagttaggtcccaaaccacgctgtttcttttttaattgtctgagagcctttaaaatgtgtagatccttttgtgattcgtaagcgtgatgattgggttttcgcactattgtgtgaggtgtgcctccctcaaaccttgttacagtgttggcacattgctgtctgaagtgaaaaaagaatatgtaaagtgtgattgtgtagttaaatggaaatgatgaaaaatgagattgcaacttcaaaatgcgcatttcattattatattgttgaaaattatacactttaaagcaggtcctaaatgtacatcaaatctgaggttgctgataatttgggggggtttttggagctgcttttgtgaattaaatcatttgtctgtttttttctattttttaactcctgtagctttttactgcccgcctaacatcctgtaaccgttcattgttttgtgtacagagttgctaggaaatagtgaaaggaaaagcagtccttcctcttcccctcccttattatagagacctccctggcactgctgtgtgtctaaccaccagctgtaatagaggaaacagacatgaccagggaagagattaggtatgagcatttgtgcattgaacaagattgcagagcacgctctttctttttccagttttgtttttagatacagtctaatttgagattgttagcccgcatttcattacagtgctagtatagtttgtacttacattgtgctcaaaaatatctgaataggagctttacctaaaacatttgttcggctaattggaattgaaagccattgtgtttatatatttttttctcaatgaaaaggatcaaagcaaagagcctccgtatggtgctgatgtccttcgctggtgggtagctgattccaatgtcttcaccgaagttgcaattggcccatccg

SEQ ID NO: 58549 - DNA, 1046 bp, Homo sapiens
ttgatgccaagtcttcatctgttgctccagtgtgcaggtgacggtcctaccttcatggtaatgagtccagtctgaggcgttatcctcagcctgtcagcaccccaaggaccttgcacatagggattataactcctactccttcccttaaaacactaataacattggagtgggtgggagccacatgttaaataccatcaactaacttattcatagtcctttaatacagtagtctagactctagttgtcatccacctgagaaacagaatgagatagcgtagccatgagtgctttcaaggaggtgggtacacctggacggagtaaaattgtaggagagtgtattgtattctttaagtagaagatgattagagccataggattagccactaggaataaactcaacctgaggcaggtcccatctaggtgaccataatgtataaagtattgtcaactgctgaataagttgttcttgttcaggctctattgtgaaaaggaaaatgaccccaaacgacgctcttgtcagactgcattagttgaaattttggatgtaatagttcgttcttttgctcccattcttcctcacctggctgaagaggtgttccagcacataccttatattaaaggtaaggaatacttcatttattctcttaatgagaaatatccctgatcaaggtgcaacttctacttctatctgcttcataaaaggggcacttatccatttacagtgactgctgtgtgacacagtgtgtcttggtcatgtatttgtttctgcacctatttgtagaggagtagggtaaatttcagaattctgtgctttctgaaatgtattagcagcttgacagtgtcgagaaatcaccttttttcttaaatacctttataactgttctgaaatggctggcatggtggctcacacctgtaatcccagcactttgggaggccgaggtgggcagatcacttgaggtcaggagttcaaaattagccaggccaacatggcgaaaccccatctctactaaaaatataaaaattagtggggcatggtggtggcgggt

SEQ ID NO: 58550 - DNA, 1042 bp, Homo sapiens
ccctcacccaatgatacatgaaaaaaaaaaaaaaaggctttgaggctgacagacctgggcttgacctgcagttccaccacgtatgggttgagaatcttgggcaagttaacctctctttgcttgtttcttcatttgtaaagtgaggataataaacaccatataggttttttttgtgtgtatgtatgtgacaattagaagtaagagacatcttaggatctagcaaagtgaagtgcctggcattctcaataaatactgttgatggaaatatttagttaaaaccttttatgctaattaggattgatacatttagtgatgtttgctcaggatgcaatggtataccagaaggttcctctctaaacgtgagattttatagtgtttctttttataacctcagtttatggtacaaatttaacataaactgtaactttcacatgcttccttccagatgctgcagtctgaagagacttccagcacctctcagttgaatgaattaatgatggcttctgagtcaactttactggctcaggaaccacgagagatgactgcagatgtaatcgagcttaaagggaaattcctcatcaacttagaaggtaagaaggagatgaaagtaacaagtaacatctggagaattgaataattataggtcatctccaactttccagtggactgggtttattctaaaggtagatatatacttggaatacatctttctatggaaataataaaaacaattgccaagtttctaagcccgctcttaaaactatcttacctgatgatcttgggaactgagggctagggacagaagagggagagagattttctttctgtcctttgaataaataatggtcactgtatatgaagtttatgttaggctgacttgctcccattcctcttttgtgtccccctgctttgatacttagtaccccagtactggcccagtcctgcccactgttccccagtattgattctaaaatttcctattatgtataccccggattaaaatatttagccattcttgtgaggggttaaggaggaagtttta

SEQ ID NO: 58551 - DNA, 1312 bp, Homo sapiens
ccaaatttaacagctagaaagtctgctctgcctgagtagatgtagaactcggtgacttgggagatgtcagttaatctcagagtcacggggtctctaattcctcagctcccttcaggtgttgagttgtatgatcccattatcttggctatatatgtaatgggacaaatggggaagtgtctgacaagctttaccaaggcaggacaaaagactgaaaaagaagcctctgctaaaccaattaagaaacagtgttacaagttgaatgcctatcagaaatactcttcatgtatttttttataggtggtgatattcgtgaagagtcttcctataaagtaattgtcatgccgactacgaaagaaaaatgcccccgttgttggaagtatacagcggagtcttcagatacactgtgtcctcgatgtgcagaagttgtcagtggaaaatagtattaacagctcactcgagcaagaaccctcctgacagtactggctagaagtttggatggattatttacaatataggaaagaaagccaagatttaggtaatgagtggatgagtaaatggtggaggatgggagtcaaaatcagaattatagaagaagtatttcctgtaactatagaaagaattatgtatatatacatgcagaaatatatatgtgtgtgtgtatctgtggatggatatatgtatatctcttcctatatatatccatagtggacttattcagaacatagatatgtattcagcttgtcttcaaatacggccaagcagaaaatgttttatattttataaatcatcttttgactctgtatttaaattctatgatactgaaaataaaggcattctggaaaaatactgactgattttggtgcagaagttttgagtatcaagtaaaagaagtatagttttgaaagggaatggcggaggcctgtttcccttaagaggtgaagggtcatttcattcttcccattagtgaacatcagccttttcagaatagctagtttttggggttggatcagaaagaatataatcaccaaatttgttactcaagaaaggaagaaatctcttaatagttagttatacttatgaatgtttaggaaacaacatgaaagctgaaaatttatttcactaatatacataagaagttcacaacaatgaacagacagaaaatagcagtatatacagaatttcactacttacagtacattacaatagagaaagcattttataaacagttcagtattggattaaaatcttttaaggatggctaattctattcagcaggaatctaacttctagacacccagcaaacccattccta

SEQ ID NO: 58552 - DNA, 1102 bp, Homo sapiens
tccttcagggatataaaaagaaaaacaaatctgttttttgagctaaaagagcacatccaaacaagaatttaactggctaaaatttagtaattactgttaagtaactatcaaacttgaaatcttacaagataaatggttaagatgtcttgagtatttgggatgggggcctgtgagtctgattgagacatacattttacagagtagcagcactggaaagggctagtccaacctcccagcctctgcttgggtctccgctgccccagccacacacatcctagaattcttgtaaacatatctggctctgtgttaacagtcacttgttatatgttttctaagagattagttcttcctgtgatttttccaagtacgctgaaagtagtagtatgaacttaaggaggctagtcaaagaaacttggagttataggtatttttaaagaataaatcctcaattccatcatcacttggcggggagggggcacttattaagcattttagataataaaactggttaagcttactctggtagaacagacaatcaaatctggggattgctgagaacaataataagctgaagtatggctcacagaatcctaacacaaatcattaagtctctagttagatttgttatcctaaaatttttcatagaattttaaaatctaattctgacttgtatggttaagaaaagcagttaaatattttactacttatcaagggcttttaaaataaataaatctgattgataggaagaaaggcaaataaatacctatgtagacattctataataacaaagagccatagatgataaaggaattagattttaatgtagaatgggtggtttctgaaacaaaggtatgtggtactttgtagttattgatgagaagccagtaaccagtagtgttttcctagatatatgcccaccctcacacaactttcttcattaacaaacattaaatatgcatttgtatcttattaaattatattgtataatgctgaaggaaaacaaaaagtgttcaaataatcataacttctacattacaggttctgtttagatgcagaactagaggggccagggtaaatgtagataaagagatatatagcacca

SEQ ID NO: 58553 - DNA, 1045 bp, Homo sapiens
gatacccataattacactgtatggctacattctaaaaatataccacaataaatacttggtatttgtagagctcaaagcactcttttacagagttttggttagtttggttttttcttttttttttttttttcgagacagggtcttgctatattgcccagaatggcctcaaactcctgggctcaagcgatcctcctccagcctcccgagtagctatagtttggttttaatcagtaaatatttatttagcacttggactgctctaggcactatagggtacaaaattagttgtattttatcctctcatcccagctgtgaggtaggtttgctaaagctgtaataccactaagcagttttttcaatactgttcccaaggacagataatattagcaaatcccagaagcatttctaaacacttgtaggaaaaataaagtcggacttaaaatttttagtatctttgccttttttttttttttttttttacataagttttacaagataatacatttttacagtgacctgatgtggatacaactttgcaacttggcaaaaagcaaatcttaacttacattataattaatttgctgcattttacacatctctgattctcaattttggcaagtacaacaggttaagggttctatttagtgtccccttctgatgaatatgatgatcttgaacccattcttcctcctcaagcacggtcatcctcctctgatggcaacagcagaacctctgggaaaggaacctttcggtatccagaactcccaggtggcagcccagtgtgggatttggagcatgacaacaaaggcattttctcaacatttactaaaggagagtggggtgttctatacgctactgatggggactgtacatgaacacatttaaattgaattacaacaacattttagataggaaatatagaatcttataagaacataatctaaattataaccaattttaaatagcaaagtttaacaataaagctacttaagtgtttgaattagaaataaacagtaaaacatctgtattaattataacagagttg

SEQ ID NO: 58554 - DNA, 1061 bp, Homo sapiens
actcataggtgggagttgaacaatgagaacacttggacacagggtggggaacatcacacaccagggcctgtcgtggggtggggggaagggggagggatagcattaggagatatacctaatgtaaatgatgacttaaggggtgcagcacaccaacatggcacatgtatacatatgtaacaaacctacacgttgtgcacatgtaccctagaacttaaagtataataataaaaaataataataatatttaaaaaagaccaatttcaaagtattcttgagagctagttgtttaaatgatgtgttccttttttgataactaaacaatttaatggaaaagccactataagtgacagaaaagctaacaatacttggtttaggtattttaaaatgaaacagtaacaatgcattgctctatctctttctccattttcaagttcttattgaaagttgtcagtgcagctgtccaggcccaacattcagccacaaaggtcaaagatcccacagaagaggccacacccactccttttgggaaagaccaagattggccagctctagctgtggatttagcccatcaccttcaagttagtgaagatgttgttagaaggcattatgtgggggaactatacaactatggagttgaccacttaggagaagaggtaatcatgaccctttgaatgttaattgggctcaagttataaaattgatagttggaataaagaatcagttaagtttccaatgaagccttttgctcttccttttattagaacatctaggtataaaaatagaacaatagaatattttttaaaacataaaattataatcaaataattcctacagtgtgccaggcctgccctacgcacagggatatagcagtaaacaaaacagacaaggttccttcatcatggacttgatagtctgctggtaggagcagaaaagcatgctaaattttgcattgaatgataggtgctatgaagaaaataaagagggccgggtgtcgtggctcacacgtgtaatcccagcactttggaaggctcaggtggcagatcacttgagcccagaagctc

SEQ ID NO: 58555 - DNA, 1042 bp, Homo sapiens
tatttagttctcaagcttgaggattctagttttgctcagagggtcgggttcagtctctaaaagacgctctgaaagcagaccaggctgttttcttggagcttttcaggttagattctcatgtgtgtatcttccatctaccacgattatttggctaccagatgccttagcaagctgaacagtgagctcagaagtgccaccatctatagtaactaatgaggctgtttctttacaatacacaaagaacactactttttaaaagtcaatatttataccactttgtaaagcttgactttaaaattggttgacagtaaatctaaaagaaggaacttaaatatgctaatgccttgactttcaaattcttgcctgtctattcagtgtggaaagtcagctgaaccagtgtattgtatcctggttcttgtttggctgacagtaactatagcagttttcctgcagggcctaattacgttcctttttaaaaaacaggatgtgggaatgagtgacacagcaatgacatctttcctcggctcctgtttggatcttcttcagatcttaatggaggtaaaagaggtgtatttttcattctgaactgctcctaagatattacatattctgcaaaccattgcatttaataaatgactattttaatgaggttgtttttcattcattcatttctaaattttgacttgagcccagaaggtagtgatgttttcttattaaattcttattgaaattagactttgtgtttttttattacaatttgggacagtgtgcaatatgaatttgcactttgctgctaataaactcattgggatatttgtaagctattatttttccattactgaacacagtcctccattctcaaaacccttaggcagatgttagcagggatgaaatacaggtgcctgtgctggatactgaggatgcgtggctctccgtggaaggaccaatctccatagtggaactggcccttgaacagaagcacatccactacccactggtggagcaccactccatcctgtgctccatcttgtatgcagtcatg

SEQ ID NO: 58556 - DNA, 1960 bp, Homo sapiens
tgcctatatatataccagtaaaaagtaggtgagaggaaagtatatcccagcagtcctggagatatgaggcaacttgttggattcagagaactagaagtagcttaggatggctggaacataggctatattagaagaaaagaaaagctaagatgaagacattcctgtgcaggctgtgaatttggattttctagtagtatgtgtaagcttagcacagggtctggcacatgtggtaagggctcagtaaatggtagctattattttatattgaagacactggggcagttttaagcagaggaattatatattcaaatttgtgtttaaaaagatgattctggcaacagacaaaatatcttgggactggggtcagctgatcttggttgttccaaggctgttgcagtaatcccagcaagtggtagtgaggtgacatttttctccaatgtctcctgtgagtttcctctcttatcaagtagtatttctgagggcagaacttttgcctcccacttattacactgtagacatatacagtaaaatcttaataagtacttattgcgtaaggaaatttttctgggctaggaatataactcccatgtgctttagagtggttttcctttctttctatttcaaacaattgtgcctttatcaacaagctgaattcttaggtgttcttgattagtagccctgaattaggctctgggttttttttttagtttttctttggtaggagtgggatggagtctcactctgttgcccgggctggagtgcagtggcacaatcttggctcaccgcaacctctacctcctgagttcaagtgattcccctgcctcagcctcccgagtagctaggactacaggtgcatgccaccacgcccagctaatttttgtatttttagtagagatggggtttcaccatgttggcgaggctggtctcaaactcctgacctcaagtggtcggcccaccttggcctcccgagtgctaggattacaggcatgaactaccacacccggcccaggctctgggtttttaggcaacacagttatttgactgtacagatttttagagtttttacttatttaatagttcagaaatatgtaatttatatttgaaaaggattattcttgagcccagtgtgagattaagtttcaccaccaatttaattgcatctactgttggtagagccaacagctaattaatgaggctgtcacatttacttatagcgccatttacggtttttaaattcggttactttttattatttgtgccatagtaatgtctttttatttaaattattaaatgttacaacattttatctttttattttaggttggaaaatcaccaaaagataggttatgccgaagggtaagtgaatctcccatagctagaattatggttgttaattccacacttttatgtagtactttattaactgtataggtgaactttgccttttatcattgtgatgacgtatcagaaggagataagaaaaatgaaaagagaatactgcattaaggaaactggtcatgaactatggccagttttaatttacttttccagattgttagatagcatattaaactaggtttttataagatgttgttcagctttgaactgtgaacaggttaacatgctaccattgctgcatattccgattagacatttataatggaagcatccaacatcaaattgaagcaggttcaaatgaagtagttaatttgatctacctatatatatgatatatataataacataagtatacaaatacaacattagtcttaactaatattctaatccatggatatgggacttgtatttgacccaagaaattaatagtactagcttccattgttgaagactttttctgatgtgttcttgagaatggttgtatgactagagtgtgtacgtgtgtgtgcatgcatgtgtgtgtgcatgtacccacaaacactgaattatttgctttggggat

SEQ ID NO: 58557 - DNA, 1050 bp, Homo sapiens
tttttagtaccataaagattgacagccataactcataaaccaaagttctgtggggttgccagtaattttaaggggatcatgagactagtaagttcaagaattgcctgaacaaagcataaactcttaagcttgctctccaataacttttgactttgaatccaactgatttttctatttctttctcatttgcttcctagattttagttaaaatgaagcatccgtgtgcttcccgtcttagatctggacctatcctcttccctttccctgcctctctcactcatggatatcgaaatcttacttatctttcaaggtccagctcaaatgcttctcctccaggaaacctttcatgattcactaactgcaaattttctcttcttcctcctaatatccacagaacgttattcctctgttgtgaagcatcactttctactgtcctggaatcatttgggttcctgtgcttatatcttgcaggaacataaacatcttacatttttagttgtctttgggggctcacactttttatcagcagctcttttaggcatttgatactggaaggactgtatatgaggtttataaatacccacatgtttatagatttttagtttacttcttttctcattctttataaaacttgtgaactttttcttattgtaaactcaccacacttcatgttgccacctagtgaaagggtaaggatgccatttgaatattaacctaagcaatggaatcaggggcttaattctggaatgagaattttccaatgatttagaagccaaacataagaaattagatcacccagcacactgctcacatttattttcactgataattgtgaatttactgtgaagcattctttttgtggaaaggtttttatttgaatcaaaagatgaggaaagactgagaaagttttggtaaacaatagagtataatttgttttcgataataaacaggactcgttaaatatctggaacgtttttcagcgtgtttacaattttttgtactatattgatgactgagacatgatataatgctgttgattagctatagcta

SEQ ID NO: 58558 - DNA, 1050 bp, Homo sapiens
taaataggtctgtggagattcacttaacattgtcagccactgttgtttataggctaaatttaatattgcctgcttgaaatgttcattatgatggagagagatgaaatttcagattgttttttaggttgaagagtgcattctgaagaaatataagtattttgatggtactgatagacaaaacttggcccttgccaaagatggcccagaaaactctgaaatgtatactggttgagtcagggccattagtgcaggactccttataaatatctgaactcaccatccttgcccatgagtctccaatctactcctgaccctcatgtttcatccagccaagtagtaatatttgtgaaatagcatgtatgtgttgctttgtgatgtatcctcagtatccatcagctttcaagttaaaagctcattcaagttaatattgattcagaatctttggcaaagaatcaccagtgcattttttattagttttcccaaacagttttgggtgctgattcagaggccctcactgattcctgggaggcactttctcttgacactgagtactggaaactccttctgaaacagctggaggattgtctcatacttcagactctgcttcacagcaaagggaacactcagacctccaaagtgtcatcactgcaggctgagccacttccaaggctttctgttaaaaagttattagaaggaggaaaaggtaagctgaagtttatttgagcatttgcatccatttttttatgttacgagggtttcttttaatagaaatgacggaaagaatagagaaagaaaaatacactcagatttaaaaataacaataaccttctatatactacctttaaattaattttctctaaagtctcatttggtcagttccacgctcaggaactgctaggtgcttccctctgcctaagaaaattggcagtgattctcaaagagtggtcagaggacctcaggagtcctccttttttcacctacatgtctatatgagaccagattttcctcttatacttcaaccaaaacacagagcacaatagattgaatggc

SEQ ID NO: 58559 - DNA, 1034 bp, Homo sapiens
gtgagaccctgtctcaaaaaaaaaaaaaaaatgctaacattctagaagataataaagtaccctcaagaaatatcctaaaatggtacttttaataccatttcttttagtacctacctctagtaccatgtttggtttggtaccaaacatgcagtgtttcaaaattatagtttactttatttaaataacttcctactcatgaaacgtgatttgtaagtaaagttttaagcagaatacatgataggtattatattaattaaaaagtcgacttttgcttacagccttgaatttcagttcagataatgtgggtgatagatgtggaatgttgttttgttttgttttctgttttaaaggacttggctctgttactaaggcttgatgaaaaagaactgcttaagctccaggcattactagagaaatataagcaagagaacaccaggacaaatgttcgattttctgatgataaagatggtgtgttgcctgtaaaaacattcttggaatatttagaatatgaaaaggatgtgctcaacataaagaaaataagtgaagaggaatatgtggctttaggtaggtaaaataatacactggtctttgtatgcctcttcttttagaagaaaacatggtaggaacatatagcatctcagagattccatttgttttgaaatttaaataatgaaaggatttaatgtactgtattttttggccaacaaaagatactctggtcaacaggttgtattaatgagtatactaaagagacaatattggatcatgatttgctttctgctttaataaatcaagcaaattgaacaattaatttctcttccttcataatgttttgtttctctggaattccagattgtgattcaataagattgttagtccaaatggtaagtagtcattgattaatgtgctttgtttttcttctaccaggtagtttctttttttggaagtgtttgcatggagaaagctccactgaggatatgtgtcacactttggagtcggctggtcttagccctcagctgttgttggtaaggttt

SEQ ID NO: 58560 - DNA, 1037 bp, Homo sapiens
atcattttgtgtggtcagttttattatggctataagaacttgaacaatattccatgatactgtatttcaaataagattttgaggggattatcagtgtctccctttttaaagaataaatatttcttttatattagatataaatattcatacagtatatgaattatgtagtcagggaaaatattttcaaaggtatttccagataatttctttaaattttaagtattagatgaagatatttccgcttccttttttatctccctacttttagagcatcttattttatttaaaaagttagacattttgtcatgacagaaaaattatttttgctttcaaaacctggtatagcttaagcatctcagtatttaatacatcagagcatcagggaattacataatattgagagatttaatgaaagcaaagcctgtttatgagtctgttaaatatatctcttatatatacttttccttctgccttttagaacttgagtctgttgatgaaggattgctacagttttgtgccaataaactaaaactgctgcaactctatgagtctgtcagtcaattaaattcccttgattttcatttagacacaccattctctgataatgtgagtaatcccacattttatattatataaaataatctctttgattagttttactttttaaaattagtagtaaagaagtagaaaattaagaattttttttaaagctttaaaggtatattttccttaccaagccccctgctagctctctgtgctttgctgctatatttatattatttatacaagtgctgagattataggcataagccactatgcccagccatgatatgtttttgtacatatagtatataaaaatagtttgaaagcctagcaggttgtatccctgagagccacatacaggacttatatgtagatacaatgagaatatttttctatgtttttattttatagtgtttacgctgctttataattaagcatttaagttcaatatttagtttcctcagaatagtaagagttgcgtttgacaccctttt

SEQ ID NO: 58561 - DNA, 1013 bp, Homo sapiens
caggagcctgccatgagtggcctcattagaaaaaaagaagcttctatcacccaggaaattacagaggtcttagaagctccccatcagaaatggggggtcaaagaccaaatgttagaacaaaaggttctcctagcacctctgtctacaaagggattaagagctctgactgatgaactaggacagagaccaaacactagaacaaaagaaactcctagcacccccattgttcaagaaattataggaactctgtgtcaggtactggggccatagaccaatatgtatatttcttattattttatagctacatacatgggagaattcagtgaatagtgatacatgggagaatttagtgaatagtgatttctgttgcagtccgtttttaaaacactttattgagttattgtagaacagaaaagcctttgtgacttttaattgtgtcttccattctactgacaatgctaattggctctcattttgctcagggtaaagtctctgttattagagatgacatgatgatgacaaagtgggcatctagagaggcatattgagaaatctgtagtagaaagggtcataacccacacggttcttctcatttttatgccatctttcttcttatcctaaatcatagaacaacaaaattgggaaaccagcataatgcaaaatgtcttcttgattttcttttttttaatggtacttctgaatcatgtatgaagctgtgaattttataaagaatgctagaaaacccagtaacaaaagttataggtcttctaggactgactaaagggaaggaagaaaccagttcaggctttgggagactgttgaataatggggaagaaaacaagctagctgctagcctgggtaatcataggcagaactggagcaggttatgcttgtcctgggttctggcctcttacagtcactttctttattgtttcctggtagttacttcattataggcctgaccaacatcttgagccaccctctaagcccatttctcctccacaaacacgcag

SEQ ID NO: 58562 - DNA, 1061 bp, Homo sapiens
tatattatatatataaaatagtaaatatgtgtgtatgaccacctaccttaggaaataaaatcttaccaggaactctaaagagccctgagtgtcccccctcagtcccattcccttctcccatccctaaggtaactgtaatttagaattttgtggttctttctttttctttactttatagttacgtcattcctgtgtggctcctttgaaacctgttgatgcatttcctgccttttcaaactttatataaatgcagtcatgccctatgtcttctgtgactttagtttttccttcaggattatgtttctgtgtcattcatattggtgtatgtagttatagttataattgattcatttactatgccatacaaattctgctcactgactagaatttatttacactcctgtcagtgaacggttaggttgtttccagatttttgacattacaaatgatgctatgcttatccatgtacatatttcctcattcacatatgcaagagtctctctggcgtttatacctaagagtggaattgctagggtgtgagcttcttcaactgtactagttgatggcaaattgtttcccaaaatagttgtactaatttatattcccacctgttctgtatgagtccctgttactccacagcctcaatattccatggtattgccagacctttactttttgccaggctcgtggttataatatggtcaccactggtgatttcttttactcccactcctcctatccaaacccctcataatgctattcaagtcctaactccacaaattcttacataatgcttcgatccccatggataactctgaactcctactctactttcaatcaaaactggatagttaatgactacttattttctaattatttcatgtatgttaatcatagcttccccgacttttttttctttaggtcttttaagctccttcaagtaggaaccttaccaaatacttgatttttataattcacagcatctaaaataatgctactgtgaaaatgtaagaaaaaactgtatcacaggttttttcttttctcttacacagtcactcgac

SEQ ID NO: 58563 - DNA, 1098 bp, Homo sapiens
ttcttgcagccactataagagagcttactgtgttaggtactgagggtatagagatgtaaagacatgcttctctgttgtctgaaagtgtgagtctaggagcctggttagaagaaacacatgagaatggctacaatactacaacatagtaattgtaacagacaaggggaccagctgtagtgggagcagaggaggacacacttattgtttctccagcacaccatacacttttatccctagatctatgtgcatgtgggctagaatgcctcctctgtgtttgttcacttggtcaagttctactcattctatgcaaactggacactgggagagaaagagcaaggagaagaggaaggagagtgactctaaagaggctaaggatatctgacacacaggccatctttctatttactgcatagctcttacatggaatactctgtaataaaaacctattggtaaacatttcagtgtgtctacttttttgctagcataaaaatgctgcaaaattccaaagtgttaagttcagttcagggtagcttccctgctctgttaattaaactttggaacattgaaactggctagggaaaatgattggatagaaactattattctattcatttatccccagcctacaaaatgaaaaaaggtacaataaacgttattgtatgtacatctttatgtagaggtctggttaatttattcaacaaataaatgagtacctattaatatttgtgctagaaatacaagataggaccccaccctgataaagcttacgttttggtgatggggagacaaacaataaactaaatgaatatcaaactcttagtgggcatcatgaagaaaataagtaggttatggtagagagtaaaggaagagggtgctttaggtagactagtgaggaaaggcctctccaaggacatgacattcagactgagacttgaaggatgagaaggagccagctatggaaagaggtgtaggaagagcattctaggtagaggagcatcagggatataggcctgggagccttgaagacctcagagtgttcaagaaacagaaagggggttggtgtgacttgactgtaaagagtgaggggaaaacaggaca

SEQ ID NO: 58564 - DNA, 1052 bp, Homo sapiens
tttaagtgacatgatgacaagatagtggctggcttggggacattggaaaagaaggtagatgccatctgctgactgatgatcctataacaaatagtaaatagctttgctggtttttttttttttaagagtattataaaggcttttagttggtattacaatttttttgctatgagaaagaagtaattagaggagaatattttgttcagccttatgctgtaaagggaattgaggcagtttgggaagaagcttgaaaggcttaatttaatttcatggcaagactgatttaatggactttccttcattggtgtattaaggccaatggtaggaagtatagacttggggatttgctcaatagtaaacagctagtggttaataggtggtaaatgggtagtggttactggatcaggaatcacaggaaggttctgggtcaaggtcttcagttaaggtaggcagcatggaaaatttccattcaaaagagcctttgaaatgtgctccatctgttttacagaaactgttataacagtttagagaggcaattatgatttagcagattaacagggtgctggtcagatggaggccccagagaattgtttgtttacaggctgagaagtggaatatagcacgacctgattggagattcctagaacattaataatctgggatgatactggaaaatgttttgccttatttcattattttcagtagactctcatgccacctgccacacaggagacatgagcatcagactgaccagaggcggaagaagaacacttacaccataaggatatgccctaggttatcctctgaggctgggcaagggtctcctcattaggctgtttcttattaggactttggactttggattgttagaaacactcattttgctgaagatcttcctctctacattaatacaagcttagtctagcctagtgattctcaaccatgggtgatttttgcctcctcagtggatatttagcaatgatttggcatcatctagagacatttttggctttcacagcttgaggggggtgcatctagtgagtagaggccaa

SEQ ID NO: 58565 - DNA, 1197 bp, Homo sapiens
actgaggcaactggggtctggagcagatccccagtaaactgcagcaaccctatggtagagtggccagactgttaaaagaaaaccagaacccaggatgtagagctggcagtgcctgacggcgcgtctgacgcggagttgggtggggtagagagtagggggcggtagtcgggggtggtgggagaaggaggaggcggcaaatcacttataaatggcgcggaagcaggacccgaagcctaaattccaggagggtgagcgagtgctgtgctttcatgggcctcttctttatgaagcaaagtgtgtaaaggttgccataaaggacaaacaagtgaaatacttcatacattacagtggttggaataaaaattgggatgagtgggttccggagagcagagtactcaaatacgtggacaccaatttgcagaaacagcgagaacttcaaaaagccaatcaggagcagtatgcagaggggaagatgagaggggctgccccaggaaagaagacatctggtctgcaacagaaaaatgttgaagtgaaaacgaaaaagaacaaacagaaaacacctggaaatggagatggtggcagtaccagtgagacccctcagcctccttggaagaaaagggcccgggtagatcctactgttgaaaatgaggaaacattcatgaacagagttgaagttaaagtaaagattcctgaatagctaaaaccgtggcttgttgatgactgggacttaattaccaggcaaaaacagctcttttatcttcctgccaagaagaatgtggattccattcttgaggattatgcaaattacaagaaatctcgtggaaacacagataataaggagtatgcggttaatgaagttgtggcagggataaaagaatacttcaacgtaatgttgggtacccagctactctataaatttgagagaccacagtatgccgaaattcttgcagatcatcccgatgcacccatgtcccaggtgtatggagcgccacatctcctgagattatttgtacgaattggagcaatgttggcctatacacctctggatgagaagagccttgctttattactcaattatcttcacgatttcctaaagtacctggcaaagaattctgcaactttgtttagtgccagcgattatgaagtggctcctcctgagtaccatcggaaagctgtgtgagaggcactctcactcac

SEQ ID NO: 58566 - DNA, 1010 bp, Homo sapiens
agaatacttgctagttgattctttgttttggcaatttgatggttttgatgaatttgctgtgatccaggggtattcaagtacttctctgagcattggcctctggctgggaacatgcttcaacagtcttgaaatgaggtccctggctccctctgttacaaagtcagggaatgtgaattctcaacccgtgatattcttttgtaggtctcttggtatgtatttgcctcaaaaggaggcttcccaactaaaaattcacagcaaagaactccaaggctccagagatccaccttctcatcatgcatccgaccttcaatcatttcggggggcaggtagtccagggtgccacagagagtggtcctcctggaagatggagcatgttctgaccacccaaaatttgcaatttcaagctctccagctgatccaagaagtaagttctctggcttaatgtctctatgaataactgtttttgaatgacagtaagacagggcacttgccaattctgtgatataagtagcagttctctgctcatcaaactttgaaagtttctgaagttctgtattgactgtttcaagtggtgtatattccagaattaggtagactctggtggcatcatggaaataaccatacagtctgattatattaggatgttggaggtgggactgtatttctacttctcttctgagttgatgctccactcctgctttctccagctgagctttaaataacaccctaagagccagaataaacttgctttgtttttctcttgccaaataaacattaccaaactttcctttacccggagggcgaccaatttcaaggtcttccaaagcccattgcctctttttgattcttcatttttctgttttgatgccagttcctcctcaggattattttcaggtgccgacagcggggactgcttgctgttttgggtgttattcagtggcctggaggcaggatgaggtacactggttgcctgcaattgcttctgcttctgattctgaactggcttgtga

SEQ ID NO: 58567 - DNA, 1080 bp, Homo sapiens
aggtgagcactgcaggaggctgtgtagatggcagacaccaaaggcttattgctcagaggagataaaaacaaaagtcattttgattgacgacagtcccggtgaacctgaatgagattaatagtcatctgctttcctcagggctaccacgatggctgggtgcctgcaggactgctaagatccactgactgtctgatgccctctctcctgggcctgagcttgtctccaggaagcactgatgcaagtgcagatgcatttgagttgctccgaatagcaagggggtgatccagtagagctcagtgttactgcgtggggagcaatggtcaactggaccctgatgggacacccctaggacacaaggttaagaccactctaaagcaaagggcactctacttagtcatgctgttagcaaggccacgaggttgcttgacgcagtgtctgggcacatggtaagagctcaagaaatggttgttttttaaattgttgtttttataagggtccttaccgatgggtattgaatattcctctactcccttcaccgctaagattttgcttgtataattattttgaagtgatatgaattacaaatatctttttcttttttttttttgacagggtcttgtgctgtcactcaagctggaatgcagtggtgcaatcaaggctcactgccgcctcaatctcccagcctcaagcaatcctcccacctcagcctcccgagtagctgggactacaggcacacgccaccatgtccagctaatttttaaatttttagtagagatgaggtcttgctatgttgcccaggatcgtcttgaactcctggcctcaagcgatcctcctgccttggcttcccaaagtgctgggcttataggtgtgagccaccatgctcagccataaatgccttgtcttttttttttttttttttttttttcctgacagtcttgctctgtcgcccaggtggagtgcagtggcacaatttcagctcactgccacctctgcctctcaggttcaagagattctcatgcctcagctttctgagtagctgggattacctgtgtgcaccaccacacccagctaatttttttg

SEQ ID NO: 58568 - DNA, 1511 bp, Homo sapiens
tcatccaggctggagagctgtggtgcaatctcagctcactgcagcctctgcttcctcggttcaagtgattctctgcctcagcctcctgagtagctggaattacaggtgcctgccaccatacctggctaatttttgtatttttagaagagacggggtttcaccatgttggccaggctggtctaaaactcccaacctcaagtgatctgcccaccttggcctcccaaagtgctgggatgacaggcaagagccaccacacccagcctcttattctttaacgtaggtgtttttttaatgaaatcacgataaacttccctcttagtactgcttttgctgcatcccataagttttgctgttgtatttttgttatctgtcctggagaatgttctgtgtgtgcttgagaagaatttatattgtgctgctattgggtggaatgctctgtatgtctacgtgtccgttaggtcaatttgttctatagtgttcttcaggtcctctgtttccttgttgatcttctgtctagttattctatcattatcgaatgtagggtattgaaatcttttattgttgtgtcgccgtctattcctgccttcagttctgtcatgtttgcttctgttctgatgttgggtacatatgtatttataattgttatagcttcctcatgaattgatgcttttatcactacgtaatattcttctttgtctgttgtgacagtttttgacataaggtctgttttatctgatgtaagtttggctacctctgctctcttttggttatttcatcctttaatttttagcctgtgggtgtccttaaatctaaagtgaatctcttgtacacaacatatagttggatgttatatttttaatccattcaacaattctgtcttttgattacagtgtttaatccatcttcatttggtgcaattagtgatagggaaggacttactattgccattttgttaactattttccgtcttgtaggtttttgtccctcttatcctctcttgctgtattcctatgtgtttcattgatttttttgtagtgacctctagtgtaagctgggttctatcagcatctaaaaccagtccctctggcagtcccctaaaaatcagagcattggatccgtgctccactctttttccccatctgttgaatttttaatttcatttatcatatttttaatttctaagttttaagatttttctcttaagcttgtctgcctttttaagtagattcttggactttgcttattttatgatttcatcttcatttccttgaacatttaatatatagtaatttgcatccttgcaatttaatatatagtaatttgtttctggtaattccattatctgaagtccctaggaggttagatttattgttgatatctgctaattctcattcactatggttgtttcttattgaattgctggtatttgatggtgtcattcactatggttgtttcttattgaatgtgctggtatttgatggtgaactcctctttgcctgattgttatttgt

SEQ ID NO: 58569 - DNA, 1024 bp, Homo sapiens
tgacacctagcagaagtgctagctgctgatgctgctgttattattccatttaattaaagcttgaaagaagtaaatttgccagttttaagtgcatctcagggttcctgaattacatggttttcattttttaaatttctgtattttacatcatggatttattcctttttataccaagaaaaagtattacatttacaacatgaggtctttctgttttactagaatttttgtagtaagtgtaagagggccactgtgaagctgaattatctgcaggcggcttggtaagcagggaattagagcagagtacagaagaggagagttgtttagtgacatagatgtcctcagtgggaatggacgtatttgtggtgttacataatgtttaagagcacaaactttgtagacaggacattcctggggtttatcccgagctcagccttttacaaggtgtattacattgggcatgtctccttatctgtaaaacaaagataatacacacctggttggatggttgttgggttttcattggtaggcttatataatatacttttgtaataatagatgttcagtaatggtatcaaagaagcaaggaatcaaaccaaaatgatgagaaagttcacagttgttgatcaggatgtatttctcttaccccacagtcgtgatacaactaaattcatgttctttgggcttgccttttctccatgcttaccagtttcttcattttaatgcattcattcttgagactgagtacaaatatacttgaaatgattacagctttaaacatgctaatggaatctctctcttgagactgcattgattttactgaacccaaatataaaggcaagtcttaagtcagggatttacagcttgaagataattttcataatgtcattgtgtatgctggaatatagtattcttctgttgtcttttctgaatcataatgcttatatttttgccccttagaaatgatagataatagtttgatgagctagaagcagagttaggagaagctctttttttttcttgagac

SEQ ID NO: 58570 - DNA, 1188 bp, Homo sapiens
ctcaaagcatgagcctgctttcattctttatttgctataaaatgagttcgttgcctagaagcaatgctatgtggaataccatgatgctaaagaaatactataatggtgaaaatgtattctgtaagtccaccagtgaaggttttgtcatagcattgtggacagagaagacaaatacatgtctgtagcaagtatctgttccaatgagaatagacaaaacaccttcccttctattatgaaagtagtctaaaataatcaacctgtcactgggtgactgggtaaccttctcttacccacctgcccactccaccccctgccgcctgccacccccaggagtggtgctattttgggagctcagtgttgttctatgaagctgacagattagccttagtgaatgttcatctatgttgctgggcccatgcataaccttcatccctgccatcatggctactttgttcatgaggccattgggcaagaatgggtggctggagaaagagagtaactgatgtatacagcatgagtcatcttttctgagtatgtacatgggaaacagtgatctccatatgctgtgctcattcagggagatctattcacagatttcctccttgttactaattttcaagtcatactctttctaagtccttgatcattcagccaagccattagcaccagtctgtgaatctctatagatttatactacatactctctctctttctaggcaaaataaacaaccaggtacactgctcaaagttccgcctgtactcttcctttggtaccaccccagagtgggactctagtgctccatctacttatgggtggtaccagcatattgtgcagaaacaactgtaaataagacttgtattgtttctttcttcatcaccaggtcctagggaactccccatgaggccatacttgttgatttagacatcaatgtagcaggggagcaggagtatgggtcaggagcatctcatgcaatgtaatttgttccttcaagacctgctcaagctttatctaatacataccatttgcatttatagtggaatgttgcagtgcatgcccaactttttggcttgatgaatcggacaacacccagctcataatgggaagcttatgttgaatggtaacttggtggcctatggtcaattgctcagtgtttactagagttcggtagtaagctactagctgcttcc

SEQ ID NO: 58571 - DNA, 1038 bp, Homo sapiens
tttaatcactgtgctaaagtctgtaggaatgaatgaataatcaaaacatatttttaatggaaatatttttaatttgaacccccatctttttttgctttaaaaaactgataatccagtttatatagagagagccttccttctttattgtgctgtcttccttttggttatttcattgtaaatcagtacttccgttagaggatagcagtggaaaagagaagagttgccaggttaaaatggattacatgcttatttattaaaaacattagtttagtgagagacaaagtagaaatcattgcattaaatggcctttaaatagcctgtggatttaatttctctgagttctctgtgatcttaatttaatacaaataattgagggttttttgttttatgtgtttttagtctgtaacttctttttgtgtcttggattgaaacagtattcattaactaaaggctttgtgacatctaatgagtatgaggtactgcactggggaagcccagtcgtagggctgtatgtatttggatgtttaatcctttgtttcatacatgaaaatctgttgtgagctgagtatctggtacaaagtgttttgtttggtatgagacaaatgagtcagcactttttctgccctttggagacatacaattaattatttaattatagcgataattgttaagaaggtaaaaaccagatgtatatgcaaattgttttctctatatattatccaattaggtctcggatggtacaaggtagataagagatctactgaattacaactcaggtggcctgagaattgctgtttaatgttgggaaacaattctagctgacagaaacatagcatcctgtgtgtacctttcttataaagtaccatatcatatggaaactgttagtttttcctactaacctttaatattttgggccatttcttgtaataatgtttatttcttcagcaactataggttgtcaattagtattggttaaattcaacaattcaactagacaatgtaatgttgaagtgtagggacttcatcttattcctgaag

SEQ ID NO: 58572 - DNA, 1046 bp, Homo sapiens
tttatggctcttcagagccttcaaacagttgtttttaatattttgtctacagattatatttttgtctgctgataggtttagttagttacaaactattctttgttggaagcagaacttccctactcctttaataaaatgactttgagaaatgaaagtttggttattgtttctaaattgcaatgacctgtattggtgctaatatcacttggccaaagggtggttgtggtatgcaaaaatagcatattccaaagtcctgagagcagagctgtgacagccctaccttcaggtctaatatgttatctgactttttaggagtatttgaatattcggtcaccaagcagatttagtgactgtcataaaacattgcaatttttaaaaaatatttctaaggatgtatagccagtgagtagaagaacttcatttcagtcagtattaaaggcggggaaaattctcttattactcaggaatttgagtctggtgctccatgggatgcagcactgaagagctaatgaaatcattatctctgcttactttgactacactgcacactcagggcaagctttagggtcacattaccactgctgcagaaagaataaaggaattcacagtctactggattaagtggaaaacttgaagaaagaatgacaggattggaacttgtgttttcagataaaggtagaaatttaaaattcatagacatgctgtaattgagctaacataatttcttctatttaacagccttaggattgaggtagttccaaattaaattcactgtttaatctagcatgagctgaattgatattcttgccacattttctatttgagaattaagctattgatcaggaaagtgagatcagctatcccaaactgtacttcaaagagtccttccaaggaaaggttgtctcctaagtgatgctgtagcaatcctaaggaaagatgtaatttttgaaaatatttgttttggtggatatcttataatcagaatatataatatattcagaatgtataatatatgtaatataaaatatatgctgtgtattctgatt

SEQ ID NO: 58573 - DNA, 1034 bp, Homo sapiens
aattgtacacagtgtccctgtccatggcccacatagcttttctacttttcctggatttagttgtgggttactctggcaaattgagtgatttttaagtggcatctagaactactcaggcctgttgtgctagctggaatacacagcaatgcgactcctactctgtctttcccaaggttgtataaacaaagttgtacttattgaaacatgtgaacatgaaactgaatgttgctttctttatctgaataactaaaacgtgtacttgatgatgataagtaatttctgtcataaaatctactaatcttgttgataaagtattgcttttccaaataggcatataaaaatgatacaattttgttttctttaacccgtgaaaataaagatgaagactcactaaatgtagccagtacactgtgtgtgtgattgttttttgagtgatttacatgtatgttgatagatttgctttcttttagaagttctgaaggaaaagcagatcaagtcttcattaattctcatgtgtttagaacattcagcatttgacctttcccatttaggcagtagcatctcccagtcagtcatacttaaaaagtaatggaatgtgaaacaatccatttttccctagcattgaaaaagacagtaaaatttgcttccatgtcttaggtatactcataaaaggcaggtaattatcgcacatttatatgaaataaggattcattgtaatctcacttctagaagtgtttgggtaaatttgttctggtttgatctgaatttaagctgatccctctcctttatcctcttctgtgtatcagatatttataggaattactgccttcctttgcaaacatcaatgatagataaaagaatctaaagttgatacaccaactgcttaatactgccaaaatacaaagttcttaaacgtgtttggtttttggaattgttaagtatctttggcttcaatattgttcccataatatgctcatattatttgtattacatattttgaattaatggaatccaattcaatgagttttcatagt

SEQ ID NO: 58574 - DNA, 1039 bp, Homo sapiens
tcatccctgacatttctccctctttttaggacaccagtcatattggattggaaccccactcttctgaccttatttaaccttcattagctccttgaattccctgtctccaagtatagtcacactgggcattagggattcaacatatgaatttaggggggcacagttcatttcataacagggatccaaatccagctgacaattcaagtgtttctttgtgaggagagatgcttgatggaataggaatctggtattccattatccttactcaatataccatgtaaaacatcctaatgttccttcttacagcaaccattcttcgacaactgcctatcatttttagtcaacacacacccaaacccacgcacatcttcttgttatcgcttatgtttttttctctctccttgtccaaagctgctgaaggagaggaaactaaggattaaacaatatactcaagacatctttgagatataggaacccaatggctgtgtattgttgttttattggaattaaaaattccagttaaagttctgattagaactttggccctgcctacacgtctttttcttgcttcttcagatggaagtggagtgaccttctgtttaggtgttgtttttgttatggatgccccagttttcacaaaatgattttaatcctgtccctcagctcatgtctgttctttgtagaacggaataactgcattccaggtaccagtcagggattgaatttatgaactaattgcagtcaaaaacccaacttaagaaataattaaataaaaaaacaccccaatacttttggaggaattcctgaagaatttgctgccagtctatttctttagattagttgttctgaaacatggagctgccaggaaacatcagtatgtttctgttagttttgagatatgtcccagccgattctaagagaaaactaccaaatttgccagtaatttcataaaaagtaactggagtaaattcaagattattcatatgacagtgttgtcttcagtatactgtaatttgatgtactttgtcaagacaagaga

SEQ ID NO: 58575 - DNA, 1023 bp, Homo sapiens
cacaggagaaggacagatgagtgattaagacgaggttttattcattcaatttacaaatatgtactgaccatttagtgctgggtacttttaggtgctggatatgcaatattgaacaaaccagacatggatcattctttgattgggtttatggtccagtggtggagatacatgattaacaggtaaaccaaaatattacataacaacaagctacattcaattgtaggcaaagatcagggtgccatgaaagagagtaacagaaaggtcccaggctttatgtggtcattttgaaataaaaaggaacttaggtgggaagataggggaaaacattctaggcaaatatccttgtcttttattccgctgagaaaatagaaaccaaaagtcatgagtactcttcacttaccattcccataccttaaacattactgttgagaccaactgatgggagggatggaaggcaagcaagatgacgcagacacagggcaccaggaggaaagtctgttactactacgacggggatgttggaaattaatattatagacaagaccatccaatgaagcctcaccaaatctactactcacaatttgctgcccagctatggtctccactgaacaatagaaatctgtcaccctcacaaacccagtactgaggagatgaccaagtaccacagggatgactacattaaattcttgcgctccatctcttcagatacatgttcgagcacagcaagcagatgcagattcaacgtcagcaaggactgtccagtattcaatggcctgtttgaattcttacagttgtctactggtggctctctggcaagtgctgtgaaacttaataagcagcagatagacatcgctgtgaattgggctgggggcctgaaccatgccaagaagcctgaggcatctggcttctattacatcaatgacattgtcttggccatcctggaactgctaacctatcaccagagggtgctgtatattgacattgatattcaccacggcgatgggatggaagaggccttctata

SEQ ID NO: 58576 - DNA, 1114 bp, Homo sapiens
ctccgagatgggattgacgacaagtcctatgaggccatttcaagttcagtgctcttacagtgtggctcagactccttatctggggactggttaggttgcttcaatctgatcatcaaagcacatgctggcctgtcgtggtggctcatgcctgttctcagcattttgggaggcccaggcaggagaatcacttgaggtcagaagtttgacaccagcctggccaacatggtgaaaccccgcatctactaaaaatacaaaaattagtcagacatggtggtgcacttctgtaatcccagctattcgggaggctgagtcatgagaatcgcttgcaccctagaggcggaggttgcagtgagctgattgcaccagggcactccagcctggagaactgagtgagactccatctcaaaaaaaaaaaaaaagggttgaggggggcatgccaagtgtatggaatttgtcaagagctttaacctgcctatgctgatgctgggaggaagtggttccaatttgtaatgttgcctagtgctggacatatgagacaggtgtggccctggatacagagatccctaatgagcttccatacagcgactacttggaatagtttggaccagatttcaggctccacatcagtccttccagtatgactaaccagaacacgaatggtacttggagaagataaacagcgactgtttgagaacctgagaatgctgccccacaaacctgggtccaaatgcaggtgattccagaggatctgtccctgaggagagtggcgatgagagcgaagaagaccctgacaaatggatctcgatctgttcctctgacaaacgaattgcctgtgaggaagagttctctgactctgatgaggtgagagagggtggccacaagaactcttccaacttcaaaaaagccaagagagtcaaaacaggatggaaaagagaaagacctagatgagaagagcaaagtcacagaagaggagaaaaccaaggaggagaagccagaagccaaaggggtcaaggaggaggtcaggttggcctgagcagacctctccagctctggcttcttgccaagtcccctgcctttctccaccaacacctcagattttatgctttctatttct

SEQ ID NO: 58577 - DNA, 1038 bp, Homo sapiens
tttcattccccatgacctcttctttactaatattttagtaaatgatgattttaaaataaggcatatatttggcataaaacaggaaaaaattataatctctgtattaatcttaaatgtaaaaatctgaaacagaagttaaaatctgttttataagaagtaaattcttatgttaaaatatccaaatttgaaaatattccctttgaaggaataagagaggcatgctattttgaatcaatgcatttggtgagtgtgtagggagatagtcatagttgttgtgtgtgtcccaaagtcttacacctctttttggcccactaatcaaactagaaatgtcacatgaaacttcttgagtgaactagtaattttacatttgctaaaatagagctataataagtggctgaatgttctgattgaccacacataatgtagagtttatttcctagcaaataatgaaagatcgatggatgaatgttggtcatgaagaggaagaactaaagccatatactgagcctgatccggatttcaatgacacaaaaagaataggtaagtatttaaacatggtaagaagtgctgtccctaggcaacaagtaagagtcctttagtgtgccaaaatagtgtttaagagtataaataggaagcaatttttatttgaaaaatacttgcattgtcattttaatgataatatgctgaaaattatacatttcaagttccctaatttgttcccatatatattatggtctaattcaatgtttgacaacagtgatataaaacctaatgtaaataaatcgaattctttcctttcagtgatgcccagcaggaggaatggctgatgtaactatcagcactgatcagactgataagcatcagcgaacatagcatgtattttaaccaaagacatagaggcaccgaattaagagttgaacactttggctctccctttctttttccactgtcttagcaatgtttattctccctcctcactcgtcctgctactgcccatacccaaccagagctctccttctaacttgttctcttcatttc

SEQ ID NO: 58578 - DNA, 1024 bp, Homo sapiens
gggactgacctgatttttgaaatcaaaatttaatcttcgttcagagtttaaagcatgcaaatatggataattttaatacagagtttttgtttgtgagcagaaagtagatcagttgtttttcagctcattatgctatttttaaaaaaattatagctggtccatccattcctcctgctgtatcatataccaaaagacctcaggctaacagtgtggaaagtgaacagaaagaggagtgggacaaagatgtggctcgaaaacttggcagcacaacagttggatcaaaaagcgagatgactgcaagccctcttgtagggccagagaggaaaaaatcttcaactattccaagtgtgagtaaatactctggtatattgcaatttattgtaataacttgttttagggttatgtgtaaaatttttatctttcatttttttaaatgattgaaaaatttaaagggaattataatttaaagaacatgcaaaagggaccacacttctcataaatgcaagttaaaaacaacaaaaaagaattcttttttgcatgcgttaacacttaacctcaacacaaaatggtacatgaaactttcctgcttcattttcctttttataatgtttatttaatattatattggcacatttcatttttatttaccaataagctgtttaatgaaggcagactcagttaaataattaatttataaagttgcctcacattattcacttaaaacagcaaactagaaattatataatgggaactagaagaagatgctctcccataaggcagcaggaaagaatagagataagaaaatataaaagaaaactaagatatacgaaatgtagaaataagacttggtaacattcagataataggtgttttgaaaggaaagggagcaaaatgaaggaggagaaatagttaaagaaataataacaaaaaataaagagggaagatttcattttgaaaagacccagagtgacaaatagaagccagaaagaaaacctattcctggactcttaaaatagaatttata

SEQ ID NO: 58579 - DNA, 1032 bp, Homo sapiens
acaccaaactgtgactttggggaagtaaaaaatgactccagtcataataattttatctgaaactatcgtatatccacaaaaataattttgtactttctcacatttacatacatagtgtgtgtgagatttttttcatagatgatagtgataaattcaccctgtatacttttcataagaatattaattgttttgttagtcattaataatgccactaatgttagtttctttcaaatgtttcagtcatgaaaggtgttagtcagtttagattttttaaaatatagttcttaaattttagtaaaccacaaattttcctctttttttccatggtcttctcaactgctttatggtgaaagccttacggagatgtctgtgagtagcatatcttctgcaggctcttctgtggcctctgctgtcccctcagcacgaccccgccaccagaagtccatgtccacttctggtcatcctattaaagtcacactgccaaccattaaagacggctctgaagcttaccggcctgggtaatgtgttggttacatctcattttgttcattaagagtttctaaaaatatagcaccatgtgaaaatacatgatagtcaccatcacattaagacctttctaataagattcagtgtttgttatggaggaaaaattgaattgtaacataaactttctatgtactttggctgttattggaaatgttgcatataacttaaatcattttctagaggaatttttttaaggatttgattttacatccgtctataaagttaaaaattgctgtttaatttgtcatttaggtaaattgatttttttattatttaaaccatacgaacaaacactagactgtgagttgagacccgcagataatgatcaggctcaattccttgttcttaataaaaccaggcttcagttttcctgtcaatgaaactgatgaactcaaagagcctgttcagatataaaattgtataattgtttttctagtatttttctattttaagatttcccaaattcagtacatctgaacattttaa

SEQ ID NO: 58580 - DNA, 1024 bp, Homo sapiens
gcagaggctggcctggttccgcttggaggcagcaacattgcaagacctttgtctcagactcaaactcacttggccaacctcatcttgttctacaacaaaaggacctgaaagctattttacttctcccagggccacagagacatatttaacagacctgcagaagcttctaaccaaagcagaacccccagacaagcagcagggttgactaagcagtgagggagagtctctgagccaggctcatgttcttgtttttgaaactggagattgccatacatcagccagacactctcccagaactgtttccgccaaataagctctttctggggtcaccaacttttagacccaaatcatttggccagacctggataattgtctggaaaatgattgttaggtcccaagacggggtgggtggagagttctgaggaagtagaaagctggagggaagctgttgggaggtggaagaggattttctgagtgtgccctggtttgtttctctgcaggttttggctggtgattaaggaagatggacacatggtcactgcccgacaggagcctcgcctcgtgctcatctccatcatttatgagaataactgcctgatcttcagggctccagacatggaccagctggttttgcctagcaagcagccttcctcaaacaaactccacaactgcaggtgttccgcttgggggcatccacagaactgcaacaggcttggtttctcttcaggctcctccttgcattctgtcttgctatagtttctacagtagaggatgacattggtaaaggaaacatttaagagaagtgcagtttgagttgggattgggcatgagtggatgatgcagggtattgttttcagggtacctaggatttgttttaatcaggtatggttagacacgcagacatagaaatgactgtcctgaaaaaagaagatgttataccaacagattctctagaaactggaggcacgctacgccacgcaaggccaagtgggggagtaccagggtgggtcaggaggcagaggga

SEQ ID NO: 58581 - DNA, 1168 bp, Homo sapiens
ttctgccatgagctaaggtttaaaatacaaggacctcagggaatttctctccatagcccctaaactacaagctccttgagggcaggggtttttatctgctttctttactgctgtttccccactagaacagtgcctggtaggtgctcagtaaatgcctagtgagtgaatggtgttgttgaggaaattattactggagtatagctgattggcagcaggtcctcgctgtttgaggatgatgggggaagggggtcgctgctggagtgggagtgggaacccaggaagaggaagcctggtgagtgacattggcccagagccggccctggctgcagccctgtccctgtgtatgggcaggaactgctccagctcctggccactgcaagcccaaactcacatctctctccttcctgaacactgctcccctcttctgcactgaagaggttttgcttctggacattacttagctttgtagttggtctaggccattttgtggagtggtggggcctgactatcctgtgttcttggcaaggtggcctacccagactactgcccgctcctgatcatgacagatgcctccctggtagatttgaataccaggatggagaagaaaatgaaaatggagaatttcaggccaaatattgtggtgaccggctgtgatgcttttgaggaggtaagcgacccactgcttttgtgcatcatgctcagatgtgctgctcgcggtgctaagggaactctgctctagccagagccaactcagatccgccagggtccagtcattcactcattgctgctgccatcactcattgcttgcggagttgttcacccattgttgctgccatcaacacgctggcctcggggggcgttgctctcacccgttaatgcttgggccccaaagcaaacagtcaaaactcgaaattgtagcaaatctgaggttggaatatgtaatcatagctcagagataactgagggaagcgaagataaagagaaagataaagccattttccacttctctatcactcagcagagctctcaaagatttgagactttcagaagacccatgccccaaagtgcagaccaagaggacacaggcaatctgccccggagacataccatgctgtggcctgagttctctcccagggcacccacatgctcttctatgggattgacacca

SEQ ID NO: 58582 - DNA, 1052 bp, Homo sapiens
agtcagtggcagtgggatcaggaccccattagcaggctgcctgtctgtgaaggtggcagcaatgaatgtgtgaatcatgactgccttctcttgggtgatgtccccactcttcaaagaaccttcagattgtaacttgggttccactgcagcttagctacaagggaagtgtgggtttgtcttgcaagttacacatttctcattgtatatctacacattgactttcctgttaatttatgactctcatggcaaactgcactctatagaagatctgtcatccctgcgatgatggaatcagggttttgagactgggagtcaagaggtggacctgaacttgccagcattctgcctccctttgagtcctctgggagatatttcttggtgtcaccttgtgctgctttcttctgctataatagtttcatacttaatatgagccaaagaataaacagactcaaaggctaatgaagccaccatttaaaagataactttctcttttctcttaggatacctgggatgaactcctaattggtagtgtagaagtgaaaaaggtaatggcatgccccaggtaaggagcctagctagaccccaggactgtggtgtggcccattcattggttcctaagcatcacctaacccttggttactgcataacaggtgtattttgacaacggtggacccagacactggagtcatagacaggaaacagccactggacaccctgaagaggtagaataccaccacagccagtgtattttaaatattatctccaccccagaactacctatgggtttaggtgctatgtctgctttagggaagatatgacctttctctccggagaaccttccagtctaccttctgactgattcgcgtctattggttaatgagagcactgttgcttcctctctttttctggatggatcctctagtgctttggataaacttttttttttttttttttgagaggagcctcactctgtcccccaggctggagtgcagtggcgtgatcttagctcactgcaacctccactttctgggttcaagtgatcctgcctcagc

SEQ ID NO: 58583 - DNA, 1168 bp, Homo sapiens
agacaggacactggaaaaagattaacatctgcagtagtccagacccatctgccaacttcatgtctgtctgaatttttgttcaccagtgaaccccagctttgggctcataaacctggagggggttgaaagcatggtgcttaaatgcactaaacagaagatttgtagagttcagggccattccattttgagttttaggggcatttgtttcaatgagttgtgaagttgaaggtacccatatagacaaagtatttattttatacttacacataagtttttttctttttggacttaaactgaagccatggagaaattgcgtagactttcaggatacttctagaaaaactagaattatttgcagtttgactaattgtccacagacttctctcgcaacattttagaaaattcttgctgtgtatttataaataacttggaaggcaaacttgagttctattgagaatacttcgattattatttcctttttgtgtctgatgattgaatttttgcttgtttcagctaccgcctgtgtgatccttctgagagggaattgtacaagttgtctccactttttgggatctattattcagtggaaaaaattggaagcctgagagttggtgaccctgtgtatcggatggtgtagtgatgagtgatggatccactagggtgatatggtaaagggtcagctttgcttctgaatacgctgtcttgaagccattgctgcattttcttgtgttaattttttttatgttatgctgctttaattcttgagagaatgaacagttttatattctgatctttggagttggaaaatgcccttaatttctgttccctgcagtaatttgtgtactcctacctcagccttctccacccctatttcccatttaatggtaaaatgctgatggaagaggctcagcagaaagacaggtatatgttcacagctcattacagaatatcattaaggaatagggaaatgaaggtgattgattctcagagttatgtacattctcagagttatgtatttattttttctgtctcagatagaagggaaaatgtttaaattattcaacatcagcttgggaaatgtttaaattgaatgtcttttatcaaatgtatttttaaagtataattgaagtttgaaaaaaaatcagtgcatcatggtgactgggtcctg

SEQ ID NO: 58584 - DNA, 1054 bp, Homo sapiens
tccagtcatgattgactggacctggatcattgtgtgagccaagggctttcatgtgttctctgcatctgagggagcccaatggctgtgagataccataacgattgagggttttccatatcactccgtcacaaactcatccaatcagatcctgttttgcagtggatggaggcaacaaacatctgtggttcactcagcctcaatttccaattgtctctgctgcccagaaggccttgtgtaatctttatctgtgagaggatctctgtgagatagatatgataacaggcactttatggatgagaaacaaaggcttagataggtcagctgacgtagggcctgggagctgatgtgagttagagctaatgggccatgctttctgcacagcactgcaccatacatttatatgtgtaacctcaataagtgactgttttgtgggagtttgaattatttatgaacagtaggataaacaaccaaataaccagagattcttattatttattcaggcttcagcaaccaggagggattgactgagatcttaacaacagcagcaacgatacatcagcaaatccttattatccagccttcaactatctttaccctggaaaacaatctcgatttttgacttttcaaagttgtgtatgctccaggttaatgcaaggaaagtattagaggggggaatatgaaagtatatatataaattttaggtactgaaggctttaaaaataattaagatcatcaaaaatgctattttgaatgttatcatggctattacacttttacttcctgactttaatattgatgaataaagcaagtttaatgaatcaactaaaaagctgcaaaaatgtttttaaaatgtgtgccttttattacctatcagtctatgttttgggagaaatgggaagcaacagatcactgtgtcctgatgtgcaggacgcatgttaccacactcacaaatgcctaatattggtctttatgtggccattgagtcctgttgactttccactcatgtgctttttactctagcattatggaatctgggctgtacttgagtatggaa

SEQ ID NO: 58585 - DNA, 1031 bp, Homo sapiens
agaatcccagctttgagaagagcaaggaactttagagggcccctaatccagtagttttcactgcaggctgttcattggtatcacctgaaggtgatttataacctatgatgcccagttcgtgtgtccagaaagcctgattaaattggtctggggtgcagcctgcacatcaagatttttttaaagctcccaaagtgattctaacaggcagcaaagtttgagaaccattgatctagtccggtattctcattatgccactacaggaatggggcttgtccaaggtcacatgcatgattaattttagagatttagtccttaatgttaaagtaggtcttgccaggttcaacagattcaatagatatcaacagactgaggtattcgtatgtatcattatttaataacaacagaatctaatatatagcataaaatataagattttttgagtactgatgccttttttcttgaattttgagatttcagttcagaactaaaaagaccaaagtctgaggactttcaaaaccagcagttcatggtctatatatttacctggatattagaatatggaccaaatattaatgttgatttaatctcttcatctggggaacctagtggtttaagctgttaacctagtggtttcagctgttaacagctatcaaaacaggtatcaaagaagcccaaccatcttaggcttctagggactttttggtaggtggtctccacagctgtacaaacttgtgggcagaggagattcatttgtttgttcaataaatattgttgaatgcctttggtgtgctaggcactaatctgcaggctgggcaatctgcatcacaatgcttatcattcaaatgcaagaaagacaacatatatggatgggaccagtcttccagatcctttccatcttggaaattgtgttcatgtttctattcttcatcttcttctgccacacaatcttatttagggagtgtttcatcttcacgaaattttgttctcctgtgaagcacatgtttgtactttttttttctttttctttttta

SEQ ID NO: 58586 - DNA, 1050 bp, Homo sapiens
cccaacccattgttttttctggcctcacctgacaacggttggcatcatggctcctcccaagatggagtaatgggtcacttgccccagtatactgaatgcagaataactgagattagcagaactgagctctggcagaaggaattattcaccactcttctcggagcaccttccataccgtgttgcctaacctttccaagtagcctgcatcctgtgcccagcctagttgcacctctttgccctcagatactgacttttggggcactgtacatcactctcattcggcatcttttacctggtggtggtagtgagagatagtcgtcttctctcttctctcctcttgtgttctgagccaaggtacgcagtttctgggtcacatctccaaccagtctcctaaagtgtgttgaccaaaggtgttgctgagtttgaacacattgcatatttaaattgcaataggacatgtgggtgagcaagttagttattttgtctctatgggacagctttgccattctccttcttgtcttcccagtggggcattctgccttttgttaagcagtgttctgggaattatagttctgaattccactgacacaatctcctcttcccaccctccgctctcctcaaacttgccctcatggggctacactaccacaaaggcacatctctccttagggctggtgggctttgctgggaaggagaacatgaaagaattgtatgtagagagttccagaagcttctagacatttcctggtcgtggtggttgtggtgggttttcttgaggtcacaaatatgttcagatttcctccatatagctctgtattttattgtttctgtattcttgtatggttgactttgagtgattcccaggatatttaccctgctattgtcttaccataatcttgatgtgtctagcctcttacaaatgagaaaatcctaccgaggaatttcccatttgtaatagtttgtcttggggagcaaagaggaggatagccaatgatcatgatgatctcctcttttctcacgcagagcaggtgttcatgataaaaagcaagt

SEQ ID NO: 58587 - DNA, 1128 bp, Homo sapiens
gagaatggtgacggtcgtgtgtagacggatgatagatggcatttttcctgatagctcttaaagttcgtttaggtgagcgtctcttggcgtggggtttggcgtctttgctatgtgcatgtctaatagaagaagaagagttagcaagcctgagttgtagagtgcccctgtgcctacaggaggaaggagctgtctttttgcagacactctgaaatcagagatagatccggtgggcaacaattcactgtccctttcaacgagtacaggctaattgggaggtcctctttacggaatcagtactcttgaaggggggatatctgtatgggattgaaaccttatacaacgtggctgcctcccattgagagaagctctaggatgcacagtctgtgccagccagggagatgaagaggggaggagagcccaagttgtcctttccaggcaggaatgagggcgggggcaggtgagagagcaaagggtgagggatttgccggggctggggtttccaggtttccagatctggctccatggcttgagatttcgttttaggacaccagttagtagtgaaaaggggaaatgcagattaatttataagaggccaaaagacaacatgtgaggttttagtatgactatgttgtgcttttcaaaggaccccaatagagaatggaaggcaagaatagctccaagttaaagagattcacttaaggggatttgcagaaagttgacatccaccctgatgtatatttagctgctgtacctttctgtgaaccatgccagtgctcttggttacccctttgcctttgcagcgagtgagggaattaaatggcaagcatgcaagggtggacaaatgggtctttctcagatgtttgcagtgtacttctgcccgagagctgaggttcagaatagatgcctcttaagagcctcccttctgtcttcagcttttctaattatttgtgcttataccttctctacagctgaacttttatgtaggtccaggaaaggttgttcattaacatttacaacattacatccaaatttaaccttagacttagcaaccaaattgattggagccctcaggtttgcatcctctttgaatacataaaaatgaatttcaagttttgataatggtatgat

SEQ ID NO: 58588 - DNA, 1020 bp, Homo sapiens
tatggagtaggagtaccattagcttggtttttgcctaccaaactaggttttcatctctactgaaatgttgttttctgattatatcttaaaatgaattggtctgtagtttctggaaatagctttgtcagtatccatgttatgtaatttaatatagcatcttttaaaagtctgaagtggaaaagatttagtgtttgttttctcaatcttagtttatgtacttaaactgtggtttttttctccctagactaaacccaaaccagaagaagaagtgaaacctgtgaaagaaccagacatcaaacctcaaaaggacactgggtgctacatctcctaaaatacaacttgcacttagaatttctctagcagtaaataagataaaccacagaatttcagttcttatttctcaaaatgatttctctgaagcttgtagaataactattatattcagagggttatctgccttcagcttacttgttcttaatttttaatacagcggagatgtttcttgctttgttttcagactctcctttttaatcaggacaacatttgaaagattttattgtgcctctaaagggtatatttgggggttgggtctttttgttaaactctggatagtaataagtttcaggtcagtataggcccgaatcatgtggtttcaggtatgtttttcttttttctttttcttttttttttttctttttttttttttttttttttgaggtggagtctccctctgttgcccaggctggagtgcagtggcatgatctcggctcactgcaaccctccacctcctgaattaaagtgattctcctgcctcagcctcccgagtagctgggattacaggcacgcaccactacacccagataatttttgtatttttagtagagacgtgatttcaccatgttggccaggctggtctcgaactcctgacctcagctgatctgcccgccttggcctcccaaagtgctgggattacaggcgtgatccactgcacctggcctcaggtatgtttttctatctaca

SEQ ID NO: 58589 - DNA, 1618 bp, Homo sapiens
aaatatctttttctagtgggttttttacttagaggaaagaactttgtaatagctcttaatgtttatatataagagaagacagaatggaaaatgttttttgaagtcaaatattgcatgatgtaaagaaaaaactttaaacttaaatgagtaggttgtcctgaattacactggtaactctctacttctttattaaagaagttatagtaagatgcctttgttacctgatttcagtgtacattgtttttatgtggttttctgataatgtcctgtcagaattgtattggtttaggccaaaggccatagcaaaaacatagagaacaaatatgatcttaaaaatagattgtaacattttaaacaattagtttagtaatttgggaaatagtggatgcataatactttaacagaagtcacacatctgtaggtttatcttttgattattctcctgaggcattagatagtttttctattataagtgacagattgactcacttaatataaataagtagcatacactaaaagcttactatgtgccagatactgtgctggacacttacatagataagccattgaatccacacagcagccctgtaagaaataagtaaaatctgcataaagtgttgaaataggaatatacatttcattatgaaaaatgaatagattatgcctatctgaatcaatattgcattcaaataagtgattacttaaatcatatatcatagtttacactccttaaaaaaaggtacataaattcagtgaggtttttttcttaacatacagaagtactaaatactgcttgcagtataatattgatattggaagctgcagtttccagaataagtggagtaataactaaacagacatttaattttatttcaatatctatggaaaaaacacttattaaatctccctgtattttatgttgtctttattacagaatcacttgtctgtttgttgtgtgccacttactgacaaaactttaaacagtacttgatgccagctctctactctgtggctgtgggacctgtttcttttaggtacttgtgcttattaatctacttactaaattttcacattgacatttttggggatgatactaccatatacgaaatggaaaatgtaatatgctcagtgcttctgtaaaatgcagcaatactggtattactttacatcagtaggcatctttgacatgagcatataaatattttgttgactcagcaaaggtgacactttgtgactaaagtatcccattatatataatgttttttgaaatgttggaaattttggggaattatcaaatgtatagaagttgcatgaaggttatagagaggtgtaactgtttgttaactattacatggatttcatactaggcagtgacaactaacatgttacttcaactaaaagtgtataatgggttgtctttttatttatgaaaataaaagtaattttacttacaatttcattgagatcttttgtttttcgacaaatatttttatacttactaagccagtagcagttaaaacagtgcaaaattattcttcacagtaatgttttaaaatgacagataaccaggcatggtggcttacgcctataatcctagcattttaggaggcttgggcag

SEQ ID NO: 58590 - DNA, 1026 bp, Homo sapiens
accttgtatcttggagtgaggtcacagaaggatagagcctgggggcaaaatgtctaacttgtctacatggggaccacagttcacattatgcatctcaggctccacagtgaggctgacaaactgcaatggcagtgcttttaaatgagatttgaggattcaccaagacccatggggaaccggggcagcagggaagccctcgcgtggtcttggatgaggggtgttaaatgtgtatcgtgctgtggaacatgggacaattccacgcacatcccaccgaatcatcacgcatcccattgactggcaagtactccccgccccctctgaaagcatgtcacatcatgtaaatttgcttctaacatctgcttcaaactgtctctggactccaaatttggatgggtcagcctctgcagaaagtttgtgttgagatgctggaagaacagcagagcctcctgcaccctcagcaagggaccagctcccaaaggaaaggtccttgtgtgacatttggagaatcttccttcatccagacaactctactcgaagcaagacgaaagcaggatgtggcagttgcagtgagaaaggaaaggaaagatgggcagactctgctttctggaaatttcttcacaaagtagagctcatgaactctgtgctgtcttctggtaacatatcatcagtgtttgtattcatggtgtggcacatggatccatggcattgggtaaatctggtggtttttacacatggtcagaatgtgttcaaatacatctcatgatggagacagtaaccaaggtaatgttttgtttcagcattttaaaaagactccacttaacatttatctcagaatcatgagcctctctctagttgacaattgtcattgttcccccagccccaaattgaaccatacatttattttccaaaacagaaattgtttctgtaaacatatccgaccttcaaaagaagtgtgaggttggatttttcccccttttatttgtcctaagattccaggaggctggcctcccagcccagatagctcag

SEQ ID NO: 58591 - DNA, 1033 bp, Homo sapiens
ccaggctacttctccctcactgttcctgccctggggacatctccagcggggtctgagtttccccgggctccagttcccgcgggatagacctccatggttccaccttccactagggaccccagcaacgagaccccttcatcccaccagcccaggagcggtagtggcttcctgctctcactaatcttggggtgttcctgctggcttctccactttgccatcacctcgttaaattccatctctttagatactcaagtcctggttttccctgaataatcacagtttgtcagctctgaactaagccctcaccagcatttctcgagatagccctcagagactcttgttgtacagctgaggaccctgaagctcaaagatgcacagggattggtttagggtgactcggctggtgagtagttcagccggaattcagacctaggcctgtctagagcatacctgggcttctactcactcctctagttgcttctgtgagtttccgtttccccttctctgaaagaaccaacaagatctacactacagtgttgtttgaaggactagagagtgcctgtagtgtgcctccaaccctgcttcacacgcatcgggacacctccggcagggtggcctgctctgcagggagggccatcttgttttccaagtggcacccactgctgccagtgagtagtttcagtggccagtgtggagagggcacctcttctggcctgtatggtgggcagtgcctgttctgcactggccagggtgtttggttaccccaagggagggaatcaaaagttaactctttttcgtttaggtttttttttttttggtcagaattcttactggtttctgtgagtgtgggtttgaagttggcactgatagaatctgtggtttgactgtttcttgaagaatgtttaagcagcagcactgtttatttctgagtcctcatccaagaatgagctccttgtggcataaaaagcaccgaactcccactgaagccgtctttgtggtgacagagatggaaccgtccttacctcgcaaccta

SEQ ID NO: 58592 - DNA, 1045 bp, Homo sapiens
tgctccctcttccttgggacagtctcccctcgcggcttccatgatgcgccctagtctcctctgccatctttttcgtccctgtagggtgtctcagcatttggactgggtcccgttcccttttctgtctgccctctccccttatgtgagtgcgtgcagtcccgtggctgtaaagattatttctatgctcatgattcctgagttctgcatttatcccagactctttctctggctgcctaactgacctggatgactttcccactggaagctcaaacccgaccagtgcaaaaccaagctctgtaccactcccttgccatgaaacaaataaacccaacaaaaacctagcatagtcagtagtaccacaatcgagccaggtcagaaatctgggagttatccttctttttctcctagccgcctaatcaccaagccctatttagaaacagaggaataacattcaagtcactcttcttcccaccacattggctgccactgtcctggtccaggccgccatcatctctccaggcatggtagccacttcctggcagtcctgccatgtctatccctgctctctaacagcctgttctccacccagctagcttttaagaaatatgccagttcccactctttgcagtgtcccttcacactatgataaaatcccaactacttgccgtggttccatgcagctgcacacacagtgtcccgcctgcctcccatccctcgtgctgtgtagccctctgtctcctgcacactcagccaccatcggcctctcttcactgcctccagcccaccttcacatgtgccatcctctctgccaggcacatcctcctccagcacttcctggaccgagtccttcctagtttttatgcatcgtgcattcctgtatgcatttatgatcggattagggcctctcatctctctgtagtgaagggaccagtgatttggttactgttttctaatacgttgcagaccaataatacacaataaaaacagatactagataaaataaaaagacaaacacataatacaagtcccatttttaactatcaga

SEQ ID NO: 58593 - DNA, 1092 bp, Homo sapiens
tgtggctcctatcaatgcaaagaaagcaagcaacctcatcagaacacagaaacacgtgtcagcttttgatttcagcaccagccattccccgctgctgtcagaggaaatcacgggtttgcacctgctccctcacctgtgtgctcctctgtggcttccttgtggcttcgaaactaggcacacttcagatttcttatgtgaagccatttttttttttcagtgaagtttcacagttgtcatcacatgcattttgtattccttcagggacatcctaacgtagtgactcagagatggaaagcaggtgagagcccctccctcagcgctgctgggtactattgatcttaaatttgatctgtcagcacatctctgagtaggtaaacaccatgctccatcctgctcacaaacaagcaaagccccagcctcatgatcattggcttccttcagtagacacatgtgttggccttctgtgttgttacaacaaaacacaagtggaaaatgtaatgtgctgtataatgtttattgattttccctgagctaaaagcaaagtttcagacgtagtcatggagatggccaggactttggtacagagggttccgtgcaacttcctggaatcattacccaaatttagatcagactggggatggctggtgcaatggcagttttgatgattagaattcagcagaactcctgcaggcagaggttgggtggttctgtacaatatgggagcagagtccctgtcttcctgttccctctcagagccacatagacaacatgctgggctgtcttgatgcgatgcctttgcactcagtatacaggctcactggctttcctgccacttctccacgctcctcaaggccaacttgagacttgagaccgtagcattaagagtcagctttactactgagctcagctacagagtttcctcatgatctggaacagcacttcacttcccaaactgcactgtgcatgtgaatcacctgggaatcttgctgaaataaagtttctgattgagtaggtgttgctagagagtaccaatttctaataagcacttagttgatcccaaaatggacagtccatggactgcaattcatatag

SEQ ID NO: 58594 - DNA, 1062 bp, Homo sapiens
taattgtaaaaatgtttttgtagagacttggtctcgttgttttgcccaggctggtctcaaactcctggcctcaagcaatcctcccacctcggcctcccaaggtgctgggactacaggcatgaaccaccgcacccagcccgtcatctacattcttgaacagggacaaataatatttcaaatttcttcctcctgtgaacaactgactgcatggcagaaagcaccttgttcctccctgcactcctagccccggcacatgctttatattctacaagttgcagctgttataactaaaacttcttttgattcatttgacatttttggatgcctactctatgccaagcaccgtgcaggtagtttatttcatgatctctcctaacaacagtcacgagaagcaagtgtggcgccagcctatagatgaggaaactgaggttcagacagctccggtgctccttccccaaggtcactctgtccacagcaaccggcccctgtgcctcctgagcccacaccttctactgacactactcttctaggccttctaagacccagactacctgctggaaattttgatctgggttctaatcctagctctgtccatttcctcagacagaatggaaaggagttggaagggttgatcttagaggctccttcctggtggtcagattctttgattctgctcttaaccagaactcacactgttctcagagaggctgccctgtccctggctggctctggaaggcaggtggcaaaatgaaggggagaggtgctaggagagcttctccccccaatgctggctaacagagttttcctgaaattcatgtttatacagtcagcctgtgagcctggagtcatctgcaggaggagagcggcaggaaaggaagagatgtgtggtgagggtcatcttggtaacaggcacatcacctgctatctttagtcagcctctagacaactccaggtattactgtcctctattttcagataggaagcaggcctggtcacaccccttggccttagggagtaggctgcagagccaagattctaaaccagccctgacctgactcctag

SEQ ID NO: 58595 - DNA, 1574 bp, Homo sapiens
gtctctgccgcatggcacctcctctccctagcggagtggagagcactttgtgagggtcagtgtttgagtgacagctgtcacactgacatgtcaacaatctcatagttgatacctggcttcatgaaggagttgataatttggaaggaaacgctttggcagcctcaccaaaggtggcaagagtttggaagcccactacgaagatgtgggtcgcatgttttaaggcctgcactattgcactcatggatagtgggaagattctggagcgtatatgggtccccatagctgtgttgtcagataaagcacccaaaatttcaaagcattgaaccagaatgatggctgtaatgttttaaaatcaatgactgtataaaattggagctggaaggagcttcctgcatccctgtgtgtccctgtgggccctggcttgctgtgggcctgtgtgctttgccttgtctgcgtgtatcttagtgctttccactctcgggttctcttcctccctgaggccctcacctccatctgtctctttcatgtgcgtgcacacacacgcacacattgaatgcaagaaatctttaaaaactaaaaaagctctgacaataaatgtggggaatttctcattgttaagtgctaagaactcagtttatgttgtcaccagtgactattgaacacctgctaggccagagcaacaccgaattgggcactggggaattacaaagaaaggaaaggacataattccttcttttgaagagtttacagtctagagggagaacaagatggcaaagtccatttcctagagaatagcctcattacagatggcagccactacacacacagctacttttaccaaagggcacacgggggcttctgcatttagaaagggtagaaggacagtttcaggagatgatatcacaattgtaaaatgaaattttctacccaggcatttatggcatttttgtttattttccccagagaccaatagtagcatgtttctgtcttttctgtctccacttgagccttggggaaagagaaagttctgaacatctcactcctagggaaggactgtgtattttgaagtgtggtggagctcatcggtatagacgcagcctgccctagtgtgtgtgagaggctccagcacagtggtttgaagggtgggaatatggaaggatattgaggagcataacaataagtaaatgaaccaaccatgtagcacatagttgcagggatggacacagacacacacggggcagtctaggaagaagaggcactaactgcccagaatccccaagacactgtgtgcttggggctgtgagagctgctggttatgagcggttgcaggaaagggctcttctctacaggggataggaccacccacaacccgttagtatctggaacattctcttcacattcaggttttcagacagcctggaaacagcacagaggtgctgggtatccagttatagaaatttctgggggcagctctttcaacagcagagatcacagcactgtgcctctttgagacaggttgcaagggtcagaagaacagacgatggaagcaaaaacttggaatttggggtccttaa

SEQ ID NO: 58596 - DNA, 1706 bp, Homo sapiens
aggtaacacatctcattctttcggaagttgtattttgtattattaaagggaggaagaagatcagtaggaggaagagctgtgaattatgatgggcaataacttttcttctctgaatacatctttctcacttttctccagagcagagatcagctgccgtgaagccatatttacaattagatgtaaaacttgcttccctcatccttaggcttaaagaggagagcagataaaagaaaaagttgcgaacattaaaggttaaattacaaaatattgcaaagttaaatgaaatgtcttcaaaaattaattttctctgcaccaaatgggaacagattgtatcatgtcattaatcttacccctcgttttattgttgtgtcgctgtttcctccatatttccatgcactttatggcttagctgtaaatgttttgctgcaagcacacccttggatgcctgaaagcaagagctctttcctccctgtttttattaaatctctatgactatagattgtgattcacgaaagaccactaatcagtagtatgaagtagtgagaaggacagggcttccactggcggagtcaaggcagtgtctgcaggggaaaagcctgtaaacacttctgctaggcaagttggacatgctggttcagctcttgctttaactcagatcttgaaagtatgcccgaagagaacaagctccaatgtgtttctcagcatctgagtatagtgggtaggaggggtctatatggggaaagaaaaaagtgaagaaacctcaagtcaggagccgcttcaaagcctatttgcagccttgtttgggaaacaaagcaaaacaatggaatatggaaacaaatgagttcttacaagtttacagcatctctacaagtgtgcacctctgtgtgggaggaagtcagggtaggacgtgtgtcatggagggtgactattgctcagaaggatcagagacggcctctctagggatgtggagtggggttggctggagccatggaatctctttggagaaggatgggggaaggagggaagggagccagaaggccagcccttcccattggttttgtcatactcctaggctgatcattagaactcccctcactccacttcccacccatcgcaaatcccccagggaattggagcctagcctagagatgccagataaaatacaggatacacagataaatttgaatttcagataagcaaataatgttttaatatgagcatgtcgatatatgggacatacttagtataaaaaattattctttccttatctgaaattcaaatatattaataactgagtgtcttgaatttttatttcctaaatctggtcgccctagcctcaagggacaaggtcatctcttttgcttccagtgggaatagccttcctgttatctggatgctgctggtaggccgtggacctctgatggaaggggctcttccctagttctggaggcttctccctactcagataaccagacagagagggccctttaaagatatcgttgttacgattttatcaatttgaaatgcctgttttcaaatcttttcaaatttggtttaaatgtgtttcaagcagtcaggttctgataagctttattttgggacttgtaagcagtctttatggagactagagaatatgattggataggcataaaacaaaatctaaggttaaaaacagggagccgagagtggctttgggttgaaaatga

SEQ ID NO: 58597 - DNA, 1031 bp, Homo sapiens
gtctataccaccgatgtcacatagcagtgaaaaagctaaactttcagaatgtcttttttctgctttgtaaatagccatgctccctgattaggatttatgctgggcaagtagtaagggctgctgaattcatttgttatccttgccaggtaattcttagaaggctaatgaatttctggaatggtggtaataatggtaacaataataatttatcacattgttataggtcattaaagtttaaaagtgctttcagattcactatttcatttaacatgcacaacaattctataagatgagtcttattgtttcctgattaggaaactgaggttcagagaggctcactcactttgttaaggtcacacagttgatgagtaagcagcctggctggaattaatcctacaacagcattgtttttcctctacaaggttgagtctaaccttgtttatgtcacaacagccccactctaatctgttacacaagagcaccttgttacaacaaatgacatcatccaggtttggagttgaaggaactcagagaaatcacgtaattcaagccctcattccgatttagtttttgtttgacctatagagaaactgagtctcaaataaggtaagagccttcccagagttaaatgacaatttagggaaagacctgttgcagcccccgggcttgtcactgttacctggactcctttcacaccatgggtcagtcctgtctgagatgcagattttttaaaaactaagttcatatccattaaaatgctttatgacagtaaagtgctctacagaagcaaggtggtattgggcagctgttctcttgggtgcgcacagatccctttcttttattcccacctcatcctgccacatgtacagccattcccccttttcacatggcccccttattccaattcaacttgcttcttccaagtgaactaaatttatagaggtctgaatttacagaactgaatgaattcactttatggcccccaaagtctccaacctcagagatgtctgtgcttcttcaagctgcttctg

SEQ ID NO: 58598 - DNA, 1036 bp, Homo sapiens
gctcttgcttgggaaagtcattttctcttgttctttgtggtgaatgggtgaaaccataggatgaattaaacctggtttacagaacattatgtatgttgatgaagcttgatatgaattatgaattttctttccttggaatttggtagaattaccataacttccaaaattaatctccccatcactctcgatatatttctgttagaatcatgtcttttctgaatttcttctcatggctcatggggaaaaaatgatggtattatttggaaatttttattttttaatttgcttggggttattttttgtttgcttcttgtttaaataaagacctcagcacactgcaaagtttttcttttctttgggggaagacaggagagaagggatactgatgccaagctacataatgagaactggctttcgttccagtcctggctgggtatgacctaaccaaatcataagaatttccaaatgccttggtttcttcccccacttggcaaaatgaaggcagaagagtcataagcccatctcaactgcattgtggagtgggtatcagagagaaacacaagtaaagtaccccttcctggagtacggtgcattgatcttaggtaggaggtgggggaaatgtgagtacgtgtttacaaataaagaccctgctagtgagaacagcagatgcagttagagttaggctctgcctgctgcttgtacccatcagtgtccattgcctcctctttcctcattcatgaagggacctgattcagcctttaccctcccaagtgctgttgtgggtggtatctcgtccatctaaaggaagtctgcaggcccctctaagaaagtttgctgccctactagataaagctgggtatccatgaagggtcacatggaaatagatcctggaaagggagataactgcatttccagactgatcttgagagaggagaagcaaagtgcatttgtgtcttactgatccagcatctttggaggagtggtaagttctgtggaaattaatattattatgagctatgttttaagcttttaagat

SEQ ID NO: 58599 - DNA, 1079 bp, Homo sapiens
gtaggaagggggtgagggataaaagactacaagtggggttcagtgtatactgcttgggtgatgggtgcaccaaaatctcacaaatcaccactaaagaacttactcatgtaaccaaataccacctgttctccaaaaacctacggaaataaaaaattttaaaaaatttccctcataattttgaaggcattactctgtagtcttccagcttctagttttgctaataagaagtatgatgtcaccctgattctagtctttcatatgtgacccagcctctccccagattttctctttatctttggttctctgaaattccccaataaggtagatggtatggggtctcttcatttattatagccttgtcagtttggagactcatgcctttgatttctgggaatttaaaaaatattcttcgatgatttccttctcttcatttttctcttttctttctggattttctataagtaggatgctggcactcctttcctgatccttaaatgttcttatcttttctctccagttttctttctctgtgcttttttgctgtcttttctgagggatttccataactttttttccaggtttttttgttgaagcttttcagctaccatattttaatgataaggaactcttcctctgtttccttttaaaacagcattctgttcttgtttcgtagatgcattatattctcttgtatctctgaggatattaattatagtattttctttctatattgttttgtatttcctcataggttgcctttcaaattgggggcttccttgaccattgcagttaagactgagacaagcagagaagctctgtgttcatgggtgggtcttatctattcctgggcaatcctgaaaattgactgggctgagattcagccattttactgaggataggaggtaggggaatgtgggaggtggttccctaatgtccacatctatagggcttttctctaaggcttttcgttttctccgagtctggggcttccacagagtgaacctgtcctctcatgctgtggtggggaaggaggtggtcatctggaagccccagccaggagagaggacctggggtggaat

SEQ ID NO: 58600 - DNA, 1038 bp, Homo sapiens
actttgtaaactgtgtagcattatataaatgggagtattatttttatggcccattctcttcctccagtactgttaaggagtaaacaaaaaatgtatggattgcagtaatgttgcatttgggagaaattaaaatatgctcaccattagcaagctcttagaaaatgtggaggaaatttgcatggatcattttgggagctcagaactgtagggggtgcacaaggtatctggatgcaccaaatcacagtcccatccatgctgccaactagctgtcaggaagacatggatagttcctgccctttggtagtgatggaagtataggcgattacagatttttttttccatctcctatgggatccacagatatccggctttaaaatccataaacttgagccctaaaacaaacaaacaaacaaaacacagcaacaaaaaaacaaaacaaaacaaaacaaacaacccccccccccaaaaaaaaagtggaagtggggattctgagaaggtggaattgaataagtaatcctactgtaaagaaaagtgataatcaatggctcttggtcacctgtgaatgccttgttattttccaagttagactcttctttaaaggatgtaaggaaaaatcccatgcccttccacttcttttttcctcccgggcacatcattattgaaattgttgaggccctagagtggagacacctgtcaggcgtgccttctgcaattttgctctgccactggactctgtcatagacttgctgcatatccttggatgatccttttaatctctccgtgccttggcttgtgtacttactattctgagagatttaaaaaaagccatctttgaaatgaaggagtctttttcaatatccatacgtggtgtggcaggactgcttcttaattgccaattgtgattcctcatgcattattaaatgactttctcttgaagaaagtgtgtctcatcagtgggctgcaacactgaagccatcctgtgaggcccctggggtgatggacagcagattagttctcaggggtgccgcaggctgtgct

SEQ ID NO: 58601 - DNA, 1112 bp, Homo sapiens
tatactaaatgcaaatgagtcgcttaacccttgacaaggtcaaagaaagctttaaatctgtaaatagtatacactttttacttttacacactttcctgttcatagcaatattaaatcaggaaaaaaaaatgcagggaggtatttaacagctgagcaaaaacattgagtcgctctcaaaggacacgaggcccttggcagggaatatttaaagcaacttcaagtttaaaatgcagctgttgattctaccaaacaacagtccaagattaccatttcccatgagccaactgggaaacatggtatatcatgaagtaatcttgtcaaggcatctggagagtccaggagagaagactcacctctgtcgcttgggttaaacaagagacaggttttgtagaatattgattggtaatagtaaatcgttctccttacaatcaagttcttgaccctattcggccttatacatctggtcttacaaagaccaaagggatcctgcgcttgatcaactgaaccagtatgccaaaaccaggcatccaatttgtaaaccaattatgataaaggacaaaataagctgtttgccacctcaaaactttatgaacttcaccaccactagtgtctgtccatggagttagaggggacatcacttagaagttcttatagaaaggacacaagtttgtttcctggctttaccttgggaaaatgctagcaacattatagaaattttgccttgttgccttatcttcttccaaatgtactgttaaataaaaataaagggttaccccatgcaatcacaccatgccatgttttccttcctggagggcagccccacaggacggtttatgagcacacaattatagcttgtttctactttaacaaggtatgctgcctctgtaaattcatgtattcaaaggaaaagacaccttgcctataattaaaatgtggaactataaaattttttaaaatccaattcagaaactttgataatctgaccataacataagggaagctctaatttctactgcttgctgatctgctgttaggcagcacagagacgtatgtgcctctcaggaagttccctgctcgaccttggccagctcctcctggggtaggtacaagca

SEQ ID NO: 58602 - DNA, 1022 bp, Homo sapiens
cgacatcttttaagattcggattcttactatattagagttgattatatgaagactttgatcatgtctaaaatgccatatttttgcattctaacatattctatatatattttttcctctgtctttccccattcggaaattcatagagaccattgtgcctccatctttttttctctgtctgctctgaattttgggtaaagaatgaagtaatgtttctagagttccttagtcattacatttgggagtaggctgaaattggacaggcatatcgttcacttttttaatatcctagacttgaacagttctttttttagttcctaagcttgcaaaagttttgtactctgagtagctcctttaagagatgcttataaagtgctaggttttagaggtgttttagagatgatagcatatagtaatgtgtcctttgtatgttcccaatacactgttgccttccactgcatgctaccccccacctcaggacattttattgtatatttaatgtagtactaacattccagcctgtacctgtttcttcccattttgtttcatatagctaaaagttgtagagtggtatactccaagttgtatattctgtgctttatcttactgtcatgattttaggagttcaggagaagatgggcataatgaataaaggagtcatttatgcgctttgggattatgaacctcagaatgatgatgagctgcccatgaaagaaggagactgcatgacaatcatccacagggaagacgaagatgaaatcgaatggtggtgggcgcgccttaatgataaggagggatatgttccacgtaacttgctgggagtaagttattctgacgcttacggtgttttcatatgtgccagagaggggctttgtaaaaactgctgtatgttatgtgtacagtgcaccaaactgccctttgttaataagacatggaatttaaacattttgatagtcttagacttaaagcctcattttcagtgattcttattatgaccaataacatctgtttgccagccctggag

SEQ ID NO: 58603 - DNA, 1064 bp, Homo sapiens
ctgcattcatttattctgtatctccagggtataattcaataagtatttttgtttggaaaaaatcttgtgttatccatagtcttgggccttgaaaatacaacagccttggtcacagataatacagcttctgtttgtatgcttagaaacagctattgtcagggacttcttcaattacaaaagacagtgttgcagcatctgacctagtggtgttaatgactttgaccatcaaaagaccctctattaaggctttagtacttatagattgatggtgtatccttgcaaataagtaaacagacccccctctcctaacaacatgatcaagagaagtgaaggatcagtttaagaacccaaatggtccaagttttcctaaaaatcaaacttgtcataaagtgaaataaaggcaacatatattttggagctgtcttttatttttttctcttttgttttcttgattttgagtttatgattctgattgctaacatcagatctgtacctagaggaaaatggacttgaagttttagatagatatatgttgattggcatttgtatatacaaggaaaattttttttgtttacaaggcttagaagttgaggtaaattttcctctttagttgggcttgagaggaattaaagaaggagggaagacagagacaaatgaggaggtcccagaactccatactgctcaagttttcagtaactcctttcccagttgattggaagacccctaagggtaaaacagacgcctctgccctctctgctgaacttttccctctgtctctaggccttttttcaggccctaggtatgaagagagaggggtcagagaaccacaaacctggagttcccttcttcatctctctcagctggtagtttttaattgctgatatttgtgattattttatttttttagaggcgaggtctcactctgtcacccaggctggagtgcagtggcatggtcattgcccactgtagccccaaactcccaggctcaggtgacccttctgcctcagtctttcaaatagctgggaccacaggcacctgccaccacacctggctaatttttaatt

SEQ ID NO: 58604 - DNA, 1003 bp, Homo sapiens
tttggggaggagggaaaaagatgaccagcccagtgaggttactcataggcatcttcttcagaatcattactcagtgtgccctcagaaaacagatgctgtttatggatccttaaaagacaatccgctgcttttttactttttaatgttattacctgtgtagctctgtttgtctctaatacttgtaataaagtgtgggtgagagttcattggggagtgtttattttggaatgttttttgtagactctatggctagattctgaaactgctcattttaaaaagtaagaaaatgtcacatcttagtttctaagtctgatcacctgagatgatttttaatactaaaggacctgtgcttctttcctaaggtttcatctgatggaaatcttccccagcaagccgcgtcagccccaagccgtgtggctgcagtaggtccctatatccagtcgtctactatgcctcggatgccctcaaggcctgaattgctggtgaagccagccctgccggatggttccttggtcattcaggcttcagaggggccgatgaaaatacagacactgcccaacatgagatctggggctgcttcacaaactaaaggtaaaaagtcctgcacagcctagttcttcctgtccccactattctttctcccaagtttgagtttaaaaaaaatctctctttgtattcattattcatgtttgaattctaaaaatccttttatattctttgctggtgtaatgagacgtttaaaaaattaaaattgataccctggttgtacaaggatgatttttcttaaccctaaataatacaattctattcaggaaatgaaataaaatataatatctttataaacctgaaaattgttttaaaaagttccttattgttactaaggaaattttgatattaataacttgagaacttttctttttgggtaaaaacatatgtgtttgtggtgtcatctgtataggatgtgaggttctgaatctattatgttgatgagtggtgttaaata

SEQ ID NO: 58605 - DNA, 1013 bp, Homo sapiens
gcaatttgttcagggtctcatagctaataagtggtagagctgggtttgaatctaaatgtactccaaatcttgtgcatttaaatagtttcttatgatgcttcccatttctacatgagctgctttttaaaattgttgcaacagtttatgaaaactagttcaagaattgctgcatccttgctgcataagaaccacttgggttaaaaatactgattcctggatcttatccccagaagattctagggtgggctcaggagtatctgttttgaacagacttccagtgtgattctgatggcagtgtttaggaagaaggtgagaccagaccagggttacaagtgtacctcaatctcaacatctaagtgttgcagttaggctattttgagcttagtggtgtacttacctaaaatgacatacctaatgattacttttatttttaggaacagcgcttaaagtttttgaaacaacaagatcagcgacaacagcaacaagttgctgagcaggagaaacttaaaaggctaaaagaaatagctgagaatcaggaagctaagctaaaaaaagtgagagcacttaaaggccacgtggaacagaagagactaagcaatgggaaacttggtgagttgttcctcatagatttacttttttatacatttatttgtctggtttttttgagacagggtcttactgtgttgcccaggctggtcttttgaaccgtggcctcaagtgatcctcccacctcagcctcctgagtagctggggttacaggtgcaagccaccatggttgatctgtagataactttaaagggtatcttttgaaaaaatataatttactgcagttttgatgctgcaggttcctctgaattgaattcagctgttgaatgttttatacaggatttctaagatacctttggaaaatgtagcattttttccccttaatattttttgactgagaatttgatgaaggcaaggatttttattcatataatagctccatctattacgataccattttattcaga

SEQ ID NO: 58606 - DNA, 1057 bp, Homo sapiens
cctggcagggacattggtaggtagtgctctgtgaatcgtgacagatatttaagcttttattttgtgctgggagtagtaggtggcacatgatgagaagccaggtaatttgagaggtgaaggagaggttaggaagtggaaacagtggagataggctgtcgaggggagaagtttgactatagttgtttaatgcaggtgggaaggagtcattagagcagggggttgaaactataagaaaggaaatacttgttaggcagggtccctgattaggtccttccacagccctgaggcagaaagtcctcttagacaagaggaaggatccctcttccataataacaggacagaaataaaactgtggcagatgtggctaaatttgtgcattttgtgggagtaagttgagggatttctcatctaaaaacatttgttttctctgaggtaggagtgatgatggaggtgggtgggaagctggagctgttttggagattaggagagagggcttactagggaagccagactgctgggaaccattgaggccagttgagattagagaccatgagaccatacatgatttttctccagtggtggtctacagcccaggtgggttgtaagaagagaagaaaacaaaggtgtctagacaaatttttctaggcaattgtctagaaaacccaaggtttctagacaaattcaatgggagttcagtgggacaggggagaagagggtattggcaaggtgataccttagctgggtggggaagaagtgaagacaggaggggctgtggggaaagagtagacagagttaagaggctgtgagtctcagttagatgaaagaacaggtgtgagaggaaatgagtgagacgcctgagattgaaaggaaatagtggtcaaaaaacagaaggtttgaattgaaaatttcggaggtagagggcttctagtgttgtggtcccaggtggggccctgaaatgaggctgaattagagtggagacgagaaagctagaactgagaggctagcatttgggcggtaatgtcatccagaatgaaggcaggacttggaggtggagaga

SEQ ID NO: 58607 - DNA, 1033 bp, Homo sapiens
acttgcctaaggtagtctaactaattatgaagaaatctggagtttgaactagatctcctgcctgggaatcgacaaaaatagcgtgttgctggcccagcatcgcggactgcagtacaattactaaaatcaccgcagagctaatctccatacattacaggtagaagcggggtcaactcgtacacttactgttcataccagtgttaaacctgtgggaaaagtaaccataaatagaacacatctgtcatcattcttatttttaattgtacttttaaataaatgaagctgttggttttccagaaagtaaaagatcagatctctgttaaagtgtgggtaactgtggttaaatggagcatttcctagtattttctttctataaaggacagcttaaagaatagaggatagatcagaaaaacagaattgtacctttctcatttcagtaggcaaatagatcacttatctgagtctttttcttcatttataaagagaaaataacacctgctgtttatctgagagttgatgtaagtttctgagataatgtgtctgaaagatgaagtttacagaggtaaggtgctatcttacataataggcttttatttgttgataaggtgtgtgtttagcatatactctgtatttccagtatttctgtaacttaacacctctaagcttcatatttacaatgaaaagttactattttcaaagtgataaacttcaaagcaagtttttgcatcggtagggagtatggagagggagtatttaatgctaaagtgtacattatttgtctccatcactgaatatgctgtatactttgggagcagcagacgagtgtacttctgtgctttgttaatcgttttattttttcaatgatttagtcaaggctttatgatttttgtgtaataattttgagtgctgccttgttggctaagttgaactctagaactgtgtacctttatgtagtcaaaatgtgaaaagcctgagataattagcttgagagcttttgagctcatactgggaaagtctacagtgtttttttatt

SEQ ID NO: 58608 - DNA, 1044 bp, Homo sapiens
tttatctttctgcagaggaattgtgaaacacagaaaccattcagattttcccctaatctctctacaagcataatcgcctggctattcctgtggtatttcttgtgagttgcaaaatttggggaggatttgtgtcactctttttatagattgttcatttcataattttctgtttcttcctcttaggtaaacttgaaggatttgagtttttgtaaatgaaaactctgaaggtgctgttgtagagcgtaatttccctttggtgacagggaacatcttatactcttggttcctttcttctttctgtagaacttcacatgattttctgaatcaaatgaataaatgttagcctctgactcatcttgtaaatgccctaatcagttttttttttgtatttcctcttagaaaagtctttcagattttgatctgaaataattcctctttaaaatgagtcattcttatgttgatagcataacatcatagttacagtacatacatgctctataaacacaggactcttaaaataaatctatgacccattgtttttaaatgaaaattatctgtgactttgaatttttggaagggcacatcttcatctagatatgactgacatgaattactatgcagtgtgcctgtaggtggcctggcacaacttaacacagtgttttttttttttttttatctttccttcgactttccttctcttgagatagatgactataggaggtagaaacaagttgtaatcacatttaccatttttaatgaaatattttcatgttcttttatcccagtttgtattaactatacttttaaattatacattattataaaaatattttactgttgagattttaaaaatttaaaagtgatagctatacttgcctctggtgtcgctgattttctgtgtatttcatacaggtcagtatatatatatatatatatatatatatatatatatatttttttttttttttagatggtacatatgtgtgtgcatgtgtacacacagacacacatatttttacttttttttttttttttgggagacag

SEQ ID NO: 58609 - DNA, 1049 bp, Homo sapiens
tttaactgtcctttcttaataggtatttagtaagtactaacgggtgaatgaacgaaacttcttgttgaagtcagcaagaagttaggattgaggggaaggcatagaaccaggagcttctttggcatggctggctttgataggatatgactcctataggtttctatgtagaggtccctgttacctattcatgtatatgaagtggttcttttaccagacatctatgaccagcaggctactttatgattttttccttaattaaagtaactacttcatatttgctctatcatttttttccagaatgttgactatttcagaatatgattgtgtgctccagatgatattgaatggatggtcaggatagtccatgcctgattaacatttttaacagaatattgttcaaattgatattgagacttcacgttattgatttctgaattctactaacttgctgtaagtgagcaaaggaatagtttatgaagtaaaaaaaatcctttgaatatgactttatgattttgctttaaataaactcagatgtaactgataggaactgatgggttaatgttaaaaatatgccatcatataaagtggtacacttagtgtagaagtaggtttaatatcattgagccttaatagaacatcggtatacataacttatggtaattggtgaatatttttaaaagcagtttaatggctccaagagtaaactctagagaaacagctaagaaatcatgataggcctttgtaagcagtgattctctgataactttaataaggttgggacccatcgtcagggaggtagagagtgtctctttgagggaaaggactcaaatatgtagtgtccctgtggctcctgaggaaggttccacagagacccctgtgggttgcctactcagatattggggagacgaggaaggacagctcaagctcaagctggggtagtggagcagcacacttcttgcagaagactggcagcctagctcacagctagggtgcagcatgtctgaattagggagccaagctcatgagtgcccttggtgtgcagactcagc

SEQ ID NO: 58610 - DNA, 2577 bp, Homo sapiens
agctcaaagggcttaagtaatttgtttctggtcactagtagaaatgagattcgaactgtctgcctgcaaacacatactctgttcaagatggcaaatgcttgggttagaatatttttatatgtttgacaggacaaacaatggtaatgatgttcttttggctaatggtaacttcaaaaattgcttttcaaagcataaccttactgtagttttaaagtagaaaaggaaaaatggaaaaaaaaaaaaaagaaaaaaatggagacatcgtcccttatttaaatccatactgatgagaagattggcagatagttctcttatcaactttcaaatgatgtggaggtggttacctccccctgggcaaaggaaacatctcaatagctatttcttcccacctctatctaatattaccatagagatctcagatcttccacatctgcagggaaagagaaggggtgtgataattagcttttgtatgaggggtgttgagtagtctttcctgagatgatatctgtaaatacggcttgaagttgatgatgtattaggttggtgcaaaagtaattgcggttcttaccatcacctttgatggcaaaaccacaattacttttggatcaccctaataggaaaggagcagagtaggataggcatgttgggagaagtggaggacagggacgcatagaatgtctgctgtgagatgaccagtgacattcagccatttccagttgctcgaatggtgcagcagtgactttgaagtgtccagatgggagtggagtgagtgtctccacttgcagcttcagggctgcccgtgtagtagggagcagtaattcaatgtagtcagatacctttgttggaaatagattaggggctgattttgaatgaaatcacattaaatcattgcttttcattctccctcattaaccatttaattgtttttggatggccttttggggataacatctgctcaacaaatatttagttaacatcttctgtattccaggcactgttgtaaatgccatggagacaggaaaggaagttttcagggagcttagctttctttcatagtgcttaatgggagatttgggtgggagagagagaaaataaacaaaaaagaaaaacatgagagttaaatgggatttaagaagggtaatgtgactgcgatggctactttagattggatggtcaggaagtgacatttcagctgagacctgaatgacaagaaggagctggtcctgtgaagatttgcaggtggagcatttcaagtgggcacgattcctagggactggtgcagaggccgggaggaagcactggaggctggggcaaggggagaggggcggcgggggcggggcagggcttcgtgggcagagggcagagtgacaagagccgaagcaaaagacctgtcagcatataggttttcgcgggccagagggaagggtggaggtggcatgggaagggacgtgggagccacagaagaggtttagttagcaaaagtgacaacctgattgattaggaaagctcactctgttgctgtgtggacagtggaccttagaggtgccagagtgtaagacttgggcaaggtgggaagagtaggaaagtctacagaaagctgccaaaaataaattaaagggttttaattttatttattttttattttttaccacacctaaggcccagctgacagaattggttgtgaaggcactcaagagtttgtcacttgctctaataaattgttttagtgaccctcagaagccccaggggtgagaggagaaacagtagcacttacccggggttggaagtaagaccagacaggaatggtggaagatcactcctgtatccacaagctccttcctatggggctaaagagaaaccatactttttatatcaccacagagctctgacagctacacagagcagtttaaatttaggcttgagaaaaagccttctgtcaccatgtttcttttcaactgagtagggtgtatcaggtttctcaaggaagccatagtctgtcttaaaatgctttaggacagctttacttttgaccacatgaccagagtgctctggaagcttctgatgcttcaacctaaaagttccttgaccccccgcccccccccttttttttttaattttaaaacaatagtatcttcattttcctgacacaaagtagcgagtgacctaggaaaatcaagtctgagttaactttaattctagaacggtctctttgtggcagtgttttctgcatcacaacaaaatctagataataactgcttagtttgtgatatgtaggtaattttcaaaaattttgttaatttcctgaaaagtttggggggtatctattttggataatgcatttattttaaaggtagataggatctttctctggtaggttttgcttgttgcttttagtagccacggacctgggctttcatcctgctgcttttcctctcttctgtcttctcctggagctgttgagtcaccagggcacacagatccctcttctccatttcctggggcacctgtttggcctcacccctctcctgcctggactgttgtaatgctctccttatctattttcttaccttttctgtt

SEQ ID NO: 58611 - DNA, 2186 bp, Homo sapiens
aatgatagggtactgcagaaatgggattgataattactctcactttcagatacctgccattgttagtatctctagttctatgatatttccacaacttgccgaggagaaactggttttactttcatacttgacatctttttcctgatgaaagaagagattatttgcactttgagagtttggctttttagtgatccgcatgttgtatttgattttcatgtaaagggaggcagttaccaaaagcaaaaattcttagtcgtttgaaaattacattagatatcttttattcactactttgattttgtgaagtgttatgctcaaaacaaaaatgtgttcttaagaaagagcttggctaactctaaaagctactctctgctcttttcagctgatagtttcataaaaatttttgtttgtacctgctgttgaaataataaattttaaaaaattatttacaaaactacacagtatttggtagtgccacctggaagaccagaaggcttgaatttgcctgtcacttggtcattggagatgctgtatatttggcatgaatgtccagctgtaatggaaatgctctgtatctttgctgtccagcatggcagtcaccagccacatgtggctactgcacttcaaatgtggccaagggaactgaagaactgaacctgagttaattttaattatatttaaatagccacatgcctggtggctactgtatgacaatgcagtcaaaccgatgtcatcatatagcccttatatagatggttttaagaaaataatagctgggccgggcacggtggctacgcctgtaatcccagcactttgggaggccgaggtgggtggatcacgaggtcaggagtttgagaccagcctgaccaacatggtgaaaccccatctctaccaaaaatacaaaaattagctgggcgtggtggcgtgtgcctgtaatcccagctactcaggaggctgaggcaggagaatcttgaaccctagaggcggaggttgcagtgagccgagatcgcgaatcttgaacccttgaggcggaggttgcagtgagccattgcattctagcctgggggacagagcgagactgtctcaaaaaaaaaaaaaaagaaagagaaagtaatggcttattttaaaaagctcagttgaagtgatcatagtttaattcctaagtttatggcattttatctttcagtgctgcagaggcataattatttctagttatttcatgatgctgcagaataaaatttgagcttctaattttgagggtctaggaaaaaaatgggatattacagtatctcctttagcagtttgaccacctgatcagtaggatttgtatatttctgagcataactgcaaagtgtgcagctctacagaccagtagcttaacttttgcttaaatacttgtattattatttacaaaggtctggttttatttgcacagatttgcacaaaacacaaccaaaattgtgttttgaaactaaaaatctttcaagttgtgtatttgaaacattatatttgtatgacttcaagttatgtatttggaacattttatttgtatgattatatcatggtctgaaagaattctttttgcttgagtaatagtgtagcaaattagcttagatcaggctttattccagaataaagtttagattaggtccctaaagagaggttcctatctttatagaattacagttatcaaaggctgttaaacaaataatctatttttagaaatgtgcaaaatatttcttttatttatttatttatttatttcttgagacggagtctcaccactctgtagtccaggctggagtgcagtggcgcgatctcggctcactgcagcctccgcctcctggggttaaagcagttctgtgcctcagcctcccgagtagctgggattacaggccacgctctgctaatttttgtattttttagtagagacagggtttccctgtattggccaggctgatcttgaactcctgaccccgtgatccactagcctcggcctcccaaagtgctgggattacaggcatgagccaccgcacccaggagcatctcacatttcatgtgcgttagttttgttgccttgtgacttcagctcttaaaagctgaaagacgtttgaaaatttctgtatttttacctgtttcagagaaaccagatttagactttttaaaagaaatttacacaagcatac

SEQ ID NO: 58612 - DNA, 1052 bp, Homo sapiens
aggcttttgacacggccaccaggccacagatgaacagcaggtttgagacatttcagaaatgtctctgtcattcagcgatcgcggaatggaggtttgcggtgtgttgcggtggcttctgcagacttcagtagcgagtttcttcgtggaagttgtatttgcacctctcccactgaagtggggacatcttgcaggcatcctatgcttgtggctccatttgttcagacaaagaaacaaaaagcttttacttttatgaagtctgtggaatggagtgatgacaaagtttgcagtcatacatacagagtataatatgctgttccctggccccctgcttgtgtcatggagggcgtcccaaactctcactgggtcgacttaacaattcactagaattagtaattgggtttagagggtttgggatattttgtcctgccaggattcaaggaatttgaaagtattaatagcattatgcatcttattttagtttaatgcctggttatgaaatcaggtttgtagtgtgaatacccaatattgaaataatggaccatagataagggtgatggattttgctgttaagatttttatttcctggatttacatttctttgtgttgaagtaacttgtacggattgtctgtgaatttttcctaacagtaggagcaagagaaacacgtatcagttgttgctatatggtttcttccttgttttttgtcaaggtatcctttggagataccctaccaaggtatccgttgtgtagccgaattcataaaacgttatgtggctcttgagactatattcaatttagcagtatggttcttctgattgcctttctgatgtcagaatacaatcctaacacagactcagtgtggtatgatggcacttacaccagctttgaagtcagactaacacttcagtattgctcagctactacctttagtgacgtagccacttaaaaaaaacttgtccctcagtttcatcatctgtaaaatggggataatagtactcagctcttagggtggtttgaggattagagttatgtttatgaaggaagtgtgattag

SEQ ID NO: 58613 - DNA, 1216 bp, Homo sapiens
cctgccttttgtatgccgcttccagcccccggcctgggtttggggagaaaactcagaagtaggcagatgatcccagccaggtttggtttatcttgcaagaataacgaattgttccccaccccaaccacccaagttttcttgttcgagaagattgagtagactaaggtggctcagtgaccccaaacccaggtagaggttccgaagaattcgaacgtgtttacttagcgttagccccagcgccctaattgaccactaaagtagagccttgggaaatgaccattcctgctttgcctcatcctaacgcttcccaccgtagagaagcaacttaccccttgacgggttttttctcttttgcaatttatttttaactagtgatttacgcccacccacctgctttaggagaggtttctttataccttaaaatcacaataggtcagtccatgatttttaaaaataatgaatttgccattggggttttacttcactccagaggtttgaagatgtggtgattgttagttcagttagatattttgctgcctttcaatgaaattatctttaagtggtaaagaaattgaaggaggtggacattttgaagtgattgcaaaccgattccatggagaagctaaatctgtgctgggaattgtttttaagaggacaaagatatttctgaatgtgctgtgtataacatcttcttattactcaatatgctatattgtaggcatacacctccactttcaagtggattataattacatttttaaaggaaatcataacatttttaaaagagaacttataaatattaattcaaactgatggccaattttttttctagtcaacacagcagttcaaccatgccagtctgcaggatggaaaatttcttcagctgaaaatagatatttcacaattgattgcctctgaatttccaaaacgttttcattctagaatttcatgtagaatcttaaatattccttcagatttttacaaacagtggcgtttaatcaaaattcgcgctgtacatatacagtgtttggaaaattgggcatataacatttgattgaattgaaccattcaaccagacaatggctttgtaaatcttggaatattcacagttctgttttgtaagtgttgagaaaaactgagttttatttgtttgttgatcattttactattttaaaaaaatgtagtggggaggggggaaccagcctgtcctaactag

SEQ ID NO: 58614 - DNA, 1025 bp, Homo sapiens
tgggagaccaaggcaggagatcacttgaggtcaggagttccagaccagcctaaccaacatagtgaagccccatctctattacgaaaaattagccaggtgtggtggcaggcgcctgtaatcccagctacttgggaggctgaggcaggagaatcgcttgaacccaggagatggaggtggcagtgagccgagatcacgccactgcaccccagcctgggcaacagagcaagactccctctaaaaataaataaataagtaaaataaaatatcaaatagttttaataacaaaacatagtttttatagtccccagtttttattccccagaggcaccactttcaagtcttccggctgattttcttctatttgatattatctgttaacttcctaataagttgagaagttagccctgttgccctcattcctttctttccttcaataacataaaagttttttttttccccacatgaagttcagtactggtgtttgtggtcatgtgattattcaggactggggcactggttctcaaagtgtggtccagaaaccccagagaggtttccaggatcctgtcacagggtccataagatgtaaagtatttgtgtgtgtgtgtgtgtgtatgtgtgtgtgtgtgtgtgtgtgtgtttatgtttggcacgcttattttttccacaagtatacatggagttttccagtagccacatgacgtttgatgacatgatggcatcacactgttagctaatgaaacgtgcacttgtgtgttcttgtgttttccagaattttctgaggtaagaatacctcagtcgattgaatgcagagacaggtatgaaaattgacctgtgttctgttaaaccacatatcaaaaagccttgcagaaatgtaaaataaggccaatcactaaatgttttgttttggaaaaaagttacttttcgttaaaagcagttacatatattgatatgtattgtgtttatgtctttgtttttttcagtagacactgaacaaatactgataactggtttagtttagttagaaa

SEQ ID NO: 58615 - DNA, 1032 bp, Homo sapiens
ggacaacacagtgagactccatcttaaaaaaaaaaaaaggaattttatcttcaggtctattctgaagccacagggaagaattaaggataacctcaccgagatgaaagctaatatcacaaatgcctaaggaaggttcacttactgttccagcaagagagttaggtgttctccccattacaattatcattaaaacaaaaaaggatcttctgctaccttttggtggtgacaaggaagtgacaagacttcattccaatccgtaacaagtctcagagaaacaaaacttaaagggatagagcacatgggggcagtattaaaaagagcagagaaatcaggctgagtccctgcagcttaggggaacagattcaggtttggaggattaataaaatgggtttgggcaatctccaaccctacccagctcccatacaggatttaatttcttagtttagtcctctagtgtctatagcaatttgtatacctgtttgtatcacttatgtacacacatatctccccagttacactgtgatttccttcagggttagaagctttattttattcatcctgattcctcagtcccaacatagtacctgatacataaaaggtgcttaataaatgcaagtatgaagtatgtaacaggccgggcacagtggttcacacctgtaatctttgcactttgggaggccgaggtgggtggatcctgaggtcaagagtttgagaccaacctggacaacatgatgaaacccatctctactaaaaatacaaaaaattagccacgcgtgatggcgggcaactgtaatcccagctacttaggaggctgaggcagagaattgcttgaacccaagaggcagaggttgcaatgagctgagatcgcaccactgcacccagcttgggcaacgagtgaaactctgtctcaaaaaaaaaaaaaaaaaaaaaaaaaaaagtactgtaacaagtccaaaagccatgtgttgtaaatagcaatattcatcagtggccagtacatcacttaaatcaccctacaggtctttactggaa

SEQ ID NO: 58616 - DNA, 1871 bp, Homo sapiens
aacgtcttcggaatagaaagtaaattggaatgtggttctagttccagaggaagacacagcttagtagcttaagcagttatgcatatcaggatactgtgagcaacatggtgtcccttaagcttctaggctttcagaacacaacttaaacttgaactcttatggttgggacattcttttcctgcttctcctgattgaactgatgcacagaatctttttactttgcaatagatttgtactaaccagacctgttctatcatgttttgaggagttaacttttttctgtgcagataatgttgaaagtaagttaatttgtttctgcatatatgcacatacatacgtaaggatcttaaacccagtcttgacagactagaagttaagtttaatacagaaaatgtcctgttcacttgaaagaaaagacctactttttaaatggacactatcttggttcttttttttttaagtcatctttttgttataagtgacctttgtctggaatgtctgaaaagtagttaatgctttttggtattgaagtaatgggtaactaaaatggacttccatagtattgactgtagaaggagcctctacaatattgactatatatttttataaactactggcaaggaacttacccagctgttatacatgttttcagttctctttgggggccatgtcctacatttgcatggatggatgcatgcattgcctagtcaactcacttaaaaagctcttgcactggtattgatcttgaacctctatacttctccactttttagagcggcgtcttagtttatttaaacgcttaacatcttccaccgcaacagcttgcctctagagggggaattgttcatccatttgtcctccagttttataggaacaagagactattaaagcccattgctttatctgctctctgtagggttcaggtacactggctaaggcagaaccccaaatttcaaggctctttctatcaatattggacctctgggagctaatactcctctttgctcaccaccatgtgatcattgatcagatgtggtgagtgagtaggggactcgacttgcgggatgcagttttgccattgcagcaaagttcattgaggaaaattgtaccatgaaaaagcattttgattatttcatttctggaggatgaccttgagggaagctttttaatattagtttcaagctttccttaccctacaactttaaacaaaagctttaattttgtttgcactcctattttgagcttgtaactggaaaagcatgtcttgcactgttcaacctcctgagtggtcgctttaacaacctccaaattgtgtacagtggttattttccccagttgtatagttttgagacattcaattatcactgtcttagttgtattttaatttactaaattatgtagctatttgactgttaagttcttttaaacaactgtttccttgggcttcagttatttaaagtaaatttaggtgtaatatagaaaactgtccctttccaggtgggagcttaacacctgtataaaacctaaggttttggtaagtaccttagttgaataaaagcacaaggttatcaccttttttatccgtccaccgtgacatggttatgcatcctttagattaacctcaccaaatgaagctttttctatccatttttaatattgtccttacataatattgtccttagattttgatcaattctatgtctgactttgaaattccatttacaatgtagtatgttttcaatgaaaaaccataaagtaacatccaagtgtttcatggtttgttgggaaggtaattttaaaataaaacaatttccaaaaaacatttgtcagccaaggtcatccataaaagtccccgtctggaactcgttttc

SEQ ID NO: 58617 - DNA, 1349 bp, Homo sapiens
ccttccctgtgttattaaatatccactaaagtctctagtaaagggaatatgatttacagaacaaatttaatgtgttagtttaattggtgttaatttaattataattggtgaactattacatacttttcttagttcctgtttttttgttttttctttacagcaaagtatccagagataaagtccttgatgaaacctgatcccaatttgatatggattataattatgatggttctcacccagttgggtgcattttacatagtaaaagacttggactggaaatgggtcatatttggggcctatgcgtttggcagttgcattaaccactcaatgactctggctattcatgagattgcccacaatgctgcctttggcaactgcaaagcaatgtggaatcgctggtttggaatgtttgctaatcttcctattgggattccatattcaatttcctttaagaggtatcacatggatcatcatcggtaccttggagctgatggcgtcgatgtagatattcctaccgattttgagggctggttcttctgtaccgctttcagaaagtttatatgggttattcttcagcctctcttttatgcctttcgacctctgttcatcaaccccaaaccaattacgtatctggaagttatcaataccgtggcacaggtcacttttgacattttaatttattactttttgggaattaaatccttagtctacatgttggcagcatctttacttggcctgggtttgcacccaatttctggacattttatagctgagcattacatgttcttaaagggtcatgaaacttactcatattatgggcctctgaatttacttaccttcaatgtgggttatcataatgaacatcatgatttccccaacattcctggaaaaagtcttccactggtaagtaaaggatttgatacatattctaattttgttttttcatttgtttgttttttgagacggtgtctcactcagtcgcccaggctggcgggcagtggcacgatctcggctcactgtaacctccacctcccgggttcaaacgattctcatgcctcagtctcccaagtagttgggattacaggcgcatgctaccacgcccagctaatttttgtatttttagtagagatggggttttgccatgttggccaggctagtattttgtcagtccaagcagttcattaaaaaaaaaaaaaacaaaaagagcaagaatataaatactgcatcttccagcctacttttacaaagggttcactcttgggtccttaagcttagtggttacacttaggatttatttttaattttattttttaactttatgtttttttagagacagggtcttgccctgt

SEQ ID NO: 58618 - DNA, 1389 bp, Homo sapiens
tgggattacaggtatgagccaccgcacccagccaagtgcttaatttctatctaattagcatgccacaatttattagtatttgtaagttcctggatggcagggatcagatgttgcctttatattctatggcgtcatccatgcagtacattctttaataatatcaagttaatctaattgtatgtatttgttgttaattttacaaataagccagatatttagtcccttggaatgtgatgggagagagacctagagggtcgagtgtattcaactgctgctgaaatgtagactgctttttgtttagaattcccacagctgctgctgctgctgcttttttttttttttaagagagaggagggaggcaggtctcatggtttcccttctcagtgtttgtgtcaaccattcatcagtcatctttgaaagaacctagtaacactcatttttcatcttgctgtattttttcccttctaggtgaggaaaatagcagctgaatactatgacaacctccctcactacaattcctggataaaagtactgtatgattttgtgatggatgatacaataagtccctactcaagaatgaagaggcaccaaaaaggagagatggtgctggagtaaatatcattagtgccaaagggattcttctccaaaactttagatgataaaatggaatttttgcattattaaacttgagaccagtgatgctcagaagctcccctggcacaatttcagagtaagagctcggtgataccaagaagtgaatctggcttttaaacagtcagcctgactctgtactgctcagtttcactcacaggaaacttgtgacttgtgtattatcgtcattgaggatgtttcactcatgtctgtcattttataagcatatcatttaaaaagcttctaaaaagctatttcgccaggcacggtggctcatgcctataatcccagcactttgggaggccaaggtgggtggatcacctgaggtcaggagttcgagaccagcctggccaacacggtgaaaccccatctctactaaaaatgcaaaaattagccgggcgtggcggcacatgcctgtaatcccagctacatgggaggctgaggtgggagaattgcttgaacccaggaggcggaggcagaggctgcagtgacccaagattgtgccactgcactccaccctgggcaacagagcaagaccccatctcaaaaataaataaatatatataaaaaataaaaagctatttctagtttatttcactataaagttttgctttattaaaaagctaataaacagctattaatcacagtgtattagtatttgttacatttttgtatttcactatctttatactatataatatggtaacttgggtaccgggggaactttaaaatttcatc

SEQ ID NO: 58619 - DNA, 1093 bp, Homo sapiens
ggtggaacagtttcttcctgaaaccacctcccctgaccctgtctgtggaaaaattatcttccacgaaaccagtgcctgagcctaaaaggttggggaccactgctttaaaaggaggccactgcagttagttgctacattctttaatctcttttaagcgtggaacatttcttcaggtttgacttttgacacttgtgaaggtttcaggccagttactttgtaaaattccttgagtgtggatgtgtctgatgttttccttgtgattagactcaagttatgcatctttggcagattacaaagtgacactgtgcgcttgtcatgtggcatgcgatttcagtttgtcctgttactcatgatgttcactgtgatcacttgaggtagttcttccaggtttctcacactacaaagttactctttactctttttttttcactttgtaatgtatgtgtattttatgggaagttactttgaaactctataaagtccattcctcatcaaagtcaagtattactatttttaatatattatccattattatcattatgatattcaaactgtcccagatttgactctcctttggcctctatatgtttgatgagtccctaggcaatactttgtgaagggcttgatttttgttgtgttcaactcataatttacagtgttgctcacaatatatccggaagttatatatagatgggtcgggttacctacttttctttcttcttaaatttttacttcacctcattctacaaaaatttttaggctacttttaagaatgtggaccagtcacagtggcacatgcctgtaatcctagcatgtttgggaggcctaagtgggaggatcacttgagttcaggagttcgagagcagcctgggcaacatagtgagaccccccacatctctacaaaaagaaaaaaaaatgttacaaggccaggcgtggtggcttatgcctgtaatcccagcactaggccaaggcgggcagatcgcctgaggtcgggagttcttgaccaacctggccaacatggtgaaaccccgtctctactaaaaatatgaaaattagccgggcgtggtggcaggcacctgtaatcccagctact

SEQ ID NO: 58620 - DNA, 1138 bp, Homo sapiens
agtggtgcgatcttggctcattgcaaccgccacctcccgggctcaagtgatcctcccacctaagcctccccagtgcctgggactacaggtgcatgccaccatgcccagctaatttttttgtagttttgtagatatggcatttctccatattgctgagactagtctcaaactcctgttcaagtgatccacccacctcggcctcccaaagtgctgggattataggcgtgagccactgcacctggcctagaaatatcttatataaaagctaagagctcttttctattgattgataatcaatttatttctcatctttattggtcactttttctcctgattatttaatatatgacttatatgaaaactgttttccgggtttttttctgggattttgcagtatctaagaataagtagataactattattttattgtaggggcgcagatctctctgctttggtacgagaagcttctatctgtgccctgagacaggaaatggcaagacagaagagtggaaatgaaaaaggtacaattctctccagaatctctcaattctaattatgatacttaaaaccactgttgccctggaaaatgaccattttctagtgtctattatctatgatattaaagctaacgtttttctaataagactgttagaagctgttctgaaatattaggtaacctctgttgctgacaattataataatagcaaagttatttagtacctctctaataaagagtactgtccctataggcaaatggatccattcgctgtcttcatcatgagtctgggctgcttatcaattctggaaaaacgtattcttttgctaaggtgatatctacttgcctgttaaaatgcagcctaaattggagagcttagaaaatacacaagagaagtgaaatttggaataactttccatatgttgagactttcctttcaaaatataaaatctgtgtattgtgttatgtgatgctttggggccatctcaaaagctttgcaccatccttcacatttgacagtgtctttaatgttattatttgagtgcatatgggggaaaaaaattgtctgctgggtgtggtgactcacatctgtaatcccagcactttgggaagctgcggcaggaggattgcttgagcccagga

SEQ ID NO: 58621 - DNA, 1078 bp, Homo sapiens
ccaagatcacaccattgtactccattctgggcaacaagagtgaaacttcatctcaaaaaacaaaacaaacaaacaaacaaaaaagcttagtcttggtggggtgcagcggctcacacctataatcccagcactttgggaggctgaggcaagaggattgcttgaggccaggaggtcacgaccagcctggacagcatagcaagaccccatctctaccaaagaaacgaaagctagctgtagatttgccccaagggaagtgtattgtgacggttagatctttgagtaactcgaaaacatcagaccttgggatccattcagcctgagattgagtctcatttcttcctttatctagtgatgagaacttggacaaataatccctctaagcctcactttcctcatttagactggataataataggattgctggggaggtccactgatgagaacacattttgcacagtgtctgcatatagtgacgcctcagaaaattatcattgttatctcctttgcatggggaaatgtattatttttatgtggaagaaaatgggtatttttcctttgtattgagagctgatggaaccagatttatgtctttttagacaggggcaagtgtccgagtggtgaatcagctacttacagagatggatggtctggaagcacgccagcaggtttttattatggcagccactaacaggccaggtaagaaataaaaatattgtaacacagatgaatctaaaaacttacagcatttccgtagaagagattcagataattaaaaataaaagtaaaaactagtagcatttataaacaatataattcacatgcatcctaggaaaggaagattaaatttgggcaatccatttttggttctgtgaaaggaaacttcatagttgaaataaaggcttagaaagcttttgcataagctatagtaaaaagtatagtattactgcttggatcccatgagattgcttttctgtgtcggtgcttagaaagctctttttggctgagaacagttgcagcatacacttttttttttttttttttttgagacagaatctcgctctgtcacccaggctggcat

SEQ ID NO: 58622 - DNA, 1027 bp, Homo sapiens
atcttcaggcctcacagtcatgttgaaaataagcctgagaagctgggcgcagtggctcatgcctgtaatcccagcactttgggaggctgaggcaggtggatcacctgaggtcaggagttcaagaccagcctggccaacatggtgaaaccccgactctactaaaaatacaaaaattagccagacgtggtggcatgtgcctgtagtcccagctactcacgaggctaaggtgggaggattgcttgaacccaggaggcagaagttgcagtgagccaagatagcaccactgcactctagctgggtgacagagggagactcaaaaaaaaaaaaaaaccataaaatatgtatctggaaataatttgaacctgcagtataaaatggacatgtaatggatcgccgtttgtatcattatttccaggcaccagtacgcaacccagaccagttcaaagctcttggattggtgactccagctggggtcctccttgctggtcctcctggctgtgggaagactctgctggcgaaggtatcatataagttcaattgcatgtaatttatttcttagtatcagataggataatatgaacttaactttaaatattacagtgaggtaagtcttatgcataatttttatcagaagtttattttagcaaaactgacaactttcttcattaaagtttcctacttttttaaattacaaaggcacatgattgaaaaatgtttatatcaaccataatcctatcaattttaacatgcaattattatattttctgtgtattacattttagctttttagtgagtattattccatagttttagtttttacttgacttagtttcctgctttggtattgttattatttataacttaagtattttcctctatatttcttgtaattattttctaaaattgttttttcataatagaaaataaaaataagcaaaaaggaaaagcattgtgtgtaattctctcactgccacctactactattatttcatttcattgtcaatccttcagatatttttctatgcat

SEQ ID NO: 58623 - DNA, 1027 bp, Homo sapiens
ataggaaaattgccttccctctacttagttgataaaccatcaaggaaccatattaatgaattatactacctccagcataagtgttttaatttcatcaggattcaactgtttcttgaatatttataaatgaaacatgggaaatattatggttgctgaaatgaatatttgccaacgcttatatttgctatacctagccctagtatatagaagtcattcttatatgtttaattataattataattggtatatctttacttgaccagagcatatgatccttaagaataaaatgaacttgtctcatgtcagagagaaaattattaaaatacatagacgttcaggatagcttacggaaatattacagtaataatttttacaagtagaaaatgtaacttttcaatagctgttgtggtgtttctttatttttttcccctctattgttcccttcaaggatgaattacaaaggctgctggggttgctaagagaccaagatcccctctcagaggagcagatgcaaggactgtgcattgaactgaatgatttcattgttgctctatcctcagtccaaccctctgccaaaagggaaggctttgtcactgtccctaatgtgacatgggcagatattggtgccctggaagacattagagaggagctcaccatggcaatattggtaggtatatcagctgccaaatattattggcatgtcatggattaaagaccagagataaagctccatgcatgtgtactaggttctgtggctaaactgacttgactataatcactgtgtctaacttgacttgaatgtagcacttctttcaagcccccaacaatggtttttcttttgtttgagatccgatttgtttatttttttaaattgatgtatcatagttgtaaatatttttgggatacatgtgatattttgatacatatattaaatgtgtattgatgaagtcagggtaattgggatattcatcacctctaatgtttatgttttctttgtgttgggaacattatactttttttcttctag

SEQ ID NO: 58624 - DNA, 1027 bp, Homo sapiens
ccattctccttcctcagcctcccgagtagctgggactacaggtgcccgccaccacgcccagctaattttttgtatctttagtagagacggggtttcaccgtgttagccaggatggtcttgatctcctgacctcgtgatctgcctgcctcggcctcccaaagtgctgggattacaaggtgtgagccactgtgcctggccatgcccagctaatttttgtatgtttagtagagacgggattttgccatgttggccaggctaatctcaaactcttgacctcaggtgatttgcctgcctcagcctcccagagtgctgggattgcaggtgtgagccaccgcacctgccctcatcttgaatatctttactgcttttaagtttttattcagtaggtcttatcagaaattgttcaagatattcctttaataacaattatctagaagtccagatgtttatagataccatgttgccagttaggttgaacaaaattttccacacatgtagtacaggggatgaacaataggtaaagataaagttggagttgtaactgtcctaatatgaaatgggaagtatatggcaagataattttcaatgatgaagataattaatggtttgtgtgtatgtgggggcttttatttctggtagatatccatttaatctactctaaaagtacccccataagttatttatcttatttcccctgtaatgttgtaaattcttaaaggcaaaatattttttaaaaattctatgtattcgtcacagcacttagcatgtttcctaacaaagcagatatttaccataatcctttctggaataagatggaacatgtaataatgacagcgtttgttgagtgactgaactatttgatcttatatagtatccattttgatacctttggcagacgtgaaggacttcaaataaatatagttggtgacttgtttttactattagatcaggaatcagaaattttttcccctgtcttttctacagaatacttcaaacattgtgcagaaaactgaggcttcctcaagct

SEQ ID NO: 58625 - DNA, 1609 bp, Homo sapiens
aaaaataaaaaaataaaaaaattagccgggcgtggtggcgggcgcctgtagtcccaggtactcgggaggctgaggcaggagaatggcatgaacctgggaggcagagcttgccatgagctgagatggtgccactgcacttcagcctgggcgacagagcgagactccgtctcaaaaaaaaaaaaagaacacactgtataaactcctcatgatttaattagcatcttactaccttcttgttacctgtgagggaaaataacctcagactccctgctgttcaatcctggttcagctgagagaaataatacttaggaaagataagatttaagtcctcagttttgtccattcctagaaatacattcctagattaagccagaacagctgaagactattttgtattcccctgctcgaattaattttatcagtctattctgagacacagactttggcatcctccccagcctccctgttgtcctgctcaccttgcctggatgtgccatgcatgcttgaccctctgtgctttcactaatactctttcttctacatagaattccattagcctatatatctgcttgttaaaattgtatttacccttcaagccttttctgaaatgttaccacctccatgaaccctcccttattcctcagttggaattcatgatgtcttttctcttattaccatggtgctttgtttatatctgttattatacttcacaaaatttgtctgatgccatttttttatttacacactcaatgtttctcaatagattgtgaactgctgaggacagagtttgtattttatttatcctcctcacaccttttacatatttgacatttaataaatgttggttttatatgtatgttgctgtcaaaatctgtaatactttatctttaaccatgaaatgattctgtaaccattattgccgtcagtgtcaagtgctttgttcactactctttctctgtctcttactagatctgaataatgtggctgctacagcccgggtcctagttattggagctactaatcgaccagactcgttagaccctgctttgagacgtgcgggaaggttcgaccgagaaatatgcctaggtatcccagatgaagcatccagggaaaggtatattcttatagaatgaagtttgtatgccactaagtcatcttaactgaatggtttgaaagtaagaggtgagaaataccaagtagccttttctttctctctctttctttttgtaccaattaaattgatttggaaaaggagaagcccacattaagaaaatcatttatgcctgggtgcagtggctcatgcctgtaatcccaacactttgggaggccgaggcaggaggatcacttgataccaggattttgagcctgggcaacatagtgtgaccctgtctctacaaaaaataaaatcagctgtgcacacacctgtagtcctagttactcaggaggctgaagcacaggaggattgcttgagcccaggagttcaaggctgcagtaagttatgattgtgtcactgtgctccaacctgggtgacagagggaggccccacctctgtaaaaaaagaggaagaaaacaatttactcatcagtaggataattgtttcaggttgttt

SEQ ID NO: 58626 - DNA, 1065 bp, Homo sapiens
ctcttatagcaaattatagggaaagacttggagattcttacgttagtagaaaccctcataacgtttctagtgagcttgggtttgctaatttaaagtttataaacttgttgtcttaagtttttttttctgtgcatatgcttatccaaaatcattgtttctgtttcatagcatagcaaatgtatctaatttacaaaagaatttcagtagatttatcacaaaacatgcattgatgaagagactataaatgtgttaccctatctgcagtctcttactgtgtacttctaatcatcttggttctcttaagtcaggtaaaaatcagaagtaacacatgtgaactgccttctttagggttattcttttggcaaatgatccttgaccttgaagattttttttaaaatgtatatgcttaattgtgcttcagtataggggatgcatttatgattgtctttttgtgatatttttatttctagtcaaatgcaccatgtatcattttcattgatgaaattgatgctattacccccaaaagagaagtggcttcaaaagatatggaacgaagaattgtagcccaactcctaacctgcatggatggttagtttaaaataataaattcattttaagagaataaattttttaaaatagtgtaattaatacatgaagataaaaaataatattcatatagtaaatatcaaatagtgtaaaaaaaaagtcatactgggcacagtggctcatgcctgtaatcctaacactttgggaggctaaggtaggaggattgcttgagcctagtagtttgaggccagcctgggcaacatagcgagatgctacctctaaaaataaataaaaagaaatagcacttgttttgtgtacacaagaaaatttgaagtatatattttatgttccttgcattaccagattgtaggttgcttcttcttctgattgatggactgattgattgattgatgagatagagtgttgctctgtcacccaggctggaatgcagtggcacaatcacagctcaccgcagccttgacctcctgggctcaagtgatcctcccatttaagcctccc

SEQ ID NO: 58627 - DNA, 2650 bp, Homo sapiens
gaaggtatccacttaaatgtgtttgcatgaaaccgttgattttttttttttttgagatggagttttgctcttgttgcccaggctggagtgcaatggcgcgatctcggctcactacaacctccgcctcccaggttcaagcaattcttctgcctcagccttcccaagtagctgggattataggcatgcaccaccatgcatggctaatttttgtatttttagtaaaaatggggtttctccatgttggtcagggtggtctcgaactcctgacctcaggtgatccgcccacctcagcctcccaaagtagtgggattataggcctgagccaccatgcccggccaaaaccattgattttcaaatagtgtttttcactgggccaacataaaaagatgaagttcctcaggaaactagctatttaaaaaatttgaggggactggataagaaaaagtagggaaattaaaatttgaatatttggttattcttttatgtgtctgcataggaacttgacctgccaattttgaaagtggctgctccagagattgtgtctggagtatccggagagtctgagcagaagctgagagaactatttgagcaagctgtggtgagtcagttaatgactaatgccaggtggtcagacgctaccagcttatattaaagatcctgctttttctgatgctagtatttgttaacccactcactggccattcttttattaatataaacatggtaatttgctatgcatgatggctaaatatttaaagtagatttagtgataccagctgttggataaataacccttttcatttgaaatcaaacataaatgtaattggtgagaaattctgggccgtcataccctgtagtcatatgttgaaaatatattatccttatgatattttccactcacttttactttcctcaacttaagtttggccaaaaaaaacttgtaagcaatgtaaaaattgttatttaggctattataaaagcaaccataaaaataccagaataaattctgtcattccttactagtaaactagggcaataataatacccaaatctcacgtggctattgagagtattaaatgagagaattcttataaaaccttcgatatggtgccttgcacacagcacaagccctgtaaatattagctgtaagattattcacacttgaacaaatatcactgtgtttaaaactaaaaaatggtgaaaagtttatgtcattattagcaatgacaatatatagtagctgatgaatatccaatacaactgttagaagcctgtgtgaaattagaagagaaattatatttaagcagtaattgagaaaaaaaaaacattttaaataacaagaatgggtaggccatctacttagttatggtgcgggctgacgttgaaaaagctgtgggcaacactaggaggataaagagaaaaaaggtggaaagggcagagtgcagagcaaagctgaactttctcaggtgctacctgttttccaaaacgcggtggattccattgttaaattggcacgcatagccagagacaagtagtaaattttgtgcgtatggtaaacacgatgaataaggataagaggcaaatggcatctttaggttgttagttctgtgtttaaacctctcactaaaccagtactgagccagtacagtacctcacagtagatgctcagtaaatatgtggcctagcaccccgcttttcctggtcccctcttcgctaatgagaatgagtccagtaaagcatgtggatcaggaaacaaaaaggtgaaatccaatcaagtgatacttggttgaaaactatgctttctttaggccacattctgatgaccatcatttattcttttttttcccccattcaactttccaggtcactgacaagtactgatgtgcttgttttctggtgcttttggcctctgtaattttactcctttgtaactgggtaatatatctagcagtcataggcgtcttttgcaaacattgtcataaggatgattagggaagagatccagctagcgataagctaaatatctttccctttaagatgtggttgttcccatggttttgagatgccttaagcgacgctgacagccttacttagcataatcactgtcactcctaaccattgagtaactgattgagtaaaatgatttagattgtaaatctagataattttcttcaatttttttcattttaactgatccttatctcttttttgtggtaaaatatatataacagaatttaccattttaaacatttttttaagtttttgtaaattattttatgtcttccatgatgatttagagggactatcttcaaaccagtacagatatttcataaataatacctggctgttttctaaccaactgagtaatttgttgcataataagccacctcacatctttcagcaagaaatacattaaatttgaatagtaaagatattacacaatgaattaggacaacaatttaaatttgctttaaatgtttctttgcggaagaggacactacacttctactcaatgaagagaaacatttttacagtccagaggtcttttattaccacctattatgccatgaattcacagggaagaggctccagcagttcaggctccttcctattggttctcagagtgcacttctctgggtggagcatgctg

SEQ ID NO: 58628 - DNA, 1047 bp, Homo sapiens
gtgagccactgcgcccggccgagtgaagtctttttgaatagtaaatgcttgtttgtgagtcatcttattgtgaacacccatatattcttttctttttttttttttttttgagatggagtctcactctgtcacccaggctggagtgcagtggtgtgatctcggctcactgcaacttccgcctgctgggttcaagtgattctcctgcctcagcctcccaagtagctgggattacaggtgcctaccactgcgcccggctaatttttgtatttttactagagacggtgttacaccatgttggctaggctggtcttgaactcctgacctcaagtgatctgcccacctcggcctcccaaagtgctgggattacaggcataagccactgtgcccagcctaacacctatatattctgattataaatgttctgagagaagttgttaaaaaacaaaatatagaaaacttattactataggcaatacaacttttatgagtacctgttgagtaatttatgctacaattttgttttatctttctgccagtcagcaaatcacatgaacagttccctgctgtctttatatcggaaaggaaatcctgattctgtttcaaatactcctgagatggagcaaagagaaaccacctcttcaacaccacggataagttccaaaacaggctccattcccttgaagacccctgccaaagattctgaaggaggatggtttattgacaaaaccccaagtgtaaagaaagacagttttttcttggacctgtcatgtgagaaaagtaatcctaagaagccaataactgagatacaggtatttttgtaatgaaattttagccccatatcatcgaagtacatttcaaccttttagttgaatataatatcaatcagatacttgtgttttgtggaaggcataggaactttaaaatatatggagaatttgatcacattgcactgctttccattctttctatcctagtctaagccttttctcattcttgacttaattattgaaacagccttctagctggagtctgtgtcctttcttgttc

SEQ ID NO: 58629 - DNA, 1059 bp, Homo sapiens
agtcttgcagaagttgtatttggttacatgctttggtcatgttgactttgtgaatttgttactcagagtacttaattataggttgctgaaatatttcctctacctgaatctgatatccctaaatgggacccttgggcctgagggaatttgtatctcacttttatttattgctaggataaatataactataatttattttgcatttattatattttgtaaatgcataaggactttgcaagtgtttatttaatcctttaataaccctgggagacagacattacttattaaatctccgttttatagataaggaagctgacgcttagagaggttaagtaataactggttaagttggattttgaatcctagtttctctgattccagagtttggactcttaaccaccataatcttttggctgaatatatttacttgttttgggtagtcatttttttaggatatgggagagaaagtctttaaaacatttttccctccttttactgaggtatactgaaagctattctgatgatgattcaagtatggaagactacccagatccacaggtaagccaaacatttagtgggtccacttagattttttcttttttagttgttatggtacctcccttgaaaaactcagtattagctggacatggtgactcacacctctaatcccaacactttgggaggctgaggcatgcagatcacttgagcccaggaatttgagaccagcctgggcaacatggcaaaaccttgtctctataaaaagtatgaaaaaataagtctggccaacatggtgaaaccttgtctctacaaaaaatacaaaagttagccgggcatggtggcatgcacctgtggtcccagctacttggggggctgaggtgggagaatcacttgagcccaggaggtcaaggctgtagtgagctgcagtgagccgtgattgcaccactgcactccagcctgggtgacagagtgagaccctaccttttaaaaaaaaaaataaggctagctgtcgtggctcacgcctgtaatcccagcactttggaaggccaaggagggtggatc

SEQ ID NO: 58630 - DNA, 1199 bp, Homo sapiens
tccctatgttggcagggatggtctcaaactcctaggctcaagtgattctcccacctcagcctcccaaagtgctgggattacaggcatgagccactgtgcctggcctagaacttattttcaaatggttttgctctacccctccaaaagaaatctctatatgtagacagaagtaaagtaaatgtggcagtttgagaatactataggtaaagaatatacgagtgttgattacattatttctttcatatttttagtaactttgaaattttaaaataaaaatatttgaagcaaaaaaggttagtttaaaaaagggggaaaatggagaaaggtcacaatagtaaatatataaacttagaagtttgaaaatagggttatggcaagtgtctatactgtaacaatgaaatattcatgaaaatttatttgatccatttagattgaacttaatggaaaaatattggtggagactactatggtaaacttcttgttttcttttttcagtatagactatggtcgaagaaaaagaaatgcttttaggattcaggtagaaaaaggtgagtcttattgttagagctaaattatcaataaagttatacaaacgattgttttagctcatagcgtttttctttttgtttcagtatttagcataattagtagtgagaaggaacttaagaatttaacagaattagaagatgaacatttggcaaaaagggcaagacaaggtgaagaggataatgagtaagtataccaaatgcagggtttttttaaaccatgaactttatcatgttacattcctgcttgtaaaactttcagtggctcttcattgccaacaaagccctgcgtgatatttacctaacctcttcagccatattgaatgttctttattccccaaagagatcaaattctctttggctgtgcctttgtatgggtggttttattgagttagagtgtcatttccctttcacaaactcccacacagccctcaagaatcagttgaaatgttactgcctttattaggcctaagacccctttttaaatgtttccttagcttctagttacagatatttgttataatccttatcatatcatacggcattgaaattatttgcttacttgtttgcattaccaacagtactgtctcattaccttctttttctgccctaatacaatatcagatatataaaaaggtgctgattaattttgtt

SEQ ID NO: 58631 - DNA, 1070 bp, Homo sapiens
atgccactgcactccagcctgggcgacagagtgagaccctgtctcaaaaaataaaataaaatgagaaataataaaataaaattagctgggcatgtcgggaggctgaggtggaaggattgcttgagcccaggaattcgaggtcatagtgagctctatcacgccactgcactccagcctggacgacagagcaagaccccagctctttaaaagaaaagcgttgagtaaatacttgttgattaattccatttctggaaataatcggatttatgaaagaggccctgcccacctctttgatatggacttgtactaatgaactacaattcccagcatgcgtcagaattagggccgtagagttttttaaaatatggactacaactcccggcatgccacaccaggattcgaggaccacacgcctcagccagccccggcaagggcctatcaggggtgggtcggggcatccgagcgggtttgacggaaggagcggcggcgacggaggaggaggatggaggcggtggtgttcgtcttctctctcctcgattgttgcgcgctcatcttcctctcggtctacttcgtatccttgcctgaggcaggcgaacgccttgccgggggacacggctgagggtgggccagttgggcacccgggcaggtgtgtgggactagggaggcgcccggcggcgggcgtgggctccctgggagctggcctggccggggcggtggcgcgggccccggagcgggtaggagaggctggctgccctacccgacgggccctgctgccctgcacgcacttgccctgcctgggttgccggccgcccctcactcgggtccgagtgggcctctccgggcgcgccccgtctcggcctgcccgcctgctctccgctcgtccccgcggcgcccggaccagccctgcctgagccacggccgccctcgggagagaagcgtcgctgtttttctgggagaggccctgcgccgtgctcttcgtcggatattgggggtcccaagggcggtcgcttgcgacagtcgggtgccgggataagtgcgggccatttgcctcctcctgttccccacgcaac

SEQ ID NO: 58632 - DNA, 1602 bp, Homo sapiens
atctaggcttagttgttgcccaatgttgtattgcaccatccaggtttaagtaattaaatataagaaaaaacgtatgaggaactccgcatttcagcttcctttcttggaaatcacatgtacctgtttctgatcggattaaaccatttgtttgctagagcatgcgggctttaggatagtcgtacagagtatatgttcagtgcagcttcatttttcattgtggactggcatcctgttgtagtggaaagggacaaaatttggaatcagatttcctggtcagctagctctttgcttgcacattatttccctaagcctcagttttctgatctttaaaataggaaatgtttatttcctagatatgcacaatgagaatggtgctgagcaccctagcacagtgcctgccccatagctaatgttcagtaaatattgctctgccttcgtgtccccaccctccccaattgagcagcagtttttactttgatgatatctaacgacaagatttctgagttttagtaggtttggggagctgattgaaagggcagcatcacttgcctaagttttgatgacctctatgcccctcttgtgatataaggaactagagcaagcttgtccaacccacggcccacgggctgcatgtggtccaggacagctttgaatgtggcccaacacaaatttgtaaactttcttaaaacattatgattcttttttggtgatttttttttaagttcatcagctatcattagtattagtgtattttatgtgtggcccaaggcaattcttcttccagtgtggcccagggaagccaaaagattggacacccctgaactagagcttatgctcagaaatgtagctgggttttttctttttgcagtttggaaaaccaggcttgataattttaaatagccctggtttacaccaatttatgcatttagagaaatggtaggtggaatgtttgacttagacattacattaaaatacattcggggggtgttttgatgaaattcagcatattctgtattttagaatagttgcactaacttagggataggaggtggaaaatggtcacggtagacttaatataggatataagagttttcttggactttgaactgtggacaaaatctacaggaaggggaagaggtgaatattccaaatcagacactggcaagagcgaaggtgcagagacaggtatgttcgtggatttctgggctatggttaacgaatagaccatctggagcacatggttgattttggcgtcagtagaaggctaagttggaaaggcaggattacatcagattttggagggcttgaatgttaagggtgggagggaagtctttcacttttatcctgcaggcaatagagagccattgaaaatttttattttcggtagtttattaggaagatgaatctgccgagtgggttggaaacaagaaagattggaagataaaccaactggatagggtcgtctggatttcaaatagagtgctggttgtgggcaggtgaaaggagggaatatgtgagtagtatttagaagaaatgattgccaggacctacaaatgagtgattatgatatatgaaacagaaggcagagatagctttccatat

SEQ ID NO: 58633 - DNA, 1076 bp, Homo sapiens
tacattcttattattttttgtttttctctgaatatgaaatggtttcctcgggattctggagattggaaaatgtttaacgttgctattctgacttgaaaggcaacatgtgtgtggatatcagacatcccaaattagagctaggggctttggcatagatactagaataggaactaaacaatactctttttttctctagttctcattcaaatctgcttaatgaatgaacctaagcctttgcttaggataaaaagtaattgaaatttaagtgctttatttttaagttgtgccctgatatatttgcatgggatacaaagttatagcagtatgcaaatctgggacatgggagtctaaaaataatcttgaaacagtagcttgtaaattctctgtacgttcattgatttagtttcaaataacatgtacagtcaggaaggacatagcagtgagatgtaatactgtgttcttccattgcagtgggtaattccagaattgattggccataccattgtcactgtattactgctcatgtcattgcactggttcatcttccttctcaacttacctgttgccacttggaatatatatcggtgagtatagtttgtttactttggtgtcaaggtagttaaaaaaaaatttaaaaagttgtgtttttttcaagacaggatcttactctgttacccaggctggagtgcagtggtgtgatctcagctcactgcaatttctgcctcctcagtttaagcgattctcccacttcagcctcccaagtagctgggactacaggcgtgcaccaccacacctggctaatttttgtatttttactagagacagggtttcaccatgttggcccggctggtcttgaactcctgacctcaggtgatctgctggtctcggcctcccaaagggctgggattatttataggtgtgagccaaaaaaggtgtttaagagctttttttctttttttttggagatggagtctcactctgtcacccaggctggagtacagtggcttgatctcagctcactgcaacttccgcctcctgggttcaagccattctcctgcctcagcctcctgagtagc

SEQ ID NO: 58634 - DNA, 3110 bp, Homo sapiens
aggtgccctagagccaatcacaaaacctgagtaagaagttactgctttgatggagtggtgggatggggagaagaggttccaggcatagaacagtatgtatctggctagagaatttaaaggtttttttttctggacataggtgttttttgttttgttttgtttttttttaactgagctaggttgtttttgttttgttttgtttttatttttttaactatagcctaacataggttttaagttgtacttcccccaactccccacccccagtcactcttttttagtgaaaaagtttggacatgaaagatcctaatatattctttcctttgggtatgaatgattgtcttttactcaaatgattgttcctttgtgaaccttagggacgcaagtctggacaaaccaggctctgtaggaacattcctgagaaaacattagtgacattcatttcttctttccacagtatgatcttagctttgataaatgactgaagctggagaagccgtggttgaagtcagcctacactacagtgcacagttgaggagccagagacttcttaaatcatccttagaaccgtgaccatagcagtatatattttcctcttggaacaaaaaactatttttgctgtatttttaccatataaagtatttaaaaaacatgaattgagtttctgtagatttctagttctcaactttagcctgaacgccaacacttgaaggtgtttttcatcctctgtatgttgaaggtggttatttgtatgtaggaacaggactgccatcccagctttgcatgccaaagaaataaagaacacactttaaagggcaaactgaagagatgagcgagcaaaggtgcccttcaggtctactgaaaagttagagtacaaaacaacactgttgatctggacaaaagaagaaaaattaccctttttgcttgtgttgtgacaacttcatttaatatggtttaaagatttatgagactgtcagctaaaagtcttttcacaagaatgtcaacagagaatggcatctcaaaatatatatatttctttgcacaatttgtgaaaccttataagccattttccccaggtacaatgtagttcctgctgatagaaaggaaatattttgtcaagagctttcatttaaaagctactacctccacaatcacccccaaacccagaaaatccccactggctcttgccagtctggttttcgtattgcagttattccaattgtatttgatctccctgataacgtattttcatgggtttgggtagaagatgctaatcagattagaagcaggaatagttatttgctgtctgtgaaattgagccttttggtgcgccacgtggtgccagatcaacacttctatccctctgcactgaccacgttgtgaactgggagaccaaatgcaagccatttcatggacatagcaatatacaaccaaactctgttccttggagttatattgtaaactcttgcaggtgggagagcagttcacctccttagctctgtttgccagctcttacagggtaaaataaacctggcaatttatcctcagtcctagtttgtggtttaatgttgctatcttaagcactggcatttgggcaaaacatgactgtgttctgtgggagaatccaaaggcattattcactctagttgagatagaattgggtggctaaacagggtgtgtggtacccaaaagattaaatgttacatgtccttttagtccttgaccaggtctagccttggcagaagcaagggagccactaagccaaactccctgtgcagacagaccatgtttcaaggctggaagtagtgccctggcaacacacaaaaggaacggtgaaatggtaggcaaagtgaacttggctctgctggcctctttggggtcacagaaattgctccttgtggtaatcttatatttctgtcaggcacagggccaagaagctgtgtaacagacattactttgcttgcatctctttttcataccttttccctctgaggcagcttttgcttagaaaacagtcccttcactctgcctttcctcctaacttcctgtgcctcttcatgttctgctcaagctttttaaagcaacgaagctgttggagaacttaaatccttgcaactgagagataagctacttaaaggcggtagagatctttttttttttttttttgagatggggtcttgctgtgttgcccaggctggagtgcagtggtgtgatctcagctcactgcaacctctgctttctgggttcaagcgattctcctgcctcagcctcccaagtagctgggattacggctagctactcctggctaatttttgtatttttagtagagatggggtttcaccatgttggccaggctggtctcaaactcctgacctcaaacgatctgcctgccttggtctcccaaagtgctgggattataggtgtgagccactgcgcctggccatgtagatgacttttgaccaaaatgtttcaccttctcattcagatattcttagtaaccaaaacagtgactcatgcagttgagagagcctttgggctgtcagtttacagtacatcaggcttgctgaggctaagcaaatcagaaaggtgccatgtttataacagaggtcaaagctccttacttctgaaacattagctgtggttaaaaacaaaaactcttccttcttgtattgcttgtctatcaaagccaggaaagtgggggatcactgtagttaaattttttttttttttaattagagacagagtcttgccctgtcgcccaagctggagtgcactggcgcaatcgtggtacactgcagccttgaactcctggactcaagcagtcctcctgcctcagcttcccaagtagttgggagtaggtgcacaccaccatgcccagcgaattttttgtagagacagaggtcttgctatgttgcctaggctggtatcaaaattactggcctcaagcgattctcctgcctcggcctcccagatgttgggattactggtgtgagccaccacgcccagctcaaaaacaatttttttaggggcacttctacaaatcatgaaagggggataaaagcactgactttaaaaagccatgtttaagatgctataaatgttctcccctt

SEQ ID NO: 58635 - DNA, 1003 bp, Homo sapiens
gtgttgtaactgggaacatctgaatgctgaggcctagagatcgttcagggtgttgtaactgggaacatctgaatgctgaggcctagagatcgttcagggtgttgtaactgggaacatctgaatgctgaggcttagtccagtgttctctctcccttaccactcctcttccccttccctctataatggcagtacccagggcccggtccatagactactatcgagtgctcctatgtgcatcttagtacgtatcattttcccttgcctttttccttctatcctttcagtggtagcaactgcccttgctaatcaccgtaacctcggctgagaaagaagaggaagcgaaatccaagatgcagctcagttcatcaaagcctagcaggtcccctcagctgccttttcatgcctgccacagactacagtaggacaaaacctgacctggtctttgaagttaagagctaagaaagcttcctatagtagtatctcccatggcacttaccacattctatctggtattacagttatttgtatgcaattaatcactcttagattgtatgttcctggagggcagaatatgcccattcatatttgtatcttcttccttctgctcttggcacctaacacagtgccttgcacacaaacaataaatgattgttgagtgaataagtaaacctgattgtggtgttctattgctttttcagcaagaagtcaaactgatggcctttaagtcagagaagcagcaatggagcaacataatcaaagttgaccatctttgttttcaagacagtcacattatgaaatattctgacatgctaggctaggaaatggctataactggttcacttgagactggagaaatcagctttgctaacaggtaatactttgtcaagtagtgagaaatattatatactaggtataattagttgtccccaaaatctaaataaacttgttctaatatatggaaaagggcagcaagatagagaaggtaagtttgaaattctacaat

SEQ ID NO: 58636 - DNA, 1660 bp, Homo sapiens
ccatctctaaaatgtataaatattttgatttggttttactttaatttctcattcataatttcgcaactgtccttttgggttgccctccaacacattacttccatttcagaaaccatatctgatttaatataaactgctaacttaagaagaggtgaatttgcatttacacttagacactttctaaaaacagggtgaacttaattgaaatttttcagtgttgttaagctattgttatagtagctgccctatagttacaaaaataaaaactataaaaacccatcccctatctacttaatccagatagcctggatttaacaaaaccaatagtataaaaatgtgtgtgtgtgttctgtgtgtgtgtgagagagagagtacttgattcattaaaaagtcctggaaacagctgttctaggatcttgtcatttttactgaaagtctcgtgcacatgtgaagtgccctctgagtttaaggtttggttaatactggtatatttttataagattgaaattgtgtccccatctttaacttaaacattttcattatcagggtcaatgtgctagaactgaattgtaacatttttaggcacagatggaaaaaaatgttattggctccttgaaaatgtgtgtgtgtggcgaggggaatagatccacaaaagcatgtatgtacttacaaaccaagctgtagagatcaagaaaagaacttaagtgttgatctcaagatttctaaattgtcaagatttacatggcattgtggtggaactagttaacacttagagcttttggtatgtaataactatttgctatggactgattaaatgtttcaaaagattgtgttcttcaattttggtgggttttgatttttgtttttttaactgcctctcagattatatttacttagtttaaatttctttgctttattcattaaagtataaaaacttcaggtctctgatatttattttcacttgtttactaattatttacaaaacaccctttgttgacttttattttataaatgtgtaatgtattaaacgtctttaaatttttgttcaactgaaactacattaactttgatttgctttactgggatttttttttaaagacactttttccatgtcagtgcgcagcacttaaccagtcgtttgtattccctttctttcaatccaataaacagaatgaatacctaaataattcttggtgtgttacatctcctaatatccattaatctgaatgtttaagtagtactctttttgcctaaaacatttgctgattttttatgtattttagagagagtctcactgtgttgcccagactggacttgaactgctgggctcaaaatatcctcctgactcagcctctcaaaagtgctgaaataacagacacaaaccatcatgcctggctatgatttgctgaatttgccttccatatatgtacctagagtttgtgagtgatagctaaagaagcagtggttagtctgttgggatcatctttttttttttttttttttttttttttgagacggagtcttgccctgtcgcccaggctggagtgcagtcgtgcgatctcggctcagtgcaacctctgcctcccgggttcaagtgattcttctgcctcagcttcccaagtagctgggactacaggcgcccgccaccacgcccagctaa

SEQ ID NO: 58637 - DNA, 1062 bp, Homo sapiens
aaaaaaaaaaaaaaaaagatgatcccaacagactaaccactgcttctttagctatcactcacaaactctaggtacatatatggaaggcaaattcagcaaatcatagccaggcatgatggtttgtgtctgttatttcagcacttttgagaggctgagtcaggaggatattttgagcccagcagttcaagtccagtctgggcaacacagtgagactctctctaaaatacataaaaaatcagcaaatgttttaggcaaaaagagtactacttaaacattcagattaatggatattaggagatgtaacacaccaagaattatttaggtattcattctgtttattggattgaaagaaagggaatacaaacgactggttaagtgctgcgcactgacatggaaaaagtgtctttaaaaaaaaatcccagtaaagcaaatcaaagttaatgtagtttcagttgaacaaaaatttaaagacgtttaatacattacacatttataaaataaaagtcaacaaagggtgttttgtaaataattagtaaacaagtgaaaataaatatcagagacctgaagtttttatactttaatgaataaagcaaagaaatttaaactaagtaaatataatctgagaggcagttaaaaaaacaaaaatcaaaacccaccaaaattgaagaacacaatcttttgaaacatttaatcagtccatagcaaatagttattacataccaaaagctctaagtgttaactagttccaccacaatgccatgtaaatcttgacaatttagaaatcttgagatcaacacttaagttcttttcttgatctctacagcttggtttgtaagtacatacatgcttttgtggatctattcccctcgccacacacacacattttcaaggagccaataacatttttttccatctgtgcctaaaaatgttacaattcagttctagcacattgaccctgataatgaaaatgtttaagttaaagatggggacacaatttcaatcttataaaaatataccagtattaaccaaaccttaaactcagagggcacttcacatgtgcac

SEQ ID NO: 58638 - DNA, 2411 bp, Homo sapiens
caatgacttagatacacagtataactgatgctcttctggaataccacatgagacatggtcagaaacagtgcttggaaggacattacacaagaaattcagagtaatgctttgaagatttccccccttttgttttattcctgaaggaacatcagtacccgatcttgaagaaattcaagattcaaaaagaattttaaatacaccaacatgagacatcagtagtcagttggttttcagtaaagcttgttccaagttgttctcaacttaggaagtaattttggtgtgatctagcaaaagagtaggaatcagcgatacaaccactttggaagtttatagtataattgaaattattagaagaattcagcaggttacagacatacttaaactgggattaaaacctcatagtcatttttcttaattgcccttaatattttgacatatagggatacataaatttaaagaatattttttctcagttttttcagatattgccatactgaacctcattctaaactggtgctgtggatagtctttccctctcccctcctgttttagtttaaggaaaggtttccttcatggaaaagcacttttaattttgagaatttcacatttaaaataagccaaaagcctgatgttcacattgtgcttttaaactccgtaacagctgaatacaacataacatagtctcccttgaaattccctccctttttcagtagaggataaatagggtgactccagctgttggaatgagaatggggatacccccaaaataagattctggtgaagaaaaagtcttgtactaagttcccctttaggtgtagccaagtctataatataattatgatcatgaatagactccagaatccacaaagagaagagggcttggatgtcaaaaattcttccattgtggggtaggtggtcggggatgggagaaagggaaaagtcagggaaggggagaagaaagaaaaacacatttggccttaaaatagcatgcattctcccagaagcccatagtaaagaaaatgacagatcgtggtcagcagactcttatcaaattggtatgtaaaagatttcttcaagctccattttgcagagaccaccacttagagaatcaaaaaattcctgttttgatacttctaagttaaaatatatgttacagtttatctggtacttcatttttcttaactaaaattactttttactttaagcttgaataaaaatcttcattggtaactgtatgtaattaagtggcaacttctctttacctcagtatagttaaaaaccattcatattttaagtgattcatgtataccctgaagccgttaatacaccccagtctctatggtaacatcactaaatgtgggcatagaaactccacagctgtttacaaatttggttacagtgtgctacggtgcatttgtaacactcagatttgtgcccattcaggggcaatttggcactcagattctactctacttcacctaaccacccctagatctgagttttcagagtgcttctgaagtacagtttaaaaacactttttaaaaagtggagtaaaagtgaggcacattttacaagaacataactcctattaaaacggagtaacaactatgcaaaggtttctatagcagctaggtgagtttgttttccgggtctgtcttaactggcagcttcctgtacatactggtacttatttgctgtaaacgtctgtttcatacatttgccatgcagtgactgtgctcgaaaggtgaaatcaatggtaaagaagcctaggattttatggtatgagaaactgatcgcaggattttctgatccatagctattaattgaaaacttctgatagtgctgtaggctctatagtaggcttaagagtgagtcttatactatgaagccagccacaagatactaacaaatgtataaattgaaaagtaccaatactttttgcacatagatcaaaatagagtggagaatttgggctccaaaaatcaggttagtaggctcatttccatgtgcttaaaaatgtttttgttgttatgcattgattaagggctagagcaaatataaaattaaatgtctttttcctccaaataattggttattaatggtaaaatgttggacttggggattactgagattagtatgtgggtagtaaagaattggagtgggagttagtggggagggatgacaaagcttcagctttggtttttgtatttttttagtcttcataacagctacatttctgttgctcttattggccagataaatgtgttatattaaaccaggtaagtattttaaacagagaacattttatttgcatatatccctacaaattggcccattttattgggtggggggataaaaaagggattccctaactttaaataatcagaatatcctgcaattgaaaggagaaa

SEQ ID NO: 58639 - DNA, 2328 bp, Homo sapiens
gtagaattaaggttttttttttgttttttttttttttttttttgagacagagttttgctcttgttgcccaggctggagtgcaatggcgcaatctcggctcaccacaacctccgcctcctgggttcaagcaattctgcctcagcctcctgagtagctgggattacaggcatgcatcaccacgcccggctaattttgtatttttagtaaagatggggtttttccatgttggtcaggctggtcttgaactcccgacttcaggtgaagtcggcctgtcttggcctcccaaagtactgggattacaggcatgatatttttttttttaaggatgcataaaatggaatagaaggaagtaccgatgcatgctacagtatgaatggaccttgaaaacaatatgctaagtgaaagaagcaggacacaagaccacatattatgattccatttatatgaaatagtctagacagatctatagacaacatagatatagtgattacttagggcttggggaagtgtttgactgctaatgaatgttgaaaatgttctaaaattgattgttaatgattgcataattctgtgggtacactaaaaaccattgattttacacttttgttttttttgtttttgtgtttgtttctgttttgagatggagtctcactctgtcgcccaggctgaagtgcagtggtgcaatctcggctcactgcaacctccgcctcccgggttcaaagtgtacactttaaatggttgctttgtatagaatatgaattatatctcaaagctgttatacacctccccaaaaaaatggagtaggatgatactgtagaatttcaaacagagcaaccaaaaggaaaattaacaactccatagttataacacgttattctaccttagactgccagatctttctttcctctttactattgtagctatcataaaaatttatctattctgctaactatctcaaggttaattttaaaagtatgagattctgaggctaggcacggtggccagtgccttataatcccaacattttgggaggccaaggcaggcagattgcttgagctcaggagttcaagaccagcctgggcaacatggcgaaaccctgtctctacaaaaaatacaaaaagtagccaggcatggtggcatgtgcctgtagtcctggctactcaggaagcagaggtggaaggatcacttgagccaaggaggcagaggttgcagtgagcccaaattacatcaccagcctgagcagcagagtgggatcctgtctcaaaaaaataaaagcatgagattctaacatgattattcacttgggtttcttcagtattcaaaatcatgaatttagatcataatatatggtctaagacatgatacagacattgttttaatgagtatgatgaaagtttcaagaatttgctttgattttttaatgttagtataattttgtaatgtcataatgctaattttgaaactttctaactggtaatttttttctctccttcccctcttccctcccccgcccgccccccatacatttcatcttgtcttcattcagaggaatgcagtagcatggatagttgatggtgaatttggagcagacgacttctgtttaacttaaaattagtcgtattttaatggcttgggatttggtgcaaacaaacatgattgatagctggacagacatgctcgtcatgaaaaaagaaccatttctgaagcccgattggggccaaacatttacaccttgcttcatagtaaccagttgagatgaagcacgtcgttagaacgttgttggacaccatgttgaattattcccccatcggttgtgaagaactgtgctacattcaggcttacccattgaactcagtatatatatttttttccttcctgtcttttgtctggcaggataccattcttgttgctcttctgtgtaatgaagtttaaatgcttgtttggaaaactttatttaacagtttagaaggcttgatagaaagagtgcattagtctgaagagtatacattggataggaaagaatttccttcttttgtttctccaaatctttccgccttatttagcttgagatctttgcagcttggttcatggattctagccttgcccgttgcgcagtatatactgatccagatgataaaccagtgaactatgtcaaaagcactctcaatattacatttgacaaaaagttttgtacttttcacatagcttgttgccccgtaaaagggttaacagcacaattttttaaaaataaattaagaagtatttataggattaaagtgacttcatttgtatacatttggaatctaaaccagcttaaaaacagtttcc

SEQ ID NO: 58640 - DNA, 1514 bp, Homo sapiens
tccatagaatttatcactatctctatcctggatttgtttatgttcaaaggccttgatttataattcttcattactcatgtattgacagaatattgcagatagtttttttgtgtgtgacttgatgagagctgatcacctttaacaggaaaaaagtgtatatttgatttaaacattttttcataaggtaacatgttaaactattcatggtatatttattttccctttaagttctagtaaagagtcctgtgtgtagtgaatgataaatttaagatcagttagttggttttattaatgtaaaacttttttctgaattactatatgttcagatcacaaggtttacatctggcacaaacgtagtgaactgccaattgcggagctgacagggcacacacgtacagtaaactgtgtgagctggaacccacagattccatccatgatggccagcgcctcagatgatggcactgttagaatatggggaccagcaccttttatagaccaccagaatattgaaggtaatacctttgtataatgttactatgttttgtccaaatgaaacatcactcggcttattatgaacttaaagcagttttaagcaagtttatttaaagtgtggtatatgatttctctcttttacatattgtaccctatctcaggccacagaatgagtttaagtagtgtaagagccaataatgtagtggttgttttggggggcacagtgaaaagaataagctggaatatgatacctcattgacatccagttagctatttagtagtttcactttaaaaatgttactgaaaatcttgcttcgtcatgctacctaaacgtaatattgtaggaagaattttatacacatgaaactaaccatacaaaatattaacaactttagatattaaatatcttgattatagattttactctttaaaaaaaagtaaacgtctgtttgcaccatgcatcatactaacatgagttgtgtttaatggatagggaaagagaagagagaactaaaattgatcatgtacctgtgtgccaagcagcatgctaatccctttacatatactgtcttgcataaagtcttcatagtcctataagggaagtatttttatctttatttttagaggtaaggaaactgcagcatggcaaaactaattcacttgttgagtgccatcaggtcttcaagtctaagtctgaaaggttttttccaccactttgagatacttggggatgaagaaaggccaaaatataaggctaacagttaaagccaaaaacttaattgaacatgatatatcagtactacagcaaagagataatgagaaacttcatgtaaatgactctcttaaatagagcacgtaaaatgtttggtttgcttagaaggaagcagtttatatataaacagattttttgttaagcatgtcccacctaaattttttttttttttttagtgagaaagatgactaattgctctcagttaagtgattctctgtggaggagggttatcggagtagcatgtatggtt

SEQ ID NO: 58641 - DNA, 1583 bp, Homo sapiens
ggtgcaaccacttggaaaacagtttggcagtttctcaaaatgttaaacagagttagcatacgacccagaaattccactcctatgtatatacccaagagaaatggaaacatatgtctacacaaaaactcatacatattcataacagcattattcataatagccaaaaagtagagaaacagtccaaatgttcatcacctcatgaatggataaacaaaataattatactgttaaatattattcagcaataaaaagagattaaatactaatacattctataacacggatgaaccctgaaaacatgctaactgaaagaagccaattaaaagagaccacatcatgtataagcctatttatgtgaaacgtccagaataggcaaatctatagagacagagacagaaagtagtggttgccaggggctgcagggaggggtatggcagctgctgatgggtaggaggtttctttgggaaatgatgagaatgttctaaaaattagatggtgtgatggttgcacaactctgaatatactaaaatatactgagttgtatactttaaaaggatgaattttatggtaagttatatctcaagttgtttaaaaatatgtaagagatagctcttattatacccatctgttttcagttgccttgaaagctttctaaggtcaaattcaatatatctttatacatatattaaaaatgttaatatatctttatattttcatcaagtacacaatgacttgtatatagtagatgcctaatagtgtagtagatgcttaatagatgttgcaatgtgaatgagtctttatgaagcaagctgttaaagggaaaattggtctgaaaatttcctcagattaaattatcaaagtacatctttgtagctatttaagttcttacattgggaaacaatgactttagtgataggggttaactgaattgtttattttccctcccaggatacacacctgctaaaactgcttaaaacattagaaggacatgcttatggcgtttcttatattgcatggagtccagatgacaactatcttgttgcttgtggcccagatgactgctctgagctttggctttggaatgtacaagtgagcgagttccatctttggttgagcttttaagtacagcatagtcataatgtacatattcattataactttattgatttatataatataaccattcaacctaaattactatactgtatctcttagttattcaagtggaacccaagtttccagatttatcaatttaagtattatgctcagtaatatatttttggaagaatgatcagtaagtgttttcaggatgtttggctttgtcctatggaatttatgctatttactgtggttcttcagaaagaattttataatggtttcatagtttcacaattgtacattacacctacctttgaaatgttaaaggtcagcattaaaccaaattttcgattctgatggcagttgcaccatctccttgcctatatttaatatactaagctagtttagtgaagctaactgatgttttcagtacttattcctaagggctttattgcttggtttgttcgtttgtttgtttgtttttg

SEQ ID NO: 58642 - DNA, 1014 bp, Homo sapiens
gcttgcaatgagctgagatcacaccactgcactctagcctgggcgacagagtgagacttcatctcagaaaaaaaaaaaagaaagaaaaaagcagttcagagttttacagaggaatgaaagcatcctttttcttctgaaataaccactgattagaaggtcttctctgtaatcttaaaacaaaaccttcactctatgctcctacttacctctctttctctctccccctccactttagagctgacttcttgaaatcattgcctactacacattcgcaatgtctttgtccttacttttccttcactcttcatatttctttagtattaggacctgtgtagctaacataataccagaattgtagatgttggtgagaatacctctttcacattcagtggatattttccagcctatatcttcaccttactatagcactgtactactttactttgaaacttttcctttgacttctaaaacattctagattcttagtttaactcctggctactccttaggctcttcttctttacctgtccctttaagaaatacatgttccaggccgggtgcagtggctcacgcctgtaatcccagtatttggggggccgaggcgagtggatcacgaggtcgggagatcaagaccatcctggctaaaatggtgtaaccctgtctctactaaaaatacaaaaaaaatagccgggcatggcggcacacgcctgtagtcccagctactcaggaggctgaggcaggagaatcacttgaacctgggaggcagaggttgcagtgagcagagatcacgccactgcactccagcttgggcgacagagcaagactccgtctcaaaaaaaaaaaaaaaaaaaaaaaaagaaagaaatacgtgttccagaattgtttcttccctcatccttagttatacttccatggttctaatgacaactagatacaggccagagctacagaatttatctcctgagccttagaccttaatgccacaatttgggttctcaagtacattaaacacag

SEQ ID NO: 58643 - DNA, 1134 bp, Homo sapiens
acaggctctaaaaatggctagaacaacagctattaacttatggtttgggttttttttaccatgtgtacccatgtccataatttaacttgtaagaattcaggcttctctttcgacattaggagtattttgagtaaaaatatacctactattttaatggtctctaaaattaaagtatagctttattttgttcttgatgtttttgttggtttcttttttagacacagcctctctgttgcccaggatagagtgcagtggcatgatcataggctactatatagccttaggctcaagtgatccactcacctcagccttctgagtagctaggactatataggcatgcactaccatgcctggctaattcttaagtttttttgtagagatggggtctcttgccccagctggtcttgaacttctggtctcaagcaatcgatacttctgccttggcctcccaaagcactgggattacaggcgtgagcctccatgctgggcctaaagcatagctttaattttaagatatcgaataacaaattgtgaaatatttcagacttcaagaatgaaataatttgaatctggtgaaccaaacaaaaaggagaatagagaatagctgcaatgcatgtgctcagttgcttttaccagtgatatcaaagaactaatgaaagtaacataaataaggacaaaaacatattaagtatgaggactttggaataacgaggaacttctgaataaccgtaaaaattgtctatatatgcatatctctactgtgatataaaataattttttacatgtgtataaaccacttttgtacctattgagtttttaacctcactctccctacttgaagtacaaaaataataattgtttgagatattggccttactttatcttaaaatattagattattacttggtacatatcttaaatattctacaaggaagtgattagaaattttttcccctatcccttttaaactctttaataatgttcattgacctgcttctgaggatttaaaaatctttttgtataaaattgaatagcaataggaagagataatagattaaaagactatatagtttcatggttcatagctccattcgcagatttgagaacagtgttaaaattaagacgcttgtgaac

SEQ ID NO: 58644 - DNA, 1067 bp, Homo sapiens
ttatgtgatgatgttcccccttaagattttgtttgggggaaaagtactgtgttaagagaaaaaaatatgtaaaccacagttttaagtcacaagtgctttaaagattttgttgatttcaatagtaaggtccaggtttctttaggtaaattgttttattcttccccaaccatgttatgtttattctagattgtaatgcaggtttcatttttgctgtatttttatgtaaaagatgttctctctgaaaattatatgattctataattttgatgttgaaatgacagtgacgatcctaagaatcacaaagccgtgcagttggggaggtataagggattcaaggattgcagtaggttggtatggatatcaaaacaccagttactccctgaattcacacagtatctttggcatttggagcaatttgtacttgatcttagccaaaaggccaagaggcgatttttagagcagtttgatgggaactagaacttaacctattgcaacatttgccaaaattttgctatttgttaagtggagattttacttacacctggtctcctggtacacaataatatctaatattcttttcattgttgtcttctttttcttcattttgttgttgttattcctcacttatcctccctgcccctagaaaatccacatataaagtaaacccctcccaccaaatatatccaattttatgagcagcatagctattgctgctgacaaatattcgtaaagctcacgtatcgcataacgcagaacttctctatttaaggaatagatactattggggtaggaacaagtacagcagaagatgagcaaatgtcttaaataaaagtttacagtttattattatttctcttttttaaaatatcttctattaaagcctatttaccaccatcagtgatgcttcccccacggcgtttacagactctcctgcggcaggcggtggaactacaaagggatcggtgcctatatcacaataccaaacttgataataatctagattctgtgtctctgcttatagaccatgtttgtagtaggtaagaggaaaacttcctatattctgaaac

SEQ ID NO: 58645 - DNA, 3209 bp, Homo sapiens
gagcaacagcagaatttacgacgtgaaactatcattcaagctatcctagtcacttaacaatttcaaatttattagatattaaaatggagaaggagatcttgctgggcccagagatggtaaaaaatcattagagaccagaaataatctcttaagagatctagttgggagttggggaaagacataaaggagagtttattttcctaatctttttttgtctttatttcttcaagattttttaaaaaatataaacattagtagagccctgtccccatctcagcaagctttaattttgtctgatttttacaatgttttcagtaaatatttaacattatttgttaattaaagggtctttgctttcttgaggttatatttacatttttgtgctttaaattttgggaggtaaaatacagttttactccccacccttatcgtatgtgtcaaatacttcaactgattttttggagaataaacattttctttcaaacagatctctagctgtgcttggccagcagcatgttagttgccatgcacaataccaggatttgatatctgtttgagaatattcttggtcttgatctggataaaatgactcatagagaaatgctcttgtgctacttttatagcattccctgtatatacagaaatatgtgtttatattggcttctctcagagttttagtcagcctttctctgctctcctgccccacctctgccccatagaaaaagagtaacatgttgtatcaagatcttggtgggaaaataagggagaaatagcgctttgggcactgtccctgcacacattggaatgggggaggggtgggcataggagcctaatgattgataccaaaaaaaataaatattaagtaaataaaaaacttgccctgaaatttttttttaagcccctcaattcccaattactaagaaaatttagtgaagaaattacatctcatgctctggccagttccatgtgacatttaaatgaaaaagttctgcaactgaataagattttcaagtttgaatttaaaaaataccacaaaatggaatgaaactttttttttttttttttttttttggagacagagttttgctctcgttgcccaggctagagtgcagtagcacaatctcggctcactgcaacctccaccttccagtttcaatcgattctcctgcctcagcctccgaagtagctgggattacaggcacccgctgccacacccagctaatttttttgtatttttttttttagtagagacggggtttcaccatgtttgtcaggctggtctcgaactgctgacctcgtgatccacccgcctcagcctcccaaagtgctgggattacaggtgtgagccaccacacccggtggaatgaaacttttaacattatattgataaatgaaaatatatgaggtcttcatttcatagttgcatttttttcagaagctaaaatggtgcgaatatccagaataacttcaaatataaaattcttttatttttagattttttttttttttgcattgtttagtttttggtttctgtgacctgatgaatgacaaagttttttcatttaacatagaaaggttaacttcaggctgtatgtacagtaatgtacttttcagagcatcttggtaattaatgtatttctgaaacattcattagtcattctaaatttatatgtaaaatttgataagtgtaattttcccagagttacaggagtgtctcagtttgaatttttttctgttccttagccgtatatttaagatgagatttgtatcaagcaaaagaaatgtatcttataaatttaaatacatgcctaacttatatgagagggtttattattgcttactttctctagaaaccacttttataagcttacagtttatatctctcttctaaatactccttgatagaaaatcttgtagagcagtttattatactgttaattctgcaaataaatggtaatttctccacagcatttcgtgacagcagtgtatttttttatggttttaaagtaagcattttgggccgggtgcggtgtctcatgcctgtaatcccagcactttgggaggccaaggtgggcagatcacttgaggtcaggagttcaagaccagcctggccaacatggcaaaaccctgtctctactaaaaatacaaaaattagctgggtgtggtggcgggtgcctgtaatcccagctacttaggaggctgaggcaggagaatcgcgtgaacccaggaggcagaggttgtagtaagccaagatcacgccactgcactctagcctgggccacagtgagactctgtctcaaaaaaaaaagaagaaaagcatcttacgaagaagaaaaattgtactttaagttttaattttaagtggacttgagatctttaccgctgtattccttggagtctctaaatatgactaacatttcctacctactgatgtctctgtttacattaattggcttgctcaagctccacaagtagcaactatgatgaaaaggtccctccaacctgtggtccttaattaggtttaaggtttaaaagaagtttcaaaatgatgtttataaatatcccttttctcttgtaaaaaactgctaagattgtgaccacgtggtttcaagttaaaagtaaaataataaagtagcatttaaaagtattaaagtcaaaaacacagttcaggaaaaaactaaatgtgaaagtgtctcacagctggaaagtggtttattggtttaggggagaaaagagcgaataataatttcctgtgcttcacttttaaatgcatcagtgatcagattgtcagaaatacacaagtacaaatattgaatctttttaaaaacctttaagttcaaccatctaacgtagacatcccttaatagccgcctagaagagagtgagtgcatcaagcttatgcttgtccacgttagttgtaggaaattcaatactttgcacaccaacttgtagtacatttgttggacagctcttaacttttgataagccaaaatatacttttctccttctcctgagtgtgtctagttctgatttctggtctacttattccctctttcacattgtgacttaaatagttcatttgctatttttttctctaatcttttcaaaacttgttgcataaaaccccccagtgccctagttataaagtcatacttcttaaaaagcaaatttcaagtacttggaatagttctaaatttttatacaagaac

SEQ ID NO: 58646 - DNA, 1219 bp, Homo sapiens
ggcttcaggtgaattaaaggtgcaaacaagcaagaataaatgcaaattcatttaaattgatgatgtagtgtattatttttattctttcattaaatacttaaaatattaaaaattttaaactactgttgactaagatgattggtaataagttaacttataaaataattctgtagtaaaattgaaaaataaaaacagaagttaaaatagttaaacatctatattcaaagggattggaaatttttcgttaactaaagtttcctcagttggtgtgtttggggtttaaaaaaaaaatacccaagtacattttattgagcagttctgcataaatttttgcttctgactgaatgagctaaaataaaaacagttagatggccaaaagaagaattaaggttgctttcccattgggcaagttagcactacttgtgtgttgacaataaagaacttgcctgtggactggtttaaaatgtgtgtgatttcttggaggttgtttaagcttcgcccaaattatatctgtaatttagtagtaaaaaatttaataggcttacttcctatttttttcttatttgtttatagtaatttgagagttctgtattggatttcgattatgactatctcattagaaaccttcattagaggcagcatgtaaactgaagaaaggtagttatagataataaggaggaatcctttctttttacagcctgttcagtctgtagaacattctaggatctaataaaagatgaagattaaatctctggctgagcctcatgccatcaaactgtttaggtatttataaaaagaaaagggttccaacttttatctcactttaagcattgatgaatcaattgcttttaaagattaatttcagcattttttgaagttgctcttcacctctctaattgtgtttaaatttacttttctcatccatcccatctccagaagaagagaatctaatataagcttaaatttgtaataatatcttagaagacaactattagggtttctttaaacgtaattattttaattgtatacccagacacatttgatggcttagtctagactaaaattgtactttattttttaagcctgaatgttttcattgacccaatccactctctctacagcctactccctttgttttttttgtctgtttgtttgttttgtttttttttttttgagatggagtctcgctctgtcgcccaggctggagtgcagtggcgcg

SEQ ID NO: 58647 - DNA, 1033 bp, Homo sapiens
gacttctccccacgcaccttcagagcttaattgtctgtcaataaagacagatgcgggagtgtgtttctgtatgtgttgggggaggggtggattagagctggtggaaataatgaaccttggaggatttgtttttcaagtgtatcttggaggcatctttgtgggacacctccccacccccaaccgtggcagacaacaacccaagcaaactaccaatcaggaaagacaatcacctacaagtgtttatgggaacggaggggctgggatcatttggaaagaggttgttgaataaatctgatgcgaataatgaagatacagtgttgatgtcgtttaaaggcccttgtgtgtgtgtacaagaggcctaaccctaactagtctgaaatctcagtttaataccaagaagatgatcgcctctgaaaaggggacatctgatctggtgaaccatttgttttcaaatacaatttaggtggccttgtatacctaacatagggtgaaggtagacagcgaccttggacaaaaaccaccgttttgtatacacacaaagaaaaactaagggggtggaaggtaggattggtgggagtgcctgatgaaggaggtgcaagagacggagtcagaatgaaatgaaggggggaggacgtgcagcagcagtcagtttcctacattcagagtgtagattaagctctcaggctagccgatgtgtacttttgcatttatggatttcttggggagtggggaggagaacagaactttttaaaagtggcacaagtatttcggttttcaggcagatcattgcactgtttagctaaaaattaagttttaaagctgaataagaaagcattgaaacataagcacaaaaaatagactgataaatgaaggttcttagataccagaatacatgagggaagaaaatacagttgatgaatcttttaagtgctcaaagacaaatatgtggtaggaagaattcactttattccctagggaaaaggattagtatgaaaacagattttgtaaatgctaacagaacatattactgaga

SEQ ID NO: 58648 - DNA, 1058 bp, Homo sapiens
aaaaagaaatcaagtgtgtattttgatacttgattcatttgtatttgcttctgtactgttttaaatagagacctgttaaaaacgggtctctatttgacccatcttgtgttaggttccaaataagaggtaacttcttgtccttgaaatagcaaacaagcctttttcacatttctcaccttttttcagggatgctgtagaatcaaatatcgagtaggtagtggaactaattgacctccaggcctttccaactgtaagaggtctgtgaactgtatgagactcccaactaatgtataaattccttgagggcacgatctgtgtattgttcatataagccagtatttttcagcttttgggttgtgacccatttgtaagtcatggaatccatttagtgggccataatttgtatttttaaaaataaggtggcaaagtataaaagcatagaagatatccaagtgaatcactcaaaagaggggtgattattattttgtgaaatttttgtttcaatgacagacacatgtctatgctttacaaagtaaaatatatttcttctgtaggccattgtcaaaaaagtttgaaaaacgttcctataagccagtccagactagactagaaggcaactcaagaaataggtgttggatatataattaacaaatcactagtactgcccacggcaactattttttttttttttggagacagagtttcgctctgtcgcccaggctggagtgcagtggcgcgatcttggctcactgcaagctccgcctcctgggttcacgccattctcctgcttcagcctcccgagtagctgggactacaggcaaccaccaccacacccggctaattttttgtattattattattatttttagtagagacggggtttcaccgtgttagccaagatggtctcgatctcctgacctcgtgatctgcccacctcagcctcccaaaatgctgggattacaggtgtgagccaccatgctggccttttttttttttttaaatacagacacagtctcattatgttgcccaggctggtctcaaactcttgagctcgagca

SEQ ID NO: 58649 - DNA, 1076 bp, Homo sapiens
ataaaacataaaaccaacatttctcacaagtctttgtaactagtagagactgtagttgttctgtccagatataagtgtggtatatcaacttggcacttagcaacattgatatttaatttgttaaatttttgttaggaagaggtgttttcagatctcaggtgtctttgggaaggaatatttttatatttatatctccagcttcattcctagcttttctttggaacactaaaattgtccagctggacttgttgggcctgggtgggattgggagaattcaggagagcacagttcttgggccagaacagttggtcagctgattgactctaggcaagtcatttaactttcgcagcccctcaggcatgtcatgtttaagtggggataatgacattggcatacctgcttgctagagttaatgtgtgggtcatgagataacgaatataacaaatatttggaaaagtactatgttgaaatattttaaaataaaatttaaatccctcttcatttagaaaggatttgaggcagctaaatgcagaggtgtaagatggttttttggttaggattgtttctgagctgtgactctgtagtcactttcttactcagccctgccactcagctgtattcctctgtagctctgggcagacgactctgaacacggcttcatattggccttccatgagtgggtgaagggcatagtcatctggcagttttacctgctgttctatgcatgtctctccagcgcttgcttattttccccttctgcaaacattccattcatgccatgggcattcagtacagtcctgtaagcaagggtaggggcggcacaccaggtggatttaagcgcaaagacaggacgactgctttgccacaggcgcctttacagccagcagtgaacagttagacatattcaccttcctctaggtggaaaacagtcctcttctcagtagccctctcatgttcttgagacccatttgatataaataacaatgttgcaggaaatttcctgaaggaactgaaatgaaccatagaaacgagatcattcttttcctaccacacagctgggattagactgcttagtt

SEQ ID NO: 58650 - DNA, 1042 bp, Homo sapiens
gaattttacagctgtatacagtattaagttttttttttttttttgagacggagtctcgctctgtcacccaggctggagtgcagtggcacgatctcggctcactgcaagctctgcctcccgggttcacaccattctcctgcctcagcctcccgagtagctgggactacaggcgtccgccaccatgcccggctaattttttgtatttttagtagagacagggtttcaccgtgttagccaggatggtctcaatctcctgacctcatgatccgcccccctcggcctcccaaagtgttaggattacaggcgtgagccaccgtgcccggccagtatgaagtatttttaaaaagtgccaaggggttatttgggttgtgagattgtatataatttttctttcttttttattaatgttatgcttctaaagcacacgtttttaaaagaacactcaaaaaacatcaaaatgttcataataaaaacatgccagataaggcaatgttattaagtatatttgacagtaagtatttgtttttctaaatctccttctcattacccatacctcttatattctcacactgccatctctgcacacacccaccccatctctcatttggttaagttcttctggggaataaagggcaaaaaggcattcctatttattaactttgaaaagtagataaataattaatagccccaggagtccctgcatagactctaacaacaggccctttgggcagtcttccttcttctcagtttcgaatgtgttgttcatccctctgacattatgataatcacaataatcaatggtaaaacacaattatgactgttaacaacaaattctaattatcataagaaaatgtttctgaatatgtgtatgcatcccctgtagatgtaatggaccaataactaggcatttaaaacagaaaaattttaaagactgtagtagattattcataaagtttaaaaacttattgaagggatctcgaggcttcttcagttaattgttattttttaaaattatgctctttactaaataatactaaatgta

SEQ ID NO: 58651 - DNA, 1033 bp, Homo sapiens
ttcttaaggactactttctgggtagtttggacaatgtgcattttcccccatgccttggcactttgaaactttggaagctaattattgcaaagaagactggccattgccatggggtatagggcccttcttgatgatagtggagctggttctctttcagaggagcagattggggagaagcactggctatccctggagagaacaccttctggaaaatgtaatgtctggattgatgcatggcaccttatcattgtttgcgttgcttgccgctttatccttgtttgcattgcaataactctccctgaaaaagaaagcttacgtcatcattgtatttccactgcagtcatgttagagaggagaggagagaagtgtgcagaattcacaggtcacctaaaacaatcaggaaccagccccaatcccaactgtttggtgaggtttcaaggcctcactggggttggatgttagagacactaaagtaacttgtctttgacttttgagttactgaacaaacattaaaggcagtgaatgttgtgaggctcttgccaggcaattggagctcttgcctatactggccctgaagctgtgcccaggcccttgcctcactctagcccctctggctacctggtgcttttcccttctgtatatccacatggctctgcgctttgccctctggacttgttttctgctgtggacctctctcccagtaagtctgcaaacaggttcctctggggccttattcttcagtagctgtgctatctggatggtgcctttgccaccatcatctgactcactcctatgggcccctccactgggcaccactgaggacttggctcctggtcactgtcctgtccttgctgtcctgcaaggtgctgggtgctgttggttatctgacctcccctctagtgaccacttccatctttgtggtccctgagccccctgacctgccctggacctgcctctgcagtgagctccctgttctctactcccgcactctgctgccccaggggctcttggccctcctttgactgtggctttt

SEQ ID NO: 58652 - DNA, 1043 bp, Homo sapiens
caccaatccccagacattgaatcagagaaaggtactgtatcagtaaaggtttttagctgcaaataaaagaaatgaatttaggctaatgtaaaataaaaaataacatactgatttatttaaaaatctctaggagggccagaactaggcttgcaagctatccagctgggaacaatggccaaaatcatctacagaactggtcttatgaaaacatgtctgccatcatcaatggatccagatagcagtgactgtcataccaatacatgactgatgctggcactggaactgctcactgcctctgctatttctggtaaatggctatagctactgccactgctgtcaccctcagcaaaatggactctgtgaatattcttttttcactagattcaggttcagattctaatgcagctgtgtctgacttgccaaggttgtgtgtcaaagccacagttacaagagagtttggaaaatcaagtatatggcataacaaatattcactaaagtaacataacctcagctctagtcaatcagtgtatggcagtcacttggacacggtgactcaagggtagacaagcgacgagtccactcgagtaaagttcaggcctttagttcagtaatatggacagccccagttattattagaaggtgtcctgccaccaaaaatgaagccagcctgaaatcaagccagtgtatggaggactgcagtactgagaatatctcagacaaattaaactgaaaccttaatcaaagcaatcacaccctgccccatctctggattttctgattggataaaacaacagttccctctactatttaagccaaattgagttttctgttaattttaacaaaagcatactaatataagttatactacatatgttactctataataacaatatttcatatactaaacactacagtatatattgtatatattaaacatgtaatcaaaagaaaaaaaagtaactacacatgctatgataccatattagagatagaaaggaagaaaactgtttcctgcaaaggtgtccaaacatttatcatttctt

SEQ ID NO: 58653 - DNA, 1091 bp, Homo sapiens
atgtgatatttcatcagcactcatgctggagagtgtgaactaatttgtgtgctgcaggcaagtataggcctgacatttacataagcagcaacctcaatagcagcattttgctaatgtggggtcagggtctaattttattaagttttcgttaacaaggtcaggtggggcatgatagatccaataacagttcattttagagcagttgaggtagtctgtgaatataataatgaggctaaagagaatcatatcagtgctcagaaagctaatcttgttctgtttcaaggagaggctgttcactcctggggtcagcagatcctaggaggtttctgagagtccttagattgagatttttgttggtcagcagttaaattaaggatgatgtcaacagtctgagaaaattggccagatgccctacaggcaagcgtcaagagagtttaatgaatcttcctctcactcctaacctcctgggatctaaggtgtcccctccccatcatccagggttgttgctctccattcacagccatgtaatcagtatgaccagtccctatcacagtcattcaccccttttccattcctcctcatgtcttacccacaacacagctctagatcactcagtagtttcttccttacataccttgtactatcctagaacatctcccaccccctaatgcgtgggccatgccaggacaatcttaagagctatcaccttatatgcataatcattattatcaacatccataactgcttatatccagcaagcatatctcggtggcaaaagacaggttacagtccaccactgcccggctcttctttgctacttggaaatttcagtagtccagtttcccaggggtagatatggggggagaaaaagcaagaagggttaattatatggtttgggtctcttacagcctatctggttctctttcccaccccgaaacttataattaaatattctgtttaaatgagaggtacccttatggggaattagtacatttaaagcccaatttgcctgtcttaagtgtgctccagtgggagctgaacctcagatgcccagttctcattattagtttttcctttgagtccattttatt

SEQ ID NO: 58654 - DNA, 1046 bp, Homo sapiens
atcgcctgaggtcacatggctccttactttgtcatcacactgttttgactgtaaagttgattttctccttagaattcaacccaggtagcttcaaataattcaaaaggtcaaaaggtgtcaaaaatcaagcttaccttcagagggcaaagatttgctaccactaaggaaattacattgaatatgatagatgtttggattaagtcccacagacaagtctctaataagcaaaggcagcaagactgggataattatagcctctcaaagtgaccaaagggacattaataagcatatctagtatgtttattaaaagcatttccttataatatgttggtatcttaaatatttgtaatgtttaagagaattgggcctcgtaataccttgtgttagattggggtcagtcttgtgaccccaattaaaagagataattgagaaactgatttatgattttaggttgaaatcttgttagattgatataaaatattagggaacaagaaaatttaagattcaccatatttatttgattattagatttataaaagttactcaaagatttgagaaggtctggaagacaaattgaagtacattaactttataatgaatattaatatatttgaaaatgtttaagcttataaatggggtcaaacattcaaatatcttttaaaagtgttaaaatttgttagacgtacaaattgaaaaattagaacttaaatacataaggaactcattgaagtagaatttagtttctttaccatgtagactatacttttctatatatctcttcaaatgaattttttttttagacagggtctcagcctcgcaagttactgggactacaggtgctcaccactacactcagctaatttttgtattatttgtagagacagggtttcaccatgttgctcagagtggtctcgaactcctgagctcaagcaatctgtccacctcagcctcccaaggtgctgggattacaggcatgagctgccagacccagcctgataatttttgaccaacaatttttcctagcgagttcttacctgatcatgagg

SEQ ID NO: 58655 - DNA, 1027 bp, Homo sapiens
ccaaagatctattctacatgtgtatatttagtttattgtatataattttataaaccacttttaccaaaaagttcataaaggcatgccctgatatcctgccaggtgctgtggtttttactgttaggagagtcaaatttgctgtattccgggttgtgctgacctgtactagagcccaaccacagggacattgcacagtcaggtctcatgtacttagaataaaaagcagctgcaagattcccctctgtgttgaagttttcatgtacaaatgaaatagactgcacctgcccagtctggctgaacacacaaatattttataaagggtgttgactacatgtgaatgtcttgaaacatgtaagtctgattagagtcaaaaattaaaatggtttgatatggacatttatttttcattcttctcacaaagcaatgcaacccgcattgtgatccagtgactaggaggtttcttcgttgataaatacactgatgttaaaaagtttgttggtaaaccggtagttgccaaaattcttgacctctcaggtgtctggtaaactgggcattcaaaagcatagagttctgaatctgtctggttggaagcatttggtgttttggtagaaatctttaaaaaaaaaaaaaatccagtagtcaaattgcatagttcaagtgaatcagtagctcacattttctgtatgctaggcttgagggatttgttatgaattagatacatttaaggttaaatggttaatgtaacagcatgtggaaattatacctggagaatttaaagagtattatggctttatagtacatattattgagaacatgggatgtaagtatagcatctactttagattttagtaatattttgggagatttaaaatctttgttgtctgagtatattatcacatctcccttgcaaaattgtagggaatgggaataagagtggtttgtatattactgaagcaacgctcagaggtttaggacttcaggataatagcagggtgattacctttgttggcaaaaagtatatgtcggg

SEQ ID NO: 58656 - DNA, 4101 bp, Homo sapiens
tggtgctgattctaagctagtgtttgataataaaatgtttgtgccatggccagtaggtataactaacagatgatatagcttgtaattttgattacactgaactctagtattgattttattgtaatgtaggctatcttagattttatctctttcatggatgtaactatatttgttttgccttcagagcgtttcctaggtggatgattaaagtagtgtgatagatttcggacgggttaccatctttttacatagtgggatttagaggttttgagttgttcttaagaatcaggccaggtgcggtggctcatgcctgtaatcccagcactttgggaggctgaagcaggaggatctcttgagcctaggagtctgctttggaaatttcctcagagcatagaaatcatttttaagagaaattacagatgctattaagcattagagtataactaagttattaacataggaaaatattttaaaattgcagtttgtggttatgtaatcttccgaggtgcaaattctcagaaaaatgcattccggaaaaatcccagtgatccaaagcttgcacgtaagtattgatttatgtttatattatatatattacatgaaggttttatttttctttttgtctcgacatcattaaaaatgtacttttatttttatatagatttaaaaaccattcatacttcaacgggaaaaaatcttctagtttctggatggtggggctttgttcgccaccccaattacttgggtgatctcatcatggccttggcgtggtccctcccatgtggtaagcatttcagaagagtgctagtttgacccttttagccgccagaaagatgtgtgtgtgtgtcctttgtgtgggacagtgtggccaaggtgggtgtgagtctttttgtcgcccttttctactgtgaggttggcctctgtagaagctcctctggcttctgaggggaattgggaattcacagagcctgaagttttactttaagcctaaaagcactattttaagttttcagctgtgcctgatagcttttttctaagtagaatatatagaaattaattcagcttcttaattcatgattcagtgtacatagattgggaaaaactttggtttttaagaagagaaagagattctgtttttctttttgtgtgtctggcctcgtggggagctgggaaagcaggggagcagggagagctgtgggagctggaggtgcttggggagctggggtgtcagggggagctggaggtactggtggagccaggggagctgggggaactgggggagcagggggatcttgggaagctgggggagctgggggaactgggggagcagggggatccaggggagctggtggaggtggaggagctggcccgtgcctgctgcctgtttggtggcccagcctgtggtggaagacagcagtttttcttctttgctgggggaagaagggcgagaaatgaagagatgtgtattaactatgaggacagatgttttgattgtgatggattgttagaatggattcatcagtctttgagtagcttctaatttagatacgaccttctgccactttccagtgggattttacagacttgtttaattattctcatcattattagagaaaatgaagtaccttgtggttccatttttagagaatttgggggaaagcaggaaaaaatacattgtagtgataataaaaatatctaatactgtgtactattattatccacaggttttaaccacattctgccttatttctacataatttatttcaccatgttgcttgtccaccgagaagctcgtgacgagtaccactgtaagaagaaatacggcgtggcttgggaaaagtactgtcagcgtgtgccctaccgtatatttccatacatctactaatgctcttctggcttttctacaaaatactcctgcaattccagctgccatttgcaaaaacaaggaaaaaaatccgaaactttcttttgttgcactgacagggtctgtacttttttttttctttttgagtcaggactatggagccgagtagttgatcttttaatatagccgtgtttacttgtattaacttacagttaacataggaaaaatacaagtaaggatgtgagaatttgcattttaatgggaaattttcaacccttaatctgaaaacagaagacagtcttaatataaatgtactgtgaagaatgctattgatgtttatggtttctgattacttttcaaattttgatgtttttttgccagttggcttttcttaaatgaaaacactgttccatttaaagtacatttatgttttattcagtaagagaatagaattttcatttgtttttctttaaatcctttactaattatataatttgaaagcaaaaagaagggcctatattaaatgctgaaagtgaaaagtgatgacattattagcagacactgcttaaaggagaccatttgtagcagttggcttaacctcaacttctaaaactacattgaaaatgtaaatacatagcttagttttttgtaatatatggtgacttcagatttttttgtacagtattttgaatgtgagatgattgtcaggactaactgtctttttaacaaaacattttcagtattttaaataaaattttgtaaagtaatgtgaattaaaaattttggaacaattagaattcattcactattgtatagaagatgctgttaaaacataggaagggtatttttcttgatccaaagtttgtgaatttggctttgctacctcaattgcaggtgtttgtttgcctttataaactgttgcaaatagaaaaaaaatagaataagtatatatttttggagtaacatcaatatttaaacatttttacacagatcggtgtttgaaaatttgccatttcaggctaatatttttatatatttttgactttttaaaagttcatcagtgtttttgctactgttaagcttatgcagtttatactgtattttttatgtatcctttatatttaccaaacctgactccctgtaaaggagtgctgtcttaaaaacaactgaaggggttaaagtcgtttcttttagtttaatagatgtgcataaggtagctttagcaattaaattctagtgaagttgatatagtctcatttttaattgtcctgtaatggaacagtagcaaattcactaaacttttgtgttcagagttaaattgttctcagtactttcaatgtaggggaatgtaataaacatagtgtgtatgtttgggttttaattacacattttatatatgagccatttagatatgcagtgttaattctatactgcatttgaagtgtatgtaacttagcttatgttaatgcagtcatgaagttggtttgctccagcatccggtagtctttaaacattcttttagtgaaattgtcattgttttatcagtgctaatgtgtgcaagcagtttttttattttgcttttctcctggcatcagaaagtggtggcgttttctgtactggattgcaccaaggaagcttttggggaggaaggaaggacattaaattctttccctggtaatgaaaagagccctttatcaatacagtgctgcaatttctggatatcagctacactttgtttttaagtttgtttttgacatgtttatttggcaaattttataatgaagttttaagttgaaaataaaatgtagcaacattttgatcactttggagccttttttttttccctttcttgcttgaaactgagatttttgggaccaagacaggagcccttagattcccacccctgcccagcctcctgttttcctaggatcatctgtttgggacccctggccaactgctgtttaaaactctcagaatgttggaactcaaaggggttagttgggaatcctaactcccagaaaatggtcatgtgtttagtatttgctgtttgagaaaatacagaaatgctaaaactattgtagatccagtcatactttcaaatgcatttgtatgaatcacagaagcatctgtgcatttgaaagacagtacgtgtgtgagagacacacgagacacacacatgtactgtgcctgctgaccgtgctttagtgcttgtttggatttccagttgactctaagcc

SEQ ID NO: 58657 - DNA, 2057 bp, Homo sapiens
atgaaatgccagattatgaacagaaattagattggtccatgtggaattgaaacaaaaagagttggtgatcttattccttcagcaagcatattttgaacacttctctccatggcgggcactgtgctaggtactggggtggcaaaggtgaaaacacacagcctctgtcttttagaggcttttagtgtagtgaagagtgactagacaagtacagtaacccaattactgcagcctactggtgggtggtgatatctgagaagtgcccaggtctgagcagcaggtcaggagggcagcagagggtgtagggcctatgtggaggttggaggaggggttgtcagcagaggggagggcctgggcatgggggcatgggagatgctttagagatctgttatctccagagcatgagcgagaggctggcgtgacgggagaatgtgacagcagaaagacctagcaggccaggggaaccagatctctctcccctttaacaaaaaaatgttgattgtggacccgcccatagcactttttacatttgcctgtaaactagtactttatttgaatactttaaacacagaagctccttctccctttccccgtctgtatccttataggaagcgttgttgacgaccatggacatcatccacgatggatttggattcatgctggcttttggagacttggtgtgggttccctttatttacagcttccaagccttttatttagtcagtcatccaaatgaagtgtcttggccaatggcttctctaattattgttctgaaacgtgagtattaattttagtctcagtttaatttattaaatattatgtactgaggcttttatgccctgctgtctacatacttgaaacatgccattttgaatggccagcattagctcagtttgaagccatttatcatgagtaataaaaaatctgcattttgcaaagagaatggatggttcgtacttgggttctcagtagtacttgaaacagattattttaaaccatcttgcttttaaatttaataaatttaagttgttttaattcgttttggtaaccatacgtcttttctcttgagtgcctgctttttctggtaggcatcttataaagtaagaagatttgtcttgccttcatagagctcacattctaacaggagaaataagacattcctgccttgctgtgaggtgtgtgagtgagcactaagaggggcttagatgacgggtgttaaagatagagagaacttctctctggggagcgttagtgtgaacttatcggaggatatggtgttcgattggagttttagaggggaaaatgggatggggagatcgaaaagtcaggcactgggaacagctcagcaagggtgtgtggtggggaagtgtgagatgaggttgggaaagactgagaagtccagtttggctgcagctgcggtccaccagggtcagtcatggattttacttcaggatgaattttcattgttcttacactgttcactaaacacttatactagaggttgggcagggaaaattagcagtgaactgcaaatacagatagttttgctacacaagttagtatctgtggtagaagaagttcaaaccattggttaaaattaagatttagtttcaccagtggtttggatgtccatgtcatccattttattattcaagacagtgtattttatagttcagctaaaaatggggaatgtcttagtttgttttgtgctgctcgaacagaatagctgagactaggtaatttgtcatgaaatttatttggctcatggttctggaggccaggaagtcaaagagcatggtgctggaatctggcaagaccccttctgctgcagcatcccagggtggaaggtggaaggacaagagagagtgagggagggcaagagagagtgaggaagagcaagaggggctgaacatacttttataacaaacccactcgagatactgagcccactcctgtgatagccacattaatctgtccatgagggcagaaccctcatgacctaatcatctcttaaaggtgctacctctccacactgttgcattgaggattacgtttccaac

SEQ ID NO: 58658 - DNA, 2088 bp, Homo sapiens
ggttgcagtgagccgagactgtgccactgcactgtagcctgggccacagagcgaggctccatctcaaaacaaaacaaacaaaaaacaagagaaacgagaggttacaaattggttgatgctgacctgaagtatttcaatataaaaaaatgtcgcctatctaaaaaaaatggagtgtaaagtcctttgggggggcccccatgattttggttaacttttttaagaaacctgggcccccggctcccccaaaggctggagcaactgccttttcagtcgggcaggcatctcctggttccgctcgtctgtgccgtcctgtctgcctctcaccaccagagccctgctcagggtcttgcaggcagtggaattgtgagcctggatagtgggcggcagtgccgttgtaaagcctcctgactgggtttggaatgctgtttgggtaaacacttttcctttctcaggaaatgctgtctatgatttcttcattggccgtgaattaaaccctcgaattggtacttttgatctcaaatacttttgtgaattgcgccccggattgattggatgggtatgtctggttttttttcttctaaatttcaattcaataggtctaattaactgctagaaagaaatgtagaccattcaaaaataagcagtgggtggtatatttttagggataattatggctttccataaatctatcaaaatactttcttgtaagtattttccagaggtttaagatgccctgttacaggttatgacaaattaaataacttttctttgctttatttttattatatcagtttatatttatgtaggaaagtgatagtgtggatgaattaatgtaagaaaaaatgcattttcctcctttttaaattttacctagttttaggcttggagttgcagatagagagcaaagagttcccttccacccttcattctgtttctcacaacattaaccttggaggaaaccgtagtgtagtgatgaagaacagcagattaacatagtgacagcattggttaccaagtccacaggcctcagtcgagttcaccagtttttccgctgttgtcctttttctgttccaggaacctcgacaggactccacaatacatttagttgttattccttcttagtcttctctagtctaatagttgtttaggctttccttgtctctcatgaccttgatactttttggaaggtactggttggttattttgtaagtgtccctcagtttgggtcattccagtgttctctttgattgcggtaaagttacccactgtgacaggaacacagaaatgatagctgtgtccttctcagtgcattgggtccaggggcccatggtgctgagatgtcttattcctggtggcgggtaggagttacggtggcgtctgccaggtgtctcagctgtgaagctcactcatgcctttgtagtgctaaggtctctggggaggtgctttgaggctatatactttccccttttgtttcaggtggttattaacttggtgatgcttttggctgaaatgaaaatacaggaccgcgctgttccatccttggccatgattttagttaatagtttccagcttctctatgtggtggatgctctctggaatgaggtaattaattttaagagccgaggccttggagtcagatggctttgagtgggtgagtgacctgtcagagcctcggcttcttgcacacaaagtgaggggagcatggcctgcctccaaggctgcttgagaggaggacgaggccatccatgtgaagctgacgagggagcactgacaggtgggaagtttctaggcatttgggagtgcttcagtgtttatcagctgttcttgtgtttaaaagtaatattctaaatatttaagattggtggatcttggttttgtttttgtgggtggtggtaattatggtatcacatgaaaatggatggattattactaaattagaatggtgtttcttggactgtcaagagtcacctagtttttaaataatgggggagatgttttattgttaatgttttaaaatacaaagactagctctaattagatgaatgtaaaatcagaaatcaagatgcattgaggaaaccagttgaaata

SEQ ID NO: 58659 - DNA, 1544 bp, Homo sapiens
ttttgcttttgaccgtttatccaaatggatttgatgactttttaggatcacagctctttgaggcactcagctcctttgaaagcaaaactatttctttagccaaaagaaaaaaattggatcttccagtgagcctttctgtgtggctgcaggactagcccggaacgagagttctgtggagcgtcacagggcgggtgctttttaacttggcattgcacgtgaatgtccccgcctgctgtccctaccccccaggtactcgcagtcccctgcctagcctcgggcatttgtgttgtggcatcttttctgcgggtggcatgttaagatctctgttctggatgatagagttttactagaatcttttgaaaccattattggcaacttggttaagtataaatatttataattttgtaactaccaacctggctcggtgcctgacccctggtaggtgcataataccctccccttaggtaatggcattagactttaaaatatgtgtttggcccagctctgttaataattagccatttgactttgtgcctgagagtttggattgtgggaattttcaggttgcacttcttgtctgttttcccttaattaaaagcaaataatgaccatttgaactgaaaaagaatcaatatgttaaactatttggaaagttctacaagagataatggtatgtatattgaaaattatacctcagacattgcttatttgcatatttgtgtgtatttagtctgaataatgaaattaagactttaaaaatgaacattgcattgtttcatagtggcgtaagtttcatgtgagccttgggttaatattaattttccacttccttttttttttttttttaaaggattctatgcttttatcctgacatctgcagtcatcggaacatctctcttccagggcgtagagtttcattacgtgtacagtcattttcttcagtttgcacttgcggccactgttttttgtgtggtcttgagtgtgtatctctacatgcgctctttgaaagcgccccggaatgacctgtcgcctgccagctctggtgagcagtgatgaattgcatgttggatgaatgcgtcccagagccctccagcagccatttccagatttgaatagattgctttttttctaacttcatttttgggaaatgaagagaagtaagaaaaaatgaaaagatgaagaaaaacgttaaagagatatgaatttaaaggaagaaaatatttttgttttaccttcatactttcttactcatttcttttttttgcagttgcttgatgacagtaagacgtttagtaaacttacaggcattttgacttatgacaaatattatttctttgtccaaaatagtaaacactctttaaaaaacaaaaaacaacagaggttactggccgggtgaggtggctcatgcctgtaatcccagcacttcgggaggccaaggcgggtggatcacctgaggtcaggagtttgagaccagcctggccaatatggtgaaaccccatctctactaaaaatacaaaaatcagctgggcgtggtggtgcacacc

SEQ ID NO: 58660 - DNA, 1043 bp, Homo sapiens
atgcgtcatcaaatagcacttgggtcatagtagagtggataaacagggtagagcccaattgaaaaggaccccacaaatggaagacaatggaatcatactgttactttgtaagagtatggtagccattggtagatgtttgagctagggatccactagatataaaggtatttaagcacatttagtcttgaggtggtggtacacaggagtgtggcagggagcgtggctgttgcagttgcttggtcctacactaggaagtcattactgaatttgtatttaagataaattcctgaaggtggaattgcgtcattaaagggcttgccactagggtttttgaaacatattactaaatttccatgttacaagatatcttccttcttgggcgtgttgaaaattaagtgatactagaatatatatatgtgtgtgtgtatatatgtatatatgatggtgatgtgcttagtaaatttgtaaattttttttcttttaaggttgtagaaggaacgcctcttattgatggaagaagactcaagtatagattaaatggtgattttctttttttaagactcaaattgatgatttgatagcttaaacttctaagtgttaaactctttgttaaagctgattagaccagagtagtaagtgataaattatttcttagtagttggaagagcaactgtttatacctgtagccaacttgtataaattatgccattaaagtaacatagcctcttagtcactcttgtccactctccagttttattttcttaatagtgctcatcactgttagaaatcattgcacttgtctaggattttatcacctgaggtgttacacggatgtgggcatccaggccactcctgctgcgtgagctgctcttgtccttgctcatgtcctctgggttgtcccttgaatattcgtcacacacacttcctgggcctttgcctggagaacttacccccaaacgtctgacacctgcatcttcacctccatctgtcttctgctgagagaagccttcaggtccctttctctcccctgctctgttttgttt

SEQ ID NO: 58661 - DNA, 1039 bp, Homo sapiens
aacacttgcttattaggaggaacttaaaaaaaaatctgattgagatttcttgtgtaacttttcaaaccaaatagaaaagaataggctattttgcaaagtagccgactctcagtggaggttgctatggaaaaaaaattcactcttagtatgtgtcatttcagatgcagcattttaaatgattaattgataggctactgggctcgatggactttagtctacatcttttactttaaaaaagtatgaaaagtttctaattttcatctctttcagaagcttgttgtcaagaacattttacgttgttttcagattcctgcaatatctttaaaatttgtctctccattgctaagtgtagttttttcttctttcagtagaatcctttacttggatatatttaaagaaacatgagattccctaagtaataaataatttatttaaagatcttattcttagggctttgcaagtttgccaactgtctgtaaaccaaaggatcggttttactggtgaatgccagtgataggagggtagagctgcaggcttaatactgtggagtgagaccataactttagtggctctagcaaggatttttgtgataaagaccttcagtcatttctacagtaagcctctacagttaaattcagattcatttagggtaaggtgatttcagagtatcaaggaaagcagttttggtgtttaaagtcatatatgtatatactcatagactaaagtgactaaaagcatatatattaaaatatatattaatattatgcagtcatcccttgatatccttggggagtggttccaggacctcctgtacataccaaaatctgaggatgctgaaggccctgataagaaatagtatagtatttgcatataacctgtgtgcatcttccttgtatactttgttgcctttaggttgcttataatacctaatacaacgtaagtgccatgtaaatagttatcatactgtattagggaataaggacaagaaaaagaagtctgtacatattcagctcagatgcaattttttccgaaatatttt

SEQ ID NO: 58662 - DNA, 1987 bp, Homo sapiens
gcccggcaacagacttttaataaactttaaaaactggattatatacatactgctcagtagtcagctttaagacattttaaaatattgggataacctttcagagtgtatttttctacatcatttttgttgttgtattctatagtatggatatatggtaaattgtatacatgtaacttaatcgttaaagtcagctctgtcaatgatagacatttagtgtttttccttccatattttcactattacaaacaagtatttttatgtaacatctgattatttccttaggatggattcttacaagtggaactgctaggtcagctgtatggtgcagatttgaggcttttaatacatattgccagattgcatcaagaaagtttatagtagtatcagtgtatgaatgctcagtttctcattctgagtattataatttttttttttttttttggagaatgtggctgtcagacattttcaacttactgttctaacttatattttgaattagaacattttaactattagtggctctctttaccaccccgggactccaggaacagatgctgtgtgatactttgttatcctttcatttttaatatttagtgactgctatatttttacagtgtaatcttacagtcctggtgtcacaagaaccacagaagctttgcctcttacctggtagtgccttgggcctactgtgtgttgcataagtacccactatttcttagttttccattatgggctattttggagcagtgaatgtctttttgaatgtcttttgttttttatccagttaatgaactaatttaccaatttttactttctctgcctttcatagtaaatacccctaaaatctatcaatgaaattatgacattcagtctgattacgtgaaagatcaaagttgttttttttttttttgaggcggagtttcattcttgttgcccaggctggagtgcaatggcgcggtcttggctcaatgcaacctccgtctccgggttcaagagattttcctgcctcagcttccgaagtagctggaattacaggtgcccgctaccgtgcgtggctaatttttttgtatttttagtagagacagggtttcaccatgttggccaggctggtcttgaactcctgacctcaggtgatccacccgccttggcctcccaaagtgctgggattacaggtgtgagccaccgtgcctggccagatgaaagattttatgtagaaatctatccaatatttcagagactgggaaattctagtcagttttattccttttcatttttaacaaaatgagggttaaattcgtcagaattaaggctgtgaaaaatctgttttattgcttgattccaaaacagtaagtttttaccatcatgtttctttttaataagttacagttcttttgattaaatgtttatattcttcaatttagaagccatttggaaatagcatcagcagatataatggggagcctgagcatattgagagaaatgacgcacctcataaaaatacacaggtgggaaagtgttccctttcatcttggttgtttttttttttcttttttttggttaaaagtgactctcccttgagaagcacattgaaaattgtaatattttataacctgttctaaaattctgtccttaaattaagactgaatataatttcacaaatttattcttactagtgtatagctgtattgagatgctgaaatagttaatgcagtagcattaatggtaattgttcactgcagatatttaatttttaaatttttcatttaggaaaaattcagtttgtcacaagaaagcagttacatagcaacacagtatagccttcgtccaagaagagaagaagtcaaattaaaagaaatagattctaaggaagaaaaatacgttgcaaaagaactggcagtgagaacctttgaagtgacccccatccgggcaaaggacttggagtttggaggagtacctggtaggcctcagagctgggcccagagagggc

SEQ ID NO: 58663 - DNA, 1034 bp, Homo sapiens
taggcaaaggaaaggtggctcaacttccagttccccttccagacgccgagggagtcgatcaaggtcacgctcccgatcccctggtcgaccacctaaaagtgcccgccgatctgcttctgcttcccaccaggccgacattaaggaagcaaggagggaagtggaagttaaattgactccgctgattctggtacttgtgtttatccttatacagccttttgtcttccgctttatgtatatatttactcaagttacttgcagttaataatattaaaatgtcactgaaacatcaaatctaagttgatgactttgggagttttcatataaaacaaatgtttggaatagaaagttttaaatatcaatggaaaagaatgtccttcagttaccagaaatgctatttaatattttagtttttaaaaaagcagcgttcaaatttgaaatagatgtagcttgtagattgaactgcgtaaggtttttacagtgtataaaagttcatatcatgtatgaaatggtaagacaaacctgtattacggaaacattcttactcttagcatcattatactttatcactttacctattcaaagatgattttagtggaattactttcaagatgtaagctttgaaatatcagggtgcatggagcctgtagatcttgtacaaatagtattttagatagtagaccaaagacaaagtatgttaagtaaaaagaataaaagtaatcttctattcacttaatgttaacctcttttctggatagaaggcacacagactttgagacagagtcttgctctgtcacccaggctggagcgcagtggcgcaatctcagctcactgcaagctccgcctcctgggttcacgccattctcctgcctcagcctaccgagtagctgggactacaggcgcccaccaccatgcctggctgattttttgtatttttagtagagacagggtttcaccgtgttagccaggatggtctcgatttcctgacctcgtgatccacccgcctcggcctcccaaagtgctgggattacaggcgt

SEQ ID NO: 58664 - DNA, 2062 bp, Homo sapiens
agcccaaacccattcattaccccagtgatgcccaatctcaggtaggtgtagggaagaaagctgcctctcttacctaatgtgttaattgactgacatcctctaatcaccagataagtacttgtgttttctttcatctaccaacctagctgccatctctgtaaactagtagagcttgttaagttttttcacagacgattaacagtgaaaaaatgtggtggttaagaaaggcctccctcaccccgcctccccccccactctcccactactcccttggggtaggtaattcaactttctccttaattccagagtcttcaaaggttcctaaatgttgcttttattgtatcatcagctcttaacaggagccagtgaggaatgtacattgataggcttggacaatacatcaagaagtgcttagttggtgaaatgaaggtgatttgggagacagctcatatctgtcctactggctgccccttggacgtggccccagctagttcatgtggtactggggaaggtcggcagccctggttttgttgtgtggaaatgtgattccgctggtcagccgatggagcggcattactgtctggcagctggaagtacccagctatcaattgatatttcaaaaagggtggcagacaggcctcacgtaagtggcagttcttgcagattgcttgtggattcctagagtattgtggggcttgtgggccatgttttgaatcagaggaaaagaatgttataattgggggttgatggctgctgtaggcttgagagaagtgagcttggatgaaggcaaccaccctggcttaggtgggtggttggcagagttacttggtatgcatttgtactttagctgtaagagttgaaagctaaataacccccaaatttattcattacagacttggaattatttttcttcctattgttgggttatagtcatgttaattgtacatccttgattttcccagtctggtttatagtttgctgtttttaataaaggcaatttgttaaaaatacaattaaatgcatttttaaagccattgtaaattgatacgcaaatttacaaatgagaaaatgtgttctttgtgagattgtgcctcattttttgattagcgagaactgtgatcacggtaggtgggtaacattttacatagtgtgaacttatggcgcctatatacattgttataattaatctttagtgtcacatagataacgcagtggctaaatcatcctctcaaatgattccaaatgagattgaatgtagcctttctggccctaaaatcctgaccagtcaattctggaaagttgtattttagtgatcagcctgtggaaaaagacgaatacataaatgtgtatgtattgactcaaatttttttctttaaaactattcaggttaattatagaaaatgccaagtaggaaatttgccgatggtgaagtggtaagaggtcgatggcctgggagttcactttattatgaagtagaaattctgagccacgacagcacctcccagctttacactgtgaagtataaagatggaacagagcttgaattgaaagagaatgatattaaggtaagagctcctttggtttatcagagtgtgtttacagtaagtgggaaataactctaagtatggtttctaagctcaggatagtcagttcagctcggtttgaaggcagaggattgagctcttgctttgggtcacatactgtttttggctctgggaatgtatgaatgaggcatagtccttgttcccaagaagctcacacttactgggaaagacagccatttgcatctgttggtcccctgggtttactacgttctgtgtctggagtttgctgtgggtggtgttgagtgtatcaagggtagagaagagccctgggcttcaggggaggctttcagaggcagtgacacctagccaagtgctgagaacaaacaggaaaaacagcagttgatggggctgtttctgcagagagggcagtatgccaaagtcaggggtctgggggacacagtcagccaagtgctggaagggggtggtaggggagggctaagcaggagccaggctggggg

SEQ ID NO: 58665 - DNA, 2391 bp, Homo sapiens
acgctttcgagctcggatctttggtgatcacttcaagaatgtattagttttctttgtagcttaaaaaaaaatctcgttcgccaagccacctggcaccccaaacactgctgcgagcgctgggagggaaagggcgggagcgcgcgggctccgtgtgctgcgagggcgcctgggcggctgagataaggcggtggcaaacgtcgcgctccgggccgccccgccagactcggtttcccccgctcaccggcctccccgcccccaggcagggtggggcggggcggacgcgccacggcgcgcgaccaatcgacagcgccggggatgattcaaaaggtcgaggagccaatgggagccccgggcggcctcgccggtggggaggggaggcgaggggaggggagaagcgccgcgaggcggggccggggaggcgcgcgcccggcttgcgggactgcggggcgcgagagcgcggccgggtagcgtcgcgcgcgtggatctgccgccgggttgctgtgcgactattctccgggagccgtccgtgtcaccgccggaacctggcgcaggtgagtgcttccacccccgccctgctcccagctccccgcggcgcgttcttcgaggggccgctgggggaggaagcccgaggccggcgcagcggccgggccggggaccctgggcgcggggcctggcgcggcggccttcccctcctctcctcgcctcctcgtctcctcccctcctcgccttttctggcccagtcgggtggtcggggcggcggcgggcgaggctggagctcgcccgagccgggcccgctgcggaaatggagctgggggttttaaactgcggacgtttccctccatgttggcggcgcggcgcggctgtggagcggcggcggcagggagggttcgtgggcgcctttgtcctgccccaccgcagcctggctcccggcccctccgagcgcccgtctgacagatgagcaggcggccccgcggtcctgcagtaggaggctgacagggcgcggcggcctggcgggacggggaagggtctgcggccgaggtgggcttagattcgcgctgcttgtcactggctttgagggtcgtggtcgtcgcggtttggtgattctccaggcacactgcatggctgctcgctcctatgcgttgaattccttcgcccggacagtctcaaaaatcgggtatttaggcgggtgtgcgtgttcctgctaaagcacggtcctgctttttcacctttttgagggttcagaaaaatgttctaatgacagccagcctcgcactgccagtagcctcaaggggcacttagtaaagcacttgctttcggagggctttgttgaaggcgctttcccagagtgattacggggcccggtcgggtgttcacacgagggcgcggtagataccgtggtccgcgcgtggacacctgcagcgcgaggcgcggcgcctgggcagtgccagggtgaacaggcccccggggaccttgcacgtaaacacgtgtagatctgtagttacgcattgtagtaactggtgtgtgggagaagatggagctacggagaagagcagagggatcctaatttagattaggcaacaagtccagtttaagttttgtttctcaggctgcctgggaagagggagaagaacgagcaggaggggaatgatgagctgcccaaggatgtttatggggaagaaggcgcttctgcctttacagccaggaaggtggcctttctgttgcttcatgaagcaaagggcgcggagcaaggcccggggttcctgtttgcattttgcctagtggggctaccggggctcaggtgtgaaaaggaagctgtccaacgtcattcgagcgtcttgctctatgccacgtttagatgaatttggagaagtgaaggaaagatggctggagacccctgtaatgttaatgagcagagaattgttgtgttcacaaacagtaacataccggagctggaatgtgtgaggattgcagtgccagttgactctgaagttagcgggcatctggcttaatagagaaaaacctgagggtctccgtgtttttcctgtttatggcgaatgaggacattgggtgcagtgaacaaaatttttctttacaaacacacttgcctaaaacatctcttgtaagaaaatcctgtgtgtatcttgactcctgtaggtgagtgcatagtgagtgacacgaacaaatgtggggcttttgtgtgccatcctggctatttcactcctgtgggggaatatattaggatgtgattgcactgtatcctcacgtttgacaattgtgtgtggatcttgtgtaaagtgggggtgcacatcatgttgttggcttcatcttttggaacatttgtgtataagataatggtcttctaagaagaatgccggttcattttgtttgttt

SEQ ID NO: 58666 - DNA, 2793 bp, Homo sapiens
aaatcaatggagtgaccatcttggggtcagtggtgttgcataaagcaccagtggtgtgctgttctgtgtcagtttcctctgcgccacgtgctttcacagtttgaattaccagcatctctgtggtggcttcagtacattctccattgtgcttcaacctggaagcacattctgccgttcagaaagactgattccaatcatgtaatgggaccacacgagatccatgctccaattatatgaatagcagaaggtccatttgactcttgtagttcaagagctgtttctaagtaaacagactttccagagctcgatgaagtgaagaagcccttctttcaattcctgggcagaattcagtggttttcatatcatctgaacctgctgtgctgctgtttattctatcactgtcagccttgaaaggaaaaaaggaataatcttaccctcctgcccttcttattttatatcttccatcttatccatctatatccatgtagtcattccttccgagttccctggttttaatccaaaagactctgtttaacagcaatgtcttggcagaccaggtgccgcttccgtgccatttgagggctctgagtctttgcttcgtcttaggaagataaagataatttggcagaaagtcagagatggaaatagcagtttgggatgataaaagatgggtcctgttttgctgacattcttttactttggttcttggtgcgtgtcctttgggattcatttcttgctagcatgaataggacatgcttttcgttaggtgcttttcttttttggagaacatgaagtgtttctaacaaaactgaatgagctagaaagaattctattttgagacatctgtagttgatgcaaagtatttctgtaatcctcaatgacagtacttacatatttgcatagaattttttttttaatttttgaggaaacctctctggagtctgtatttataggagcatcctgaaagtccctattatgtagctggtgggagcgagagagggacagccacactcgtgctgtgagcagagcacaacttcaggcagagtgaatgccttctgagttctcattggaagctttctgttgctcagcctctggcagatttcagaaccttctacttaagccaggtgtggtggtgcgtgctcctaggcacagcgactcggggggctgaggcagaaggatcacttgagcccaaagttggaggccagcctgggcaacatagcgaggcctgtctccttaaaaaataaataaataaataataaataaataaataaataaaaaccttgtccttgactattgtgctgtctgctgcccctttgtagggatggggttggggtcagaataagcatgtgcatgaatggcggaaagctttggtggtgtttgtttgtttgtttgttttttgagaggtgggggagtcagcagtgaacctttctggttaaagaacaacgtacataatttctattatgagatttagaaggttaaatacttttttttttcaggcctaccaagttgatagaccaaaagtatatagtagaacagcacagtagaaaaaatttaaaagtgaatttcttatggtccaaaaggatggatagtcacagtccataacctttcataatatatgctggaattggaatctcttgtcatcttgctttgctctgaattttagaactagaagtgtgcatgtatgtcaaaagattatgcagagctattttctttgctaacaatgtaaacatttgcaccccatgaatgggactttataatctggaagtgagcctaaggttgcgtatactgaagtcatgttttaaaagttaaggttgacttaaacatatacaaggctgtattttaattgtaactagaaatcatttactatgcatacagaacctcatgtatcttatcatggaatttgtgaattaatgggccttgccgaattcaagggtaagggaaactggtaacaacttgttttaaatcaacatactataagctcctgcttgcttgactcaagttgtttgaaaatctgaattaaacaggatctcattgtcaggaaacatcttctaagcttgacatctacgtttaagaagggaacgtggaagagaaggtgagacatgaaactaaaacagctgggagggtaggatcagactgcacctgatttttggaccaaagtttcatataggaataaataaaaaggaggaccacttgtgagccaacctaggaaggacttgccagaaagtagcagctcctgctgcaaaatacagtgccttcaaaatgattctctgtgtgaattgcatgcaatttcatgtaaccataaagtgtaacctgtatgtgcatgacatgtgtctagaatgtgtaaagttaggattcagcaggaaggggcctggccctgtcactgtggtggatcagtggacctgctgaagtcactggactcatgtgacttaggtttgcagcatcagacccctgtgtttgcattaagtggccacatcgttgaaatcggatcaatctctccctcagctttctttcctactttgcagctttgctggttttaactgcttcattcttctgcttcttggtatccttttttcttttgaaataaaaacatgaaatacttaattcaaatgagatttgtatttattttaccagttgctcttaatttaccaaaggtatacgacatgaaaagagttgcattcttttgtcttggttgtgattctgaccttaaaatacgctcagttctaaaagcttgaggagcgttctatactggtccttctgcatttcagcctgtcaccaaggggagtgttttgcgat

SEQ ID NO: 58667 - DNA, 1148 bp, Homo sapiens
caacatcaaaagctgtggattatttggtgtgttcccctttatgttatctctcgataatttttgagacatcaagattttttaaaatatcaatactggaaagatgaaaccttcaaattaaaacctaaaattgattagaaagaaaagtaaaatattaatgcagtaaatttaggatggttacagatactcaccatcaacataaataaatggagttctaggataaattatttgtggaatactaatggtcaagtcacataagagtaaaatcttttggtgaggagacacatttgacaactgctaaagaattaactaaatttgtctttctaaatagttttctttataaagtaacagaaacattgtaaaaggataaatgactgtcataatgacttaggatgttgtaagaatgtctgccacatttattggttatttctgttgaaatctgaaggaatcgatacatctgaaaattgagaaagggaaataggactgtccccgttacagatactctgtgatgcacacaaccttctaaacggaagtgttagtatcatttaaagcacatagtaggccttgagtatttgcagattaacatgcagaaaaaatcaaagatgaagccccaattaagtgtttgaaccaaagaatcacagtcactgagctgcacccccgttctgtgaagcatgttaaatactcataaagagcagagagcagggcccgtagacgcttctggtgtaggacacaggaattctaggcagagggagaaaattaggggccccagttggtggctgagagtaaaaagaatataccatttgagtagtgctgttctttttcctcagtttttaaagacatataattcctagtagttaggacatctaaatagctcggtaaactggtcagaggcgggaggattgcttgaggccagaagttttgagatcagcctgggtaacagggagactcatttctacaaaaaaatttaaaaatttaggccaggcatggtggtgcacacctgtaatcccagctactcaggagactgaagcgggaggatcacctgagcccagggaggacgcggctgcagtgagccgttatcatgccactgtactccagcctgggtgacagagcgagaacctgtctctaaaaaaaaaaaaaaaaaattctaagag

SEQ ID NO: 58668 - DNA, 5676 bp, Homo sapiens
atctggtgtgtgttttgcacttcacagcacatctcatttcagattagcctcatttcaggggctcagcagctgcatatgattcgtgcctgccgtattggacagcatgggtcaaccagggcctcatccaccttcctgcctacccattagggcaatccctgaggtcccttcagggaaatcctagactccttgaaatatggtttggcagctatggtgattcctgagaaatctccatacatacttcagacaaaaggacagatttgccaagagccagtttttcagtttactgtaatatcttcctcctctaaacttcctttgcatcacctctcagactgttcccagaggactagattaaaagcacagctgttatcatttctagaaactatctgactcatacgtttcactggatgacagagtaattatcttaattttaggaagcattctatttcacatattgctaggctagaataagccaggattgggaagggcagaatattaaaacaaaattcaccaaggctagtcttccaagaaatagaattgtggctctggaaacaaaaaaaactacacatcatatttcatgacattcttaaaattttatgagtaagaatctctttagtggtaattttgttctgtatttctggtatttttctctaatattttaggacattttagatgaaatgagaaaagaattaacaaagctaaaagaagagctcattgatggtaagtgtctggacaaatttactattcctataaaacaatgtttaagattgaccatttttaagaaaatgcaaataaggaaatacccagctgattagttgagggcaatgacttccatagtcctgcccttttaggattagggttttggggaggaggtttctccttcatataatggaaattatttttataaatagggattaaacaatatccctaagtttcaggtgttgtcttttcttagatggaaaaccacatgaacagatctttctctaggttacctctactcacctatcccagtgtcctcttgtttttgagcccacataatcagtgttttcattttgtatacaaaaggagaaaataaatatatagaaattagtatcatctttctaatattaaagatgtgtgcaatgaaagatgcaaagttaatcttcttattactgtgagtttgagcacaatccttaaagtttcttaggaatgaatcactcatttatcttactttatcattatatttattttcaatacttgttcttttccatccagcaatcaggcaggaactgagcaagtcaaatactgcatagaggaacagactaaggagagataggactttaatctggaggaaaaatatcctacaaacaacaactgttcacaacagcaaacccctacatttatgagctgtaagaagaaaatggagacaaacagaaggagggaaaaaccaacctactctgaaagccttcagacattatgactctggtgataagctctttccctctccgtttgctgcttttttctggcctttacaacagaatggaagagaatcatttaagagttcctgtaacagttatgcagaaaatactaaaacccatcaggcaagatcaccacgcattgaaatattttcatatcaagataaagtcgcacattttccacaatacattgctaaaataaagaggagaaaggcttaggaagtttttttgcagagagtgctggtaaagaattgagcaagtttgctattgtattgtaatgtttctctcaggtttgttcttcctatcatgtttgatattccatgaataattgagatcagccctatgtaagttaagatcataatatgtggaacaaatggaattgtaagtgctttcaaagggtaatatttataagaaagtgtccgaaaaatgtttcttcagcttgagaaattttagaatgataggaagtttctcgagttagccttcatgcaattttgtagattaaaacataaaatttgtccagaacttaaagatttagatgccttcctaaattgttacaatgctttaccaaatctatgacttctacataacacaaaccagtggtcaaatgtaaacactatattgtagatttactgtaggttttcaaccttttttagatttatgcatgtggacatttttataatgtaattacaatcaccacaaggttagcttttttaattgcagacagtaatgcatgtcacactaatatgtagtggccttttcaaggcctagtcccagggaaaacattttgtagagtataggggagtgggaggaaggggaggaataattttttatttaaagttgatttctgcactatctttttctcagttacctgcatgaataaataatgagaaatattttgtgactttaattggtaaatatgttacaaaaccaagtacttaatcttttacatcatgtcttcagctatttgtattttaaccagtaatttcaatggtctgaaacatgattctgagcttcacataatatcttaactgtggaactcaaaagtttgatcactgaatttggcagttattattacctaggtacccccgctgttacacaggtgtttagatacgtgttcctgaatgaagctgcttttgaattttgttatgttgaaatgcaagaaataacaatgatggcagcaattaaggtcacagaaatcattaggtaaaggaaaaccaatgaggagttctgcagttttcttttaataagtaaagtgagacttgggtggtgggaagaaggaaggtgggaagaaggaattagacactctgcctgccactctgcgtgtgtgtgctctcgcgcacgtgctgtctatatggaagccactcccttttctttcctttgaaactggtaaggttaaaataggggagaaatcctacatgttggaatgatagctttttggaaaatttaagaaactctccaggctctccatcttgatttatgcttgagttgttatgtgccatatttgctttgaactctgattatcagaagttttactaaaactttgaaataattcactttcatctgctttctagattttgtacatctcagtccataaagcaaagcttgttgatagtgtagttttctaaacgctgcaaatttgcagcctttaccactacaaagaagtttggatgagggattttttttttctttgtcaaaatagttcctgtttctgtagaaatttcatttttagattaaactgtgatggatgagctatcataattcaagtatacatttcttttttctatcagatattcattgtcatgcagtagtagtaaaaacatcaaagatgcagcaagcttattaagtattattttctaaaagaaataggaggcattttcatctttattattgtacttttggttatgcaaacactttgataatataaacagttatgtcccctataaatctggtcagcaacctcttttgattttgttgggtaagttaaatagtctgtagtaggtagagtactgggtacaagtggtccaaactaagataagagactaaaataaaatgctaaatcttaaaagaaactgggtttatgcactaaacgttttgtgccttggtctaatattaacatgatgtatgtgtaaactgacaaaaaaaaaaaaaaaaaaaaaccagtgttgaatcatgctatatttcccatcatcccagattgctaaatgttctttccaagaagtctgaatgaattattatatacatttgctatcatacatgacagttgtgtcattattagagatttcagtaattaaaatgggaaacagaagcctaagttatttaccttatcaaaaccacgttccttggaaccacattattatgatggtttttgtgctcttgtacgttggatgtcttaagctgagtacagtttaggggatcctttctaatgacaggaaggcactgctttcctcaacactgtgatctgacctgtgacaagtctgtactatccactatgtaaatggctcacaagtcaattgcaaacaaactgaatgtacaaatcttagtgctggtgctgaaatctcttcagaatagtcatcatgatttaaaagtttgtttaaaaatttgcaagcatcaagtgtcaatcaaaactgaagatgaaacactaatgaatgttgaattctcatgcttttaggtgtacttcctttttagaattttcagttttctgctatttttaccgtaactatttcgtttaaatttgtttcatttaagtttcctacacgctaacttcgtttgtgcgattgaaataaaattgcagtatatatatgttgcttgtttgtgacacttagataatcttctgaaataatttgttttaaagtaagttatattggatgtgaaaaacaccttttaaagtccaagactttactacttaaaagtttacatgtcacgtcactattctttacagatttcatagaagtcgtgaatactaagtaatgtatacaaaagaaatatgtgatgatgtgtctactttttgtttgaaataactgttgggtgttccctcttcttattttctctctgcccaccttgacacagtaacttcctcttatagtcaagatgatgattaagtgtttaatttttattccattttgttctgcaacacgttcaggtacttaaaactcattcatgcagttagaattatcctttatgtagtttgcatggtaaaggacattgtgtggtaaagggcattattgagtaatgaattttaagtatagcaaaatatgtatagtgtttatacatgatgctgatttcttaaaacctacatataagcagtagtactttttctctattataaagtattaattttgagttccattttataattctgatgtcttcattagaaatacaaaaatacaatccttgtattttttctttgaccagacccaaattttccccttcccccctccattctcctctccacttctcgtggaccgcgtgttcccaatattcattaacatttgcagccattacagagttacagttgtaaaattttcagctgtttttttttttttttttttgctctagcctgtctcatgttcttgcttctcttcatatgtaagtcagtatttttgtctacaaattaaaagtcacttgtcattcaaaaatgagttaagtaacatgataatcttttaaatttacctagctacaacttttatgtctcttgtaaatttatatatactttcagtgccattgtgaagaattggccttttaattctaagtagtattaccctatgaagcacagtgtgcaaaggtatgctacaaggtctctttaattcctgtgtggccattataattttataacaccattaccctttaaattctaccgattataagcagcgtaaaagtaactatataaagcaaacatcgcaaaggaactctgcaggagctcttaattcctttatgtagctatcataaaattcactttcctgaagacatttactctcattcacttccaaactccaaacctttttctggtagcaccacttttgtttttaatagaaagatgagttcatatctgtacatctctccaaagctctaaggaatgagaaaaggatcctagtatattgaaattactgatgtttaatacctctgccttttcactaaaagccatttaatatttttaaagtcaaaacttgacatacaggtatttataaggaatctccatgactctgaaggaatgaaattgatgtaggta

SEQ ID NO: 58669 - DNA, 1735 bp, Homo sapiens
aacagcagcaacaacaacaacaaaaagcagattaactcagtgtttaatcttcaggaaccatgcctatgggtttaaagtattttatgtcttataagaattataaattataactttgaaaaatttattatgccttttgggtcttgcttcagattgctaacattggtactctgcaaaattgggaatatatgatttgcctgatggttttaaattgcatttatttgtggctcataaaggagggcatttactagactaaaccagaacccggaggagtgcccatttaaaactctaggttttccactggggactcttttattgccggacttggagagggcgccatgactggtttatttggtgttgaaacttgtttaaaatatacctaatcattgacttattaagaattataatagaaactaaacttttgaaagtgcaataataattgacaatctgcttctgtctggcatatcctttttatttaataaaataaatttatggaagtagttagcctgaaacacaccattcaaatgacgtctccataaaaatttcacaaggaaatagtcacatagtctaatctaataaacatttttaaaacattttttattttgatgcttgaaatggaataatatgtataaagcaaatcatgctcactaaaaatgttttcttcctgcaatccaaggcatcagctttgtaagctgatttatgttagtgtaaaacattcaagtctttatgtttctcctttcactggtttgtccaggtatttaagtagataatgtaaaagttcaaaagaaagacaaaacaagattgtgttatttgagcctcagatgtttcagctggcctcttcatcactgttttggtcaacgtgccacgttacctggttacctcatgcccaaagaatactgtcttctactcttttctgaagaagtctcaccatcttgtcacctttttctagttcctttataaataagaaatactgagaaaagtgaaaaaatgttgttttatgttctaatcagccctacaattttgataattttttaagaaaatggcttttttaaagaaatgtatttaaatctggtgttgggttggtaaatttgcaattatttatgaactcattaagtattaagaatgttgtttacctgtcctggaaatctcatttatacagaccaaaatccacacccttatcacagcccagtgccaatggagtccagacggaaggacttgactatgacaggctgaagcaggtgggtgctcagtggcagctttcctttatttgtacttgtttctttttaaaaaatatcccatatgcatatctttgacatggatcctgaatgtacttagaaagacgatagagctattgttatacaaattaaacagtggcattagtagtactgcatttttgcaaatctacacttccggttcattgagtttgcatgaaggtccagaggtagtggagggtggggttgtggttcagtgataacagcataaggtgtaaatgtaagtgcatggtacgcagttgtaaagaaaacaatgggcttttacttttcagtgactgtcttggcaaaattgaacccaacaaatctgattttggcaagagtgcaaggaaacaggcactcttctatacttctgctttctaaaaagcagtttggaaaaacagaatcaaaagcctgaaaaataaatgtcttaccttgaattctgtgatatgaattccaggaatttatttaaagaaaatattatggaagta

SEQ ID NO: 58670 - DNA, 1049 bp, Homo sapiens
gctagtacatagaaaagtagcatttaacaatgagatttttaaggctgggtgccatggctcatgcctataatcccagcactttgggaggccgaggcaggaggatcacttgagtccaggagtttgagactagcctaggcaatgtggttaaaccctgtctctacaaaacatacaaaaattagctgggcatggttgcatgtgcctgtgggaggctgaggtgggaagaagacttgaggccaggaggtcaaggctgcggtgagctgagatcatgcacactgcagcctgggtgacagaatgagaccctgtgtccaaaaatacatatattttttaaatgtagtaaatctgctcagttatcttgctgctttcacacatagtaccccctgggataatgttattgataaacttttttggtaaaagttaagaaaaaaagtggtgattacatctttccttcagtatgaaaagttcccccctttagttaattatcatggtggtggtggtggtgatggattgcatgttagcatgaattaaatttttaaaaatttgcatgtttccacaattgtttattacataacaataatttttgcattgcctagtaaatatggatatattcataacatacttgcccaattaaatagcaggctgtagttcatgtgaatttcagaggtattcattatataacttgagaaaataactagctaaatgggccacttaaatgggaaatgtaaaagaaaagcagagtatgaattatagtttaattctagagaacaggaataggtagcatgagtgaatatatgaaataacatcctaaactttaagaatatttgccagaagtgactctgcattttatggatctaagtaaatcttaagtgaccttggaatttagtagtcttccctagcaaagtaagaaggtgtagcctcacaagaggaaaggaaatatttcatataaatattattccctacagtgcctagctcagtgcttattgaatgaaattttctggaagttatttttccccctattcatataagcagatacctaataaagtaaaattgga

SEQ ID NO: 58671 - DNA, 1906 bp, Homo sapiens
tatagatgagttgaatcttgattcttaatatccagtagtgcaccataatcatgttccaattctgttaggtggttttccttccctttcccaaaatagaaattctggaactcctgattatttcctgaccactcatatatcttttgatagatttgatccaactactgatatataggttttaaaatttcaccaaaagctgttttaaaccataaaggatttttaaaatatgtttaaaagagtaagaactatattgcttttcttcctaagttatctctcctgttccttcggaaagcaagtgtattaagtatgtcttatccttgcattgtagtgaaggtccccatttctctttggaatagctttgtcaaaattacgttagtggtaagatggattaatgtcccataatatgcatgagatattgcatattgctgtatttgttaagtgaatatgtcagagtaaaagcaagactgtttggttaaaaatgctttaaactatgactggattataacgtttgggaagttggtgcattcatctgtggttattaagaccttacagatcttgtattcaagatgggaaaactagtcctttacatgcctcctgagaagagttaattttgtatacttttatatacttactgtgcctacaacctatataaaaagtagccattgtgtaatgatttttaaaattttctgtaactggtatcttcacataactaaaagtaatcttaaaatatcttttattggggaaaaattggttattttaaggttaatagactcaattcttgttttgtttgctattaacaacctataaaacagtaacataatgagaattattttttaaagttctattgtgtatccctttcaatggttttccccttcatagacgggattctccaaggaaaaatcagattgtttttgacaacaggtcctatgattcattacacaggtatcatcctgctgtgacgttgtgatttgagacttttaaataacatgttcaggatagggctgagctttttctacctggattggtaatcaccacaagggagatttttttttctttattttgaataccttttaaaaattctgccatcacttcacagttggattcaaggataaatacaaatggtaaacatattagaaatactagactgggaatctaaggccacatgtattatctaggccatttgtagcttaagcgttttcttttaaaggctgttcgccttatgattataagacaaggtttcaaaaaagttgaatagaagatccttttccatctgttactggaacatggactaatattaaagccatggttgtggataattgattatttgaggaaaatctctgtttcctagatactttgtagtaaattatcttggacagtttaacatctaacaccctgagtagattgttttctaggatgagccctattataccattttttaattaagaagacttaagaactagttttttcttaattaaaaaaattgacagctaaaaataatcctgcaatgcttttcagttacttacacaattaatttgacagaatagggacttaaatatagtagtacagtcattttataggcagatgtttaaaggcaacgctctcatcataaaaaaataaaaactgacccagcacctggtggttcacacctatagtttcagcaccttgggaggccaaggctggaggatcatttggggcccggagttcaagaccagcctgggaaacatagcgagaccccatctttacaaaaaataaaaaaaaattagctgggcctggtggcttgtgcctatagtctcagctactcaggaggctaagacaggaggatatcttgtgcataggagttagaggctgcagtgagccatgataacaccactgcaccctagcctgggtgacagagtgagaccctctttta

SEQ ID NO: 58672 - DNA, 2196 bp, Homo sapiens
ttaaaatggcacttgtgattttcccattgaaactagggaggattaagataggcagaccaattaggaagctctatacgcatgccagtaaagatcctctgaagggaacccagccttgcccctcctgaaacacacccgagctccttagagagaagaggcccttgcttctcagcttccacagggccagctgaaccagatgagcccttttaagactaaaagatagttctggtttggctgattgagaaaggacctcagccagctgttaaaaggtagcacttgctacatcttaaccactttggaattactccctcatccttccacccgccgcctctttagtgacagtgtccgatgaccgttcccttccctgtcccggtgtccctcagtttcattcaggacttcccttttttcacctgcttgggctggtgtcacttggatatgtttctgattcggcctgtcccaaaccccatccgattatttgatcttcctggtcaagtgtggaacttgacaccactgtggcggtcattgagaggctgtgttagctgttagaatacaaaagaaggaatataaaaaagaaggaatttagttgatgaggagtaaagcaagatcaataatgactttaaggtttcacatctaatgccttcatgcaacaagaaatccagaaccaaaagcagggcttcatggaagagtgtgagtttatttttgcgttaagtgtactttgaagagacggtaagctacctgagaatgtgcaaaagccagctgaggagctgcattggaactcagagcagttttagttaaaactatacaatgagatcacaattcatgaatagacttcattctcctgtggcccaaattctttcctccatgagaagattccacttctgattttacccagtcatgtagtgaggccagtgacagcatcagtgagtcagcccagattagaaaaacaattcaagcacaatagacagccaactagtgagtcactgactacatagtgtcttttgtaataagagcttagagcgagcttgtttatatttaactggaataatcggctaaggcccaagaattaattgtttaagaatcaaggaagtacaatagaatttcaggattctgatatttattttgagttgttcctatttttttccccaagagggactatttggatttagattaaatgttgaaatacatgaacatattataagttatacttactgtttttatcattggcactaaaaaataatttaaaacagtgtcggtaatactattccattttaattaattgaactatcctaattttaaaattatcctactttattcttactgtcctttctttgttagagaaactccttactatcctaaggttatagaatcataatattttagacttaacaatgtaagttttccttggaaacttactgtactagcttataatttcttctcattttaaggtctggcattgtgcaaattagagtccttacagatttcaattaaagtttagaatttaaatttttatttatattactactatgtaaacaggtataatgagatttagtattttgttatttgttttataataactctggaagcatttatttatttaatagcttttgttttttatttttaaagaaccaacaagaaaaccttgggaaagaacaaatacaatgaatggcagcaagtcacctgttatctccaggtatcaatttttttctctaagttttatattttatttgtataaaaaaaaattaatgcattcttagtgtagaaaaaaattgaatggtaagaaattatacagaggagcccataaaactctcgtgatcctcctagtattggacaaccaccaagcctcattatatattactcatctacattactagtgattgataaattctaccctacatttattaaccagatgatctgagattttaagatagctttctttttcccaatttgtattttgaaaaattcaaaactacagaaaaattaaaaggatagtacagtgaatatgcgtatacccatttcctaggtttaacagttgtcaacattttgccccacttgtcttaaatatctacctatccacacttttttcccctctgattagtttgaaagcaattcacaaataagaactgtttcaccctaaatacttcagtgttttttggaagaaccaggacatctgctatgtaaccacaataccattattactct

SEQ ID NO: 58673 - DNA, 2135 bp, Homo sapiens
atcatttattgcatttagttataatgtctctttgatatactttatgacagttcctcaatctttcataatactggcatttttgaagactgtaggacaattattttgcctgttatccttcactttggcttatctgatttttcctcaagattagattctagttatgcaggggttgttttagcaggaatattatcagagcaaagtcatgcccttttcatggcagcacaggaagagatacatgatactgtttcattgcattcttggtgatagtagttttgataaactcttgttgatatataaagtcatgctaagaatctattggttcttaaagcttaaaaaataatatttaggttttttaaaattaatgctgatgtttccttctgttttagatgtaatatattaataaaaatatggttgtctaacataggagttgattatgtctgtatattctcattaagatggaggatacctctttcccaagtggagggaatgctattggtgtgaactccgcctcatctaaaacagatacaggccgtggaaatggaccccttcctttagggggtagtggtttaatggaagaaatgagtgccctgctggccaggaggtaaggaatttcattataatggacatgcccagaattgagaggattttaattgtattccaaatacaactaactagatgcacttctttcctcgtagagaagtggtttttatactgaatcagataatatttttaaaaatcggatttgccttctttgtaggagaagaattgctgaaaagggatcaacaatagaaacagaacaaaaagaggacaaaggtgtaagttaataaagatagtctaccataccttaaaatatggaattcaggcacagctcattcaggaaatagtgtcagcatttatttaatttgggcttaattagtttgaacttatatttgctaatttttaactatgcatgtgaagtggcttgttttgactgttatttataaatttttaatggcagtcttagtaaagtgagttgaatatgtgaaattatgggaaaagcattgaagttcaaacctgtggagtttaattctgttccttaaatgagtgaatgacatttcactacttttttcatctcttagaatctcagttcccttgcattaatttaaaaggaaggaattcgcctaaattcatatgtttcccttaggagcttgatggttattggctgtgccccttcagagtgtaaccttcatgccctcctccctgattcagctgggcaaactctgctttgtctgtgctgtatattggtgtgcaacaaataatatgttccccctgctccatctggccaccttagatgccattcctcaaatctgtctctcgtgtctggctttgtagcattggctagtgaaagttctcaaggagaacacatgaggaaaggagctgtggggagggttgaagggaagatggttgaagacaggagaagaaagtctaagctgaaatgaaagggagagaagaccgatgaaagagaaagtggggagtggcagaaagaatattagaagtgttcgtgtaaaacactaaatgtatatagcaacaggggactggtagatgtgatattaatatatatctgtatatttaggaagattcagagcctgtaacttctaaggcctcttcaacaagtacacctggtaagttcaagataaatattttaacctttataaactttctctaaatattaatactccccagttaaaaattccccctttccccatatttggaccaagtgactggacactaaaatgccagagttctttgttcccacctgaaagcattcacttttttcctcctggaagctgctgttactttcttgaggttacttactaaaacaaggaaaatattaatgtactattagatgacaagagtatttttcataattgtttttctagaggtaaaaataaagtgagcatgttagttagtactacagtctgcttcagaacattctcaaattgagaaggatgtcctagccattcatttgggtgatattgataattaagggaataaagtttctgatttgtaaacttaaaaagtctccttaaaattttggggaagtgttcttgaattcagtgaaatttctgacattgagaattcttgagcatctgata

SEQ ID NO: 58674 - DNA, 2291 bp, Homo sapiens
gtttcctttggaacagttctgatcttgggccctgtttccttcttgcctttcctatattagatgccccatgttggacttccaggataggtgtcaccctaacccttggagcattatgactttgcaggaggagtagagaggatggcagggttcatatatgccctaaagggttccaaggtccaaaattacaataagtagtggcttgaaggggtaatcaagagagaatagcatcctctgtagttattctccccgtccctaccttattgttatggtaacagggaaggcaggatgtaatctctaagtggattatttgtaagtagaaaaggacctggttctgtaagtaaataagaagatgcttggcaaccctagtttttaaaatatgatttaaggaggactacagaaagaaaactgaaaacaaatttgtacttaaacattgcaaggcttgttattgctgtatatgtatatattttgttgttgttgacttacaaatttgcttaaaaggttagtcagaattctaagacgttcagtttggtttcaccatgacagttatactgtacaaaatgggcacagtcagcctgacaaagtgacctgctgtaccctcagaactcttaacaacccctacagaagggacagactatttctagatgcttcttttaacaattgatgttttctgcttgtgtaactgctcaagctgaaaaagttagcaattaccacccagtgtgcaaaatagcattttattcgttctgaaaacacccctcttaaaccttaactaaaagagcacctactgtttcaggattctgttattaaataaattcttgttcactccctttgtgattttataacatttgaacatttctcttcttgccccccattttgtgggataaaaacaactctacttcaaatcctatggtatttaattatttccgagcgttattttgaggttttactttgtactagtaaattcctttacttcagtgattctcagccttggctatccattgaatttaaatgtgaagtattttttaaaatgctgaagctgggacttactcctccttcatgtttttaatacagccactttgactgtaaacaattaaatgtatgtgttcactgttactgaatttactgtctcaacacttaaggttaatgtggattattttgggtctgatatttcaagtagtactaactgccatcctatatactagtttgttttttcagggacgcttacctctcttccaaattttataagtatttattttgcttatttaccaaatccccatgaaaaaaaaaagtcttaattagatgatctgttgcatagttctattactaaagctctaacctaaagtaagtagttatatatacttggaccttacatttcagtatctttcaaaaactgatctagacttttacaactatgataaattggactcattaagtaaatacatgagtcagtttaatttagcatggcattctgcgtaccttcccacataaaataatatcactcagctctattgttgatggtcttacttaacatttctctctctcaggcattgtcttgggaccacttgcacctccacctcctccaccactcccaccagggcctgcacaggcttcagtagccctccctcctcccccagggccccctccacctcctccactcccatccaccgggcctccaccgccccctcctccccctcctctccctaatcaagtaccccctcctcctccaccacctcctgccccacccctccctgcatctggattctttttggcatccatgtcagaagacaatcgccctttaactggacttgcagctgcaattgccggagcaaaacttaggaaagtgtcacgggtaaatacctttctgaaaaatttttttaatatgtcttattcttcctaaatatctaaaatgttgaatttattgtattctaattttatgaaatgttatgaacttcattgatttaaaaaattgaaataatttaccctggcgcaatggctcatacctgtataatccctgcactttgggaggctggggtgggcggatcacctgaggtcaggagttcgagaccaggctggccaacatgttaaaaccctatctcactaaaaatacaaaacttagccagatgtgtgacacatgcctataatcccagctgctcgggaggctgaggcagaagaatcgcttgaacccgggaggtggaggttgcagtgagccgagatcatgccactgcgctctagcctgggtgacagagtaagactttgtctcaaaaaataaaataaataaaaattaaaaattgaca

SEQ ID NO: 58675 - DNA, 2009 bp, Homo sapiens
atatggctgaaagtttgagatattttaacgtttattaaaattaacattcattataggatttaagaatattccttatggcctaattaaaaagtcttaatgtggtttgattaaacagtggttggttggttggtttattaagttaatttatgtatttttagctacctaattattttctggagttatggccaacaaaacaaaacttttccacaagttagcattgaataggagcattgaacccttcatattaaatgttttgccagctttactagttttgctatttgttgtttttaaaaaaacaactaaatttattcttctgtttatggtcctattcatgtgattttaatgtcctttttcttgtagactaaataaaaattaagactaatactagctttttcttgtaaaagaaattagtcaattaaatttattaatccacttattagataaaaggaaacttatttcatccccttctgaatctcaaaatgtatttacaagttaaaatattcttgggtgaaaatagttatttgcgtttgtgcctaattctctgatactaactgtagtctacatttatacattgtgtctgaatgctggttttgtggcttcactagctccctttttctctctccttttttatcctgtcttttgctgctgctttccaccttctgtccagctccatcttcagacagctccctgtataacgctccacttcctgagtattccagttgccagcctccttcagcacctcctccatcatacgctaaagtcatctcagctccagtgtcagatgccactcctgattatgctgtagtgactgctttgccacctacttccacaccccctacaccaccactgcgacactcagcgacacgttttgcaacatctttaggttcagccttccaccctgttcttccccattacgctacagttcctcgtcctctgaacaaaaactctcgaccttcttctcctgtgaacacaccctcttctcagcctccagctacgaagccctgtgcctggtctacttccaatttttcgcccctccctccatctcctccaataatgattagcagccccccaggcaaagctactggtccaaggcctgtcctccctgtttgtgtttcttctcctgtgccccaaatgcctccatcaccgacagcacccaatgggctggttgactctgtaacatatccagtgtctccaccgcctacctcagggccagcagctcctccgccgccgcctccactgccttccctcgcatcactctcacactgtggatctcaagcttctcctcctccaagcacccctattgcctcaactccctcatccaagcctagtgttctcccttctccctctgcagctgcccctgcctctgttgagactcctctaaactctgtgctgggagactcttctgcttctgagccaggcttgcaggcagcctctcagccggccgagactccatcccaacagggtaaggctttcattattgctactaacagctaatcacttgaaaatgttatatagcagtgactttaattgcctgaatggatgggtaggatggttttgatccttgaacatttatatgccataatgccatgctttttttttttttaattaaaaaaattaaagtagaaaaatgtttttcctgttggattaattgcatttggaggaatttccttattgaactaggttttgatatcttttatagtatcgcagttaaagatgttttctagtatttaagagcccctcataatacatttctttatttttttcttttttttttttgtttttttgagacagagtcttgctgtgttgcccaggctggagtagagtggcacgatctcagctcactgcaacctccacctcccgggttccagcaattctcctgccttagccagctgagtagcaggagttacaggcacatgccaccacgcctggctaatttttgtatttttagtagagacagggttttgtcatgttggccaggctggtcttgaactcctgacctcatgtgatct

SEQ ID NO: 58676 - DNA, 1314 bp, Homo sapiens
cccaagtagctgggattataggcgcacgctaccatgcccggctaattttttatatttttggtagagatggggtttcaccatgttggccaggccagtctcgaactcctgacctcaagtgatgcacctgcctcggcctcccaaagtgctgggattacaggtgtgagtcactacacctggcccattcagtaaatatttattgagctattgctgtggccagtcattgtattttctgaaatattatttgtacaattaaatttgatattaaggatattacaattacaaatgttttcactaaataattaaaataatgacttggttattaaagtggtatgttatttggaaaattcatttacttgcaacactactcatgaaaagtacagaataaaatgaaatgttagtgcaatgtgctgaagcattcagccaatatgatgctaataggagaaatgattttcatttgtatgaaacagtctctatccaaggtagccttcatgtgggaggagagatgtttgcatgctctacattgcttttatttgactcagaaatagtttacataggtgaaaagaatcgctttttcatgatgagtagccatagatgcatgtttttacttttttttttttttttccagacaactacaagaacagcaacggcaaaaggagctggagcgggaaaggctggagcgagaaagaatggaaagagaaaggttggagagagagaggttagaaagggaaaggctggagagggagcgactggaacaagaacagctggagagagagagacaagaacgggaacggcaggaacgcctggagcggcaggaacgcctggagcggcaggaacgcctggagcggcaggaacgcctggatcgggagaggcaagaaagacaagaacgagagaggctggagagactggaacgggagaggcaagaaagggagcgacaagagcagttagaaagggaacagctggaatgggagagagagcgcagaatatcaagtgctggtaagaagtttacaaactcttctgtgttcttgtatctgagcttggatgatgtctcttgtgcagtcatgtgttaaaatatttcacatttgagatgtttgggattaagccatacaatttgaaattatgaataaatatgcagcaattactactttaacattttctttttatttctctctgtattgcttttattgcttggagacttaaagaaagctcttggaaatttttattctgccattctaattcttctaacaccctataaaatggctataaagtgtaagtgtgtttttatgggaaattttttatactggatgaacttcaaat

SEQ ID NO: 58677 - DNA, 1030 bp, Homo sapiens
tgctatgaaatacgtatgtgtaagataaagatacttttttttttttttttttggagacagggtcttactctgtcacccaggctggggtacaggggcatagtctcagctcacagccacctccattccccgggttcaagtgatcctcctgcctcagcctcccaagtagctgggattacaggcgcacaccaccacgcccagctaatttttgtaattttagtagagacagggttccaccatgttggccaagctagtctcaaactcctgacctcggcctcccaaagtgctgggattacaggcatgagccaccgtgcctggcaaagataactttttttttagggaaggttaattgacacaacttttcctaaagacaatttggaaccatgtatcaaaaatcttaaattcataccttttcacctagcaaaatttatgtccttattgatcctatagaaacagaaaaagattcaaagatgaagacaaatgttattgcagtattgccaatagtgttaggataacttaatatcctactgtaggagactgcttagactgtggacagcaaaataatcgaatattattatgcactcatggaaaataaagatgctgaactaagtgccttaggataactctgtgtgtgtgtgcgcgcgcgtgcgtgtgtccatccagagttgtacacacaggcaggttctcatcccagatatcctcagttttactaacttatgtctccctccctccctccctccctccctccctccctccctccctccctccctcccttcctcccttccttcccttctttttcttccttccccgcttcctcctttcttttctttcattgtttttggagacaaggtgtcattctgttgcctgggctgatgtgtgatgatgcaatcttatcttactgtagcctcagactcctaggcccaagcaatccttctccctcagcctcccaagtagctgggaatacaggtgcatggcaccatgcctggctgattttaaaattttttgtagagatgggtcttgctttgttgtgcag

SEQ ID NO: 58678 - DNA, 1796 bp, Homo sapiens
aactgtatctgtgtagttttattttctgagaaatgtcaataataacagtgttactaaatattaccaactcagaacatttttcctagactgttcctacttcattttgttaaaattgaaatcattcttatttacctagtaacactattcattataggtaaagctgggtgaaatgtattttgaactgatgttacttaacattttacttgcttcaagaaatgtctttgagtcaacataaactaaataatgaatatatatttaaaaagctattaatctcaatgtgggctgatgctttgtgcatctatttacatttggggatagctgttttggagagaaataggtatttgggtggtggaggaactgtgtctgatattttttaaatgcttaaaaaataatattggtgatttgcactataattgtttctgaaaaaaatttatattctcagaaactttcaaattattgtagaatatatatgcctagcttaaaagaaaaattaaagtagtccgtcaggatttttcatggttcagaattaaggcactctttctttgaaaaaagtcctcagacgattctattaatgactgaagaaaacagttggagagagaactctaggaagaggagccatgtgcatttccagtatgtgaattggcagcgataattctgaggaaaagcaaagtttataaatttggaaactcctcctagaaagctacacaaatgtcttgctttagaggtcaaaacatgagagtcaaatttataaaccatccaatttaggtgggaattattcatgccacacaagattcggaagccagagattttctgcttgaatcactattttgggaaatccgtttagatgggcatcttttcagcaagcaagctaaaaattagcttaaagtgttcaacactttcttttcttaccttcagaacaagaaaatagtaagaatctcctgcagctatatgaattgcctgcttgaatcatctgtctgtgaacttagaaatattctccagcattgtgtccttttcctatatcagtagacactccttatcttttatagcctgaaaaccctggaatatgatgacatgtggaacaaacttcttaagtcaatacaacctagctgtaaatgctgttaccaataattctttcagattcacctcacccatgcctggccttctgcttgtgacttaagcttactttttgtgtgttaaaagcattgtattgcttagagaaacagccattaacttggtggttaaaaaaaaacccaactactaagaacttgaatgagaaatgaaatgtagtcatagaatactatttggttcagctgtgagcagtatttacattatcatgttaataatgtaagctgtgaatattgattttccatattgggagaagcatgagtgtagtgagggagttgtagaaggcatcttcctgttagaaagtagatagcaaaagctaaaatgtaagaaacagctgcaagagtaggaaacgggtgggagggttgaggcagtgaactactgatttttgttataaactttaaaaactatatatttatgttgttttggtaaaatagaagaagtaacaaatgctcaaagatctaaaaacttagatcttttcatcatagatttcttgggacagctactgtgctcttaaatgtttctctttagcttctgtatttaaatttgttctaattagaataatatgggtgtatcttttgccctttgggcccaacagattgcttagagcattatatgtaaaatggcccatattttttgatgtaggttgaattatctgaaatttaatacaggct

SEQ ID NO: 58679 - DNA, 1652 bp, Homo sapiens
ggagaacaaaaacgtgaagaaattgaatttgcaaataaataacaagaaaatttgctggaactcattgatcgtctagatcaaaggtccgcaaactttttctgggaagggccatctgtgtcatttgctagactcttcctttgtagctcgccatagacaaaacggaaataaatggttgtagccagatttggccctagggctgtatacagtttgctagcttctggtttaggtcaaaaaagctcaccaaaagtccagcccagtaagtggggaaaaaaacaaagacctcccaccaagacctctcactatggtattttagaatgttgtcctagaataagtaagatttcaaatgcttggtaaggggtggtgggagtgacaaggtgggggagcttcaaaatcctaagagaatctctttccagtctaaaatctcctcttctgcacaacttcctaagaagctattggaagatgtgttctgttaagatgagggagtaaagcaagaatgatgaacccatgacagcatccaggagacaaggaatccaacttaggaaagagataggtaattcccgcacgactaaggtcaaagcaaaacctagggaatagcccatccggttgggggcgctgggagggctgaaggctcccgacgggtagtttctgagggaaagcaaaacaaaagaatagaaaaacctgaccgtggttctgctatgttggaccatgttgatagggattacagttctaatggagagtttggggtgaagtagggacaggtatatagaaaaagaatcaaatttttaaaagtactactttttagcaccaaagtaagaaaaaaattgttctagaaagtaaatgtgatcagcagtgaattatgtgatatgtgaatattggtgtatccaaagtggtggtatgagtttattgggaaaatggagaagaaaaagttttggggagctagagatataggaattaaatcatttgtatagtaggaagtcagtagataacatctaaatatgaaaagtctagaagtaatagttctaaatgaattactgtatttagaaacatgtgataagtaccagagtattgaaaataattgcttctggggagcaaaatcagaagtggtgagcgttagtaagaggattactgttctaagtcttataatataatttggctttttaagttatttattactactgttatgtttaattttttatttttaataaatgtagagtcaatagagcacatgtctaagtgttcattcttattagtccaataccctttattattatatcatttattaaatagtttttggttcctactcatataattaatatttggcttggccatgatgaggaaacatattctaagaaacatgagtcagtcctatgttagtctccacatagaaccttaatatagttaatatctataaatagttcgcaaatcaccagtactatctgaaagttataaaaggggaataataattgcggcacagaactgagcagttggaacaatgttggaacaatgagagtgtatagccctcctattggccttcggaggccggatggaccaaaagttgaccgccttctcttgtgagtatcaactcttgcctcagcggctttgtaatattaaaacttagctgtcttattacattttatccattttttatttgt

SEQ ID NO: 58680 - DNA, 1561 bp, Homo sapiens
tattatatattaggtccagtatttatctcattttgtgacagatttgatttttatatccaatgacattaagatgtcccataattcagtggcattctatctaagatgcaaaaaacaggtctgcattgtacatgatatgtgggaatggatggtcattagtgtctcatgacagaaccatgttgtatgaatgcaagtttttttttcttcttaccctaaatgaaaacttaaaattacctgttacattaaaaattcagttcagtaggttaattactatatggaagtttagcaaatgtttgttttcaccagtgctggaaatgctaggctattagacaaaaatggcagcttaaattgggcaaatttgataaatgctttagcatactggagtctagtaataaggttctcatgctctctctctctcctgtttttcatttccagtgttctatttaggtgagtttttgaattctgatttttcatttaagttctccctctccacttcatgaataattaccccaaagagaatgtctcattgtcttagaaactgtcaagcttaggtgcctcttcagatgctcatcgaacacttgttttactcaagctcttcatatataaatgtttctttttccttattgttgatgttttccatttgtttcaagtaagccttctggagatgatgacagtattatgttgcagtctttcatttgctctgtgttatgtaaagcttatattttattttgctagacaaaaagaagacacgtttgtaaatatgtgatggttttatgttattctcatgattttatctcctctgtccagctagatatgaaaataatgttcatctgtaatgttttctccctctgtagggccaacattgcctagacaaaactcacaactacctgctcaagttcaaaatggcccatcccaagaagaattggaaattcaaagaaggtaaattttcaagttattgtttgtactttttctttatgcttcagaagacaaaactgaacatcctgtgtttaaagtagattatgtcttatcagctgtttaagagtcacaacttttattcttacattagtaagttttgtgactgtcattagtaagttaccagatacttgttatgctggacatgagatgttataaaatttcatatgtgtttttttttgtaaaaattatacttaaggtatgtttaaaatattgtaaatacgcttaacagaattcaaaatcttcttatggttcaagaagtcttacttttgtaattataaagtgatctgtgagtactatgattttcatgtgacaaatttaactaaaaagttgaaatattgttggctgtttctgtaacacattgatcttcagatattactatagggtttagtagtagaatacaaaatcattctctactgggcagcattcttccatgactaggagttctctgaaagtggtcagagtacgtaggctgacaggctaacctttggagtaccaggatggtgagcaggcaggcctcagaaccgcacaaacgctgagctactaaaagttccactggaagccccaactcatctgaggcagcttgttcagt

SEQ ID NO: 58681 - DNA, 6052 bp, Homo sapiens
atgaatgcagagtctactgtagtaattatatacagtaataaaatacagtcatgccaatcaaatctaaacagcctgtcgttttccactactgctaacttacccagcgtttctacatttccctgcttgtacaaaacgcctaatggtaaagtatgttaaaggcaggggtaagcctgaaggatggctgtttgacaactgcattagcgataaagggacagccgtgaaaaaaaaaaaaaagtcaataggcctaacttaaagagaaatgtcctttcataggtaaaacgtaaggtttatgtaacatcagtgctagtgttaaaaagtatgctgaaaacatcgtattactgaatttactcaacctggacaataagtgttctttcccttattctgctctgttgccctgactgaatgaagaaagagttaatggtatcagtattaagcaggaagttctgttaggcttatgcatatgatggcatgaataatttagcatcttcaggaaatgcaaactgcagtagaatttaagcaacctatcagaatttagatcaatattttacatgatagtatgaaattaaagtcagtggaaagaagatgcttaaagataccaagtgaagaatgttaatagtttaaactgtgagaaagactgggaattttttattggaaatgttttgtcttacgcagcaataatggtttacctgcattctgacacttgtcagatgactttttgccaacatgattggtaatgggatgtggcagtatctttgctgtcaaagaagagataatttctcaggtttttcttgtaagttttaaaaattgtccttatgggtttttttttctctttaaatatggaataaaggaactgaagggtaaaacctgaagactagtcatgtttctttaataaaggttttatagaagtagccatttgcaaacgtcggtaagacagatttttaaaaaaacagtttaaacttataattattgaaaatattctaaattgtttatctcctgtggaatgatctcattagcttggtagacattttatgtgtacgcctgtggtctttctatatcttatgtcattactgtaaataaatattgtgcatgcaactttaatagattgggtggttggaagtacttagcaaaggtgacatttatcaatcttattttgtgtttgcaaaaaaaatacagtgtatgtaatattttcaaagcaagacaattggattatgttaaataatttctaaaaatgatgaaaaattctcttttatttaagacattaccatttttagatgtgtgttatttaattataaattggtttggttctgatttttctaaaacttttagttagcatgagttgtatgttttaaataataacagtcttaggggagatctaaaacactgtcttgtttgcctttatgtgggctttcctaagccccagtgcattttaaccactaattgtttcttggttaataccaacggaaaaagaaaatctttcccatgctgaaaataatttcttcaggattttacagaaaattattgatgtaaagttttggatgtcactaaagtaatagtaaaaaaaaaaatttacttttgtttgtctcatctcaattttgagtgtcactttgatttcatataaacccttccccttttcatagatcatcaccttctcattgagttttttctcctaaagagaatttacttcattgacacttaagctaaaatttaatgtaaatagcctaaataaatggctgtttgatctggccacacatttttaataagacattttgtcaagtatgtatatatatattgagaaaaaaaatagtaacatgtggcttggtaaaaaatgaatagctgacttttagcaaaccaaagatattcttattttgtatcagtgaatataaaactctttattgcagtgtgccgtttataatggctttggtctctttccaactagtaggaatgagttaatcttaagcacttccaagcttaaatttttttcagattcaattctcctaaatgagaatatagatcttgtgaaattaacactaatagccacagatcttggcttcctctaccttatcttcattgactttaaaaatatataaccctaaaatgctggttgcactctttgaccgtataacttaggaaataactaagttataagtgcatcatttgatctatggctgcttacagggtttttccaccaaaaaacgattgcataaatttttttaagagcctatgttaaagaggatgcgtttttattaaattacagagcttccaggatgaggatctagataggacgtatgtataaatacattttgaacatttcaaagcaccttttagtttatgtgaagttcttcagatggccccgttgtccttcgaagcttctaacaccaaggtgtctgttgcagcccagagcaaggttactgctacccaggacagcactaatttgcgatgtattttctgtggtaagcaacattatgtttacattactttttcaagctgtggtacatgctacttgcgcatttccataacttttgttttcttaggccatagtctggtttgtgatatttgggatatatagcaagctattgtttttatgttgtgatatttgttgtggttcatgtaggtgatttggtcagctttgagttggcttgttagcgagcattagaattagttagaattaggatcttaaaacacttcttgtccacctcttccaacacaaatgagaggggtttttgtttgtttgtacttttttgtttttaattattttgtttgggagcaaatttttgatttagaatttaaggaaaaaatttatgtccatcttaatatgatttgaggaacgtaaatgtgccttgtgcaaaggaaacttttgcttaacttgaattaattttaggtgtgcatgttgtgaggcagatgtaagctattacttgctttaataggttgatttctgattgacagcctcctttattcagtaggttagaaatctgtgacttaagagtgaatttaggcttattgagtgttttctttcactctcactctcatatacacatgtgtgcacatatatgtattgtttgcatggacaaaccaggtatgtcacttagccaccccaaattagagagaataagatatatatctaaggatacgtatctatctataaacacagatagatacatatccttgtctaaattctttttatttccatttgtttctgaaactttgttttaaaaacccaagttccaaagagttacttttaattacttgagctttgaaaagaaacctcatatatgcctttttgattcatgtgtaccttgctagccagattattttatgagagagataaagttattaaatgatatacagtattgctccaattttacataaagtgttcagctctgtgtatgtactttatgtgactcagaatttttaatgtgactcctcaatactaatgatactgtttttttttacctatgaagagaattattttaaaatgtatgtactttctggtttaggcaaagaagtacgtgttgcaaatttctttaaaataaaaaaaagaaaaaaggaaagaaaagaaaaggctaatgtatttgttagtcacttaaagttatattttaggattgttccagaggacacagttacagcagtgagcctattgtgtggctgttcataaatccctcctctccctcccagatcccacaatgaaacactgcagattaagtgtgtaatcagtaactttttctcctcatttttctgcctcctcctgggggtttttccgggctatcttttgaactagtcatgagtgattattgatatttgtgttattaggactctctttagctcattttgaaaacccatccaatgttgtatgcctttctatttaatatgttgaggtccatacgcagaataatggatactttacccaattgcagagaaaatattgatttgacctaagtgaaggtgaatctttaaagttgtaaaataatgtgttaaaaagtagatttccccccattattacctttaatttaactgtgtgcaaacaatataattaacacgttgctaagtttaaacttgattgtattgtgtatataataacaccgatttgtcttttagtcctgtgtttttaaatagtctgtggctaattgtgaaaatagatttgtgaaaattaaaatgtgacagtaagtggaatgtgctttaaccaaaactcaatattgaaggcaagactgacatacagttcctattatagagtctcctgatctgattttaatcatttatagggtactgtatcagtgacattgccacatttctctgttacaaacagtaactcacagactttgctatataccttcttcttgtagccaggacaaattaagatcagccactatctttggctgtgagggagagaacaaactctcaaacagctgctattctttatgataacatagaaagagcaaagcaggttcactagtttcttaaccttggttgttcttccctctttttcccctccccaaagggctgttaaccaccacatgatgctcataaaatattgtcattttcccactgaaatggttatgaaagtacctattttgcattttatgagaacacactcatttaggaatgtgacctgtgtaaagtaatgtttatattcctgaacatacagcggcagctgacagactttgcctgatcctagttgctgcttcatgtcatgtggggtgcctttggtattacttaccaattttatagcccattagaatgtttgacaagaaggaaaaatgtaattgtgtaccttaaatttatatttacctggaacttttaatgtttatagtatgtttgtattaatttttaaatgcacataaatttcaatgtgctagttactgcaacctgacaatttgaagaagaaacaaacagaacaaccagattaaatgtagatgtgaaaaagtgccaaagggagtgattccatgcacggacacacacacacacccaatttaaaggatgtctggaaagacaaaaagcccaaaaatccattatcatcacaaagaaccatgtagaaaagaattgttaagagttgttctaggatcaaaattctccccattttaaaaggaacttccttgaagcttttcatctcagctgcaggaataaactgtagtaaattttttttataattatgataacagccacaaaatattacccacattttaaaaatctcctttctgaacagatttgcttagtaagcttttaaaaagctttaaaaaaatattccaaagcaggttctgtaaattgctaaaagattttcttttctcagcttttgtgagttacattaaacttgtgttagttttttaaaaacctgttaaataaaataaataggattgagttgaaattttgacgtcttttttgaatctatatatttgaattaaaactgagattttaattggcaaatttaatccattaatattacctttgatatataacacctgtcctaggtgtgtgactggtataattgcattcttctttgaggtagatgccaaacaggtctaacctactcacattcagctgtttcattatttaagcagcctgaggctttcaacttaaatactcaagtaaacattattttaaaaaatagttaaaacataatggtcttgtgagttgcccatgctaaatgctcacatttagtactttggatatataaagtacattccctaaataatttcatgctacctcagatttacccgcccctccccacacttgtgtgtccccagaagagaggtcttttctctgtaaagtattaaacatttgtgtatagcctaataggagagtctgtttttacatcattattttaatttcccaagaaaagaattctagtctgtttactagacagcaatcatgtattttcatttatacaaacatttacgtgtgtatttaatttcaaaagttttgtttttttttgttattgattacatgggattaatttttttttataatatttatttggttctcaaaatagcagactcttaggaaatctaatgaaatatatcactgcagttgtcatcaatttgtctttagaggacaaataaag

SEQ ID NO: 58682 - DNA, 1414 bp, Homo sapiens
gtatttatcttaagagcagtgggcagcaattgaagagcttttactaagagcgatgatttgggttaattattaaagtatcactggctactgtggggaaggggacagataccacgattggaatgggcaacttaattagatgatgctaatgtaattgtctaggttggtggtctctcagtttttgagcttatcccctcatacatgtgtgtttatcatttatatatatgtactttgttgttgacaagttgagtacattataagacgttaaaaaacagtaaaatggatgagaaaaattaatgaatggaagtgctactatttttttccctgccccaactgatgtatgttaagcttctgggatacttgttgccccaccctgaacatgactaagcaagggatcatggaacaagaacagtagcaatggagagagtttggagagagaaattaggaggttgcattaacaggacttgaaaattggttaaataggagtaaaagaaaaggtagtggatttctggtttgtgtaactgaacagataagagctctgattaaagagtcaaccaacactctgatagatgctaattgtgttaaagtagcattctgccagaatgtggtggtttctctgagcatatactcaataatgcccttagtaacaaatggtaggagggcatttgatgggcaagtcttgatctgtgttcaggaagaggaagcagagcaatgaacctgaggacacaggttactcttgcctttggaggcattagggtatgacagcattggtaaatgataggcccctcaacttccagttgcctcttcaagtgtctttagctagaggcagggccattcatttcacgactaaaaataaacggcttacaaaacatggtggactgaggaacatattaagactattgccagtgcagacaaataatttttcagcaagttatcaactgatagaagtgattttcatattggcttagaagggaataaaatgcattcgggtcataagttgggagaggattgcaagaaataaaggatgggaaaaaaacccaatcatatatacagttttgccttaaggttgagtgaaaaaaaaaaggcgggggggaagatgtttatgatggtacattttcatgtgtagctatatatgcacgatgctccatttcctgagatatagaaaagtttttttatcacattttaaaacaaaatttgaaataatatttttgaaaatgtttcaaaatgccactttaaaaatgcattgctttgaataaaatttactgtttgtaatccttatgcctcctagcacagtgccctgcaatgtggtaacttttttttttaatgcagcaactgtaccactgcagtatctgcctcccttctattctagatacctttgagcaaacgtaaactcatttgctttcattctgtctcaaaa

SEQ ID NO: 58683 - DNA, 1002 bp, Homo sapiens
cgcccatgtgcatattttggggcattgcctctgagttaacattgggcattcctgttttcataatctaggtaaggtagaaaaattctaaggagtcttttgaagatggtgttgaatagcagtatctttgaagttagttggtatttcatatatgaaaaatattgtgacattatttcattaatacataaaaaattcctaaggggtagatgctgttctaatctaagagaagaaatgctgtagttaactggaattatttgtattcctgttaaggtactatgttacatgagatgagagaaacaaataattcaaaatttttggtcttaaggaggctgttaattgtgtagatagtataagtcatggtcaaaaatatccacaaggcagtgtaagtaacatgaatggtgcagaatggtagttaggaaacaaatatagaatgctactcatgtaaaggtaccaaaaataattcttacaaggtagacctgctatttatgtgagcttttgtaatttctgaaatgattcacatgagaaaacaaatgacttctgtgttctggaaaatttcaagagtatttggctattacattgtcattcatgtaggaagaaatacattttttatgaaggagtttattttgcaaatattatcctgctctttgctgtggtaatattgtaacaaagagaattccttttcctattcagaaatactcactggtttcccattgatttaaagttttcctcaagccttgaaatcagtcccactttgaagactggatgaatgatatgggtgcctaggaaatgtgtctccagtctcttctgcagataactaatggaattagccttatattgctaggaagatggtagagtgggtttttgcataactattgtagtatgcagcaataaccctgcaatggcttcctatcaatcttagaataaagtacagaacttttttttttttttttaagagagagtcttgctctgttgcccaatctggagtgcagtggtgcgatcataact

SEQ ID NO: 58684 - DNA, 1025 bp, Homo sapiens
agaagtgggactttgcaagtcacagaagtggcaaaaattattcctaattgctgttatcatctgtcaatgaaagggaaaatgtaggtctgatggcctttttgatgcttaatatataaaaattgcccagcaattagctttgtaaccaccatctatttaatagcagtaactgttgttactagctgtttctagctctgtctcagtcagtacatttgtgatttttctttttgtgattttttttgtgattttttcataattatatctgaattacatattcatatatgtggatttataaattgttcatactaaattacaataaatacattttaatatattaacttctatgacttttaagttcttgttcactaactgtctgggaaagctgctttagcttatgaagcctcatttttcatgagcgcagcttttagtcttacgttgtgggacttaagacatcttgtcctgccccaaggtgggaatgattaaatggctaaaaagaggcagatactatttttgtgataaatatgggtttcatgtctcatagcaagttattttagcctggagtttgttgtcatacagacactatattctgtctgcctttcattcccttttctctacttccttgtttctctggcagttaggcaccttataatctattgtctgatgcatgtccagctagtgacttcagttcttccaggcttattttacaataggcttgatctttattcagtggtgctacaatgacctgaggatgtcatctgtgattatttgcatgctttcttacatgaggatagtaatttgcatgtaattactttatctttattcatgaatttttatcctttattgctcataaattgaagaagcattttgctggatgttaaatagtcaaaaattgtgatacctctgtgtggaacattttcctcttaaaacaagaataaagagaggctttaatagtctgtcttgttttccactgatgataagagatgaattgcaggaaccacttccactctgatgagaccattcacaacaca

SEQ ID NO: 58685 - DNA, 1696 bp, Homo sapiens
acaaataatagatgtctccgggaaagtatcatatatgtttgaatataatgtgtgtgacacctaaaattatttctactgtatgaagaaaatcagtactttgggagaaacaggtaaaaatgaaaatgtaattcagcatcagtttgagtttcactgtgagcctcagtccaggttttagaaagaaaggtacgtagacacaattctggctttaaatagttcacaatgtggcaaaagaaacttcattaatttcttaagattaatgataaatacagtttctttgggcagattgactctaaatattgagttcaagggggttaattacagtataaaagggtttctagctgttgaaaaggttgggagctactgaattaggcctccagatcctgtggcctacctgttatacctcaaagcctcaattttcagccgcttccttagcctttctcaaccagggctgtgagacagttaagctctaaggaaaattgtttgagtaactaatatcagttctcccaaggactgtatttaggtattctttacctaccatggatgtgttagggccagactctcttggaaggatgcttctcttctgttctcttcccttgccctctccctctctttatgcttctgttttgtgatcccccatttacacacaggaacaacctcaaagttctgggttggaattgggaccagaaaatgactatagctttatcttctaatatttgtgttgattaatgcttgaaattatatctaataattcatagtcactaaaaagaaaatttgagtgaatatttgatagtagcttatcctcttaaagtttacagacctcaggccaggctgattctcattagggccaggcatgctggctcaggcctgtaatctcagtgctttgggaagatctcttgaggtcaggagtttcagaccagcctgggcaacatagtgagagcctgtctttaaaaatacatatattaaaaattaggtgggcatgatggcgtacatctatagccctagcttcttgggaggctgaggcaggaggatcacttgagcctgggagtttgagtttacagtgagctatgatcacgccactgcaccactccagcctgggctacagtgaggccctgtgtctttaaaaaaaaaaaaaaaaaaaaaaaaaaagtttacagatgtcctaatcattagagctaataaggcctaaattactatgtacttgctggttctccatgttttaattttcctttgggctaaatcaggtgtaaaattgggaatcttgaatttaaacctctaactcagggattcaaaaagtgtggtccatggcaactcttgagggtccccttctggaccgtttcaaggatcttcttcattatacttcagccagaacagcatgccacagcacactgaatacaaaagcaattgaaataatctagctgtctggattattatttaatatttagtgttaaatgctaaagagatttgtaaaaccatggcattctaatcacttaatatttttgttctgagaaatagttatttttcattaaaatgttattttaaatataactgctttttagttgttttaaaagtgaattcctaaaagttaaaacatgtaatttagttatttagtacagtaaataatgatagatgtaacccacataagcaaaagctctttagggtctttaataattgttaggaatataagtggatcctagga

SEQ ID NO: 58686 - DNA, 1851 bp, Homo sapiens
tgccaattattggtttgactttataaagaattattattttttaggtcgtgataaactgtgccattcctaaagggttgaagtacaatcaagctacacagaccttccaccagtggcgagatgctagacaggtgtatggtctcaactttggcagcaaagaggatgccaatgtcttcgcaagtgccatgatgcatgccttagaagtgttaaattcacaggaaacaggtaaggtgcccatggtttatttgtattttctttctttttccagagacaaagcaaaactgaagatttacttgtattcttgaactgaagtgccatgtgtatgttaaaacaaatgtttgttaacttttagatcttgtatatatttgaagtagtttttgaatttttattttctatagaaatgtgaactttttattgatgataaatgtataatctagaaagataatcctgtgagtttagttctttttaattctgtaacccttttatttgaagtatttagatgggtttcatcctgctttagaaacacttccgttgcaagtacatgaagcccagagaatatgcagtggataggaattatgcttatttatcatctttgtgtaaagaaacacatgttttctgaaagacatttttcaaagcatggacttgaagtaggactgggtctccttcccagtaggtaaaaatgtgattctcggtttttttaaagattttaggagtgccctcaggtggtatcagtcatgaattgcatctcctctgatagtgcatattggttagaaatatatatagaaatcactttttaaaaaaatctcaatttttaaaaactgtacatatgtcaaggataagctcagttttgtcttggtttaaaaaatagaaaaatgtaccagtgtgtggttatttctttgaagagagagattttataatcaggaaataattgttatacatgaaaacacaaatatgattactcttgcctatattgtatatttagtaatgattttaatgatataaatgtactgtaaacaatatatattttaagaggaaagagttgcagtcagatgaaaatttgatactttgttgaaagtgtagaatatcaaaatctgttcaaaatctgttataaatacattaaacaatgtatatgttgccttatactaaaaagggttgaagcatctagctggtgtgttagtctgtcaaatactaatttcagagcaagaagacattttgggatcttgcagaaacttaaagttgttatgcctttagatgttttgtatcagatcttcttttgaggaaattaatatcaatacataacttatacataggttgcatattttgtctagtttgagaaaataaaccactagaacttggcctggtgtgtctctaagtccagaaaatagcataggaaagtctgtatagtcttgtatgtaggtcatttctctaagtctctgtacttctctcctaggtgtcagtattttattggcatgctatcataggtatagaattgcttttcatttactgtagttttaccatagggaagaagctagaattgtgattctttttttttttttcttaatatcttgttggataggtcagttatgtgataaataattaaggtaccaaagtttggagagtagacatttgactatcccgtgttttagaacaaactagcattatttttatttctaaactttcaaaagtgtatccgttgatattagaaactaaatgttactgatattaggaacttatattggaaactaaatgttccttttttaaaagtagttaaaattttattattcctcttgtcattgacttttgatttttagtttttagccaaatggaaaggattgtttctctcaatgagtagtc

SEQ ID NO: 58687 - DNA, 2640 bp, Homo sapiens
cctgaggataaaagtaattttctcagtaaagaaggtgttatcacagacaggtcatcagtatactaaacatgtatgcaattaagcaaataatgattaatttacacttgtattaggttggtgcaaaagtaattgcagtttttgccattaaaatagcaaaaagtgcaattacttttgaaccaacataatagttgtattcagtttagtgaatgaattagatactcaaatttagaagaaaccatttcttgtgttgcttatctaagtgttcttcgtggatcctgctctccttttggtcttttaattatactttattttttttggtttgtcttcaccattagactgtacacataaagacaggaagcctctgtcttgtccattattgtttccagcacccaataacagcactgatcgttgactgactcctaggtttgtgtggctatgtggaacacttagcatattttaaatattgcaagtttgaatattttattttattttttacagtgaacagagtatctgtcaggcaagagctgctgtgatggtttatgatgatgccaataagaagtgggtgccagctggtggctcaactggattcagcagagttcatatctatcaccatacaggcaacaacacattcagagtggtgggcaggaagattcaggaccatcaggtaaggctttactacaattgttgttaaaaatgatttagtattacaaaaggacttggcatattccgtaaaataaagtagttttaaaactgtaatcaaaatagtctctctctgggaaaaactgaatataaaattgtctctccaccctttctaccttttatgaagcctgaacttaaacgaagatttagaacaagttgtacaaaaatagaaatacaagttcttttatgatgaattttcattagattttctggccttcaattagtttttgaaatctaaagcaaattaaggacaaacaaacaaaactctacttaagtggcagattgtatgtttatggaattaatttcctgccaatgtttgggatatggggttagaggagggagttgaaagtatagatagtttcagaaaatactgttaaattcacatgtgatagaaaaatagtaggtattgaggttgctggaatagtttggcttttgcagttcatgtctggggcgacagctaagcttttactaattcctcgctctggatttcttagaaagtagctggattatctgattacttgatttcttgggccttaacagatcaacagcagtagatagaggaaaaggcagataagctcttactagcattaactatatactaatagtaagaacttttataaagagtagatttacaaaatactttgggaaaaaatatttaccaaagatgttggaatcaactgactttaaaaatcatcctgctacacatgcggaaagaatgtaacaaattttcttcttcattgcccagctgagctcttatgaagaaaggtaagttcctaggtttcccctacattgtgtggtagtgtggtgtaaacagatgctgcattagccctgggttttaggatggtgattatggattggtaagatttgtcatgtatgcatataggggctgtgggcctacgagaggttgggctgtgaaactggtattttggcaaaacaaacaaacaaacaaaaaaacacacaaaaaaactagcaatcttagaggggctacaccccgtagaaagaagacaagagaaatccttctatcagcacagggaagcaaaggagtgtgttgctttcttagctggcttagaagctcccccgagaaatgagaaactccttcacttaagcaacttaagccaagaaattaggaaacactggttgtagagcactgaaactgttggggcacgtggtaaaaacaaatgtggtgcctgcgtggagatgaactttcacagctctgagtcaatctgtggaaagagcaattctctgaatttaccagatttatccatttatacagacggtttcggcctgcctctctttctgccctctctggctcccttctgtctgtctctcccctgtgccccgccctcttcttttccctccttagtcttcctgcgttttcctctaggctccagtttccttgttgtgttgcacagcctttttctggtctcccaggctttttaccaagagccccctttgtcccatttgtagtccaggttctggggagcactgtctcatctttgtctttgttccagcagcgacttagtccagagataaatcaaatacaccccaagatgttattatggggaaaaaaaaagaaaactggacaattaaaattttgtagaaattgttgaaccttcttaatacaacattccaaactaatagctgtaaagaaactacgtttttggtaaatttagtgaattggttatttgaaagtactgatgaacaatcctacatttagagaaacaaaaaagaatatttgaagataatcagaaagaaattcttttttttttttattatttgagacagagttttgctcttgtcgcccagggtggagtgcaatggcgtgattgtggctcactgcaacctctccttcccgggttcaagcgattctcctgcctcagcctccagagtagctgggattacaggcatgtgccaccatgcctggctaattttgtattttta

SEQ ID NO: 58688 - DNA, 1047 bp, Homo sapiens
ataactcactacagactaggctctgtgctgcacataggggattcaagaagggatgacatattttccattttcaaagatgatgaagacatgtttctgaataagtgagttgggccatgactttcagtggtggtacattttaatactttacagcatatcacatactaactgggagtatcattaaaatgctaggtgcatccataatttttttcctccttttgattgcctcctcttttgcatcctgtctatctacagatcctttcttctgtacttgcaacatacatccccagtgctttcctctccctcctttttttctcgtctggtatttgtgcttctgttcttgattttgctgccactttcttgaattttttctctacatagtagctacagttatctttaaaatgtaggccgtgttctgcttaaagcccttcagtggcttcccagtatacacttggagtaaaactcaagtctttcccatggcttaaatattgcctcctcagagagtcttgtttgttgagagattaatgaatactctgagaactcggaggaaggagcaattagttctggctttgggaaccacagagagaattaataagaggaatagtatttgatccaggtcttgatgagtaggattttgttagattacagtaagtgctgaaaaagcatttaaagagtgcctactgtgtgctacatattgtcatattcatgctttctttgacaagtaatgattaataagtgatatctttgaaaagaaattgatatttgttaacaacttggttttactgcaatctcaataaatagtatatacaagactagcctagcaatccttagtctgcttaaataccaggaagcgcttcattcactggtacctgtgagaatagaacttggcaagcgttctcatcacatatacctgctcagtcaatttgacaatattcagaaatgaactacctgacaaaactacaaaattgtaatttggtgtcttggtttttagaccttttttcccttcttttaaaccagctatctctagccttttaatgccatattttattt

SEQ ID NO: 58689 - DNA, 1948 bp, Homo sapiens
cagagtgctgggattgcaggttagagccactgtatccagcctgttaatgtttctttttatttttttcggtctccagagcttttgtaagttttacaagtttctctgtctctcttatggttctaagaatatggaaattgtgcattctaattgtctttattattctctgtctccaggtatgttgcagatagggacaggttctttttaccgcctgagtcacatttattgaattttgcagattctatacttaagtaagaggaattcatgattgaagtcaaatagtaccataagaattattgagaaaagattactccctaaaaagattactccctattgaaaaaaagattactcctaagcacacatgactacatgtggtaggtacattctctaaagtactttttctacatactattgtatttaacctttaacgttttcccctattttaagagattttttcatcctgcagaatgacccaatagatttgctgaaatgttttcttttaaatcatgccatcttgcttttgatggtcatttagactgaccattttctttggtgaatctggatcagttatactagactgcatttgtactttgcacatgaatataggtgttgtaggacaaagagtttaatagtgccatattgatgtttttaccttttatttattattctatttctcagaaagatgaatgaaacataagtgtggtctttagaggaagttttgcctttctgcatatttggtgctgctgcattccagatggttttcttgccttgcagaaaataactttgtaggctgccgttatttgcatctgctgtttgtcagtggcattcacagtgtttttgttgtattcctcaatctctcagccattgtggcagaaccgaattgtaactagcaagcaaattttttctcctgattcttagcaagattttttctttctttttttaatggaatggcaaaggagataagtttctaatttggtctactggtgatagtggttagttagttgaaatcaagtttggtatccttaaaaatgacatataactttaaatatttatttttcatttatttttggaagcttaaacagatttttaagttttttaaaaagttttttgagatggggtcttaactctgtcacccaggttggagtgcagtggcacaatcttggcccaaggctccagtaatcctcccacctcagcctcctgaatagctgggactacacgtgcctgccaccctgcccagctaagttttgcactttttgtagaggtggggttttgttatgttgcccaggctggtcttgaactcctgggctccagcaatccacctgcctcagcctcccaaagtgctgggattacaggtgtgagccactgtgcctggcccagaaatttactttctcacagctctgaaaagtctgagcttgatgtgctggcagggctggtgctggtttcctctgaggcctgtctccttggcttgcagatggccgccctcttgctgcctcttcatatggatgttcctctgtgtgcttgctcctatggtgcctctcactctttaaatactctagtctctgttatatgtgttaattctctagtcttttgctgtaaagctttttctttagtgttagtctggtgatgagaactctatattgtttttcttcctaaagcatgccccagcagataatgacgtttcagctttggtttctttgaagtggagagagaacttagacatatgcaaagcattctgaatacagaattctgttagacttgtatgatctttttagtgacctaccttgataaagacttttcaaaacatttaacttaatttttatagtatttctgtatactcacatatcaatttatataatatttagattgcagacttacaagtacaattataatgaatacatttggtcacagacagctgattctttttgttttttgggttttttttttttttttt

SEQ ID NO: 58690 - DNA, 1082 bp, Homo sapiens
tgagccaccgcgcctggcctgaagctttgttgaggtatagaatgtgtgagaaaaaaatgtatagtccatgtgccaatgattctgataacacaaaatatgcttagcaacaattctataataaaatcatcattgtcatctggtcttaacttaaaaagtgttatagcattaataagctgtctttaatagttcacctgaaaataagaccaatgaagccaatggaaaagtaaatgtattttataaaagattctaattgaactattcctaactagattctcctttgcagaaattgtaggatattatattttctaggtaatatttagatgcttattcttgctcaggaagtagattatggggcttctaggtggagaggctggcggtagaaaggctgttttggaggctgttgtaatctaggaaagaaagaatgcattaatgtagtggcacagtggaacagagtggaggaggtgttagtagagatgtttgggtggtagaattgacagggctggagactgacatagggatgttggcagaggagtcatctagggcactccagtttctagctcgggccagacagtatggttttggtatccttcatctgggaaagggaatgggggggagaaaaataggttgtattttgaggtatgtatgatatctaagtagaaacacataataggcagctgtttatgtgagtttgttgctcaggagagaagtatggactgtaaatacctatttgccttttttcttttttcttttttctttttttttgagacaggctagagtgcagtggtgcgatctcagctcactggaacctccacctcccgggctcaagtgatttttgagcctcagcctcctgagtaggtgtgcgccatcatgcccgggtaatttttgtattttttagttgagacagcgtctcaccatgttggctgagcaggtgtcgaactcctggcctcaagtgattcggtctcccaaagtgctgggattataggcgtgagccaccacgcctggcccctgtttggcactttttaacaggtattagttgaaatggtgaatttggaatctgtgtttaaaccttggtgctgtgtgtg

SEQ ID NO: 58691 - DNA, 5280 bp, Homo sapiens
atttagagcaatgtatatatgctaaatcactcttttcaggcttaataattggagaagaatatttctagtcttttattattgtttcataatttaaatgctatttgaggagtatagttaaacttgaacagagtactttggaagccagtttttttcccttcctccttcttaatcagaagctgtttagttttactatggctatatgtggtcctcctagttttgtaataaggctggtgtaatttcaggaacctttttgtttaagagatcaggacattgaaaaccagagagggctaaactcaacttgagtcctgactctttgctgattaagtgctagttctgactcgtagaaggatcagtcatgtgggtttgcctggcaggcttaccctaagtaaaatataaattcctggttatcactaaggggggaaaatatctgaaaattcggtttttcaatgaagagtactttgtgttagacatagctgtctgtctcactagcaatgggatttccagggtagagtattaaagatatcatgagtcttttgcagctaagcagcttatgaggtcagtcaaggaataaaaaaataagccagcttcagaagagtctttctttgttattagaaaaattgtgagaggctatagaattatgtcaagatgctgagaaaactatagtttctaaatttttaaccaaaagggtatcctctttagtagtaaggaaataataatgagaaaaaatgcttaagttcagttgcagacattgcatatcttgaggaaaaaagaggacacttctaaaattaaaatatagcccataacatttttattttttatgaattggattactcattttgaatgttgccttctgctaagttactcctttagcatgaattaactgtattctttttcagtcatattcctaaatgttagatgaaattcatttaatgttttgaactttatatttttagctatactataaagattacacagctgttgcttggagatgtatgtgaattacttggagcagtaggatcatgatttgggtcctatgccagctgatagtcagctgctacaaatgaagagatcctaacacatgggaataaaaattcttaaagggtatgaatatcatattttaaaatgttctgggtagtgcctgcccttgttttaggcacctaactatttgtcatgacataccacatttcatgattaggagactggctttaggttttctgttggagagctgagagtattctcccctcattttgatagcaattagagtaactgggaccagctactcctgtcaagataaattgcattaccaacttcagcttttgtatttcatttgataattttttttttttttgagacagagtctcgctctgttgcccaggctagagtgcaatggcgtaatctcagctcactgcaacctccgcctcccgtgttcaagcgattctcctgcctcagcctcctgagtagctgggatcacaggtgcgtgccaccatgcctggctaatttttgtatttttagtagagccggggtttcaccatgttggtcaggctggtctcgaactcctgaccttgtgatccacctgccttggcctcccaaagtgctgggattgcaggcttgagccaccgcgcctgggctgattaaaatttacctaaatacttagattcttcatgccatggttgatttagtagtgttaagattgagttgctcccaagctacaattaaatagctctgatactgtctgtgttttctgtatacctattttttcttgattgtattaattctgtgtttattgagagcatatgtagtttctaaccttcattgattatgctcttagcaaagctgtctataaagtattttgtacttatagcaaagatgtcataaagagaaacttcaaatgcagaattgcgtattattttcattgaaagtgatctctactaaagaaagtttaaaaagattaaaatagtggttatccatggttcctgctgggcattatgttccatttactaatttgacattcagcagatgcttgaatatgcttcagatattaatattgtagatagaggtgatgcagttctctacactggtaagtgtatagtctaatcaacaaatcatcgtaatagagtgaggatcatgccgtggtaggagtatccctgcagttctgtggcgcttggagacctccctcctagagggatgtttttggaagaaggcagtctgagtagactacttggatgtgaactgggagatacaattgagcagtaacaattaagaaggtgatggaggaaaggaaggattttcttatttgacaatcaggaatagcatgattaaatgagtgaagagaagagagactgttgccccagtgggaatgataggatttaatagattgttgtaatgatgtaatttcattgaaatttccccaaaactgagactttgcgcagtgtttgaagatgtccttactcaaattagaagtaaaatatattgcatgtgcctgtcactttcacatccatttaagaacagtttgtccttaaactttgaatctagcagtgttccagagaagcaatgtgaatggttctcaagataacaagatcatctctgaatttctagcctcatgccaacatttatggcaggcacactcgtttcaccttcttcctaaggcagattgaaaagggaatttttatagctgaaaatcatgtaagaataccaagtgtaatctcaaggcccatcaatttggttacttcttcagtaggttccagtagtctttgcaagcaactgttgattgttaataactacactttattgatattatcagaaaagcacaacattaaggccttctagtcaagcagctttaaaaaattgtaataattactattctaccttgttttaaccttttgtagaagcacaggacaataagttccagaatcttttgaatgtcatgcggttcgtaattagctgaagacgaatgataaaagtgggctgctgtttttcagattacggccagtaattctctttggttatggctgtgctaaaattactttctgaacacattgccaaagtgtgtgaacaaaacatcatatgctagtgattcccaaatcactcttagctttcatcatatttgttctgttggtagtgtcaactgcgtgacactgcattctatacttacttttccacccctctcaaagcataaagttttggtatttaccttaacattcagtcttcctcttgtcacaaagactctttggtacttctgggttctcatactagggcaccccccacccccccccccccccccacacacacacaggggcaggctgcagtgtgcaagcatatggagcacactgtagatgacaaaagtggcatatctacctggaagataattctactgaaagatttatggagagaacattatattaagataggcagtgtagtggggtgaattataaaatactcattcaattttaatgtgaactatgaaactcctgagaaatctgtttgctcttcagggtggctagacgtctttagtctgtgtgtggggggaaggtctactatgtgccatctcttatcaatcttttctggcatttttgttatatgatagttatagctatatggtagttatagctagtctagtccttggaactaaactattttgaacttcgtttgatatagcaaatttgtgccaggggtcatctggcatgtcatgtttaggggccgtattcctcatctgtgtggaggaactagatgtggagagagaaagagaaataaatatgtttccccagctgtagtggacaggctgtttttcaggacagaattttacaacttttataaagtagttgtgagcagaagttggcagctggcaaatgtatgtatttgccaaactataaatatctggtctgcagccacaaatgtccaagaaaggctcttggaaaattaagggtttccttaggataatagtaaaaccaggctttcctcaagttgttatatttaagcataagaagcagcagttcataattggtttagttatattcatttatgttttatttcaagttgacttttaatccaaatactaaaatataacaaaagacaatttctgaggacttgaaaagtacataaaccttaagtcacatatagtagcagttaacttaaattgaaacaagaagttagaattgtatttcagttcatagagatgtactaaacatcgcggattctcagattgacagataaccactttggcctagaatacccaccacataaaatgagtatccagggaagagtaaaaatgaagagagcctcattgggatgcacttcataggaagttcaccaggctcacttgctggatagggaattggtcacgttcactccccacatatcagactggcagaatgggaagtttagattcttgtattggtcagaggatggctcgaggcatgtgggtctttgggattgtttgttaacacatcaaatgttaaaggtgtactgtttggtagtgttgagctcacttgtggttctagcagatagctagatttatttatttgcaatctccatttaccaaaatactgttgctgctcacagtaatagtaatgagtaacatcgctgagtacctaacatgtgccagatacttgaatgcttcatgtacatggttttattctcacaacagatccatgaggtattactgttattattatactctagaaatcagggaacagaggcttaatgaggctaaataaaaacttgtttaaggtgacgcaactaggaaatgacagagccagaattgtaattcacttaggtttaacttcagattgcctcctcttaatccccatgctctggtgcttctaaagagaccaacactctgccctgaataatttagtactgatgttaaacatttcagaaagacttttgaagcccttttttttttttttttttttttttttgagacggagtctgtctctgtcgcccaggctggagtgcagtgacgcgatctcggctcactgcagcctccgcctcccgggttcaggcagttctcctgcctcagcctcccaagtagctgggactacaggcgcctgccatcatgcctggctaatttttgtatttttagtagagacagggtttcaccatgttggccaggatggtcttgatctcctgacctcgtgatccgcccaccttggactcccaaagttctgggattccgggcatgagccaccacacccgactgttttttttttttttttaaacgtagtttcgctcttgtcgcccaggctggagtgcaatggcgcagtctcggctcactgcaacctc

SEQ ID NO: 58692 - DNA, 1026 bp, Homo sapiens
ataaggaattttggtttttatgtctgccactgaaagtagcttgtttaaatttgagtttaattagtagaatgacagtgttattactcatagtgtgtagtgttattaaagattctttggcatacatgcaagtttttgcttattagaagtttctagttgaaattatagcactcacaaaaagttttgaataaataagatttagaatgagtgacccctgaaaacctggtatgcaaaaggctactgggtaataatttcattaattttataccacatgtgtgatttcaccatactttttttgttccttgtggttgattctaagtgatcagcaatttttattttgaccatttaaacccatagccattagctacttaaatttgtgaaattctttgtagtgatttcagttttacaagtttgtatcttggctgatggtctaattttgaaaactttacatttggtagataccaatgtttttcttaatgtactttttcacagtccttctgattgatttcaaagtgttgtctttgaaaataaacatgactcatagcacttgggtagccagagcatgcctgtaatgaatgcctctgtacattttgaggctgtggtagaataaacatagcagttcctttcctttttgaaatggaagtttgatactagtactgaatttaaagatgaacagagcttagttttggagaaagagaaaagcacggttatatttgcaggtacacttttttctaactttcattgactatttttgagtgttaatgtgtaattattaaattaataaaagtaattttatagaagctgcaaattaccatatttcaatttatttcaggggttattcttttaataatttaggagctttaaagtatgtatctcaagcgctatataataaagagccatcggtgtagttaaacttttgagcttttaagaagttatacatataattctaaatatttgcttaattatttatttttacttagggagaatgactgcttaaaggttgagtcttcacattttggatagccaaga

SEQ ID NO: 58693 - DNA, 2561 bp, Homo sapiens
aatcccggcacctcgggaggccgaggcaggcagatcactcgcggtcaggagctggagaccagtcgggccaacacggcgaaaccccgtctccaccgaaaaaatacaaaaaccagtcaggcgtggcggcgcgcgcctgcaatcccaggcactccgcaggctgaggcaggagaatcaggcagggaggttgcagtgagccgagatggcggcagcacagtccagcctccgctcggcatcagagggagaccgtggagagagagggagagggagagggagagggagaccggggagagggcatcagagggagaccgtggagggagagggagaccggggagagggagagggagaaaagtattactcttaaggatttgtgtatggagaagggtattgaggttgtggaatagaggtaggattggtgttggaggaagggttacttaccttatggaatcggaaatttgagacaggtttctgagtgaaaataggtaaatgtggtattgtaatataataagaaatacatatttggtctctgttcctggttcctggcacacagctcttaaaacccttggactgaccaaagtactgtaataaatgtctttttgtatgctaatgagatgactggtggctggggctcctggatagcttcagggtgggggagctggttgctaggagaagcaaccaacctatctcctgggaggggaaggggaagagcctgaaggatgagttgataaccagtggccagtgatttaatcagtcatgtctacataatgaagcctctatacaaacccaaaggatagagtctggagagcttccagatggatgagcaagaacacatccaagtgcagcgattgggggtacatcccaggtacaggagatcagaaactcttgctcttaggacccttccagaccttccccatgtgtctcttcgtctggctattcatttgtatcctttaaaatattagtattggctgggcacagtggctcacacctgtaatcccagcactttgggaggccgaggtgggtggatcacctgaggtcaggagttcgagaccatccttgccaacatggggaaaccccgtctctactaaaaatacaaaaattagctgtgcatggtggtgggcgcctgtaatcccagctacttaggaggctgaggcaggagaatcacttgaacccagtaggtggaggttgcagtgagccgagattgtgccattgcactccagcctgggcgacagaatgagactccatctcaaaaaaaaaaaaaaatctttctaataaatgggtaaacataagtaaagtgttttcctgagttctgtgagctgctctagcaaattaaactctggggagagcttatgggaaccctgatttagagctattgggccagaagcacaggtcacaacctggggcatgagattggcattagaagttggggtggtcttctgggactgatcccttaacctatgggatgtgatgttatttccacatagtgtcagaattgagttaaatcataactcacttagtgtctgccagagaatctggtgtcaggagtgtgttgtgtgagagtagaaaaaacactgtttttttccccatctttaataataaaatatgctataaggtgtagtagagcattatcccttattaggaagagtttataattagttatttttgttgttatggctgaaccagacctttgctttgttctcagaaaatatctagcaaagttacacattttctttggttcaataagtgttgtttgttgatctagttgtatatttaaaaatagtgttaaaaataaaatatgtgcttattacacataaaattgacaaactgaaaaagtagaaggaacaagttaatcaacaaatatttattatcttcacaaatatttattattaccaccaggcactgttctctgccctggggaaatggtgttaaacaagtcatgtacccagggggcttacattctggtagctgaatggaggagaaggatgtaccaataagtctgttattctcagtaagtgtgaaaaagataaaatgtgtagtgagaaaagatgggtggtgaaggcaaggcctaacttggttggggtggtcacggaaggcttcttagggagggacgtttgagttgctctgaaagatgaggaggcagtcattggagagcagggaaaagagtactctaagcagaagaggtccaaaggccttgcaatgaaaatgagcttgctttgttcaagggacagaaagtaggaagaaaatagtgtccgtagcaaaaccataggacacatactgagtctttgtagatgtatactttggcttgtatttttagaatttgtattctgctgttttaatatttgcttcataatataaacattcttcatttcataccttagtaaacatttttagtgttgacacaattaattttgtaaatgtatcgtggttgacttacccattccccaatagtttggcatttagatccctcctcccccccttttttttgcattattgtaagtattacagtgagcactttggatataaaacttttttgcttcttacggttggtcctcagaaggcaaaatata

SEQ ID NO: 58694 - DNA, 1991 bp, Homo sapiens
ctttaaccttttgccctcctattgtgggccagaaagtaggccttctctctctccactggtgccatcaaactcctctgaactctggctcatgtctttcctttacctgcatgtaacgcaatgtaatttagtatagagtagaatcctttggaatttttttaaaggtgattcctggtagttgctggtataaaggtggttaaaaacagaaaacctaaagcacagagatagtgttctcatttaagtgttttaagtagaacatgaaactttctaagttgagtttttgtagagtgatcactgagaattcatctatatttcagaggaaaacaagaaagactggtaggtaggcacttgatagatttgtggaatgggtggagacagttctgagcacctgtctaggatcagtgaactacgtattagtgaatatgaagcagaagttgatagtaggaacagagaggtgattatcttcccctttttttctgtgctgtactatcttggagaggtgaggagaaaaaggttccaaattggccactagatgattgaaagaagtccctgtggccaattttgtatctggatgaccattcttttttaagtgagatgcgtgaacctttcatataaagagctgctggcaggatattgttttattaggttttagggatattggcccatggttcactttttctttctccccagtttttggaaaagttgattgctagtaaggctgattgctttcagggaattgtcattttcctccgggggatgtttggatgagaatggagaccagtttggcaagggcaacagctgttgaacaatctgtttgggattaggtgcaagttggtatgtagtggaaatctgcctcctggttcctgaaattatgttcctttgcctcaaggataaatgttttcctgctcattccagttacattcacttagttctggctggtaatgcttctgactgataactttcctcttttaagagagcttccttgaaagaataattgatagctacgatgaacaattaaaaatgttatgccttcccttaagattttgctcaggatttaatcataggttggtggtaacagaacctttcagttcaaaattagctgtatattatctaaccattttggtaaggggagagacttaaggtgctttctgatggtttagatggcagtatcacatgagatttattcatattgtgtgttggaatgtaaattctaatgacctttggaagcattagtagtaaaatttacttagctggctattcctaagcttactagtgagttggagttgcatgcgtgaatcatacctctgaccagttgtgatgatacaaattaagttgagtttaaggaagagactaaattaattgccatcctgtcaccacactgtccacttagcactgtacagctaagatcctttcagttttttaaaaaatacttttttaataccacagatataagaacctgcaatgggtgcttttaatttgggtttatgctgacctttatgtatcagataatgtgtctaaatcctgagccaggatcctagtaaccccaatttctatctaagcatagtctaaaagctgtcactcagtactagaacgtcttttgtggtatgaaaggataatgtatagggcctggaagtacacttacatatttgcttatttggttaggttgttattttgtgaatagaatttaaattcacttttagaagtaatgtcatagttgtcagtggacatgtatatttcaactaactataaggaagacagatggaaatgtccttttctttttcgtgtctgataatgcatttgcatttgttgatctgaggtcagcacttaagttggacatcttcaaatctttttttttttttaattgagatggagccttgctgtgttgccccggctggagtgcagtggcatgatcttggctcactgcaacctctgcctcccaggttcaagcgattctcctgcctcaacctcccgagtagctgggattacaggtgcct

SEQ ID NO: 58695 - DNA, 1983 bp, Homo sapiens
ctctagtcagtttgcttttcatatctgttcacagttgcaccatcttttttttttttttttgagacggagtttcgctcttgttgcccaggttggagtgcaatgacgcgatctccactcaccacaacctccgcctcccaggttcaagcagttctctgcttcagcctcccgagtagctgggattacaggcatgcaccaccacgcccggctatttttgtatttttagtagagatggggtttttccatgttgaggctggtctcgaactcctgacctcaggtgatctgcccaccttggcctcccaaagtgctgggattccaggcgtgagccactgtgcccggcctagttgcaccatcttttaaaaaaatgttcttcttttatttttgtgcatttatatatgtgtgattatacttgatacattttttgccttgttcatttgatatgttttgcattttctatgttttttaaaaacttagaattttattagttgcatatttcactgtaatttacttacttcctttaaaatggctatttatgtggtttacagggattttgtgtaatgaataatgctttcatgaacccaaaggtttttttcccctcctaattgcagactaattccttaagatggatttccagaaatagtattagatccctgaaggaatagaaacgattttaaaagctcttgaatcttattgccaaaatgctttccaaaagtgttgtaccagttttcatgccagccagcaaatatatggagtgtccatttcacctcagccagcaataggagggaatgttttgatgctgacctttaaatctaagaagaattgatttacagctctgctgagcttctatcctgaattacacccagaattataatcgtggttgagattggattagaaagaaggaaagcctggtttaccagtttctgccccttcagctgcttatattctgttttgcccagttaaggtgaattcttttggaaacatgaagtaactgcccttttctgcttttcagcccccttaattattttgataagttggtgggggacaaaacagtgtatgtttataagttggtaggggacaaaacagtgtatgtttcacatgacatttcccttgagagctggggtaggtttggctctcttctccactccaccactgggcttggtgtgtctggaggcgtctgaaagttacattcagtagccaccttgtccaggggtgctaattagatgtagcctgagtcactgctacttctttagctaggaaatcattaacaactctggaggtaaagtagcttttccctaagaacttgttagataatttagtattaagtatggaaaattttctccctgaatagaaggagggtcaggggacaccattcctactgaaagttgataacagggaggtcttatctggtctcctctggcctcataacagcactcagcacagttgaccattctggcctcgagccactttgcagtgattttaagctcccttggttctctccttatctcattggctgtatcttgttcctttcctcccttttcattttcttctccccatcagtcttcccctcctccacaatgttactccctgggctttacaacctgtgtgctgcttattcctagatttattttttacctggctcttgctcctgagccctagataaataagctggcatcttaattctctttgtataactaataggcactttaaataccacgtgtccaaatcagggtgttgtgatattttcatacaagtttatacttaggtgtttcagtaacatttttcccaaagtttcagacataaaaataacgcagggggctaaattataaataatatcaatttaagacacattgtattaaaactgtctttctcattttgtaaactgtagagcccataatttttcttttgataggccagaagaaagtttacctatttccttcccaatgactgagaacaaaaattctcactagaggattttatttgtgtgtt

SEQ ID NO: 58696 - DNA, 2373 bp, Homo sapiens
ttttgagagatggtgtcttgctctgtcactcaggctggagtgtagtggtgcgatctcagctcaccgcaacctccgccttccaagttcaagtgattctcttgcctcagcttcccaagtagctgggactacaggcgtgtgccaccacgtccagccaatttttttttttttttatagtagagacagtttcactatatgttggtcaggctggtctcaaactcctgacctcaggtgatccatgcgcctcccaaagtgctgggattacaggcatgagccaaagtccctggcctttgtacagatttgttttgcatacttctcagccttggtggggttaattgtggcttggcaaatcaagaaaaggagttctgtgctgttttcagactgcagaatcttgttgctatgcaacaaaaattgtcagtcagtatagggtatagtaaattggtattctctgtcccttttcaccacatgctcattttgtaatctgagagaagtggtttggggctagtttgcaaggttttattttaaaacaagcatttaaaaaattttgttgctatttgtaattggttatatttaaggtcggtgaagtctttctgtacttactagaagatacaataaaatgctagtgttcaaagggtttatagatctgtttccaagttgtttcaggttagagcagtgtatttttgttttgttgctgtaacaggggtaatattgccaacttccaaagagtaaattttagcttgagaattcaagttgtataatttgaacatcagaagtttattgtaagcacatcatattatttttaaatttatttatgaaaaacatgaacccaaaaaacccttttattgataaagttttttaaataggaaccctaaacttgtatgaagtctcatgtatgataatttattttctgccaggagaaattaaaatgcctttatagcaaatgggtgatggctaatagccttctaaaaattgtgataaaatatatataacacaaaatttacaattttaaccatttcgagtgtttcacatagttgtgcaaatatcaactgttcatctcctggataacaaccttttgcatcccatttagtaacttagtccagactgtcttctaaatcctttaattcgtttaatcttcgtaagaaccctatatgtacgagaagtacttttgttccaaatgagaagagtgaggcacaaaaaggaacacaaaagtagtaattagtggagccggaattcaaacaccaacagtccaactcttctgtgctctcaactattatgctatgttaccctcttttggaattactttcttttttgtttagtggttaagagcattgatttaaaaaaaaaattactttctgtagcttttccaagtaaagttaatacagtttaacagcattttggactgttaacaaatttagtttggctataaatccctgcaatcttctagacattttttttctaaatatttcaaaaggatgcagtttatgttattttatattgtgttatttgtatatgaaattatacatattatggttaattatatagaaaggacttactttcctttttcagtttgtttctggaccatttttcatgccattccttccaatagagaatgcaaatcattttctggtcatttaatgtaaataggaaggtacacttgctgttagagaattttaatatgatgccatccaaagactaaagccagttggcattggatcatccacttagtattctctaaatttatgatcttctttttcacgaataatctggagttaattgtagtattggcagtttagaataaagagcaatagggaggagtaaaaagggagaaaaacattgcaaggagtcattaacttccaattgatgaatagggatgagtttttgcagactctgctttttttctgccatgtaatatctctactaccattcttaagcatccttaaggagcttactttcctttgattttttttccccaccttctacttttttttttttttctgggacagtgtctcactctgttgcccaggctggagtgcagtggcatgatctcggctcactgcaacctccgcttcccagattcaagcaattctcctacctcagcctcccgagtagctgggattacaggtgcactccactaccacctggctgatttttgcatttttagtagaggtggggtttcaccatgttggccaggctggtcacgaattcctgacctcaaatgatccacctgccttggcctcccaaagtgctgggattataggcgtgagccacagcgcccagcctttccctgccttcttttctttcttccgagatggagtcttgctctgtcacccaggctgaagtgcagtggcgtgatctcggctcactgcaacctctgcc

SEQ ID NO: 58697 - DNA, 1087 bp, Homo sapiens
aggcaagaattgatgttgcatcttgagtctgaaatttgcagagcaagtcagtaagctggaaactcaaaacaggaggatttctgtattacagttttgaggcagaattgctttctctggcttgggtttgctggcagtctttggcattcctgggcttctaggtccatcacttcagtctcatgcttctgcagtcacatggctgtcttttcctgtctgtcttcagttgatgttttcttcctcttataaagacaccagccatattggattaaggggtccactctactctggtgtgacctcatcttaactaattacatctgcaaagaccctgcttgtaaaagaggtcacattgtgatatactgagggttaggacttcaacatcaacttcttgcctgagtttcctctttgagtatggaccacagtggtctcattcatctctctcattagtcagatgaactaattgtctcaggtgacagatacagagggagacatgcatgtacacaataaaaataaatatatgcaaagattccacagtaaagcagctggagctaatgaacgacttcagcaaagttgcagggtacaagatcgtcacacaaaaatcagttatttctatacacctacgataaacaactgaaaaaaattaaaccagtttcaggctaggtgtggtggcttgtgcctataattcccagcaatttgggaggctatgatgggaggatcacttgaggccaggaatttgagaccagcctgggcaacatagactgtttctttaaaaataaattttatataaaaacaatttcacttacagtagcatctaaagaaataaacacctaggaataaatttaaccaaggaagtaaaagacttgtacactgaaactataaaatattgttgaaagaaaagacttcaataaataaaaagactttgtcttcataaatttgatattgacttgataattgttaagatgtgatagttgataagacttgatattgttaaggtgacagtactacttaaattgatatgcagacacaacgtaatccttatcaaaatcccaatggcgttttttgcaaaaataattcatatggaatttcaagggac

SEQ ID NO: 58698 - DNA, 5579 bp, Homo sapiens
agcgatcctcccatctcagcctcctgagtagctgagactacagatgtgcgccaccacaccctctaattgttaagatttttgtgcagagacaaggtctcgctatgttgcccaggctggtcttgaactcctggcctcaagtcatcctcccacttcagcctcccaaagcactcggattacaggcatgagctgctgtgtccagccagtaattcttgttcctaactatatagctacataactttaagtgactgcataatattccattgctttggatggatgactttgtctacttaaatcttaaagatggacttttagatttgttccattatttttgttattataaaaaacactgctgtgaacatctttggttatatgtctttgtgtacatatctgatactgttttaggatacattcctagaagtaaaatcaagaagtagtgctgtgttttgtttttttttttattttttgtttctttacctttctgtatccagtctatcattgtcctaccaggtcaccttcacttgcttctgtccatctcactgcctcaagtccaggccactgttatctcttacctgaactattagtgtttcctcatttccattcatgtcccctgttcttcatgcatcactcagaatactcttaaagtggaaatcagatattgttatttcccatgtaaagccttcagcggcatcttagactaaaacccaaatttgtcataaaaccaaaattattaaggtcttgcgtgacctggctctgcattccaagttcccagcacaggcctctgtgagtatgcataagtatttgagtgaataataaacaaaatgactaaagggagttgtatcagtttttgatacacgttaccagataagcaagagtagatgagatttctagttaccccacattctggccagctcaggccattatcggtcttttaatctttgccaatgtgataggtaaaaggtgttacctcattggtttaatttgtatttctttgattacctgtagggtctctttgtttgtttattggacagctttatttttgtgtggatgtctgttcatgtgctttttctgttttcccaatgagatgtgtagtttttcttctaatgatttataataatgaggatattaactcttcatagtgcatatacatatatcgtatccgatattactgctgtttaacaaagcatctcaaagcctagtaaagctgttacccgggctggagtgcagtggtacaatcatagcttactgcaacctcgaactcctgggctcaagtgatcctcccacctcagcttcctgagtagctgagactgcagatgtgctacggattggctgggcagctcttcttacctggactcattcgtgtgttttccttcacttaggttcatctggtgtgtctatcccatccctctgcctcatcgctcacttaacaatagcagcctcctcatgacaacatgccctagtatgaaagctcttaccagacctcagcttgcatcctgtttgcttatgtttctttggccaaaacaagtcatatggtcaagcccaaagtcagtgggggaggtgattacacaaggacagatcaagaggtgcgattcattggtggtcataatgtaaactttactatatgtatcttctttttttttttttttttcctgagatggagtctcactctttctcacccaggctggagtgtgtgcagtcatgcgatttcggctcactgcaacctctgcctcctgggttcaaacagtcctcccatttcagtctcctgagtagctaggattacaggtgtgcgtcaccatgcctggctaatttttttgtatttgttcttatttttatttttgagatggagtcttgctgtgtcccccaggccggagtgcagtggtgcagtcttggctcactgcaacctctgcttcccgggttcaagtgattctcctgcctcagcctcccaagtagctggaattacagatgcacgagaccacgcccaggtaatttttgtatttttagtagagacagggtttcaccatgttggccgggctggtcttgaactcctgacctcaggtgatctgcctgcctcggcctcccaaagtgctgggattacaggtgtgagccacggcgtccagctttttttgtgtttttagtagagatggggtttcatcatgttggccaggctggtctcgaactccggacctcacgtgatctgcccgcctcagcctcctaaagtgctaggattacaaacatgagccaccatgttcagccttgtatcttcggtaatactgagttttccattctttttttcatctgtatattaagatttaaaattttatctttagtgaagtgtgcggcaactcattggttttttttaattaaaaacttttttttttttttttttttagagatggagtcttgctgtgttgctcaagttagtcttcaactcttggccttgagtgatctgtttgccttgacctcccaaagtgctgggattactgaaccacagtgcttggcttagtttctagtttaatgggttcgacatggtacctttaaaaaaacatgtttagaaggaaaatgcataattttttactatatagacatcatataaaagcatatataatatgcttttagctttcttttttatcgttaagtacatttgttctcatttttctttgtcttaattttatttaaaatgtgtgtacttgtatttggccgggcgcggtggctcatgcctgtaatcccagcactttgggaggctgaggcgggtggatcacgaggtcaggatattgagaccatcctggctaacacggtgaaaccctgtctctactaaaaatacaaaaaattagtcaggcgtggtggcgggcgcctgtagtcccagctactcgggaggcggagcttgcagtgagccgagatcgcgccattgcactccagcctgggcaacagaacgagactctgtctcaaaaaaaaaaaaaaaaaaaagtatgtacttgtatttaaaccataaagcttgtgtttttaaaaatgtttttcctttgctaattaacttaatttcagtgttggcatttatattcttcagttttcttagagtttaaaaaaaatgtaatcgctgttattgagtacttactgtatgaaacctttattaactcatttaacactgatagaactgttatctccattttatagatgaggaaattaagccacagagagttaagtgacttgcccagggtcacccagttagtagagagtggaactgggattccatctcaggcagtcaggttccagagcccatggtttttaaccagtaagctctcatacataactgtttgtaatggttaacttttgaactgaagcttatatttgaattttccaaatgttaatgtgtgagtgagtaatttatttttccttgtgatttcattgtttagggggtctttactttctgaaaataattggcgtaagaacaagatcttgtaggatgaattgacctagaacatttcagagataatagtacatagttggggtggggagaaaaggctttatttgggtttaatcttgaaaaatgaaacaaaactatgaaaacattcatgttatggttgcaactatgtgttaaattattagaatgaaagaagaatgaatcaagtgttggttgcttaaaaaattttacataatttttctgagaaaattgtaagatcacatgaaactatccatgttatgatggacttttgcagtatgatcataaagacagtcctttttgccaaaatattcaagggcttcattagttttcctaactttgattttcagattttcttttgacctcctggtaatctcatctttgttagttctccagttattaatttacaatctgttaaaatgctttcagctccaagtaactgtttaagacttaaagtgcttaaatattgagaaaatttatcccatataattagaggtccagaggtaaggtagactccacacatactacagtcagtgggtcactgatgtctttgaggacacgggtacattttgccatctttggtgttcagtcatctttatattggtaacaagtggaccatagggcttccaggattcacattgagacccagtaattcttggaggaagtaggaccatccttcttgtgtgtgtgtgtgtgtgtgtgtgtgtgtgtgtgtgtgtttaatcccgccatagtccattttgtgctgctataacagataccacagactgggtaatttataaaggaaagagatttatgtggttcacagttcggaggctgagaagtccaagatcaaggggttgcatctggtgagggccttcttgctgtctcataacatggtggaaggcatctcagagcaagatggtgtatgctcaaaacagaaaaaaggggttgaattcctgtggtaactaacccactcccatcataatgttattaatcgattgatgggggtggaatgcccatggccgaatcacttcttagtactgttacagttaaatttcaacatgagtttcaagattcaaaccatagcagctctcttaaggtatcatttacatacagctaaatgcataaatcatgtatacatatagcttggtacatttttactatgtatacatacctgtgtagccaccaaccaggtctggatatagaacacacttaggccattaagttccctcatgccccttcccagtcagtatctttccaaatactcatttttttcagttgctttgtaaagagttttcatcattttcagtgacttcataaaggcctacatcttttggaatgtttgcactttcactttgtagatgatatgcattgtgttgctttgtaattgaaataacctgtcaatcattgagagactgacagggcaaaggtgaaatggcctgacatagaggctaatgctgctttgggagggatgtttaatggggactgatattataaatgtttagttcattagcggatatttttgtgttaagaatacttttgcttccctggcaacttctgtgtctgataatgaactttgattttaagacccttgtacctattttgttctgtattacatttttacatatatgtcgttatagattctctaatttattgcattggtctattattcctatgcaatctgttagctgtgagccgttagatctttatgaaatttagatttgatcagctcagccttgagtctgaactacttcagtgccttcccattgctcttggaattaagaccaagctccactaagctcctcctcattatggcctaagtcctgcacaattttactttctcagtgattccaaagtaagtaaaatgacccaataagaaaaatcctcaacaataacttacaaaaaagtaaaaatgtgcataggtatgacccattgccttagacttacagtttagtgggggaggagacattaattttcaagagctggcagagcatagtggctcatgcctataatcccagcagtttgggaggccgaggtgggtggatcagttgagcccaagagttcaagaccagcttaggcaacatggtctatctctacaaaaaatacaaaaaataatattagctgggtgtggtggtgcacacctgtagtcctagctatactcaggaga

SEQ ID NO: 58699 - DNA, 4212 bp, Homo sapiens
gaggctgtacttcagtggatgcttcttcagataagggtttacgaaattttcctgactagaaacaagaaggggactccttgtcagacctgggatatagtccttgacttgcccctaacatgctcccccaacccccttgtcccccactattcctgtgtgttccagtgcactttacatgtttttttgctattgaatttattctgtcttataattatgtggttctttttgtccctcttcattgtaagttccttgaagaggatttttatattcatggtactagcaaaatactagcatttttatattcatggtactagcaaaatacttggcaaatagtgggtggcctgtgtaagtgtttgactttgactgcgttgctcttttatagaatctgttcactagcaaccccatttttggaatacctgtagtgttctagaagctctactggatattgtagggtgtagtgtagtatttggtggatactaaatgttaataacataatttaattaagcaagcaaaaactcacatcctgactccaggaataggtgtagaatttggttttcttttgttcttttttaaattttaatttaatttttattttgtagagatgtggtcttgctatgtggaccaggcaggttttgaactcacctggccagaatttatttcttattctaacacagagcttggaagtggctacaagtgtcaggattgtctaaattctaagccctttggaggataccatgtttacttgactttatgattaaattctgaattactgaaagggccatcaatctgtttttaagtctctttgaccaaagaacttgtaaatattttcaagtaacaagcatatgcatctctattggtttaatttatttttaccccatttagtgcttgctttgttttgattctttttttgtttttgttttttgagatggagtctcactcttgcccaggctggagtgcagtggcatgatctccactcactgcagcttccgcctcctgggttcaagcaattctctagcctcagcctcccgagtagctgagactacaggcgcgtgccaccacgcccagctaattttttgtatttttagtagagatggggtttcaacatgttagccaggatggtcttgatctcctgacctcgtgatgcgcccacctcagcctcccaaagtgctgggattataggcgtgagtcaccgcccccagccctgctttgttttgattcttatcagtgcttcaaataccaatcactgggtagtgtatgatactcttgaagtattagtgtgggctgccataacaaaataccatagactgggtggcttaaacaacagaaaattattttttatttttatttattaatttttttgagacagtctcactgtgtcgcccaggctggattgcagcggctcgatctcaggttactgcaagctctgcctcccgggttcacaccattctcctgcctcagcctcctgagcaggtgggaccacaggcgcctgccaccacgcctggctaatttttttgtattttttagttgagatggggtttcactgtgttagccaggatggtcttgatctcctgacctcgtgggattacaggtgggagccacagcgcccggcctagacatttattttaaggttctggaggctggaagtcagagatcaggttgccagtatggatgggttttggtgagggttctcttcctggcttgcagaagatatccttctctctgtgtcctcacatggtagggtgggtatgggaatcctggggtcggggagatgaggggggatttctctctcctcctcatttcataaggccattaatcctattgaattagggccctgtgcttataacttaatttaacattagttacctcctaaaagccctttttccaaatagagtcacattgagggttagggtattaacatataaattttaggggaacacagttcagtctatagcagaagataactacattttttttttttgtcagtgcatacaactttggaagaaaataatttgtttaatatttaggtgaactttagataagttttgttttaagtaaccagaagttgtttactaaagaagataaattaggggggttgattgatttatacaagatatccgttaaattttctagaaatctctttacactgggaaccttctattttacaatgattaaagtaagttttattaacaggcaacttttccaaagactactttgggtatgaggcaatgtatgtatatctaagtgtagagattgaatggtgtagggtaaagaggacaggctttgaagttaactctgggtttgactctagtttgacatttactaaataatttatttttgagtgggttataaacattttttgggatcgaatatactttgtgaattatagagctgttgagaaaattaaataaaattctggcataacacttggcacacaaaatgagcttgataagagtaaatcccccacttttatgaaagtctgacatctcttaagtttatgttaagaatgtgaaaaaccatgtaagatggtgcagctgctttagaaaacagtttggcagttcctcaaaagttaaacatagagttatcgtatgacccagcaattcctttcctagaaatgaaaacatttgtccacagaaaaacttgtacacaaatgtctatagtatcgttattcataacagccaaaaagcagaaataacccaggtgtgtctgatttcatgaatagatcatcaaaatgtggtatgtccatacaacagaataatatttggccatcaaaaggaatggaattctgatacatgccacagcgtagatggaagcattatgctaagtgaaataagccagacacaaaaggcgatatatgccatgattccatttatatgaaatgcccagaatagacagatctatataataacaccagaagatctcatttgctttttacgtgagttgtttctgacatttttattactttggattaatattttgaattgacatcttcgtgctatttaaagaagagagattgaagatagaaccactggacatttctctgtagggaaacaagcacgtgggaatgctgaggtggaaaccttggtagtggtggctttgaaaggcctgaacaaattttggagctgtatcttcgtgctaaggagacagccagccatctctttggtaggcctgttgtaagtaaggatgactaaagtcaccagtaaaatgtgatgaagcaaatccatcagaatcttcagaaaacttaaatctgggtggtgattttctggggtttgtttacagtagtctcaaataccaaaagttttgtctttggggaatgaggtaatcatgatatttttaaataaactgagcccttttccagtggtaaaggccttatagaacatctggtcttggtaagaatacatctgatgatgtgaaatcaaaatgactacctttaactgtgccttagaggtcctcagtcttctgtcctttttggtatctgttacatttgcaacttggcagcgggggagctttatgaagaaccaagaacttaagtaaaataaaatgaatagctcttgaggtcaaatctcaagggagtccaaattgctccttttacagttcagtgaagggatctttttatgcagtcttaataattattatatactggttatttgaatatctgctttgttctgcagtctttctcctcctcccccaaattctcatgttagactgatattgcaagcaaaattgtgaccgttcagtttttaacaatttaagatttatgtatcttaagttttcatttaaaacttttacttacagtctacttaattgtggtctttgcacaatttttttagaattatttttagaaaaataaatcaattactgttgtccatatgtctggtcagtatttttttaaattacttttttccttccattgtaaagtagtacagattttgaacagattttagaaggtatggaaagtataaaacatttatttatgaaatgttaaatccaagccatctagtattttaatattttaatgtgtagatttctaaactttttgtagtgcatttgcagcattgcagatcattgtgcgtgtgcatatgattatatataaaagtaagattatactatttaaaaatggaattatactatatttgtattgtgtattttgtagcttgtccctttccatatatataatatctatactttttacattttattatttttattttttaaata

SEQ ID NO: 58700 - DNA, 4722 bp, Homo sapiens
cgggcgcgcggccccggcgggcacccctcagagggcggccgaggaagctccgggaggaggagcaggaccacgaggaggtgggaggcggcggccgcctggggaccagctccgcgcctcggcctctccgccccctccccagcctttctctcgccctcttctcccacactcccggccggcgcctcggctttgtgcgaggagatggtgtagccccctggccgccgaaggaggagccggacacttgtctcccgtctccgagctgctccccacccctggaggagagacccccccctcggctcggcgccttctgcgtctcccggctggtggggaagcctctgcgccgccggcaccatgaggtgaggggcgcgcggggcgggggccgggcgggccattgtgccgcgggagccgcgacccccgttctcctcggaccccgccttccctctcccggcccggcgcgtctcccctggtctccggtctgttcctcccccctccgccttttgtcccttccaatttctctttctttcttggaaacctccccaacccgtgtggtttgggggtctcgcttcatcgttctctcatttttcctcaaatgctcttctttcacccaggatttcccttcctaaatttaatttgcgcctggctccctcccccaagcctttgcaagcgaaacccgggagatggggaggggttcgagaatcgaagcgtgcgtgttgctgggaaacaggtattttttcgtatatatgtaaaaatttcatgcacttttgcctccgaactctcgtgtttaattaaaaaaggaagaaaagtttgaaaggtctgaaatctctgcgggtaataaagtgcctctggtaggggtaggtgaaggagctgtgaaaggtgaaatttcacgatggtgggggaagggaaagaattgattaggttcacgtggtgggggcagtaaaagactgggataagtaagttggtaggggtgtgtaagcgggggcggggaagggatctgtttggaaaagccttttctcccctttctctgtagcagcctgtgttgcattgcagcagctgctttttccctttgctctgtactcaataaaacaggagctaaattatttttgcggccccgaagaattgaatgtactgtcgtaaaatatttttttaattgatacgatgaaacatatggtatgatatttttctttattgtttctcaaattgtgtaggagaataaaccgtgatgtggtgtgtcattcattggagattttttttccagcctttcctaaacctgttctgtgtccataaccttctcttttcggattggtgcaagacttcgtgtgaaatgggacttggtagactgaaggctgatccattctgcgttatcatccttaaaggccttccttttgggttaaacaattgtggataaagtaaattactccatttctctctcctggaagagatagtcttacagttcatttggatttgaatctcctttgtgttaaagattaatggccaaccgttgctaagacctttataatgtaatacaatgagatttgaatgatataatctacaaattccttcgctttggcaagaaaatgtcatgtcattggaattctttctcaatttcggtagtttccattttaaactttgcttttcattttttttttctatcaaggttaaacgtgtttccattttgcttttatatatatattgtgatatatctttgttgaatttttacttaggcttactgtgaatttgaatttttttttctgattccaagttacctgtatttatgatggccttaaagagtgagtttaatgtggtgtctctaggcgactgaccccttttcccttgatgatttcacacaagttattttcaaatataagcgatgagtttaaatagtaattatagcatacgaaccaaaaaacacaatctttgtaaaatatggcttgaaaactttgagtcgtatgtttgagcatgacttctttttttttaaatcaagttactgatgtccttaaactcaggaactataatatacatactgttatatcttgtaatattatatgttgttggtttctgttttagagatctaatgccgtagggatcttgcagaccagaagttatcagttgtttcaaactttgggtaaacttatcttaacattgagaaatataaaacagggaaagttttttttttttttttttttttttttttttaaatgcagtcttgctctcttgcccaggctggagtgcagtggcgcggtctcggctcactgcaacctccgcctcctgggttcaagcgattctcctgcctcagcctcccaagtagctgggattacaggcgggtatcaccacgcccggctaattttttgtatttttagtagagacggggtttcaccatgttagccaggatggtctccaactccggacctcgtgatccaccagcttcggcctcccaaagtgctgggattacaggcgtgagccacggtgcctggccgaaagtgggttatttttaaataaaaacaggaatagttgtctaattcaaagattgtgaactaaaaaaaagttaccgttttgggtattcagtgaagtttaatcactgtcatgtatagatgtcagtctgtcacaggtaaattatgtcttcacttgaaaattccttttctaataaaaagtaacttctgtttttcaagctcttttcttgctctgttccttatgaagtgtagagagagaggaaccacgctgatgttttccagtaacgtaaatatagaacttggtacacaggtctgaaaagtttatttaagcagtctacagtaattcttcgtaggctaattttgaataagagcaggaaagagggtcagcttttcactttggaaggtactggattatttggcaggtggttaggtagtacttagatttgcttagatacctgtaaaagtgagattggtatgggataaaacgttcttgtgctgcttgcaaaagtctttggaatattctttgggatattttggtgcttaggaagtgcttttcaggttatattaatatatgcttagtcttcatgctttcaagtcctgtgggacgttaatgttagtcttttaagttgagtcctttttggttatattaagaggtagttctgatgtttcaaaggccatccagaaataggaatgcctgaacaggaatttccaattaagtcggtcagaatcctgaacagaggatatgatgaatatattacggtataactattagtggtatctgtcagatgactttaattttaggaatagcatgatcactgtgtataatcttatacagaagagaactgaataatagtttatgttcctgaaacggtcataggcatttgagtaaaatgcagtatatagatttacttgttaatattttgcttaaagatgaatatttaaaaaatgaaaaagcatattacttatacaggacagtggaaaggttgagaccaaaaagctggtacttttagtgtcctgtctgtttagttctattcttatttttcatttatgcaatgtttcaaaagtgtaagatgctttgtgattaaagtgtgcgtgtatgtatgtgaatgcgtttgtatgcatgtacatacagtgtgtgccttttaagtgcatttttaaaattagttggtttgttacttaagatttttttttttttttaactgaaagaggagcttgtctgatctaaaatagttgcatgtagcctggtggctaaggagagctcagaagattttgtatttacattcttggatccgtattaaaatagtccaggcttccactagctactctgactttctcatataaaaaggtatagtagggttatgaggatttgtccaagccatttactagctgggtgaccttgaagtaatcacattatttcactgatgcctttttaaaaaatatgtaaaaatagagataattcttaactgagtagtgaggatcaaatgataatagaaggtactttatacactggtaagccttaaatttatgttactcctcctgtttccaggcctatttctatgttagactatttgggtaaaacttctgggcagtgggctccaccttgcgaccttatttagctcaaggatgtcaaaaagaccacatttttattattttataggtgaggaagctgttcccttcttctgtgtttccttccttagggtctttgaagtatctttatttgtggtaatcataaattttatatacatttcagagtgtggtacaatcaagggtcagaagatccaggttttatatgctgacctgttaattgagtaaactggtaaaaaaaaaaaaaaaaaaggagataatcttatatttcacaggattgttttgtgaagtgtcaagtgagatatccatgaaaggatacaaatagtagtctctttgttcccatgggtcttcatttatactcgtagctgttggatgtgtgactttcccacagaggtttattttaggagcaagagccaaatcttcattttttgaatgtcagtattgtaggaatttactaagtgaataaatcttgaagaagagtgtggattaatagagaaaattcactaaagtttattcagtattcaaggtgttggataccttgttggcccagttggattaagcaaaataactatggaggcaccatttggctggtatagaagaaattacatactgaataggttttggtgatttatcttacagaaggcttaaaacaggtgattgtataacttgtaaaatatctagtctgtatcatgag

SEQ ID NO: 58701 - DNA, 1019 bp, Homo sapiens
accacgcctggctaattttttgtatttttagtaaagacgggttttcaccgtgttagccaggatgatctcaatctcctgacctcgtgatccactcacctcggcctcccaaaatgctgggattacaggcatgagccaccgcacccggcgccagtgtgtttttaaaggtgttctgagaatgtctagcattctttttattaacgttctaattagattcagagagtagctaagggatactgtaccccaaaagtaacctgatgctatatttagctttggttgtctgcaaagcaatttgccataaaagtcttactctaggatgagatgtaccaaaatctttgacaataactcatctatttcttcatttatattcttgtgaaaaacttttttttaggacttgctcatttaaaatttatcaccaatgagggtgcttatatttcagggaaaggccctgaatagaaaaccactatcctagcttcccattcaggttttcttgtctaactcaggtggcattttatatctgtcaacatctcataattagtctttaaatagctcctgttttgtgtgtttttttgtaatgttcactgaggaactcattgtacttgattttattcagtgtctctcacttgcaaataatatttcccttcaaaagttcacagtctggtcttttccttcttatttttcactttattttctctcctcctactagtgagatggtgattcttgatttgctttatttgagttatttatatcttccggcctctgtttaatatcaagtctggcgtggcattcttttcctactgaatgatgcccaaattaagttaagaagcaattcctaagaaagctggcctgtgattcttcatggtcttctggtatcccaagcactggacagtctgtttaattttgaaagttgatgtaactagctaagttaatagtttatgtcaggtttgattcaagagttgctttccagagtaactctgttccaaaactagatgaggagatagaatagggaaggaagaattaaa

SEQ ID NO: 58702 - DNA, 1077 bp, Homo sapiens
ctggaaacttccccagtcactccgtctagttgcctcattttgttgggccttggtttctttcagtttcctactaaaacttacctctttggggaggcatgagtatcaatgcttggctaccaatccaggtaaggcctctgaatgaaaggtgatatggaagggcacaaacgatctggatacctatcccctgggaaagtccaggcctcaggccacagcaatgccacagcttctggaagctgcctgggaactgaggttttattctcctgtgtgtgtctacatgcctggagtgttgactctggagacctatgaatacagtaaatgacatcataggtagctcaggtcaatgaagatttatttttagctatgacccttgtctgttaaatgatctgaatttaaaaagaaagaggacacggaagaaggaaaagaaatgtgaaaggcaatgaaagaatgtaagattcctgcttgatcttaaaaagcactagagcaaaagtcaagcacagctttcttatttcttttcaaccagaagggtgttacaggagaaatgtatgaagggcggaggatatgccctcttgtgagaattctgtctcttccctgcagttactcattttgagaatgtggctcccagtgtctacagtggaggtgggctcatttgtccctgggcttcttttttattttatttattttttgagataaaatctctctctgtagcccaggttagagtgcagtggcgccatcttggctcactgaaacctccgcttcccgggttcaagcaattctcctgcctcagcctcccgagtagctgggattacaggcgcctgccaccgctcccagctaatttttgtgttttagtagagatggggtttcaccatgttgcccaggccggtctcaaactcccgacctcaagtgatccacctgggattacaggcatgagccactgcgatcccagtgatcctgcggggattacaggcatgagccaccacgccaggcctggacttctttagattgtgcttttcagtaatctgtccctgtttgtcttggtgtcttatgggctgacgtctgagggatccctggttactcccc

SEQ ID NO: 58703 - DNA, 1067 bp, Homo sapiens
tgtggctggaggtgggaggtgagggggacccatgcacttggcaggcccgcttccaggacagccctttgctgggattgatgagctgttggtggaaaattgttgaggaccttggggttggtggctgtttcggtaccactgtgcagcctcctctgcatccagcataatttaaaataaacattttcaggaagccacacttctccagaaagtaacattgttttctggtgtaacggttgcctccttcagggagctaggtttgggggataatagggggcctttcactggccccacttggtctgacttagcagcaaaaactctgcgagtgctctccaagcagtttttctttcccaaatttccacacctaggaggcgctgaggaggcatgggcggtacttaggaactgctcactgtggaactgaggcacagcggggagcatgccctcgtgggatttgcagttctaggggcagagggataataaacaaaatacatttgtaaactataaagtatgttagaagatgatgtgtaatatggagataaataaaactttaaagaggggagaggagtgccaggtggaaagggaaggcctcactgaagggtggcactggcatagacctgaagagttagggagcagccaagctgctgcctggggtgcaggtgcaaaggctgggggcaggagtgtgcccagcttgaatggcctgatgtttgtgtttgcagagtgtgggtcaagctgatgagtgacctactggataaactgaactagctcagtctgtaagtgaggggactcctgagctttctgcggccttcttcccaattccaggaaaggaaggaccttccacagaaaataactactcagcaagacagccagggtgaacctcagcaccatctgtgacaagccacatgctctctgcgtgatgcctcctgcctctcagctgtgcctgaagcacactagctggcatggacttacgcggctgggaacatcttcaggaagccctgaatgagggctctgtgggcagagggacctttgcagaaagggcatcttgaccactgcaggaggtggagtgactctcctgg

SEQ ID NO: 58704 - DNA, 1024 bp, Homo sapiens
ttgtagctaaatgaccactatcttccagtcacgtttttaaaaaaaatcatgctggtttgcaacaaaaattgtattttctttactaggcaagtgaaccattttgttgggaagagtaccttggcttcgagaaaaaaatgatttcattctgaaaggcttcccctccaaccccctcctgcacaaactctcagcccagtaacttgtcagtattctggaaaagtgcattacaaaacaaaaactcgaatcagataaaatatatctctggaacttttgaggcagatcaatgaagctctgatttcaggtgctagcaaaataaagcaggcactctcattttgtattgttttacttctcagtttttcatggtgtctcctaaactttgatgttttgaagaagttctaatgtttgctacatcagcaggagctgaccacagggaagagataaatatagctctccttggaaaggtgaaggcttagccaccagaattctgccccttgatgctgagaatgcaccttctccgaacagatggaaaagaggggtggagattaccccagggacatatcttgcaaaatgctgatacccgaagatgtacatagccttgtgctttggtcatcctcccaaatcatgtccttggtgaaggcacatggagaggagagcagatgctgccagaccacggtgcctgacgccatgcactccctcacgtccagcctgtttatgtgcacacggctgcagcgggaccttggggtgtgggctaaataacaagaacaggggctcctctggggtctgttacaaggcagagatgctccacggtaattagggatttaggggaagaggaaggaacacacatgttgataataagtagttcaacattattatccccattttacagatgcagctactgagcttagagaggtttcataacttgcccagagcccctcaactagtaaacagtggagccgagatttgaacgacccaaagaggaaagcaaacaagcagcccctttattacttttttttttttttaagatgag

SEQ ID NO: 58705 - DNA, 1019 bp, Homo sapiens
ggattacaggtatgagccacggcacccggcctttgttttttctttcctttttttttttttttacatttttagtagagacaaggtctcaccatgtcacccaggctgatcgcaaactcctgggctcaagcaattctcccaccttggcttcccaaagtatcaggattataggtgtgagccaccacacccagctgacattgggcatttatggtacaaaacctccctcaggtacaacggctccaaaagagccagtttccagcattgaattcatcgtggacttacccatgtgtggttctggcaccctgcccggggctggaggcctgttcttggccttggtcctttagaataggagtaaatttggcaacataggaggacacccaggatacattgttaagttaaaaaaaaagagattctaaaatagaatgtatgtatggttctatttttgttaaaagttatgttctctaagtctttttaaaaagtttgaactgtcacagccaagaagggtctaaagagacatgacagctcagtggtgtgtgagtcctggatgggatcctggaacagaaaatggatatcaggggaaaaactgaggaaatctggctcatattttgttgtgtgtagataccagcattatccaggttttaaaaaggagaaaatcctggccgggtgtggtggctcacgccagtaatcccaacactttgagaggccaaggtgggaggatggcttgagcccagtagtttgagaccagcctgggcaacatagcgagaccccttctctacaaaaaaaaataacaaaaataggctagacatggtgttgcccacctgtagtcccagctacttgagaggctgaggtgggaggatcacttgagcctgggaggttgaggctgcagtgagccgtgattgtgccactgcacttcagcctgggcaacacagtgagacctcatctctaaaagaagaagaaaaaaaaaggaaatcctgcaatgtgtgacaacatgaataaactctgaggaaataatgctaagtgaa

SEQ ID NO: 58706 - DNA, 1032 bp, Homo sapiens
aaattattgaacaagtatttatggaggcctgctgtgagccaggagctgtcctgagccctggaaacccagcagtggctgtacagacctggcccagctgtcagggggcacctctaaggaaaccgggaggcaataatcgtagctcccttgcagggaggttgtgaaggctgagtgaggacatctgtgcacctggagcacagtgtgagtgtgaaaccagtgtcagcccttattactgtcaataccatgaaggggcggcgggggcactaagggtggcaggactcaatatctaggctctggggggtgccagagcctgaccgtgcagggtcttctctctccctccaccctgactgtgctctgtccccccagggctggacatccacttcatccacgtgaagcccccccagctgcccgcaggccataccccgaagcccttgctgatggtgcacggctggcccggctctttctacgagttttataagatcatcccactcctgactgaccccaagaaccatggcctgagcgatgagcacgtttttgaagtcatctgcccttccatccctggctatggcttctcagaggcatcctccaagaagggtacggggctgctagaggttccataactgccccgtcctcgccaagggtgggcccggtgttcccaccaggctctccttccggcggggtgagcagggagttggcccgaggaagctgggaaaggaggggcctgagaggccggccccagacacaccgccctccggggctggagatgccacccctatatttgggctccaggattccttcttgcctctgtgagcttttctgacctccacctgggggtaggcgggcctgagaaatttcatagaacaccagagggcccaaggagcaatctgcctgtgactccgtgactccatgcctttccccatcactgccagggttcaactcggtggccaccgccaggatcttttacaagctgatgctgcggctgggcttccaggaattctacattcaaggaggggactgggggtccctgatctgcac

SEQ ID NO: 58707 - DNA, 1042 bp, Homo sapiens
tgtttttagagcaaaagaaaatgaaagcatgtgtagtgacaatatggaatgctggaaataaactcttagggggttcctttgtttttcagtctagattttttcttccggtggctctttgacaaaacttcctcggaggcctccatcaggttggagtgagtattgccaagttgagttctggagccatggccctgggtgaaagtcccacaggggctggggctgcagtgggatgggtgggggcggtcgtagcctatgcttctgaacaggcatcttcctccccagacagcagggcttggggcctcacctccaccctgccaggtttctggtagacactgtgggagctgacccactttgtgctatgcttgcagaaatgtggttaattttttaggccagaactcaattagcagctgtctcattcattgaaacttactgagcacagagtcacatggggagaaggaattgctgggtctcagtggtgccagggagtggggaaaggagaataataattaaagatggcagccaggatgcctctgggctctggggattatttttgccagaatagaattaaatttattactgatgtatccttgttagtattttaaacttataccatgccacttaatagtaatagctattgtttaagaaggcactatgctaaatgctttatgcatctttttctcactgtatctttacaatgagctatgaggaagatactattattctctccattttacagatgaggagactgaggtttggagacgttgaataacttgcccaagtttatccagctggttaaggaacagagctgggattcaaccccagcccctacagactatacattaggtcttaatataggtccagaggcttggcattgactttcctaaaagaatgtgcttacctgtaaggatggggcgagttattttaaatgagttcttgctgagtaagctgatgagttgggagctgatgactgtgacagacacacatacatacagccagcaatagtctaggttgacagtgactttcagattgacaagtccagtgacca

SEQ ID NO: 58708 - DNA, 1077 bp, Homo sapiens
tggagcaagtcacctccccatctctggggacacagggaggaggccagggtggtaggatggactgggactcttggctccacctcaggtctccatctgagggggagacaggaaacaggtgggggcctggggcctgggcatattcccaactttattctttttttttttttcttttttgagatggagtctcactgtgtcacccaggctgaagttgcagtagtgggatctcgactcactgcaacctccacctcccaggttcaagcaattctcctgcctcagcctcctgagttgctgggattataggcatgtgccaccacacttggctaatttttttttttttttagtattttttagtagagacagtttcaccgtgttggccaggctggtctcgaactcctgacctcaggtgatccacctgcctcagcctcccaaagtgctgggattacaggtgtgagccactgcgcccagccctaactttattctgaatgtgatttcttagaagcaggacagggctgtgagatgactgtatttacgtacctttcccacacacgtaacttgggcacaaatgtttctagcaacatcagatggagtgctggtattcctttacctcgagtatggtacaggggctaagacgggctctggaatttatatcatgtgagatcctgaaagttatgcaaatttcctgtgcctttatttcctcatatgtgaacaaaaatgtggggatagcgatcgaaccatctcataagagtgtggtgaggatgatatgagacacttcatgcagagccccgaggcctgttccactgctcattaagattcctctgtgtcttggccagtgatgaccagatcctggaatggtgtggggaggacgccatccactacctgtccttccagaggcacatcatcttcctgttggtggtggtcagctttttgtccctgtgtgtcatcctgcctgtcaacctctcaggggacttgctgggtaatgaccctcctcacccttgtctatgttgtaatggggcagagtggcagtcctagggaaagggctcactgtggtagaccagaaccccaggagtcatgccccac

SEQ ID NO: 58709 - DNA, 1020 bp, Homo sapiens
tgaatcctgctgagctccccatgctaccacccccgcaaccccactctcccggggcgggtctaagagctcttcggggaaattcaaagcactacagggaccaacgtttgcagatgctctccctgcgccgcgaccaccctgtgcttggcccagttctcccggaggcgtccagagactgggctcgtgccgggggacggaagagggtgcgccccggcggatcccttcttggagcctggacgtgagctggccggtccggggcttgcagacctccgggaggagctgcggggctgagcggcgaccaggaggccaggccggggcagaggaccgccgagggccaccgcgggaggcgcagtcagctgcgtacaggcttgcgccgccgcgggccaagactccaaattgggaaaggggtggccgcagctctgcgcatgtgcaggaggcgccggagtttcactttgtaacttttaagtggtcggaacacgccccgcgctgctgggtcccgccagacacgccgccgccgcaggtacaggggacagggggcgtgaggaggggcaatgcaccctccgcctttcccgggacgtgcgcgccaggtgtccggttccggaacggctcccagcctacgcagaccccagagcccccgaccccaagcagggggtgacgacgcgggattgggtgggaggagagggtccgggcagcgcctccattccagccctgcgctccttgggaattcctggcggcttttcaggactttcctctccggcttttcgctttcagggctggtatctccttcttccccacccctctctttgggatttgtcggcggagtccgacctcccacctaactaggagtgcagctatgggctcctcggaccctatacgaggccgggctgggaaagggccaagcgtccgactctcctgacgccaggaaggcagaggccacccctcgggctgttcctgggtgaccacttcctgcagccttggcggagtcctgaggagggaggctggggactcggggactggggggaa

SEQ ID NO: 58710 - DNA, 2336 bp, Homo sapiens
cctggcctggctgccagctcagtggccctgccatcctcagagctcccctggagtcgggggaggccctgctgaccctgctcttgtccccagaggtggccggcaggttcctggcgttggaggccagcacacacctgctggtgttcggcatggagcagcggctgccgcccaacagcgagctggtgcaggccgtgctgcggctcttccaggagccggtccccaaggccgcgctgcacaggcacgggcggctgtccccgcgcagcgcccgggcccgggtgaccgtcgagtggctgcgcgtccgcgacgacggctccaaccgcacctccctcatcgactccaggtgggggtcgcgggggcgcgcagggtagggggagggcgctgctaggcccggcttgggggcggggacgcgggggggcggtgcggggtcctcggggcccgtcccagtccccgccctcaagcggcgctgggtctctgtgtcatgtctcaggctggtgtccgtccacgagagcggctggaaggccttcgacgtgaccgaggccgtgaacttctggcagcagctgagccggccccggcagccgctgctgctacaggtgtcggtgcagagggagcatctgggcccgctggcgtccggcgcccacaagctggtccgctttgcctcgcagggggcgccagccgggcttggggagccccagctggagctgcacaccctggaccttggggactatgggtaggtgctgagggtcaaactggtaagccggaataaagagacaggcaattacatttattttgaaatggacaacttttcagagtgctgtgggaatgaatgagacaatgtatacaattcttcctctgactcttaggagatcctcagtaaatatcggttattaattttcaagttatttctagctgtccatcctatatcacaaacatccagctttttgaagttgagaggtggatcataaatctccatcccagacgccctctgacctcagccctcccagctgaccgctgaccctgctctctttgcccacacagagctcagggcgactgtgaccctgaagcaccaatgaccgagggcacccgctgctgccgccaggagatgtacattgacctgcaggggatgaagtgggccgagaactgggtgctggagcccccgggcttcctggcttatgagtgtgtgggcacctgccggcagcccccggaggccctggccttcaagtggccgtttctggggcctcgacagtgcatcgcctcggagactgactcgctgcccatgatcgtcagcatcaaggagggaggcaggaccaggccccaggtggtcagcctgcccaacatgagggtgcagaagtgcagctgtgcctcggatggtgcgctcgtgccaaggaggctccagccataggcgcctagtgtagccatcgagggacttgacttgtgtgtgtttctgaagtgttcgagggtaccaggagagctggcgatgactgaactgctgatggacaaatgctctgtgctctctagtgagccctgaatttgcttcctctgacaagttacctcacctaatttttgcttctcaggaatgagaatctttggccactggagagcccttgctcagttttctctattcttattattcactgcactatattctaagcacttacatgtggagatactgtaacctgagggcagaaagcccaatgtgtcattgtttacttgtcctgtcactggatctgggctaaagtcctccaccaccactctggacctaagacctggggttaagtgtgggttgtgcatccccaatccagataataaagactttgtaaaacatgaataaaacacattttattctataattttgtaattttctattttattttaattaattaattatttttgagacagagtctcactctgtcacccaggcgggagtgcagtggcccaatctcggctcactgcagcctctgccttccaggttcaagcgattctcatgcctcagcatcttgagtaactgggattacaggcatgtaccaccacgccaagctaattttttgtatttttattattattattattgagacagctctgtcgcccaggctggagtacagatggcgctatgttggctcactgcaagctctgcctcccgggttcacaccattctcctgcctcagcctcccgagtagctgggactacaggtgcctgccaccatgcctggctaattttttgtattttttagtagagacagggtttcactgtgttaaccaggatggtctcaacctcctgacctcgtgatccgcctgcctcggcctcccaaagtgctgggattacaggcgtgagccactgcacct

SEQ ID NO: 58711 - DNA, 1272 bp, Homo sapiens
tctggtttcacaactggggaccaccagctcaggatctcatgaggccccgggaccctctgagcacgggcccggatgctcatccctgcagactggattggcccttagagccctggcgttgcctgagccattctggttcctgtcagttgtttggttgcagcaaggaacaagactctaggtccacttaccagcagctgggggaactgagcctcttgcagagaacgagagccccacctctactctaggaaatgagctttttaatttaactggtcaggcctcaacccacattaggggttcatgaccattgtatagacagctgtagccagctgttcacagcccagacagacttgccctatctagacagccccctcctcccagctcagggactcgtctggctgtgagcttccaggaggtctcaggggtgtgacctccctccctccttccctccccactccctacctcctccctccaccccaggctataaagctgcccaggcttggctctcagcacatccagctgcctgagaccctcctgcagccttctcaagggacagccccactctgcctcttgctcctccagggcagcaccatgcagcccctgtggctctgctgggcactctgggtgttgcccctggccagccccggggccgccctgaccggggagcagctcctgggcagcctgctgcggcagctgcagctcaaagaggtgcccaccctggacagggccgacatggaggagctggtcatccccacccacgtgagggcccagtacgtggccctgctgcagcgcagccacggggaccgctcccgcggaaagaggttcagccagagcttccgaggtgaggccctccctccctgctgcccctggtcccatggggcaggtcagatgtgcccactccggtggtgtcaaagggctcctggccttgcagaggtctgtgggaggctgagtgagggccacggtctaaggggcagtgaggtggggccgggcctgtgaggatggcggggcctcagcatgcagcggtgcatgcagtcaggactccgggggtctgttttcgtactgccactctggtctgagttctacttggagcatattgctttaaaatcatctcacaaccatttgctcacatggaactggggtataactatgtcttgcccatcttccagcattgtgaacatcaaaatgagtcattgtaaatagaagcgtgtttgggtaactgaaaaatactgcacttgagtagacaacctgggttatacctggctgtcaggggtgcagcgg

SEQ ID NO: 58712 - DNA, 1033 bp, Homo sapiens
gcagagagctacagtccatggccgaccaagaaaagatctccccagctgcccttaagaagaccctcttagacagagtgaagctggaatcccccacagtctccacactgaccccctccagcccagggaagctcctcacaagaagcctggccctgggaggcaagaaggactaaggcagcatctgtcccctctgtgattcagagcccttagttgagagcccctgccgcccctgccacccccctgccccgctcccaccattgcccctcctcagctgtgcaaggagaaagcatgcttaggaagttttcaggtccttgtgataaaacctccttaaatctgttcagaccaagcaatgcgagcttcctctcctgtcccatgttggaagttgctctgaaggggtggtagatgctggaagccagacacaaccctgcgtacgctgctcagttggtggagactggggctgggactggagtcagcccagctgggaggaggggctggggaggatctgcagctgaagcccgaggcagggttggtgtgatgccaaggcaaagtggtgaggagaaaacaggaaacgggctttctctgaattggtaaatgggaaagaagtgagcaacttaagattgtcacaattaatcacaagtgtacaggattagactgggtttatatttaactcttgcttcataggtgtaccatttaaagagtgttatttaatgctaagtttaactgctttaataaagtttatttttaaatatcttgcttttgttaggcttaatcttaaataatcatcctggagaacttgatgcccttgtgaggtcctccctgcttctctgcgagagcactgtccaagggctagaagtagggatgagaggaataaggggccaggcccttggtctggatcaaggtgttgttctagaatgagccaaagctaatggcagggaagagccaagtgggctgcatgggttgtgggtcagcagcccagaataaaggggaaagccgtctgctttgatgtggggcaggcactgtgctgagcatttgatcc

SEQ ID NO: 58713 - DNA, 1044 bp, Homo sapiens
ctcaaaaaaaaaaaggcaagtgacagcaaggggctggggggtgcgggatcgcggaagagtcggagactcgaacttgtccttcttgtatctagtttggacaaattcgcgagaaacactcaagttcaagtgaataagccgcggctgaccaccctggtgccgcctcgccgccacctggtctgaacctcgccgccacctggtctgaacctacgccaggagggcctcgttcatccccgcaaatcggcaacctggagaattcctgtgggccttgaggggcatctgatggccagcgccagaaataatattagccaggcctgggccaggcctcagccctgagcccgaggtggcttagggacggcgacctcagccttggggtggggggggggggtgggggcggccgggcgtcctgggccggcgggcgcctggagctcacgccaagctgccacaggggcttccgggactccagcccggagttccgccctccagtcgcgagcggaggaggcgggcacgcggcctggctcgggccgcggattggcctgccccgagatcctggccactgattggtcgcccggacggggcggggccacgtggcctaaggcgccatcagccgcccgggagatatccgccgggggagaatagggttgcaccatcccagaagctgctgttagctcgccggtcctcggcacgccgcccgttcgcccctgcgctgtccgcccttcccctagcgttacttccggtccctcgctgagggggttcgtgcggctcccaggaggcgtgaaccgcggaccatgagcgtgggcttcatcggggccggccagctggcctatgctctggcgcggggcttcacggccgcaggcaagcgcgtggaggcgggaggcggcttcgcgggcggtcccgaggcccgagggggcctccgtcccaccagcatgagcgaatgaaaggggagtttgcgtccggtggggtagatgagactctggttgagcagcaagtgcgtcttctgtcctcgtagagggttgagggggagagggagactggcactgttaggac

SEQ ID NO: 58714 - DNA, 1669 bp, Homo sapiens
agctttcctcctgctttggtgaattctttctcatggacaagttagctctctggagcagatgggggctgtgtagcacagtggttaagaagaggccttggagccggttggcctgggctccatctagctctgccttccactggctgtaggtcctctggcccatcaccgaacacctctgggtgtcagtggcctcaggtggaatggggataatgctggaacctacctgaggatgaaatgcagacatcacctgagataatacatgtgaagtacctagttcattgtctggcctattaggagacctttaattaatagtagctgatttattatttatgtttcagatatgtttattcatcttctcacaaatatccagcttttagaacatagtgagagctggatcataaacctccctcccaggtgcccactaagctgtgccccaggccttctgacttcagcctcccagatgacctctgaccctgctctccttgcccacacagagctcagggcgactgtgaccctgaagcaccaatgaccgagggcacccgctgctgccgccaggagatgtacattgacctgcaggggatgaagtgggccaagaactgggtgctggagcccccgggcttcctggcttacgagtgtgtgggcacctgccagcagcccccggaggccctggccttcaattggccatttctggggccgcgacagtgtatcgcctcggagactgcctcgctgcccatgatcgtcagcatcaaggagggaggcaggaccaggccccaggtggtcagcctgcccaacatgagggtgcagaagtgcagctgtgcctcggatggggcgctcgtgccaaggaggctccagccataggcgcctggtgtatccattgagccctctaactgaacgtgtgcatagaggtggtcttaatgtaggtcttaactttatacttagcaagttactccatcccaatttagtgctcctgtgtgaccttcgccctgtgtccttccatttcctgtctttcccgtccatcacccatcctaagcacttacgtgagtaaataatgcagctcagatgctgagctctagtaggaaatgctggcatgctgattacaagatacagctgagcaatgcacacattttcagctgggagtttctgttctctggcaaattcttcactgagtctggaacaataataccctatgattagaactggggaaacagaactgaattgctgtgttatatgaggaattaaaaccttcaaatctctatttcccccaaatactgacccattctggacttttgtaaacatacctaggcccctgttcccctgagagggtgctaagaggaaggatgaagggcttcaggctgggggcagtggacagggaattgggatacctggattctggttctgacagggccacaagctaggatctctaacaaacgcagaaggctttggctcgtcatttcctcttaaaaaggaggagctgggcttcagctctaagaacttcattgccctggggatcagacagcccctacctacccctgcccactcctctggagactgagccttgcccgtgcatatttaggtcatttcccacactgtcttagagaacttgtcaccagaaaccacatgtatttgcatgttttttgttaatttagctaaagcaattgaatgtagatactca

SEQ ID NO: 58715 - DNA, 2838 bp, Homo sapiens
gggtgtgcaaggagtgtaggttggagggagatgaccaaggggcttctgtgaatgtggccagaaccagcaggaaggcagaatccttcccgcccttcctttatgatttgcagacctggacccagcccagcctccagaagagacttaaagagatttaagcagctggctagcaggactttgtttttcacagaatagactcactttttcatagaacagggctggggtaaggccaggaaaattcaacaggcactaaaaatattgtcaagctgctgacagcacagccagaggccccaggcctgggtggcatccagacagccctgtcctttctagacagccccctcctccaggctcagggacctgtctggctgtgagctcccaggaggtcccaggggtgtgacctccctccctccctccctccctcttcccttcaccccaggccagcccagggccagctataaagctggcccagcctggctctcagcacacccagctgcctgagaccctccttcaacctccctagaggacagccccactctgcctcctgctcccccagggcagcaccatgtggcccctgtggctctgctgggcactctgggtgctgcccctggctggccccggggcggccctgaccgaggagcagctcctgggcagcctgctgcggcagctgcagctcagcgaggtgcccgtactggacagggccgacatggagaagctggtcatccccgcccacgtgagggcccagtatgtagtcctgctgcggcgcagccacggggaccgctcccgcggaaagaggttcagccagagcttccgaggtgagaccctccctccctgctggccccggtcccatggtcgggggcaggccggttgtgcccactctggaggtgtcgaagggcccctggccttttgggactctgtgggaggctgtgtgagggccacggtccaaggagcagtgaggaggagccgggcctgggtccagggtctccagctgtgcactgaggcccccctccagcccaggggaggtgcaccaggctagacctgctggaaaaaccaagacttcagagaaggggagggtagaggagagaaagtagagctgggggagcaggtgagtgtgtgcctcaaggcacttggtgcagctggactcccagggtatgttttcacactgccactctggtctgagcctgaccttgagtaaatggctttaaaatcctctctccaccatgtgctcatctggaacaggggtatgactatgtcttcgccatctcccagcactgtgaacgtcaaagtgagtccttgtggatagaagcgtgtttggataactgaaaaatacctaagtagactacctgggttatacctggctgtcaggggtgcaactgggcctgaatcctcctgcagcctctcgcctccctagctcctcagtgcccagagctagagccagtgccaggcacctgggtgaggattctgctcccagcatctcagctgaggcaaacttgctagccagggtcccacaggcccccctgcctgctggatggaaattgttactaaacaaggcccagatccaaggaagatttgtaaactgggtttgccccagagatagaacagggccggtgtctcctggcctggctgccagctcagtggccctgccatcctcagagctccgctggagtccggggaggccctgctgaccctgctcttgtccccagaggtggccggcaggttcctggcgtcggaggccagcacacacctgctggtgttcggcatggagcagcggctgccgcccaacagcgagctggtgcaggccgtgctgcggctcttccaggagccggtccccaaggccgcgctgcacaggcacgggcggctgtccccgcgcagcgcccaggcccgggtgaccgtcgagtggctgcgcgtccgcgacgacggctccaaccgcacctccctcatcgactccaggtgggggtcgcgcgggcgcgcagggcaggagtaggaggctgctcggcccggcttgggggcggggacgcagggggcggtgcagggtcctcggggcccgtcccagtccccgccctcaagcggcgctgggtctccgtgtcgtgtgtatcatgtctcaggctggtgtccgtccacgagagcggctggaaggccttcgacgtgaccgaggccgtgaacttctggcagcagctgagccggccccggcagccgctgctgctacaggtgtcggtgcagagggagcatctgggcccgctggcgtccggcgcccacaagctggtccgctttgcctcgcagggggcgccagccgggcttggggagccccagctggagctgcacaccctggacctcagggactatgggtaggtgcaggactgggcagaagggaggcaagcagccactgagtggtccagacccccgtccccaggactgtctgggggaccggatggtggcggtgggctaggggtagggagagcgcggtgcagactgtcccaggatgccagcgattgcccactacatgtcagggtttctaatggcagaaattgtattgttggccaggcgtggtggctcagacctgtaatcctagcactttgggaggccgaggcgggctggatcacaagatcaggagtttgagaccagcctgaccaacatgatgaaaccccgtgtctaccaaaaatacaaaaattagccgggcgtggtggcgcgtgcctgtaatcccagctactcaggaggctgaggcaggagaatcacttgaatccgggaggtgaaggttgcagtgagctgagatcacaccactgcactccatccagcctggaggacagagcgtgattctgtctcaaaaaaaaaaaaaaaaaaaggaaa

SEQ ID NO: 58716 - DNA, 1017 bp, Homo sapiens
caggagcatcgcttgaacccaggaggcggaggttgcagtgagccaagatcatgccattgcactccaggctgaacaacaagagtgaaactccatctcaaaaacaaacaaacaaacaaacacaaattagctgggcatagtggtgcgtgcctgtaatcccagctactcgggaggctgaggcaggagaatcacttgaatccaggaggcagaggttgcagtgagccgagaacacaccagtgcactccagcctaggtgacagagtgagactccatctcaaaaaaaaaaaaaaaaaaaaaaaaagaaataaaaagaaataagactgagcctaaaagaaataaagtgatgtcaggaaatccgtggctgagacccacatcaaggatgctggcttcttcgttcagcagagacccctccagcctgcactgttccttcctgcttctgagtggccttgcgcccactcccaggcaatgtcatgtgctggccaagcccacagagccctgagccacattgcccaggccggagcccagttcaccactccagagtcaggtggtcttgggtaccctccttgccttggcttcaacatctgcagaatgaggaggataatagagtcttttttctaggttttgtaaatcacttgctgtttattaggctctaaacagttcccagaacatggaaaacactatgtaaatgctttaaaaaacaaaataaataaaagaagggacccgggcacagtggcttacacctgtaatcccagcactttgggaggatcgcttgggctcagaaggtcaagcagcctgggtaacaaagtgagaccctgtctctacaaaaaattaaaaaaattagctgggcatagtggcatgtacccgtggtcccagctactcaggaggctgaggcaggaggatcccttgagcccagtaggttgaggctgcactgagctgtgtttgcaccactgtactccagcctaggtgacagagcaagaccctgtgtcaaaaaataataaaaacaaaataaaataaggaatcc

SEQ ID NO: 58717 - DNA, 1242 bp, Homo sapiens
actcaattagaatagaaagcattaagattatggaattagtagattcagaggcatgggattctcattaagcttttaggagtgcctgctctttctgtgggaatagtgtggggataggctggctatattttactgtttagatgtttactagaaaaatcggaaaagaaagcaatattaaaaatctgtttgggaatgctatacttctgttactgttctgaatgcttgtttctaaatgtatagatgaaaaattagttattatgtgtgttgagaatacttatggaataacatgtggatggatgatgattaaaattcagttgcaaggtatggcaaattaaatgaaaatttctcaagaaatgtagttgacagttaaagagtctttattcagaggaaggagcctgttttaaatattttcttatttttttccctcaggttattgataaggaaactatagatttattggcgttcacctctgttgcagaactggagttgctgggtttggagaagctcaaatgtgaactgatggcccttggactgaaatgtgggggcactctgcaggagcgggcagcaagactcttctctgtcagaggactggcaaaggagcaaattgacccggctttatttgccaagcctttgaaagggaagaaaaaatgagtatcatcagagctgattcctatttgtttatagtgtctaccatttacaacctgcataatgtggactcttgaccagtattcctgttgatattaaaagctaactttttagtaacccaattctaactatcccctttttccttgtcagggctgtagaattaatgtctgaaaccatctgggccttaaattttctttgtctggttttctatagtgtatttaataaatatagggctattcacattttttggtttgatcttggtgtcatttaggtaatgaatctatccaagaaatctatccttttgacccaggttatcaaatttgtagacataaggttatttataatggtcccttcttacccttttaatgtctttaggagctgtgttgataatttccttttcattatgatactggtaatttctgttctcactttcctaatcaggttgggtaggggtttatcagttttactgatctgactttttattttattttattttttttgagacagtcttacactgtctcccaggctggagtgcagtggcgcgatctcggcttactgcaagctctgccttccgggttcatgccattctcctgcctcagc

SEQ ID NO: 58718 - DNA, 1049 bp, Homo sapiens
agggataagctaagtcttcagaagatgtctagacctcaaagaatttgctgccagttttaagtcagtttttaatgtgaatgattctcattaacttttgtttttagcatccaaaacatggcaggcctagtatgggaacaatcgaataagaaacaatctttttgcatcaaaaaggttatgacataacaggaaaaagacaagtgtatgcaaataactaacgcagggataaataattaggtttggggagggctgggtatgaacttgtcagtctcaaggttacaaattgtgcagtggtgctttaaaaaatctgctcctagactagaatgtttatcattttaaatctgtgtaaatttgagattaactgtataaaatgttggtatcttaagaaatttaaatctggagctgtagattgcagctctttttgcaatccatgttatttatgatttctttaaacttagtccctatagtagaaactgagttgttaaaatttctggttaggtatgcaggctgcctccagcaagatggtttcagcagaaatcagtgagaatcggaaacggcaatggcctactaaatctcaaacagacagaggagccagtgcgggaaagaggagatgcttctggtaagtgtttcactttcgttcccaattgatctttgaggactgacttgagacatttcctccttgtttatctggcataaacacatttttgtgtagtgtttggtgggagctcagaaaatttccagagtgcttcaagctttaggtttcagtgattgtcacattgtactggtaatggtttctgctgtgaatgccattaattgaatgtaaaggatgaattttttccttacactgaaacataaaaatagctttatatttgaattacttttttggtgttgaaggggtttaacttttagaaattctaggtggaaatcaagctgtactttccaggtggttgtctgtggtttttcacagtcatcattgaggtctttggtcactttgccagacttctcttcaccactttcgcacttgagggtaaaaagcacagcagtactttttc

SEQ ID NO: 58719 - DNA, 1029 bp, Homo sapiens
aggtggaggttgcagtgagccgagattgagccattgcactccaaactgggtgacagagcaagactcggtctgaaaaagtatatataaagaaatataaatgagtggattcagtcagaaacttaaggaacatgaccatagcaaatatgaatagaaacacaaaagaatattagttgagatactggaacaagtaagaatagctcaagttcacacctatgtttttaaaaacaaaactattctgagacatgatgaagttagtgttaactcccactgagaaaataaaaatctgccctgcttttcatcaggctgggataacagacacagataaagccagctgcaaagtttttgttttttgtttttgtttcccccacactacaccgatgtacagctgcagagttaacaggaaatggtgatgtgtcataatgtcataacgacccccacgaaggtctgctgctttcttattcactgagaaaccttggtctcaaaaaccatagaatatataagaaattttgctgtttaaagttctctcaataagagggaaccttcccactcttgccttgtagagaagcattcttgatttccaacccaggtcagagcttcccattaagggtttctggacacaactttccacatttatcttaaatttgtagtttccaaggaaagaggagccttcacaatccagatctgatgttgacgtttttatatacagtcctgctttattttgaacctttttaaacactgcttgatgtaaatttcacctcaactccaccctagccccaaatcttgtaatgacactcctttctttgggttggtgagatacccatgactcctggtgtgcagttcccctcgttgcagtgaatcagtaagtttgacaggtttatctctgatagccttaggctggttgtgctaaaacacacatgataatttgtgtttgaagcactttacaatgcacaaatggttaaaagcagttaaattgagtctaaatgttgtatccttttttctgcttgtgacttcattgacaagaatcttaag

SEQ ID NO: 58720 - DNA, 1011 bp, Homo sapiens
tctgccgccttatctgcctccgccaggcctttcctgttcccctcccccagcccgcaccgccccgccgcccggctcacttgacccgccccaggggaggggaggggtgaacggaagcgtgaggggcggggcgttggaagatgctcgcgtcatcaagaggcgccgggcgagttgcggcgcctggtgtctcagagaggcttgaggttcgggtagtcggtgacatggcggaggccgcggcgctggtgtggattcgcggccctggcttcgggtgcaaggcggtgcggtgtgcctcgggtcggtgcaccgtccgggattttatccaccggcactgccaagatcaggtgaggatttcggttcctgttaggaaggagaaagaggcagacaggtggcagcgctgggtgcggagtaggtctgtccggggcgggggtacgtttattctctggggttttcactcgttgaggctgagagttcctcagtgttaaggtgcttcgaattgttactgagaccttcctttgcttttcttttgtggtggtggttttgccttcccaccaagagggagaaaaaaactgttacaggcacttagtcccgctcacagttacaaatactttgtttctctttctttatccgtaaatataatggtcttctggcagttgggccggctgatttttaaggctccagtcttcaccttcttactatggttatgtgacgtgtattttgtccactcatcacacagccttgttagccccagcctagagaagtatgtcatatccaaacccaggccaaaggatgattgggaaggaaaattgattcttctggtcagtcgttgtgaccaagcattcacacgtgtgtcctgttgagggcctgggttcttagggcctgttacgtagaagtgttcactattaatttgatggtctcatttgtccgtgcatatttgtgaaaacctaccagggacttccagagttacacgtgagcttttactgaactttcaagtaagtaagcttttaccagctataa

SEQ ID NO: 58721 - DNA, 1057 bp, Homo sapiens
gtggagcgcgcagctcctgcaccagggcctggtggcttgtcctgcccgcccgtgggggccgtgtgatctgttttcggtaggattgctttggaaaggaattgccgaatatagatagtcaaatgtccgcagcttctgcatagtttagaagaggctgaaaacggcagaaagaaggcaaacgtggtttgggaattagtacatatacctgttttccaattctcagtagcataggaaacggacttttcatggcccaagttatcctcacgacttgtcagttgattggctttggaacctctgaaccgtccctagatggtattgacgcttcacaactgtgtgtaaaggttttcaatggaagggtcatgcaaatatcccgtagggtagtgaaggaggaaaatttcataaatgaagggcagtaattatttgtaatctgaagatctcacaaagcggcttagtgataaacattatcccgaaacagatacatggaaatcagatacgagggaagaaatggatttgtccaaggtcacttaagtgaggaagagacctaggagaaacaaacagacaaaaatccaggcctcccgtttcattattatttcatgaatgttaagtgtccatggttgctgtgcagaacacatgcaatctctaatcctatcctaaaagcacatatgcaatcagcttggaccgagctgccagcaaagaatttcctataattcaagccaagatgagttattttgcttgttttttgttttgttttcaggaaaccgaaatatttattgttggatttatccaggaaggctgttctgcattagttaaatgcatcatatcttcaagaaatgttaaatgacatgggtaatgttttctttgtatgctggatttttcaatagcttctacttcttggctttaaaaaatatttctaaccaagggtcagaccattttaggtagagtaattatgatcttagatgatttgaactaactcagctgtctgtccatttgtgaaatgggaataataatatttatctctatgaagttaggccacaaattctttctagtaggttcaagtatt

SEQ ID NO: 58722 - DNA, 1060 bp, Homo sapiens
ggataggggtattttcgagcgatttggtgttttgtctctttggaacggaatcggatacgttttgcgattgtttccattttgttctggtcggggagccgagttggttcctgctcgaggcgctgggagcgaggcgggcaggttgggggaccctgtgccgagggacccgaaggaggcaaaaccaaaagtttatgtggtgcttggggtggaccggtcggcggatgtcgtgcgttaattaaagcctgggtgcggggcactttttatttcactgcgaagcctgtgaggactggacgcgaggacggggctttgtagaatgctcgctggtggtagctgttgttcctctcttgttttttcgagacgcctttttgtcaacataactgtaaagatgcaaaaccaagaatattttcagatatttacagcaatccatcaacagtcagacgaagggggggcagccaaagtgggggggagtaagaccttttttttgctgtaatttgactcgaccttccagtggtttgtgccttttttcttttgacttgtttgtggatggaatgtttacagacatttctaattactgctttaattaaataaattggatcaaaggccgttcgaggtatttttgttttgccgtttgtcgctcagaattggcattttgagaggtgattgatactgctaacaattttctagtactctagtttgtttcaagaagagattttgggtagacgtaatcttcaccctttcaaattatataacaatacgaacattattttttatactgatcataatttccagatttggggagggggtgatcgtggcaggaaaagttgtatgtttggtagttgcatatggtgatttttgatttttcaatgctggtaggtaagtaaggaggtctctgtaccatggctcgtacaaagcagactgcccgcaaatcgaccggtggtaaagcacccaggaagcaactggctacaaaagccgctcgcaagagtgcgccctctactggaggggtgaagaaacctcatcgttacaggtattaaaaaacaggaaaaaaatgggacaaagtctctct

SEQ ID NO: 58723 - DNA, 3096 bp, Homo sapiens
gaggtattctgggaaatagaacttgaatgccacaagcagatttttaaatgaagttcattgggttgtgttggtcatctttaagggctcttaagataatagagggtgtagggaaggagagtggtgctaaattgaggggagccaacttcttcattagcctgacagctaataccttcccaaggtttatatacatgaataactttttaaaatgaaaataaatagggctttgatgaatttcttgctaagaatgcattttaatttcatgctttttgctttaaaggtattgttactagatttgaatgttcacatcttaagttgatcagtgaaatttgatactgaagctgaagaattgttgggtggcttattttttgaaagattactgcatttctttgaagctgcccacttacctttttgtgctagttatgtttttggtaacagtttctttattaattttttaaaggcctggtactgtggcgctccgtgaaattagacgttatcagaagtccactgaacttctgattcgcaaacttcccttccagcgtctggtgcgagaaattgctcaggactttaaaacagatctgcgcttccagagcgcagctatcggtgctttgcaggtaaaatggtgggtgggaagactcagagtttgtattcctgttgtgtaccaagaacagttccaaattgttgcatgtgcttatatcatttaatcacaagcctgtcaggtagttgatattgttacttcactgttgagacttcagaaaggttaaattgctcaaggtcatacacgtagaaaatggcaaaaccataatttgaacctatttgactccaaggcttagtgcacattccattataccatttaaaattttgaaacattgcactaaaaacaatatttaaagaaaatcctctggtttggtttatggatgctgcaggacattaagaagaacttgagactagaggtctatatttgtagtaacaatttcaaacaacagtgcctagaataaaagaaatgtctcttcaggtcctgaagaaacatataggtagagagagcttaatacctaggatgggaataggcagtattaaaaaattatgcattaagacgtaaaaggagcagtgagtggaggataggattggattggcaagattgggggaacggtgcttaaaggtgatactggacgtgtaaaggggccaggatttgccttgtggtttcctaaaggggattagggattgccacttacatgtggagcatattgaatttaatcttaatctctagcatgtcaggacttagagaaatactgttctagagatatttatgtatttgagatatttgtggtttaagttaagaccaaaacttgaaattcctacaagatacttgataaaggtatgtagacgtcattaacatcagtcacttaagtaacctattttatattgtgtggttggattctttagttgcaagtatcccagaatacagtaaagctaccacctccatcagaagcatgcagttgggggtcgttaaaaatgctgattgttaggcaccattgcagacctgaatcattctgggggtggggagggggcatccagaatctaagtacattccattggaggattttcaaggctgctgttgctgtgctgggcttttgctttatgtatgagaaagataggataggtggattccaccctgaagtgtaattggtcgagctgtttctatggttaatctaaacttcatttgattggtgaattccaggagtaggcatccattaaattctcagtgagttgctgaaatttcaactactaaaatcttccatgtttttacttaaaactttattttctgttttaatagccgattatcttcagttcttatttattactaaatacagaaatgttactaagattcgtaagcattggtacaaagctgctaatattttctagttagaactgtgcttaaagaacaatactgtacttgaaaagtgtagcgtttttagcttaaatgtcaataatgtagccttttaaattgaatttactaaacaatctgggtaaaagactcatctttctaaaattattcacatgtaaacttccattgttactattacatatttgtcattaagtgtggttgtattggttttaagcaaaatgttcacctcttctgtccacagttctcttagtgttagatagctctttattggaaagagtgatctttgttaagcttttgtgttttctgtttgcttttttatgcatatattttagttatcttaaaaatacagagagtgggccgggcgccgtgactcacatctgtaatcccaacactttgggaggctgaggtgggtagatcacctgaggtcaggagttccagaccagcgtggccaacatggtgtgaaaccccttctctactaaaaatacaaaaaattagcttggcgtggtggcaggcgcctataatcccagctactagggaggctgaggcaggagaattgcttaaacccggaaagcagaggttgcagtgagccgagatggcgccattgcactccagcctgggcaacaagagcaaaactcttgtctcaaaaaaaaaaaaaagataacagagggagaatttgttaatggaataggataatagaagatcgcaattgaagtagaaatccaaaggtcctttgtttttggccttagaattacacactttacaactaaaggatagcaggcagtccagtgagaatggtagaggagaaattagtctcagtttgccatagataatcaataattgacttacttaaaatatagtctttgcttttaatgtctgagaacttgaactcaaatattcttgtgttaagtggacagtgttgctttgaaatggtaaagaggcagacgttgaatatactcaaaatgtcctaaactaatactttcttgtagttcttttttttctttgccattaaatcaaaattaattcattaggtcataaattagtgtggcagtctttaattcccattacagccttaatgttttaagggactttgggttacttgtaataaaattggaaatgtatgggtcatggtcagatcctctcgtaggagttcagtctcctctcagagctgaccagacacaatccttataaactag

SEQ ID NO: 58724 - DNA, 1022 bp, Homo sapiens
tccaaaactgttggatttatgattattttttaaaatggtaatttctccatttcaaaatgagtaagcaggccgggcatggcggctcacacctgtaatcccagcactttgggaggctgaggtgggcagatcacctgaagttaggagttcaagaccagcctggccaacatggtgaaaccccatctctactaaaaatacaaaattagctggacgtgatggtgcatgcctgtaatcccagctactcgggaggctgaggcaggagaattgcctgagctcgggaggtggaggttgcagtgagccgaggttataccactgcactccagccagggctacagagcaagactcaaacctcaaaaaacaaaaacaaaaagagtaagcagatgttttggcttagactaaaagattcttcagcttttcagacagctataagtatactaagaatttgagttatgagttaattctaagtggaaacgcccctttttcctcttcacaagttaagtgtcaatgagtgattcatacactgtcatttttaagtggtagtaggaataagataacttgaaaggatcttacagtcaaatgggaaaaaccagagaaatcgatactagtactagagggcaacaaatgctgttacaaattggggtacgtagaggaaggtacttggtagaggacaggggcatgtttccggggcatagatcaaagtatataaataaggaactgccaggccagttgcggtggctcactcctgtaatcccagcactttgggaggccgaggcaggaggatcacgaggtcaggagatcgagaccatcctagctaacacaatgaagccccatctctactgaaaattagtcaggcgtggtggtgggcgcctgtagcccgagctactcgggaggctgaggcaggagaatgacatgaacctgggaggtggagcttgcagtgagctgagatcttgccactgcactccagcctgggcaacaaagagagactccgtctcaaaataaataaataaggaactgccgggcgcggt

SEQ ID NO: 58725 - DNA, 1022 bp, Homo sapiens; identical to SEQ ID NO: 58724

SEQ ID NO: 58726 - DNA, 1031 bp, Homo sapiens
tagccaggcatggtggcgcatacctgtagtcccagctactcgggaggctgaggcaggagaatcgcttgaatccgggaggtggaggttgcagtgagccgagatcgcgctactgcactccagcctgggcgacagagtaagactccatctcagaaagaaagaaagaaatacggaactaacttgtgatatgttctggaatcaaaagtactcttatgataaaacaggtatgaaagggaacatagatgagaagcatgtgataaaaaccacttgttcaccatgttatactactggacaaggcagaggttcacatactgtgtgaatgggattcagagtgaggaggagactaggctgggatggggtatttggattggacatgattgcgtttataagaatgagagtgttaaattggatttcttgctttatttgtgacatttcagtttattagaaatcatgttaccattagaaaaattgaagtttcctagtaacaaagtaatttgatttgtgtaacttgataaaagatttactgacttaagcttttgttttttttcataagctgcttttgagctttgtcccacaggttgtaaaatgtaagcatttggtaaaattgtcagcatcttgcccagtcatttttttaaagggttcaaaaacctttttgttttaattcgtatagttgggtcttaactattggaaataacatcatcagtaattttttcttcattccttttgcaggaggcaagtgaggcctatctggttggcctttttgaagacaccaacctgtgtgctatccatgccaaacgtgtaacaattatgccaaaagacatccagctagcacgccgcatacgtggagaacgtgcttaagaatccactatgatgggaaacatttcattctcaaaaaaaaaaaaaaaaatttctcttcttcctgttattggtagttctgaacgttagatattttttttccatggggtcaaaaggtacctaagtatatgattgcgagtggaaaaataggggacagaaatcaggtattggcagttttt

SEQ ID NO: 58727 - DNA, 1183 bp, Homo sapiens
ttgatattggtctgatggtttgtgaactcttgctgggaatcaaaatttccttgagactctttagcattcatactttggggttaaaggagattcctcagactcatccagcccttgggtgctgaccagcagagtcactagtggatgctgaagttacatgagctacatgttaaatatttaaagtctccaaaataaaacaccccaacgttgaccttacccggctgatggttagccccttgctgcctgctccatgtgtcttatgagagcccgtagttacagtgtcctctaatttgaaatccataagttaacaagtctatatcaggtgcagctggctttgattaaaggccatttttaaaacttaaaaactcaacacctcacagattataatagaaaaagaaatggcctcagtttgatctcgttcagaatgacccagattgtttctgctttgggtgcagctgtttagttcagagttatattacagagaattattttctgagataatcttaaactagaatgttcaaaactaattgataattgaagtatcaagatacgtagaacacctcagagatttttcttcaggaacttccacaaactttgaatccttgtatctttatttggtattcatactactagtagcaaaatacaggttttttgttttgttttgttttgttttggcttcatagagtatctcaaattgaaacttttctgcacaaagaataaaattaaggattttataaactcaaattggcacctactgaattaaaatacataaaatcatttaaatataattcagcatatgggaagtaacattgcactaatatggaaatcactgccagagacagtctattttcttttaatttgttactacttagtcacaaaccccacattattccagtttggaattacttattaaggagaattggaaatacatatgcccatgcttaaattttatagctttaatttgtgttatttctttattgacgggaagaggtacatctttttttccttactgaaaacaaatatggattaattgcctcaaatttgtataagtgattggctagtgattcttgttttcagaagggagagtggtatagatagaaaatgacaaagatggcaatatacacttaatgttgttattgtatgttgttactgaagtacttagatttttaaaatttcaaatcctaaa

SEQ ID NO: 58728 - DNA, 1021 bp, Homo sapiens
ttcagatgtttttagtttttacctaatgttccaagatcctttccaggatgccacattatagtcagtcatcatatctccttaatctgctatagacggtgagaatttctcaaacttaccttgttttaaattcctgatagtggccattgacaagcatcactcagtgtgttgccagaattcactctgccatgttataaacctgaaaatccatgcctgtagtcccagtctcttaaacaaacaaacaaacaaaaacaacaaccataaacccgaaagtcttgtcttctgtgctgaatactcccttgacctctttgagctggtttgtattaaatatgttaaactgtgacttcgaagctggttcataattttctcattcctgtaggtttctagaggcattttttttcctaacctcatagcattacagttcaaaaaactcttaaccggggcaaacctttcagagcccattttttgccacttagatcatctctgggttaaattggcctagtgaaaataattgaattttcagagtatctctgaatgcctatctctctactatgattttttcattttactgcttatatttaagatatacagaaagcaatagtcctcacaaatcatcttccatctttctaaaatggggaggactcatattggtcagaaggaggatgatgagagcaacattttcatgttactcagatgagtgaaattcctgaggatgaattaggaattgaatggctatggaaaggggaaaatgggaccttgaaataggaatggtagtaagcacagaaagagataggatgctgaccactgctaccactagatgttcatcactgggctcccagggctcagaacagggtttggtgtatagcacatacttaggtatttgaatgaatgagtgaatgaatgaatgaatgaacgaactaataaatgctcacatgcacataacttgttaaatggttcaacagaattcccaacaagagcagtttctcaaagaaaggataggctgggcacggtggctcacgcctgt

SEQ ID NO: 58729 - DNA, 1050 bp, Homo sapiens
agtacggtgatggagagagaggtacattatctttgagagaatgtaaaacagggaagtgtgacctagtcagagaggccaccagaggcttcccagaggaagggacaattgacctgagatatctgaagcaagaggagttaactaagtaaggaggaagaggagagcatttcagtgacagtggtcagggatggtggtatggttcataagaaatttggtttcagagatcttccttgtctgtttagaacaagtaataattgcttcagaaaaggctttgaaatcccttggtttactgcccccttccctttttttttcttatcaagggattatactagcatcttcaaatgagagaaaatatttcaaaggctctgtgactaactttgaaaaacttattgcatagtcaagtgcacataggtactgctcagtaacaagactttacccctttttctcagtccctagtggttctaatcctgtccgagtttttgtttctttgagctcctttagaatagcccctagaactttgggatagttggaggtgaagaatttttcaacagacaggctgaagtcaaagtccagctttctttgttcacatccacaagagtaatttattcctaaagccagaatctctcttccttgctagaatatttccctcactccagctggggccttcccaaggtcattcttgaatccccatagagggagtgttgaaaaaaattcgtttctaaaattgtgggctgccattgttacttgaagaagtacgatgacctctgagtgcctgcaacattgttaaacatagtaatctggagagactcccatggggaggcttttttattcctccaagtccttgatctaagctagaccatattgtacttggtgcctgagtacaactgatcaggtagtgctatgaaaatgtggctacctgcagggtgaaggctctttttctttagctttttaatacctattgcctttagaatctcttccagtaatagcagctccatccatgtggacacgacctcagatcaaagacttcaaagagaagattcagcaggatgcaga

SEQ ID NO: 58730 - DNA, 1031 bp, Homo sapiens
cgagctcaggagtttgaggctatagtgagctgtgatggcgccactacattccagcctgggtgacagagtgagaccctgtctcgaggaaaaaaaaagccataggccaggtgtggtggcacatgcctgtaatcccagcactttgggaggctgaggtgggtggatcacttgaggttgggagttcgagaacagcctgaccaatatggagaaaccccatctctattaaaaatacaaaattagcctggcatgttggtacacatctgtaatctcagctactcgtgaggctgaagcaggagaatcacttgaacccaggagggggaggtttcggtgagccaagattgtgccattgcactccagcctgggcaacaaaagagaaactccgtctcaaaaaaaaaaaaaatccataattgagattagagtgatcaaactcagtttatcaaatttattggttgcttctgagaagagaaaaggaaagagactggggaaggaacaaagggaactttactcctataaaatattaatttttatataaatagcaaaatgaacacatttgttaattttggggtgtagatacatttgtgggtgtttgatacgttgcttttatacctttctgtgcttttttaaacttcctaataacaggaagagagtatggaaatatatcattacaatctattacatgtagtacaatagattcatggtcgggggttcccagagaaagttgtttttctgctagagcctttcaagaaaggattagtggagatgagggaccatttgagctgggcctattgatcatcaaaaatgctcttttgctttcctgtcatgcagtgaatgttctgagtgtgctgacttgttttgattttaggtactttctctggaagctagtatcccttctagaaaattgatgtggaaattactgaaaatccagaccttggaagaagatatcttaaaatcttaattgtgttattaacctatattagcagcaaagagaagcattgctattcatttaagtaattggcttgtaaatgatacattca

SEQ ID NO: 58731 - DNA, 1051 bp, Homo sapiens
taaagtaacttttgggtgatcttttaggcagacttgagaattgcacaggcaattgtgagagaaaatatgtgttatcgaagcaaccgatgatgttatattgtcataagggtatttgggagttgtatgggttgagtgtctttactgtgagtctggcatagaccctaatagtggtcctggaacatgaggacctgagtaactagccatagttcagagatgtccttcaggcagtgcattgtcagaggcttggacagcctccagtgggaggactcccctgccctaagaccatgggctggttctgcagagctagattgggtccatttgactttgtgttaggcaccatagttaggcagtgctcataacagcacattgctattcctcctccaactgcctgcccccaagtattttgcttccacataggagaggttggtttaggtgaaagaacatgggactgggagtctcataacacttggattctctttgggctttgacattaccttgtttgatctcagacaagttattactgctctgattgttctgctctttctttcagtccgtaacaataggatataaaatcaaagcacctgtcctgttaacctcacaggactatcagaggagtcaaatgagaaaagagttaccctgtgaacgatttttgtacttgtagaagacactaattttacattcattttttacatcttgtgcaggcataaaatacctccttaaacttaacgtagcttagtttaacttacttaattttcacttataaagcagttaccacctgtcaaaaaatctgagtgaagaaaagtgttacattatagttgctcagcatttcttactgcatgaaataatctttgttgtttttgccaaactctttaaattccttgaaaatgtgtattcttactaaacaaccttttctcctgagtctttggcatcagttagaagttaaaaagcactgcaagttttttgtaatcctgaagaggaggaaaagatgccaaaccagagtttattcaagataataagtggtatttttgagagatttattctctctcctctg

SEQ ID NO: 58732 - DNA, 1355 bp, Homo sapiens
acagagactggctggaatctgtgagacccagttgcagtttcccaggacagagaatcttgttggtccagtctatgtcagatatccatttatagtccttagtacaagatttggaggcttcaactattgcttactcagtaagggctttgagactcagagactgacaggttcttcaagagggagctgtgggtacaaggaggcagtgattaacacccataaaacactgggaagtaagtctgagtttgtaggggtggcatggcttgtaggttaaaccagagaacatgagagtccattgatttcttctcattatttctgggtagttcctcagaaaaaggtttagtgctagcctcaaactaatccaggccctcattcaactttggagaaagactatgaatgcagctcttttttgggggaggttgtcctaggtggatcgaatgttgtgctgtatgtaggagtttgtgaggctttgctttgttatctattaatagatggctttgaggtctctgttaagttggtcacataagtaagttaagaagcatgtggttgctggctgtggtggctcatgcctgtaatcccagcactttgggaggccgaggcgggcggatcacttgattgaggtcaggggtttgaaacgagcctggccaacatggtgaaaccgtctttactaaaaatataaagattagccaggcgtggtagcaggtgcctgtaatcccagctacttgggaggctgaggcaggagaatcgcttgaacctaggaagtggaggttgcagtgagctgagatcacgccactgcactccagcatgggtgacagagtgaaactccgtctcaaaaaaaaaaaaaagaagaagcatgtggtttatctataaaagaatatgagtatctctaaactaagcatgccaagatattttcagtatttcctctattaagacaggctttaaattaaatgctgtggacccttaatttttcactggctttatttatacttaccagggccacctgtaacatcttccagctattcttctgcctcttactgttttttatgtatttaggtacagaagccatagccaacagttaaatacctcatctatgtcagagatgacaatccatcatcttaaagcatcgtggtaaattagtgtagctctagagccaaactgcctggatttgcatcaggctgtagcatctgctagcagtatagtcttgggcaagttactgaaccctctgtcagagggttgttgtgaggactaaatgggttagtatgtgtgagtactttcaacactgcatggcacatagtaagggcacaataaatgttaataattatgatggtggtcatgatgatgatgatcatatgcttatcttc

SEQ ID NO: 58733 - DNA, 1125 bp, Homo sapiens
tttataaattacaggtatgtacatttaggaaaaacataatatatgtagggttcaatattatctgcagtcttaaacatccactgggggataagataaggactattgtgtattgccaaattgaccttcaaggtaactataacagtttatactttcagcattcatatatgagaatgggtacctgtttgtaggatcttaataactttagatgttatctaacttttttgtttatctgatgggaggtgggggtcttggtatctaatgcttttaatttatatttcttgactagtggggttgaatatctttttggatgtttattggcagcttctatattttttcttctctgagtttcctgctgttctttaacccatattcttctcacttattagtgattttatttcaccactatatacatgaatgagacatataagtagcatatgctactttcaagtgccctccccgttttctttaaatttggtagtctgttgtcattggaatcaaccagtagttagtgctaccatttatcaaagaagtggaactgttctctgaatatttcccattttaccagaacccaatttcatacggcttttaaatgttggtagcagttagtctttattggtcaaactggtcgcactcttaattgcctatatggaaacctaccagagccaatcaggtgaaggaaagaaaagcattaataagttagtaataataataatcctattacctctgaagtagcaacctctgaagggtaaccctttctttattgatgaataaactgagaggttaaatagtcacatagctaggaagtgtctcagctgagatttaaacccaggccatccaattccaaagccttttccaccacattatactaccttagtgggatggatacatttttgaatacagcctttcaaagtgtacataatcttctatgcatgatcatgttaaaagggactaatgtaaaattattttaagtttttcttttctcttttggctaaaaattatttttaaaagctattttaaaaaccgattgttgggctgggcatggtggctcacacctgtaatcccagcactttgggaggctgaggcaggaggattgcttgaacccagggttcaagaccagtctgggca

SEQ ID NO: 58734 - DNA, 1027 bp, Homo sapiens
tattatccgttaaatatatttgtaagagcttttcacttatatccagcctatggacagaatagaaatttcacatggattttgtatataaagaaatcaggacatatatttaggtttggggtcagcatggaggttgagcttagaggtagagcttccccagtcagtgagagactcatcttctccttccagccccccgtggctcctttgcttctttagagcatatttgttcaactactactgaagtagaattatggctaatatattagaggagatttattccttccctaagatttatcatagctgtttcctaactaaaattcaggtcttcttttaaaaatttttttcttaattttttgaaataaagtagttaaccatgtttcttctttctttagttgctttcagaataatgtagaaatccatgttgcacatattcagagtggcctgagccagatgggaaacttacatgcctttgcagcaaataacaccaacagagactgagtaaagatttcattattccaactgcacgggacattgtttttgagaagttcttttcctttatataggcttccaacaccaaataacctaactgctggaaaacaagggaaatttaaatctccaaataaggcattttaatagactgtactgcttcttaaaccagcattgctgaccagcattatatttatttttcttttattattcagatgcagtagcattgcttatgttacatatgtttatattcacaaatatttttaaactgaaatatctgaacataatataatttcgtggaagaatacattgaccattttttttaatgtgcatgaattcaccgcaacacatgcagacaactgctgcaatggagagtatgaagaaacctggtctttttattcatgtcggtggcagtgtggaaattccatccagaaaattacaactccacttgatttagttgatcaccatctcagtcttcaaaagataacatcatgaggtgtgggaagtcctagttttaaggaaaccactgaaatatagatgggaa

SEQ ID NO: 58735 - DNA, 1027 bp, Homo sapiens
acgccattgcactccagcctgggcagcagagcaagactccgtctccaaaaaaaaaaaaaaattacaaaaattagtcaggcatggttgcgtgtgcctgtaatccctgctactcgggaggctgagttgagaattgcttgaactgggaggcagaggttgcagtgagccaagactgtgccactgcactccagcctgggtgacagagggagactctgtctcagaaaaaaaaaccaaaacaatgctatgctatatatatatgttgaaacactaaaatctattgctgaagtatcttactaaaatattggaaatttaatgtctaaccaatatacctaaatgcctctgtttattctaaaatatttcttctttgtctgtagaccagattatcaaaaattctcatgattaaaaaggaacatatcaagaaattaagggaaatgaacacagaagcagaaaaattggtaagaatttctctttttttttcttcatttgcttgtctaattttaaaatagtgagaccatctatatctaatgatttaaaaatatctatggaaggaaaccttcagataaatattatttttaaatcctcatttgcatgaggtccacacctgtagtccaccttcttgggaggctgaagcaaaaggattgcttgagtctagagtcagagactgcagtgagctatgattctaccactacagtctagcctgggtgatagcgagaccctgtctcagtaaatgaatgaatacaggaatacatacatacatacaacagtaaatcttcattgctatcactatctcttgttatacagaacatatgctaagtaaattggcagtgcattgccccagacctcattatgccattgactgtacagttgaataggattaatggatatattaggttctttcagcagtttgcatgagtctagaattgctcagatacctgtgaccaaggaagttgtaatggcaggttataaaaaatgtttcagaataagtaagtcaggaaatatctatgttgtcatctttaggttatcttgacaa

SEQ ID NO: 58736 - DNA, 1047 bp, Homo sapiens
ctaccaataaaaactcttaaatgccttatgataattttaaacaggaaaatatgttcatgttctgtagaatgaacaaaaatgtatcttgaacttcaaaaaaaaaagttgtcaaggacaagtgcacataagcatctaataatttgattttgtaatcccagcactttgggaggccaaggcaggatcacttgatgtcaggagtttgagacgagtctggccaacatggcaaaatgccatctctacagtaaatacaaaaattagttgggcgtggtggcacacgcctgtaatcccagctacttacttgaacctgggaggcagaggttgcagtgagccgagatcacagctgtacactccagcaagggtgacagaacaagagtctgtctcaaaaaataaattaaaataaatttaaaaataataatagtttgatcttgttgaaactaaaatgcagtgtgcatttcttggctaagttagctgttgtatacaaggttgaatgaacaagaaatagttaaataacaattttgttagctagactttggaatagctatgttactaggataatctagatgattcacaaacatacagaaaactgatctttatgactgtgacactgtcctgtcgcaactctatccactgccttccttcctgagcacatcactccttctggactattttacagagccctttttagcaatacagagaattctgagcaatacagaacaaatataatgtaggataaacatgatatgagacttcttcaagtatgtgaaaagtttttatatcctctgagttttctctttactagttgtagaatctctagtgctttccatcttcatttacctgacatggcttgttcccttaccctccttagtcatatcttctaaatctctcgtattttgtctgtatgtttatttaaagaacaccacccagagctgaaaaattatgaaaactaacttttactgattacttatgtgttgagtcctgttctaagcacttcataggtattactttgatttaatcttcaacaactcctatgagataggttactgttac

SEQ ID NO: 58737 - DNA, 1678 bp, Homo sapiens
gcccaactaaggttttttttttttttttttttttttttcttttttttgtagagacgaggtctccctatgttgctcaggctggtctcaaactcctggcctcaagcgatgctcctgccttagccttccaaagtgctgagattacaggcttcagccaccatgcagggcctatctttatttttttttaaagatggagtcttgctctgtcacccaggctggagtgcagcggtgcagtctttgctcactgcaacctccgcctctagagttcaagcaattctcctgccttagcctcctgagtagctgtgattacagatgtgtgccaccaagcccggctaacttttgtatttttagtagaacctggctggtctcgaactcctgccctcaagtcatttagccccccaaagtgctgggattacaggtgtgagccactgtgccaggccaggcccatattctttaaatctttttgtattactatgtaacttcctagtggcagctattacagttgcagttttgtatttgtttatgtgattggttagtagccccatcagagcaggtactgtcttaattgcattcccagttccatgcataacacctggcttacctctgccctttcataccattcttccctatgcaagcacagtcacccctcctcccttcttaggacttaacctgtttcttctgcccagactcattgctttgatttcctgctctctcacagctagttttttagatgttacctcctcagagaaaccgtctgtactcaaaagtaaggtagctagtacttagagtaattcccccgtccccaccaatatcaccctgtttatttcctttatcatgagctataattattatgtacgtgttttatatatatatgtctctttccactagagtttaagcttcctgtgaggagaggctttgtttgtcttgttctttggggtaaccctcgcccctaacagtgcttatggtaggcattcaataaaatttttttttccacatcagatgggtcatgtgctgacttttcacaaagtttgagagagacacatctcacacatgagtatgaaaacccaatcatcatgcttatgaactaagaagggtagaatctttggattaatgaacacctcgttagagcaagattctaatttaatcagattcgcctgactgaaaaatccatgttcttaacctattattttttgattgctcaaaataatactaacagcattatatcaaaattaactgtgtaatatatgcattgttctatgcacttttacatgtattaactcatttaatcctcattttacacatgaagaaacaatagcacagagaggcaaagtaacttgcttaaggtagcatgcaagaaagtgtcaggaccaagattcaaacatagctagtctcaatctagaacctgttttcttaaccactatgctatcctgcatctagaaaaaggaaagaaggaccggttgcggtggctcacgcctataatcccagcactttgggaggccgagccgggtggtcacctgaggtcaggagttcgagaccagcctggccaacatggcgaaaccctgtctctactaaaaatacaaaaattagctgcgtatggtggcatgcacctgtaatcctagctacctggaaggctgaggtggggagaatttcttgaacccgggaggtggaggttgcagtgagc

SEQ ID NO: 58738 - DNA, 1139 bp, Homo sapiens
ttccccactgcagttactggacgcaccaattaggattcttttcttataagtagcagaatccaattcaagttaagggaacaagggagatacaaggatacttcaggaaatgcaagggcaggaacgcagccaggcctccagagctggcagtgtcttctctccatggactgggaagcagagagattgagttgcacaaaggatgatcccccaggccgcctcctccactcaccagtgtttcagttttcttagaccaacccaaatggaactggaattttaattccacttccagattctccatagagaaagatctgattagtccagcttgatttggacatcgaccctagtcctgtgaactgtaaccaaaagcacaaggtcatgtaaaaggccaggggtctggggactgtggaatgtggacggaaacctagagctgctgaccaccactccaaatagggccttgccttgaaaatggccccatagcagtgatcgctgggcacaaactatgttcagccgcaactgcagtttcaggttctggaacagttccagaaactcaggagggagcctgagcagtttagatggtctgggttttgtggacttttatctcatctctgtatctgatcttattctcctaatcaaactgttggtttcgagagcccagtgtgaaggcctcttctgagactgtcctcttttgaataggtatgaactgaagcacgcttcacatatcagcaagttacccaagggcaagcacagtgtcaaaggtaaagtgtttccaaagctgttgctacagcccgaggcaccctggacagcacagaagccgggggcttgctgtcctgagaaggctgccttgtggctggctgtcaaacagctggagattcattttatcttttcgaggggtgtgtgtgcgttgttgttgttgtttggggggtggtggtggtggttaatatgctgcaactgaccatgattggaggttcattttatttatttttgtaaaaaaaaaaaaaaaataggcaagctctatagcaggaggttcatttttaaaaacagttcactctctgtggctgcagctggtatcacagatgccacaggagaatcttggtgcaggcaccagtaaccagatgcacgggtttcggctttaacctaacttg

SEQ ID NO: 58739 - DNA, 1056 bp, Homo sapiens
acgggtccaggaccaccaactttgctgggatcctgtcccagggtcttcggatagccccgcctgaagcgcccgtggtatgtgcctggcctggcgaggggtgggcaatgcctgtctctgcaggtgtctccataaagaactttgagcaagaggtctagttggtttagggggattctgccagacatcctttctttgggccttcacccttttatcctcctgaccctaaccctgtcaggggtttcaaacacagtttctggaacaaaggaggcagagcatccaggccagggcctgctgcagatgctaatcgggtgtgttgacaagcaaagaacagacacgtggctacaggccaagctgagtccaggcttatctctaccacttcccagccgggccacctctgagtgtcagtgtcttcagcaggaaaacgtagcgatgaatgagtaaggctttacctagacacgagggatcgtgatgccacctgctggattctagatgggtccacctggacaggaccttctaagcctcttgtttcacagttgtagaatgaggaggagagaagtttaaatgattctctctggggctgtgcagtagtgtataacgggcaaatggcctaccctttgtgaacctcgtgtttcatttacaaaagggaataaaaataccagcctgcattccttgggtgttgacaggcgctagtttaagtaacactgatgagctcattccgtcctcatggcagctccatgagactgtgttccccatttgagaaaagaggcaagtagagtccagagaggttacgtagcttcttgcagctccttggcacctggcagagctaggatctgacagcctggcttgtgagctaaaactttggtatttcctcaccatgggcattgtgagaattagaagtgatggattgcagcacttagctgggtggcttgctcaagttggcactcagtgaacagctgctcctaatttcccatcagaagattctcagctctcccttttccgaccttccagacaggctacatgtttggtaaagggatctatttcgctgacatggtctccaag

SEQ ID NO: 58740 - DNA, 1112 bp, Homo sapiens
gggagggccaccctcttgcccttgttttgaagttgggtttctacccacattgatggaggcagagctgtttttcctgcccctgttctaccaaatccactggggaaagagctgttggagagggacagcctctccctcataacagcatcttcctccccattttccctccctgccttttaagacagctcctggctcaggacccatttgtctaaagtaccttcactgtaggtcccaaatgtcagcatgtacgagaggaaagacagttcttccacctctcaactcccccaggccacaaggccttgttaacattccagaaagtccttatgagctctcaatatgtgcagcaggtaacaggctggccctgaccagcaggagggtttgccattcactgtgttggaccttctctgcatgtaggttttctctgccacctgggtgagtctgtctcattcaccatgatacctaagtcgggggctttcttttgctcctccaggccaaggtggaaatgcttgacaacctgctggacatcgaggtggcctacagtctgctcaggggagggtctgatgatagcagcaaggatcccatcgatgtcaactatgagaagctcaaaactgacattaaggtaacagggtcaggccttcctcaagcatcttaacctctcatcctgagagcagcggtcccaaacttccatgtgtgttaggatctcctggaaagcttgttaaaacacaggtggctggcgcccaataattcacttttctaacaagttcccggacattgctgctggtggtcctttgagaacctttgggcgtttcacgtgtagataatgcaccttgtttgcaaggcagccttccaagccagcacctcagcttggcgtacaaatttatttttgagggtcttaccaaaagttcttttttgtttgtttgtttgtttgtttcctctccttaatctagagaggagctctgtttttctaaacccttgtagcgtgaacttttagaagacttattaccggtgtccatttcagaagtggaaatgcttgatggcacctgtaataaaaacacaatgcttgcgttcatttttctctggtgctgaagtggactgtgttggcacacacagtctct

SEQ ID NO: 58741 - DNA, 1053 bp, Homo sapiens
ggaagtgtaagagaaaagagaaggaatttgtccatcagtttcatgtcccattgctccaaagtttgcttctacagctgcccagcacttccaggttgggcatgagtgggcactagacaggttcccaggcagggaccagcaaccccagggtgggtcagcccatgcagacgctgcagtggcaactagaataagaatctggagcagccaagagaacttcagggcaggcacaggaagagtctgacccatgtgcagcatcaggcacactcatcctggccactgttttccacacctttttgattaacactcagctttttttgctggtggcactctagcctgtgtcctttgtctgcagtccagccccacagacgcagataccttgcttgagttgttgatttgggtctcttagcaatgtgcttttttcctgaaggatgaagaggcagtgaagaagctgacagtaaatcctggcaccaagtccaagctccccaagccagttcaggacctcatcaagatgatctttgatgtggaaagtatgaagaaagccatggtggagtatgaggttattgcgctttatcattttatctgtgagcatttgctgtggatgattatttgctgagctagtgaagagctgtctgcctgttcttgtttctgtttcaaaaacaatacattggctgtcagcttcttgtacctgtccttcaatcttaaattgtgtgagtgttggggcctggagtggttgcacttttgcagagggttgtttgatttgcagtgaagcatgtgttgtgttggagagagttgttcctggtccctagtcccctttgtactttttttctgagacagagtctcaccatgttgttgcccaagctggtctccaactgctgagctcaagtgatccacccacctcagtctccccaaatgctaggaatataggtgtgagccatcgtgcccggcccaccctttgtatttttccccttcttcatgctgtggcaaggtgtattagccatgcttcctttgtggcccaaccaaaccaaccaactggagttaccatgggaagtgcaagat

SEQ ID NO: 58742 - DNA, 1023 bp, Homo sapiens
catcatgtcttggccttggatctgagttgaaagtttcattatttttagggtacagctgtaagggttgactccttgaacacatgacttccagatagtactttgtatttctttggggagaggactagaatcatttttatgcaaaggtctccagactccaggattcagtcctcaggcttggctgccagaaccaagtttaaactattctttggcattttttgtagtcaatatgatttgaaagtttaatgaaaagtaaaataaagaccctttattgttatagcagttgtgtttgttctgtgttaatcaccatccttttggggtgtgtaaaattcttccccacgtgaatgtaatggcaggaaaggggagctcctgaaatgggacagctgacccacacatgtgtatctgacaccctccttcccactgcaggtattggatattcaggtcctggggccgtgtgggtacggtgatcggtagcaacaaactggaacagatgccgtccaaggaggatgccattgagcacttcatgaaattatatgaagaaaaaaccgggaacgcttggcactccaaaaatttcacgaagtatcccaaaaagttctaccccctggagattgactatggccaggtaaccacataatgcccttacactgtctgcttctaggaaaaggaagggacaccttattctagaaaatccacatcgtggatcaggtggcatcatagtaaacatactaccaaatgttgaaaggagaataatagtccttcacaaattctcccccaaaaatagaagaaaatacttcccagctcattgcatgaaggccagtaccaccctgataccagagccaaagcagcacaggagaactacagagcagtttcctgtgaatagacatgcagaaaccctatgaatagagatacaaaatcctaacaaaccgaatccagcagcatagacggatctatacaccactcccaagtgggatttatcccaggaatgtaaggttggttcgacatttaaaaatcaatgtaatatatgaa

SEQ ID NO: 58743 - DNA, 3668 bp, Homo sapiens
atcagcactagtgagaaatgccccaagccaaccaagacagtgagagcaacgtatttttttggcaggagaagtgacccgctgcttgtttactcagagacatgtggcatagtctattggtgaaggtcacagtttggtgggtggaggatgagggttccttccttgaacataaacctgttattgacttccttttcatatcctgagaggggaccagtggtcactgcagtgtgtgctggtggtcatcccgagtccactgtgctgctggcagcctgggtccaggtgcccacatgaagggccagttgggggctggcattctgacccctccatggagggttccctcctctgctttcccctgacttgcagttcagcatgagtcaataattttgttctctggagacctcagcagtttcagttaaactgtcagtgtttcctagttgtttgccctcacagggaaggcaggaaggacttttccttgcagctactccagttctggacgggtgtcacctgcactgtgttgtttgctgtgaacagaaggcacacccctgtccaggcctttctggcctgggtcagtgcacaccaggctgctgcttttctcctagaatcagttagctcagctccgtgtgattgtgctggccactgctttgagggactatcatggacatgtctcattttaaaatggggttaattcataagaattgcagtttgtttgggagaataacagaaggaattgggggttcatgtgaccttacccctcttcccatccgactccagcctcctggtccctcgtccgcagatgcagccttcctagcctgaccttggcgcggacctggggtaacccgcagctgcctggctcacgccgcgaggctggcctggccatggagtggcattttgtggcttgctccctgcccagtcctttctgtgctgagggacatctgtaggtactcaggtggcagcttgctgtcccgtcctgttttctcgcgagtgtattttcataggcttttcccaggagctcgctgcttggctcacctgctcctccacctccccttactggggagcagcaccagagctggccttgctgaatgattctctcctttcatcccagataagccattatccaacatgaagatcctgactctcgggaagctgtcccggaacaaggatgaagtgaaggccatgattgagaaactcggggggaagttgacggggacggccaacaaggcttccctgtgcatcagcaccaaaagtgagttgaatctgaatttgtgcaacagggacaatgcttctgtatcttatgattgtgatgacgagtaagtgaggaagagtcgaacacagcgctgaaaaactggatcttaacatcatcatcgctgtggttctttatgaagggaaaccagtatttgctctcagtgttgctgctttgtactgtagattcacatgcattgcgtgttctcaactaaagacggtaagctactataggttgagtctccctagtcccgaagcccaaacaaattgcctcaaaattcaacactttttgagtgacaacatgatgctcaaaggaaatgttcattggagcatttcagatttcagagttttggattagatgctcagtcagtaaatatgaagcaagtattttaaggtctgaaaggtttctggtctcaagcatctcggataagggaagctgctcaacctgtattctcatcacttcgcactgctctgtaagatgtgcatagatatctgccaaaacagaagttcaaggttcaagtatgtttggaaaaggtagggtaaaacaaagctaaacaggtttctgtgtgggtttattatgctgattaccactgtaggtcttcaggaaccagagaaatagaatacaggatttcccatacatatttgacatcagggtgttttttctttggagtgtttgttaacatcgtgctgtagaatggtttggagaaggctgccctggctcatcataccttagaaaagggggaatgttgctgataaaaacactcttgggagcattagacttggaagcaaaggagagctgtgaatgctgagggtttggaagtacacactaaatataactgtagtaatttgaagtttcagttttgttttaaacttgtattttggttttttttcctttcaatttgaacagaggaggtggaaaagatgaataagaagatggaggaagtaaaggaagccaacatccgagttgtgtctgaggacttcctccaggacgtctccgcctccaccaagagccttcaggagttgttcttagcgcacatcttgtccccttggggggcagaggtgaaggcagagcctgttgaagttgtggccccaagagggaagtcaggggctgcgctctccaaaaaaagcaagggccaggtcaaggaggaaggtgagggccccaagctgccccctccagggccaaaagccagggacattggtggccaggttgttgtccacggaacctctccctttgtgtccctgacatggcctgttgagtgctgcagagcaggacacagaatggcaggcgctttggggtggcgggagtagtgtgtatatagatgccgagttgacagatgatgggaatgagaacaactcatttgccttctaccttccccttactttttagttacatttaacttcatgtttacatttttctgttctcctccaaggtatcaacaaatctgaaaagagaatgaaattaactcttaaaggaggagcagctgtggatcctgattctggtaagcaaacaggactgccagcaaagtgggctgtgccgccccccaacccccagctgactaggagcacacatccaaatgcccgcagcatacctggggcagtgtggtcgtgcctttgtcctcactcaggcctccttcaccagctcccccagtcctgagaacacacatttgtggggagcctcccgagggtggtggtagtgtatccaagaggcgtgaacctcaggcctgcagatcccttctccgtgagagtgctagcacctcaaggggagagaaaactgtaggtgcttttcctctgggacaggactggaacactctgcgcatgtcctggagaaaggtgggaaggtcttcagtgccacccttggcctggtggacatcgttaaaggaaccaactcctactacaagctgcagcttctggaggacgacaaggaaaacaggtgagttctgcaggtgtagcctggttgtgcagagacatgggcccgtcctgcattggttagtgctgtgccatcagccttgtgaaacccgttaggcccagtgcctggggaatgaaatctaatcacagagatcaaaaacaaattataaggcctttgcttaaaggggagaaagaagccacttactaaccagtagcgttgctgtccttgtacagttgtcccaaggtatggtttcacatattcttctgctggcttttctttttgtttggtgttttgttttttgttgttgttttgcaactatttgttttgttttttgaaatagtctcgctctgttacccaggctggagtgcagtggcgtaatcacagctcagcggagccttgacctcccaggctcaagcaatcctcccacctcagcctcctgagtaactgggactataggtgcgcaccaccatgccttattttttatggagacgggcctcgctgtgttgcccagactggtctcaaactc

SEQ ID NO: 58744 - DNA, 1801 bp, Homo sapiens
aaagattaaaacttccattttcagaagagcttaaatacattcctgcatgatactgaatataatataccatcaaggaaattggtgtttgcgaatcattcctactctaagattggtggagaatggccataccctgcctcctctagttgctgataaacgtgggccgtgggctcagcctagcacctccaggctcttacctggtgtttctggggattgatttctgagggttggttccaggagccttggtgcagtctcccccacacccttagggcttcctcatcaccttccacagtattctctgagagaccacacagcaggtttaatttggtgtccacaggagcatgactgggagtcaaatcctgtgctaatcacccagatttgcaggggcagctcgctggtgcacaagggtataactggaggctcagcatgaccagggctcctcctccagttggattcttcctttgaaaagagctagcctctcagccactgggtcttgtccataggctcagaacgacctgatctggaacatcaaggacgagctaaagaaagtgtgttcaactaatgacctgaaggagctactcatcttcaacaagcagcaagtgccttctggggagtcggcggtgagctgcctttgtgttaagtgggacacgcatgtgaggccgaccccgtcgttgtggagtgactgtcccaatggagtgtgggaggccctccgtgtgaacacctgctggtattaattgcaaggagtataaatcgtggttgtgttgcacggtcatcaccaccatcgtggtcaccatttttccggggtggatggggccggcattcacacgccccaccagacatcttccacatgttagtgcttgctctagagtgccaggcctgtgaagagaggagagccccctcctgaggggtggcatgatggtttcccatcagtgtccccagctggcccttctctgctgtcattcttgggagttggcttggcactgtactttctgcaatgccagtggttgctttcccttcatttctaaatcactgagggttgggggcgctgcaggaacacttggaaataaggtctcctacaagaatccaagctccattgtaaaccaagggtgggtggggtgttaagagccccatagcaagcccacagcaagaagcctctcttctttgtagtgagtggaatctgtgcaagttcctccatcccacattagtaagtgtccttttttgtagtcccgcatttgccctctgacatgtttctccactggctgcagatcttggaccgagtagctgatggcatggtgttcggtgccctccttccctgcgaggaatgctcgggtcagctggtcttcaagagcgatgcctattactgcactggggacgtcactgcctggaccaagtgtatggtcaagacacagacacccaaccggaaggagtgggtaaccccaaaggtaaggggtaggggaagatcctgggatctgttgggagaaaaacctggccccactttctgcgcttgtttatacttcaggtccctgagattgcagggccatgttcctcagacttctttacagctgcgtcatcctgtttaccagaatataaaattacatgtttgcaaactacgcaaatgtagaaccgaagctcctctaagtatggagtagaggtccatttggtgtaaaatgttgcttgcaaagaccatgaatagtttttatctattgaatgcctcctatgtgccaggcacagttctaggcttgagggacatatggtgaagaaatggatagtaattcctgctttctgatacaaggttttttcaagg

SEQ ID NO: 58745 - DNA, 1003 bp, Homo sapiens
accccctagccatgggcttacctctagcctagtcccggctagaaccttccaggccaggagatacatgggtttcttttttttttttaacctcagacggggtctgagccctggattcttgtaatgggttgttctgagtccctggaacaaccctagcccctctccctggctgggagagtatgttctgaattggatggtgtcttctgccatcttggctgcaagtactccctgagtagacagtgatcgcctaagggcactgagtggggcaggggttagggagtgacaagtgtgagtaggccctacagggagttgatagaatgacattaagatactgcatcaccgcaagtcattgggtgtcagacttttaatggctctggctgtctctcatatcctgtgtctccttcagaaagagaaaaggcgatgaggtggatggagtggatgaagtggcgaagaagaaatctaaaaaagaaaaagacaaggatagtaagcttgaaaaagccctaaaggtgagttctcagctctgtgtctcctttcgacattctgctgtctggattctctttctcattctgggaagacaattcaaggagttgtgtcccacttattaagacctttagcaaattgatggcagttattaaatagcatggcttttccccagattctttttcctcctccaaaagaaaccatttttatttggaagagaatccacattaggctgtaggtgtctgacctgcagccaggcttgagcaagggctgagtgctctgtttccgctcaccagcctcatactgggatgacagagattcatgctttggccaaattatgcacaactgtacaccctgcacctttgtggtcacttgcaaactttggaaactgaatacttagaggatgccaaagattcttagcatagacaaatggcttgaagagatcaagtgtctccacattttttaaatgaagatcttcatttttaaaaaaggaatagactgataatgacagaagaaaactatccat

SEQ ID NO: 58746 - DNA, 1276 bp, Homo sapiens
atgcctgccccaggtcagcagaaacatcttaaggggaatgttagcaattcttcacatgtccaggcaggtaggtaggttgccagccatttggaatttaaggaaccctgagtcttgagggtgggtaacacacaatccttgatgacctgagagagctaaacctctcaaaagctcatgagtcttcaagttggcgggcaggccttggcttggaccctcagctcctcactggctggagcacaggctgcccgtatcatgttcactatccttgcttgtcgctcccttggtaccacatatggtttttcctgcagggccaggtgcgcctgtccaagaagatggtggacccggagaagccacagctaggcatgattgaccgctggtaccatccaggctgctttgtcaagaacagggaggagctgggtttccggcccgagtacagtgcgagtcagctcaagggcttcagcctccttgctacagaggataaagaagccctgaagaagcagctcccaggagtcaagagtgaagggtgggtggagcactgcggggttgccctgggggttcagtgaggggttcaagggaggcccaaaggccctacaggttccataccactcctctgtttcccttcgctgactgtcagtaagccagggagatgcaaactgaggaatggtgacagcagagatgtgggggcaaaggacagggtagggaaagacagccaggggttcccatggcctctgctgagagccctctcccctgtgagacctgcttcctggtggtctattccccttccaacatctgagctccatggacaggctaactacactttcccaccacaaccctttagatacttaaaagaccaccttccttccctgggtatttgttgtgcctgggttgatcactattcggaacaatgctgggagaatggtgaccatttttagttaggggatgggcagtggataattttcctggcttagagttgagaatgataagggttttgcatggtgttaaaatttagaatgggaaggaccatcagtgactgtcttgaatccatggacacctcttggtctctccagtttaccctctgctggtccctcagcctcagtctggagaactgcttgttaacaagcacaccaggggtggtgtggcagagcctggtatgcaccctgctccttgaacggtgactgggcaaccatcaagcagccatcacacattatctcagttcataacgcctgttcattgcagcagcacatggggctctagaatgtggaagaaaactgaaaaatca

SEQ ID NO: 58747 - DNA, 1123 bp, Homo sapiens
agtgatgggaagatagcttcgtcttattcctaatcttaggcaagaaacattcaacctgggaatttatttttataataagagaagaatccagtttttgtcccaaatggctagccagtgatccccagaactctttattgaataattcaaccttttcccactaatttgaaatgatacctttagtacatatttaattcttacatatacttgtgtctgacttatatcaaaatatttcctttaattcaacactttggtaaatagaagtataatggaaattagaagccttagtgagacgtcagtatgcttccaggcttttaaggtaagcacctaataagtgctttctaaagtgtgggaggggcctccagagaaaggggaggagatggaatgtcagacagctgaccaccccctgatatgctgctctttcaaggagctcagtctgagaagggtcatttatctccagaaaagaagctctattagctgaccacggttgttacaaacagacagatgagatggaccaatcgtagtctcccaaggcataaggtgtcctagtggaaggatcctggggaggtagaagaggacggggctcctctgagctgcattttggggctgttgagatgagcattgctgtctgtttgattctccaggcaaaggccaggatggaattggtagcaaggcagagaagactctgggtgactttgcagcagagtatgccaagtccaacagaagtacgtgcaaggggtgtatggagaagatagaaaaggtaagatcttgggggcccagatccctgaactttatggattgcttgcaatgatgttattggctatctcaagagaaaagaagaaatgggggctttagggtgctagctcaacgtaagtgattaaaaataaagtgaagacattagtattgaccagatacgtcagtgacttccagacaggtctggtcctccttatcacggtccagttctcatgtatgtatgcatctgctcttggaaaatgttaacaaaaggagtctcttttggacccagcagtggctggggagagactgtttgtctgtgttttatggtagaattaggtataaggagtgtgtttaccctgttatgagcctccagccttctgtttaatcaaag

SEQ ID NO: 58748 - DNA, 1714 bp, Homo sapiens
gccgaggcgggcgggtcacgaggtcagaagttcgagaccagcctggccaacatggtgaagccccattgctactaacaatacaaaaattagccaggcatgggtggcacgtgcctgtagtcccagctactcaggaggccgaggcaggagaatcgcttgaacccaggagacagaggttgcagtgagctgagatcgcaccactgcactcagtgcaagactcggtctcaaaaacaaagccagacagtgctcgaggcctgggagcagaacctgaccctgtcacaatgaaaggcctagtgggaagcaaaccacctggagaggggaactgtgttccctgtggccagacttctcaggtcctacgcctgggaaactgcgccccagaaggccagtgagcagctgactccagctctaggcatgctgccccgaaccatccgctgtcacagttgcctcaaagacctccattcattccactcccatctgtgtggctgctgcaagcttgacacttttttctgacacactttctctgctttgctcattatctgggacttgttccttgttattcttaactgcagaggcacttaaagagcccttttctggggcacacaggccctttgagtccaggcaagcctggagcagttgtctggccattcccagcagatgctgcaggattgtgactctgcacaagtgtcttctgtgcatttcactaggccatgaggcagctcaccactaaatgtagcagtgtgtggtcaaaagggacgtggggcagagctcagtggtaaaaggccacctttctcgtggctgtgtttggtgtcctaagagaatgagctcaagaacagtgggctacagtcttctgacccttggggaagatcgtgagaaggatgctgcagctcttcatgtgagagcggaggctgtcctcctttcacagataggagaacaaaagtttcatgtgctatcccactgctggggctgggactggggtcgaggtcaaggtcaaggtctagtgggtctaagtcaaaagttaactgcttacttacttccctctgtttctcttccttctagtcgcccatgtttgatggaaaagtcccacactggtaccacttctcctgcttctggaaggtgggccactccatccggcaccctgacgttgaggtggatgggttctctgagcttcggtgggatgaccagcagaaagtcaagaagacagcggaagctggaggagtgacaggtgtgtacatactggggcagcatgggcattcagcccccaccctgaagctcccaggagggcctcgtctcagagagcaaagcaaacctcccccagcttgccctctcccacatgtgcagatcaagcgtatggtgcccatgttatttcagcaacacctcctggactcagcatcatctgttgcatgatatttggtattttgtttttccaggtgcttggaatgtagcctttaaagttgttttgtttttaatatactttatttttgttcatggcaaaagtaagcaaagaacaaagagtttccagtaccccctccccctcccaccacacaggctcttccttgtcaacacctcccaccagagtagtacatttgttataattgaggaacctacactgacacatcattattgcccagagtccagaaactcctgatgctctacattctatgggtttggacaaatgtatgatgacatgcatctgccattatagtatcatacagagtag

SEQ ID NO: 58749 - DNA, 1006 bp, Homo sapiens
ttgatagattgaatccccttctgaggtttcctgagccttctgtgaggtggtgggcttgaaggcccctgtcatttcccaggggctcctgcctccagcttccagtttgccgatgtctacctttgtattaataattctggttctcatctgccctgttcctcctcgcttccaacatattacccaagcttagtgctcatggtcaaggtagcttgattttcctcccttccatgagctgtaatgtgttttaggaatgaccagatatccctcagtggattttcagtacttagtacaagggagggcgacatttaccgagtggatacccaagtgccaggtgtacttccgttatcttatttcacaatatgcctgtcatcttggtgtcctcggggcatacctaagtcagtacgtggcacacagtgcttatttggtaggcattttttaagttctaagcactctgttaggttttaaggacacagaatccacctttgggaatttccagtttggttaaacgggaaatgactggtaaacaaacgttaccgtaagagaggatggatgccacctgatggagctgtgctctaggcattgtgtgcctaggagtccgagatgacccagctaagggtggaagcttgattaggagtcgttaattcacagaagtggagcagaaagatgagaatagggaagtagacagggcctacaatttgaagagccttgttgcccactaaggaacctagaacttactttgaatatacaaggcagcctgttatgaagttctcactcctggtgcaggagctcttaacccagggtctgtgggatggtaggtagaaggcaagaggtccatgagtttagataagaaaaaattgatatctccatctccactaacctctagataaaattatttcctctaatcataaatgtaagcagcaaagcaaaggcatattagcagtccctatttttttttcaccagtgataattacagatattttcatatcactttacagttggaagtttttca

SEQ ID NO: 58750 - DNA, 1053 bp, Homo sapiens
tgagcgcctgtagtcccagctactcgggaggctgaggtgggaggatcgctgggctcaggagttccagactgcagtgagccatgatggcggcactgcactccagcgcggtgagactcagtctcaaaaataaaagggggaggggttgggggtaaaattagttgtgaaatcaagtaagacttcctgggacagaacaatcaaaggggtggcgccgggtcctccaaagagctactagctcagcccaagccccgcctcggcccccagggcagcggcccgcagagctccacccggcaggcgcccgggaaactccgccccccggccggcagggggcgcgcgcgccgccggccccgccccgtggacgcgggttccgtgggcgttcccgcggccaggcatcagcaatctatcagggaacggcggtggccggtgcggcgtgttcggtggcggctctggccgctcaggcgcctgcggctgggtgagcgcacgcgaggcggcgaggcggcagcgtgtttctaggtcgtggcgtcgggcttccggagctttggcggcagctaggggaggatggcggagtcttcggataagctctatcgagtcgagtacgccaagagcgggcgcgcctcttgcaagaaatgcagcgagagcatccccaaggactcgctccggatggccatcatggtgcaggtgcgggccgctgtgcgggcggcggggcggggacgcggcgccccgggttaactgtgtccgggaaggctgggggagggcgggcccagggagcgagcgggcccgggccctcggagcggcacttggggcctatggggccgcggccgcccctcctcccgagcggcccggccgacccttccggaaggttttgctgatgttgcaggaaaagcccgggaaataaagtctgcagctggtgttgcctttcgctttgtgaaaacgaggagcctcttctcttctcctttctgggtggcggtgttttattactgccgttcgcctcaggggttgggggggaattgtacatggtctctttaagctaatctgattttgacctatcttgttctg

SEQ ID NO: 58751 - DNA, 1033 bp, Homo sapiens
ggcagtccgattcagtgaggctgcaccttttctcctggatcaagagccaaccccaggctgggtggtggtgcacacctgtaatcccagcactttgggaggccaaggtgggaggatcacttgaggctagaagtttgagaccagccggggcaacatagcgagactcccttatctactaaaaaaattgtctaaaaaaaaaagaaaagaaaaattagagccagccccagctggaacagagtctgccgtcccctcggaaagacgtgccttgactcagggcactgagctgactgcagctgttgggcaacacacgccccaaaccttcatccaccaggcaggaaaggagctgctggtgagccctgccccaggcctcggccctcatgtcgccttccctcccacgtaggacctacctggaggaggagctcacgaaggcccggaagaagcccagcctgcggaaggacatgtaccagaagatgatcgaggtggaccccgaggcccccaccgaggaggaaaaagcacagcgggctgtgaccaagccacggtacatgcagtggcgggagaccatcagctccacggccaccctggggttcaggatcgagggaatcaaggtgaggccggcgagtgagggcagcctcgggccccacccgtgcccacctcagggggcttggcttctctcagcgccctttggaagctgtaagcttctccaggcacaggctcagaatgtgggtggcccgccccaaggccagacatttggagacatcagcctattcctcaggcgggatggctgtgtagggggctcaggcctcagagcagagtggcttctagccctgcccagctgtcagccctctgccgaggactctccatttagcccagacggtgcctggcaccgaaagccaggcgagaggcacctgcgggatgcctgtggggtagctggttcattctgccatggctgcaaactgggactggcagacaattcggggaagggaggagcatgctgaccgcctttgatgttggagccagggtctctgagaaactgcat

SEQ ID NO: 58752 - DNA, 1034 bp, Homo sapiens
aatggagagtcctcggcagagggctgacagctgggcagggctagaagccactctgctctgaggcctgagccccctacacagccatcccgcctgaggaataggctgatgtctccaaatgtctggccttggggcgggccacccacattctgagcctgtgcctggagaagcttacagcttccaaagggcgctgagagaagccaagccccctgaggtgggcacgggtggggcccgaggctgccctcactcgccggcctcaccttgattccctcgatcctgaaccccagggtggccgtggagctgatggtctcccgccactgcatgtaccgtggcttggtcacagcccgctgtgctttttcctcctcggtgggggcctcggggtccacctcgatcatcttctggtacatgtccttccgcaggctgggcttcttccgggccttcgtgagctcctcctccaggtaggtcctacgtgggagggaaggcgacatgagggccgaggcctggggcagggctcaccagcagctcctttcctgcctggtggatgaaggtttggggcgtgtgttgcccaacagctgcagtcagctcagtgccctgagtcaaggcacgtctttccgaggggacggcagactctgttccagctggggctggctctaatttttcttttcttttttttttagacaatttttttagtagataagggagtctcgctatgttgccccggctggtctcaaacttctagcctcaagtgatcctcccaccttggcctcccaaagtgctgggattacaggtgtgcaccaccacccagcctggggttggctcttgatccaggagaaaaggtgcagcctcactgaatcggactgccttcactttcactccaagcccatcggctggcctcacaaagcccaaggagctcctcctcgggagacccccacaggaaccagcagaagaaggaagacggaggcagggcagcagggggtgtcgggggtggctggtcctgatcctgctgctacggtggagctaagagaggggactggggg

SEQ ID NO: 58753 - DNA, 1058 bp, Homo sapiens
agacctggaggttatgcccgtttgccctctgatttgttgaaggcagtgtttccgtacagcatgactgaggatgcctgatgggaaggacccggggaggatggcgtcacccaggaaccgttagcatcacgggagggttgggacttgatccagaaaaacacacagaatcagaccctccccaggcagccccactggctcggggcagctccaaggatgggctggaggtggggaggagtaactgcttgcccaggaaggctccacacccacctgccacagaaccctgggtctgttttatggctctgtgtgttgagcaggaggagatcattctgtgtaggccttggcccccagggagtagattcccatctgctcttcagaccaggaacttctgggaaaaggggaagaggaaaagggagacaaaatgtggcatgccctgagcttccccaaggcgagggcttcctactcccaggtgacgtggggagcagaatcgggagctggggcaggcttctctctgttgcaggggaatgtggctgctgtctgccggctcctcaagctcccttcgcctctgacttcctgtctcctccaatgcaaagatggttggggttttgttgtcagattttttccctcccactacaaatctctctccacattctctgaatattttagctctttcaagtcgggtgccaggggacaaaaccacaccagaggtctccaggcctctcttgagtttcaaagaatcactcccctccccaccaccaccacccctccctcaccctggtccggctgttttctgatcctttctttccacatttctctgagtgaattgaagctccatctttccctgcgcttctggagttcagcacgagactctcttacagagcagggtccaggttgcaacaggcaggggtgacaaatgtcagcagcaggcactgcccaccctgcctgcagaggagcagctaagcaaagctcagaccagtgctcttgtaaccaggagtgcagccacctagggagttccccagctggttcgcatccaagcctgtgaggccgggggttacctgaaagac

SEQ ID NO: 58754 - DNA, 1054 bp, Homo sapiens
aattgtgactggcttcattagcattttgggcagtggccccgagcagctgggctgctgctgtcaagagttgctttgcagatggaagacctccttttctgtcctctcctcttggccctcattactatctaatgccaaagatacagagtgggggtgactcttggcttgggttctgtgggaccctgaacacacgagacaatcctgatggggggcggtcaggagtgggggtggttacattctgagtttcccggaacagctctgcaaaacagctccccaagggatgttgtctaattcgtctttgcatttccagtgccagcatggtacctgccatatataggcagctgcagtttaaaaggctatgctcttttctggaaccctccagggctgcagggatctcttgtatgataatgtcactatttgccatttcataggggcttaatcattgctgaaccctatcagaagtgtgaaccctatcagaagtgctaagcccatttgttttttcttgccagaggcttgggcctgagacttggtatggcttctactttgggtgtatttctcctaaggaaaacgtagggcaattgggagctttatcctggtttctttttaaaaatagttgttacagacactcccttggctggtcctggcaaagactcttgaggttgtaggagctgctctttcctcctccccagacacctggggaagttggtgagctccttgaggaaactcggaagcagtatctttttaatctttttacctccatccctatggtcttgagtagagagccacacacaaaaggcccctggacaatgaggagcaatggcgatgctgcccagctagagatccttcccacagttggtatctgtgtggcccctctgtgccaagcaaggccacaggagggcaggagggcactgtgtctctaggtaagtgctccctacagtgctggaactgctggggctgcagtttcatggaacccctcagttttgccagcctcaagttgacaagtgcaaaagcagatgtggtttctgagctcattcatgttcctttacagcgggcagca

SEQ ID NO: 58755 - DNA, 1391 bp, Homo sapiens
gcgtgcatcaccacacccggctaatttttgtatttttggtggagatggggtttcaccatgttgcccaggctggtctcaaactcctgaccccaggtgatccacccaccttggcttcccagagtgctgggattacaggcgtgagccacggtgcccaataccttccagctttttgaaagagttggaagaatgaggagacctaaattcaaatactgccctggttaactttttaactgtggaccttgatcaagccagatcaaagtttgatttacccagtggttttcaacaggagtgattttggccattaggggatgtttgacaatgtctggagacatttttggttgtcacaactgtaagggtggtactgctcctggcacatagtgggtagaggccaggatgctgccgacatcctccagtgcacaggacagcagagaattacccagttcaaaatgttcatattgctgaggttgagaaacactgatggctaagcctgagtttctttactatgaaatgaatataataatacctagctccttgacttggaggctcaaatgagataagatgtgtaaaagtacctgataaaactgcaaagtgctctgtgggtacccagttcatcagttgatcagttgttattgaggacacgccataccaattggtaatgttgctgtcactaattaaagaagtcatagatagaaaggttgactaggatcagtctcagaaaagaaccttctagggtcctaataaaagcaatttccaatgttcttaagggtctgttatcagtagcctctaggggtatagttgttctaacagcttcaaaactgttcaaccatactttgacacagatttttctttttctgtcttttcatgcaccttggtgaaatctgaacacattctttatggcattcttcctgattttgtatcctgcatcaaaagaagaaatgagattggtttgttgaaactttttcttaatgaacacatgtatatttttagtgatttctatctttccctgtaaatgctcacaaatcacttgttaggtaatccagccctatgtttgccagtctgaagcttccagaatccaatttggcaaaatgttaggcaaatagttacccatctttagtcctctgacacctcttaaaggttattagcaatggttctgtgaatgcagagttgagttctttcagagctatccttgaagacaaggtgtgctgtgagaacccattgtgggtagggccgcatggatcatttgaattctcttttaaaagtgttgatgtggagctttttgagtaaacttgagttatccaggaaaggggaataaggtacaaatcaccttccctctgacccatggtgtcagcacaggcctttaattcaaaaacgtgggactggctcctatgacc

SEQ ID NO: 58756 - DNA, 1038 bp, Homo sapiens
cagcctgggcgaaagagctaaactccatctcaaaaataaataaataaataaaaaataaaaaaagattgtactttatttggcaataatgtttttattctgaattattctactaggtccctttatttccttgtgaaattgttcttaattgcgctggcctggaaatagagcccatatggtactggagggtgatggtttttcataatttttcttatgcaaccacccttagtgatgagtccctagaggattgaactgtgcctcattctgtggactggactttttggaaacccctttttgagcccccaggaagaaatttggctgagagctgatgcctggatgctagccagctggctgctggccatatccagccaccccagtcccctggccatctgtgcacctcggcaacagagtggcgactgacacacccaggcccagaaagccagacagactggcggctggaaacttcatggaatccttgtaattagaaatggaaaagacctgttagctcgagtggtatcctcctcctcctcccacaggccccaaccagctttagaaggtgacatataatttgccctgtcacctggagcactcaactgagttttctgggtcttatctgtgaaatccaagagctggaccaaatcagtgttttttaaccccttttgggtcttatgccattttggaaagtggtagaaagccacacaccctttttccagagagaggcacatttcacaggccatgttgccctttcaggacattgataacaagaagcctgtctagatcctagcccacagtcttcaggtttggaacccaaagacttgttgatctctgaagtccctctcagctcagaaaacccacattctagaaagttttctgtcaagaaccctaggtatggaaatggataaaagggagtctcttgtacttaacttggaggaaaccactgtccagcccaatgggtttcactatcaagtatttttatttattgttttatcatttattattttccaggattgagttcaacttgtggtaccacgttctttccca

SEQ ID NO: 58757 - DNA, 1018 bp, Homo sapiens
gttaaaggaatgggtgaatgaatgaaggagagaaaaaatccctgctgcattatctacccataaaagaaatacagaaccatctggaaggtgaagaacaaagaaagggaatcaagccctgggaatgcaagtttgttgcttattcctgtgactgctgccacagggataagggtgctaggcttgggtttaggagacttgggtgaaattccagtctacacatggctagcaagctctctgaaaaatggggagagtaagtgtgacctcatggagtggtgagcgttcaattatgtcatgtttataaaagtgcctagcactgtacctggtacatagtaggggtgtagtagtagtggtttccttttgttcagttgcagggttggggattactttaaggcttagactcaaagcgataggaatgaattgcttggtcagcagaagtgcacactgcacaccagcctcaagggacaaggtcaaccacgacacgtttgcaaagtgtttgtgcggggaagaccactctgatgtttcttacttaaaggcagggtcttccaactttgtctgatacggaatgacttgttacaatcatttcacaggcaagccaacactcaggcttttgactaacttgtctggcgtgtttctcaacaactccattaagaattcactgttagaaatctgatcttttctcctctgttgagctttacttgggcattttattgatttgatatcacttagtagaaacccattcaacaaaaggtatctcttcaggccactagtcaatacagcattttttatttgctgagatttttacttctattttgccccacatcagctggtaagttttataagtaagcaaaaagtaggagctatagacaataaggaagcagaatgaacctctgcaattcatatttatgtatgatttcacttggagtgggaggagatgttttttttccccatctttgaataagtagaaaaacatctcacgtaacctggggtggtggtggtgaattttcagctgaagggaatcctt

SEQ ID NO: 58758 - DNA, 1049 bp, Homo sapiens
ttgaggtgttacataagtcattttcagaatttttgtttttaagtgctgaattgctacagagtcacttttctgattttgttggcacatacctgttaaatgcagttccagattagattagtactggctagtttatttatattcctaggagtattgacaacattgtttaggcttattttattttgtcaggtctcaatttagttatctaaaggtagaattttaaggtatttaatggaaagaattttatatcttggtggaaaaaaaactacagactttggataatcaggaggtggttcagaattaacttgggaagtcttctaaagcatgttgtgatcgcagcctcagggtagaaggttctgtggattttggtgggagaggagaccttgggatggtaggtttatgcatatggtactctcaactccatgacaaggccttgctgtgatttttcttttcctcactgggtagaattggcatcatgaaagatgtatttttcagccatcaggggagctcattgttaacaaaagtcacaccaaacccaactatgaactctttggtaatttgaaaagtggagtggcagctgcctgtttgggattttgtattaccagttctaagatggttgcccttcctgtgttaacttaccaaaccaagtgacgatggtgctacaggcagtcccaaacaacatggagcagaaacaatcagcatctccttcagacccatgggtctggtccatctgactgtggagggctaccttggtgatctggaagaatctgctgacctggtcccttgaccttgtagtcaaatttgactagctaaagttctgccagacagctcttcattttctcactgggcccccttcattcaccccaactttctggtgaagacagcagccctgatccatttttccaggagtaaactattatcttaaatacagttcaagtctccttggttgacagacaccataaatatatatgatctcattaggaagttaggcctctgtgcttcctattaaaaaataacaaaaactaggccaggtgtggtggttcatgcctgta

SEQ ID NO: 58759 - DNA, 1039 bp, Homo sapiens
ctgtgtttgatagataaaagccccaccagctctgtctgaggttctaccaaactgatgtagcattctcttttctggactttgctgtgtctgtccagctactgcacaacgctatagctgcacactctcatgcttgctcacacttgcttacacttgccctcacacatgccctcacacatgctcacacttaccctcctatgctcacacaggttcccccttgctcaccccactcacacaggtctgaaatggcatgttcagcgttccagtcacataaccaacccctggccctcagacccacactagacactgagattgtttctgtgctgccctaccttcccacagagttaagcctttcgggcctcctgtggcgctttcttcatccttgctgaggaatgagtgtgtatgacttggtgtgcaggcagggggtgacagtatatctgcttagtagggatcagacacttgaaatttgctcagaaatagttgcattacacgcccagtgtgcaatggctgaaattcaggcacattcatgcttactgttctctgagatctgaacaaaatcaaattgcactgagcaaggatagtgctcaatcttttgttctttctgacaactaaaaattaaccagcggttgtttacttccctatataattctgtttaagagaatctggaccattgagacaccaggcttaaaatgttgtattaagatataaaagtaccttactttaaaaatagatttttattgatttatttcaaaattgttctgtcagttatatgtacaaaaaaaaaaaaaacaaaagaacgctgggcacggtggctcatgcctgtaatcccagcactttcggaggccaaggcgggtggatcacttgaggtcaggagttcaaaaccagcctggccaacatggtgaaaccccgtctctactaaaaatacaaaaattagctggcgtggtcgcgggcgcctgtaatcccagctacttgggaggctaaggcaggagaattgcttgaacactggaggtagaggttgcaatgaggcgagattgtaccactg

SEQ ID NO: 58760 - DNA, 1068 bp, Homo sapiens
gaatgaactgggagattcagaacgaaatcatcaccccagcccccaataagtccaaggatgttggatagaggggtgcaggtggggaacaggggtaccaagggagatcatggaatgtttccccagcctgcaatctcccctcctaaccaagaagagagcagacgccatctcaaatctcatgatttatgttgatgtcattgtttccagaccctgcgtcatcacagagggtaaccttcccaggctcttccttcgggctactgtctgacactcagcatttcctgctggtgcttgtctgcccccatcccccttggctctactggttgagctattcaaatgcctatgtaggttctgctgaattttcagaacttcacatgactcatcccatgcatttcagtgactgcaaagaaaagtaaaccattcccgctgctaaagacagttgtctttatgcttactgagattatataaatctgcattttatttttgcaacttcgcaaagaaacatttgatgggggagtaatgagggtaagggcaggatggggaataaggtgaaacagaagttacattgcgcacaaatgcgacatgcatctgcagatctttttttgatttatttctaaaaacattttctgggacctggagcctcatgcaaccagatttctttgcctgtgacccctcttctactttaaatatggatcagtacctcacttctctgccccattctcttgtcttctctactcttctaattccactgcttcagcctctacctttgctgatgcctccccaaactgcccagctctcttctctcctgaacatcagccttgtgtttaagacagcccaatgttaccaaagccagcaagtccaaattaaacccagtatgattggcccctttggtgtttcgattctcagtgaaggacctaaccacaacacctgttcatcaagctacaaaccccagaatcttcagtttatcttaagagtctggctttccttcttattcactgttcctcactccacctgagttagcaagctctctccattctactccaacttccaatgtgcctcaaagtcaccacttcc

SEQ ID NO: 58761 - DNA, 1038 bp, Homo sapiens
gcctgaatttctggagctctggcgtctgcaaggtggcctgggaaagagtttatggaacagctacagagttctaggtaccttcatgcagttgaggattcgagcccgtagaggagaatcgcctgcagcgtggccccacgggaaagcacattccaggcgcattccgaggatgagcggagaccatgtatggaaaggtagtgccaggactgtcatgagtgtcccagggctcgggggattcacccgtgaactgtgaggtcttggctctgatagacctggttcttatgctttaggaggggagacaaacagtaacagaatagacaaatgcaagagagagtgactctggacccctcccacaacggcctcctaacaatggagcatgagcagatacctgcaggatggagggtcctgtgcaggctttctgggacgcagactggccacctcccccaggccctgcaggcagccactgttagcaccgcctgagatgtgaaccttttctcctcccccagctgccatggtgtggacggttggcatggcgaagctggacccctcctctcagggtgccctccagctcccctacgacccggagatgggtgagtatcttggggagctaacagcctctcatcactggggggcagctccctacctgcacccagctctgctcggcctggcttccctgagaggcatgagttcaggaggggcagagggaaaggtccgttgaaaaccagccggacacatgcggcttgaagattcagcaagtgttggaccctcggtcctctgccagcctctgttgcatcgttctgctgggcgtgggtgggtggagtgggggaagccctggtgtcaggtgctggtgctcagggggaccccttcttggagctttgttccctggtaacactctgaccagctgttgtttctctctcttgttgtcccctcctcacggtgatgacggacatcttctcttcctggacacccagaagaagactcctatgacagttttggggagccttcataccccgaagtctttgagcctcccttgactggcta

SEQ ID NO: 58762 - DNA, 1003 bp, Homo sapiens
caccctggcctcccatcagctctacatctgagggacatggtgtgccacaggctgcaagctgcagggaattttcattggatgcagttgtatagttttacactctagtgccatatatttttaagacttttctttccttaaaaaataaagtacgtgtttacttggtgaggaggaggcagaaccagctctttggtgccagctgtttcatcaccagactttggctcccgctttggggagcgcctcgcttcacggacaggaagcacagcaggtttatccagatgaactgagaaggtcagattagggcggggagaagagcatccggcatgagggctgagatgcgcaaagagtgtgctcgggagtggcccctggcacctgggtgctctggctggagaggaaaagccagttccctacgaggagtgttcccaatgctttgtccatgatgtccttgttattttattgcctttagaaactgagtcctgttcttgttacggcagtcacactgctgggaagtggcttaatagtaatatcaataaatagatgagtcctgttagaatcttggagtttggtccgttgtaaatgttgacccctctccctgcatcttgggcacccctgggataacttgtgctgtgagcccaggatggaggcagtttgccctgtttgaaggaacttttaatgatctcgcctctctgcacacatttctttaactagaaagtttcctaagcaaaggagttaggagagcagggtggcctgacatctgccagccctgagctgtaaggctgtggatgctgagcaggtccctggactcagttgtgcacggtggcacagacactgccaggtggttgccaaaacatccagtggttccttcagcaagtgttcaccctctgcagaagcctgtgagggcctgagctcagaaaccactctcctttccttctctggctttggccctgggcactgtggtgggagagtggacagtttggctttgccttctctgtacatcaatcatggg

SEQ ID NO: 58763 - DNA, 1029 bp, Homo sapiens
ggtcacccgcgcttggtggccttgctgttggtcctccccgtcggccctcatcacaatatatgcggtgtcatctgggaactggaggacctggtggcaagtccctgctgttcacggggctggatgaggggtcctggggacagtccacatgaaaagaaatgttaaagttcaagctcagagcctgggccccagcccagtgtttgttctgtgcttggcacattttttgtttggcactgatactggctcagaggagggtaaaagtaagagtcgattgcccggtaagctgaaggtggttactgtttgacacgtgcttgagcaaacatctctaatcttcccgagattgaaaaaatcctgtggctcttgctccctaaggtgtttacagccagcatgtggtcaagggttggacattgtgctgccgcgatgcctgttgtagctgctgtttacacctgcttggtgctcacggttcatgggccagggctgattggcctgctgaggaacagctgcctgctggcttcagcccctcctcttttccctcagtcttagacagggacgggggtgacgcagaggaagcagtagcagtgactgcgtcccctgctccctccctgggtctgtgtgcccaccatgagcgggattatgaagctggcttggaaactcatctggcttttgctcctgtaaaaatcactttttgaacagggtgctgctgccatttctgtggctgtgcatgttggggattcaggttcccctggtgctcagcctcctcggtggtctcttcagtcctgggctctcgatgagggagctcaggaagccacggagcctgggtgcctgggtcctgcctcactgactcataatgctaataaactcgtgtgtatgaggacagtgccagaccccgttgggggtacagaactgggaaagagagggcccctccctccggagcttaccttgcagtaagggaaatgggacaggcacacacagagtcatacagggcatggcgaggtgaccttaggccattaagagatgagggagtttagagga

SEQ ID NO: 58764 - DNA, 2014 bp, Homo sapiens
tggaggcctctacaccccacgtcccgcagggcaccctctctcctggcagggccatatgtggtgtcttctggccccagtgcctggacggcaccagaagcttgggaagtatttgctaaatgagtgactttgggggcacagaggggcccccagcaagcttgatttggggtgggcaaggacaggggacaagtgattgctttttggggccagagctggtgggagggtggccgtgagctgttcccaggggtgaggtgaggcaggagtaggtggacaacgaggctgtgatggggtccaggtcacggcagcatggctgggtcttagctctggttctccagggtgtgggctggggccaggacacagctgggaagccagttgggggttgggggagtgccccaggcagggcccacccgtctccctgggctaactcccctgcctcacccatacccccacagtaccctggcgtggcccagagcatcaacagtgatgtcaacaacctcatggccgtgttgaacatgagcaacatgcttccagaaggtctgaggctaggtggttgggtcaagggcaggagtgggtggcaggcatctgtgttgggttctggggaccagagggggtcctccctgcagagcccccttcctcgctgatgccctcctccctggcccaggcctgttccccgagcacctgatcgacgtgctgaggcgggagctggccctggagtgtgactaccagcgagaggccgcctgtgcccgcaagttcaggtgtggcccccggccgggccccttgcgtgtttgcaccagggaggcagaagggaccatgttcagcagctggtgaaggcccctccagctctgaggggcagagggctggggttgcagcctgggccgaggccatatcctgcctggggtgaaggagggccctctgcctggttggggggtgtgtgtggggggggggacggtgtggagggcctgtggctagggcgtgacctccctcccctacccagggacctgctgaagggccaccccttcttctatgtgcctgagattgtggatgagctctgcagcccacatgtgctgaccacagagctggtgtctggcttccccctggaccaggccgaagggctcagccaggagattcggaacgaggtttgtctgtgccagcagacaggtggggccagggtggccctgctgtgtggctgtttggtgacctaatagtgtgagctggggacttggagccctgaggtgctccctgggggtgaggggcagtgaagtagcaccagtgggacttagggggacacaggggagctgctgccttccctggcccaagtaacactgggaatcaaacagtccctagggtagggtgggtaaaacaggaggcaggggcttctctggccccagtctcccagggcaccaggcagtgtggtgctgcctgacacagacccttcgcgctgtccacagatctgctacaacatcctggttctgtgcctgagggagctgttcgagttccacttcatgcaaacagaccccaactggtccaacttcttctatgacccccagcagcacaaggtgagccccagggtgggggcacccgcagccaggcctgagagcttctccgaatggggcacgtgaggccctggactgccccttgtcctgggaaagtcagcagagagctcagggctctgggagtggggatcctcactgccctctgttgcacccccttcccggccccacacacccgcaccatggagcaccagggccaaacttctcctggtgtctctgtccccaggtggctcttttggattttggggcaacgcgggaatatgacagatccttcaccgacctctacattcaggtaactggagaggggccctggccttggtccatgtttttctgaggctgggacaggatgctgggggactcggggtagggagaatgactgggttcctgcccttgtgtccccatctgcgctgcctgcccctcaggtctggtgacagcaggcagttaggctgacagctgccaggcgtggt

SEQ ID NO: 58765 - DNA, 1200 bp, Homo sapiens
gtttatgcccattaccatgatgtaatccagtttacagcagagctttgaatgagaactcagcgccccgggcactgtgggaggaacccgggctggtggagggctctggtgtctcgccgccatttatccttcctctcttgccccaggtcatggaagacgcccacttggatgccatcctcatcctgggggaggccttcgcctctgatgagccttttgattttggcactcagagcaccaccgagaagatccacaacctgattcccgtcatgctgaggcaccgtctcgtccccccacccgaggaaacctactccctgcacaggaagatggggggctccttcctcatctgctccaagctgaaggcccgcttcccctgcaaggccatgttcgaggaggcctacagcaactactgcaagaggcaggcccagcagtagggctgcgggccacgcccaggccggctccgcgggaactctctccctcagacaggccaaaaaccagtagcgaggtcgtggtgatgctctttttaactcctttgcccaataaggggggtggctgcctggagccccgtagccagcgctttccacggtttctgttgctaaatggttgtagggtgagaagtgcaagaatgaagatgaagccccactgctcggtcagtctgcctccgtgtgtcctctgaaataagcagatgaagatgaaagggcaactttgttttcttctttttcctgatgtgaatgttaagcagaagggagagagtccttactcccttccaatctctgttcagtgcaaaacccagaaacatgaacagatacgattgtgggattttatcatctgtgtagtaggtgtgtgtatgtgtttctagagtgagatttgtgttttctgcccttttcctctccagccgatgggctggagctgggagaggtgctgagctaacagtgccaacaagtgctccttaagcctgcgaggcccaggcctgtggggctggttctcacctttgacagctgaatgttcctaaagaactgctgccccacagtgagggtgggagcagcggaacagggaatgccagacacaggctcgctgctgctggaaggcggggtgggacttccttcctctgtccggagaggcacaggtgtcaccagttccagccaaaggctcctcacaggcgctgtgaatttttgtacaagtcttgtaattatcgaatcaacaact

SEQ ID NO: 58766 - DNA, 1116 bp, Homo sapiens
ctgagatgcagtgagggaagaaaggatcctgctggggattccattgtaagcacctataatcgggaattttcatgtaacagctttgacatttaaacattctgagtttggtgccagctcagatttgattatattttattttggatgggtgtaattcacagcacagttctaatctcccaaatctttctgctttttagaatgaagtataaaaatacttttctcacctgaataccaagggttggccctttagttggatcattgtcatatgacttggtagatccttgtcctcagcacctcacgtgagagaagggagtcagccagccggccccctgcttggtgctcgtgaccagctcgcaccccttctgtccacccttctctcctctcctccccactctccccaccctcctcactctccccaccctcctcactctccccaccctcccctcctctcctcctcactcttcccaccctccccatccccaccctccccatcctcctcttccctttccccttgccttctcctctctcccttctcttctcaggcagggaggaggccatcccaagccgagattaacaggacttgacataagccattagtttgtagctttgacaagtaattatgaatttttgttgcttataggtgcttattttgcaaaggatgcttttaagatcaaaataataaccctacctaaagtctagctccactgctatgggtcatactcttcagcctcccaacagggcagagagagagagctactgaggcttgtctaggttgccaggctaactgggcgacttgtccatattcaccccatggattgcaccatggcactctttgatttttccactgcaatggcaagtaatctcatcagtcataatagagcagtcccgaatgcgtgcagattctaaaagcagggctttaggagagaaacactgccagggggaatagttttggggagggttttcccaaaataacggtcatcctactgggtttatcccacccttaaatatgaagcctgttacctccagaagcttctgagaagaatgatgtgaaaagacagggagtgggttctaggcaaagaaaacataatgaccattcagaggagtcagtagcacagctca

SEQ ID NO: 58767 - DNA, 1429 bp, Homo sapiens
tatcagagatccctcctctacattttcttccctcttccttccaccactttaagaaaaaaaaagagataaaaagaaaaaatctgtatcttattttttgttcaaaataaggtctatattgataagcaaaacaagtgaagatagcattttccacagaatcattagactgcttggtttttagtgtttgttgtcacctgattttgttaacacatgataatcgttctttttggcattaacacaagtgactttttgccctctcattgcatttcagtttttaatgtacctttcattgctttaatgttttcttatcacgtaagtgcttttgtatttccaggacaagaagttggtgtaaatttttgaaacctgtttcttcacctgtacatgtagtatgcatcaaagattttatctgtctgaattcctcttcttcacaaccagattttattgtcacatgacttttttctatttcactaccaaaggacatataacctggggcttttttataggcatccatttaatcatctaacaaatatttattgagcacttactttgtgcccggaaccatctttatctcagagtagacactagtaaatacaataatatgcatgtctgaaaataataataatatgcatgcctgtacttgtgtatgtatctattgaaaagcttgtgatattttaatgtattctcagttgttaatatgttctttccattgaaatggaattattacaaactgtctcataaaataaagatgaattaaatttatctaaagttaacatatatgtttttaaataccaaagccacatgttgtcatctattcagagagcatgtgtcccagacatttttatattttaatttattcaaatcagtattgctttcctgtgaaatacttataagcttagaaagtttattgtatgtctttagaaatttaattctgttgcttttgtgcaagatgttcttgaaacagaattgtttgctttttgaatgtggaaggagaagtgaggctaagggagtcatattcctctatcagatgcaaacctttatttgtatctaagtgagccaagacaatataagcattaatataagatggtgtgtgtggcttataaatagatgctatattcattttcttgaatttttaaaataatttaccgttttaatacatggttgctatttgtgataaagaacaaatttttctctaatttggatgcaagaataatactttacctctagaagacttatttttagcacattacatttctcctagctttttatccattactaaaattgttaataaaagtatattttcgagcttagtgacatcctggagctttaagatgtaattttgcttcttaaagtcaaagtttcatgtacgtcagtacaacctcagagggtactgattttattcatatatctagaataaaaacaagaccttacagaa

SEQ ID NO: 58768 - DNA, 1024 bp, Homo sapiens
tctaatgtagagtcagagttggaatgtctgacttttttgtgtagctctttcaataattccctttgtaaccttagtttaagtaaaccattgaatctttctttgcttgtgtcaccatttgttgatattcattctttcaacaagtgtatattgagcatctaccctattcatgtaactgtgctacagtgctttattatacattcttaacagggactagaacacttacctgaagatttctctgctttctaagtttgattcactgtcaataacttaactacttttaggaatcaaatagttcaaatataatgaaattcctttatagaactcatgttgggcaaagaaatagtatacccctggtgtttacagaatccgtctatattataacggctatataatctgaatcatggtataccagttcctcatttacgatatatgttctgtttgcttcaaaaatgttttgatttggctactatatgatagccccataggatttgggtgggattccactctacagttatttagtgtagacctttcaaaatatttggggtttaatagttaaaagtaatccgcaagctgcccccccttcccttctcccaggttacaatgcaccatatctctcggtgtacagtgaaaatgcagttgatatctttgatgtgaactccatggaatggattcagactcttcctctcaaaaaggtaatttaacattaaaatgtgggctaagccaactgagtataagtgaaaacactaaattactacatagtaattttttttttattaattcaacattttctggaatgtgtaattggcagtttgggacttagctaagagtgagaaaatagaaacagaaataaagttggttaatttccttatgcctcactaaaaccatactaattttactatatttggtttatgcaaagtatgattgttattattatgaacaactagaatatatcctacaacttaaaatgtcagtgttatcttctacttttggattaaggagctctgagagagtacatgattattat

SEQ ID NO: 58769 - DNA, 1381 bp, Homo sapiens
catataaaaacttctgaaaaataagttctctgtttttaaaaatgggaatcctatggtgacgttccctagaatttagtgccagtagaaaagtttccttgaagatttggcatacttttacacaagaatcctttggggtttgccttggctgccagaaatctcaggactcaaatttaatacgtactataggtgagttaaattatcttatgatgggttggataatctttttttcctgtgacttctgatgtcttattcttccgtatgtgcatctgtaagttgacttacatccttttgagtataattgggatatgattaatcaataaaactatattttgatttattattctttctgtgtttagaaattattagagttggtgacaataagaagattcatcagattgaactcattccaaatgatcagcttgttgctgtgatctcaggacgaaatcgtcatgtacgactttttcctatgtcagcattggatgggcgagagaccgatttttacaagctgtcagaaactaaagggtgtcaaaccgtaacttctggaaaggtgcgccatggagctctcacatgcctgtgtgtggctatgaaaaggcaggtcctctgttatgaactatttcagagcaagacccgtcacagaaaatttaaagaaattcaagtcccatataatgtccagtggatggcaatcttcagtgaacaactctgtgtgggattccagtcaggatttctaagataccccttgaatggagaaggaaatccatacagtatgctccattcaaatgaccatacactatcatttattgcacatcaaccaatggatgctatctgcgcagttgagatctccagtaaagaatatctgctgtgttttaacagcattgggatatacactgactgccagggccgaagatctagacaacaggaattgatgtggccagcaaatccttcctcttgttgtaagattctctttcttacggctgtcttatctttatatctcttcttccttttcccttctacttcgtctcccaaatgttgtcattgttgataacagttttttaaaaaagtcattcttaatgcttttcctcagtattgattatgttgttgatgtaaaaaccatatgtagttaggcctgggcaaacagggccagcattagcatgcacgtaatttaaacaaaacatctttctgtggaatatttcactaagatggattttttaccccacatcatattttgaaataacccagaattgttatctcatggtcccccaaaatatggtgcttgtaagcatcagtgtttcacagaacttattctggagaagtagttactaagtgagttatttaatcaggtatgtaaaggtataatgtaacatctataagaggtgttttttca

SEQ ID NO: 58770 - DNA, 1913 bp, Homo sapiens
ttgttgttgttgttgttatatatttaatgcctctttagtgatagtgttctggcacttttacagaaggaaaatgaaaatgatactaacatttcaaatggtgtctgccacctttgctttgtcatgtattctagtgctaaaggtagttattctgattaggaatagctgaactccagtaatggtatcatttaatgaatgcttattttattggtgagtgctaagcaaactaacataatcatgaaactagcataaagggtgtctgttttctaatatcatgaatattgattaaattgttctaggtcacagcttcccagctctcagcatctaataacaaatgttcaatcctgatgctagcagacactgagaatgagaagaataagtgggtgggagtgctgagtgaattgcacaagattttgaagaaaaacaaattcagagaccgctcagtctatgttcccaaagaggcttatgacagcactctacccctcattaaaacaacccaggcagccgcaatcataggtatgaatttataacatttatcatattattatcattgtttactaatctaccttgagaacagggattggctttcatctaggaatccccagtgtccaacatactgtgcatcatatcataaatgctcagtacatgtttactgaatgaatgagacctatatcagatctttgtttttcagtaaacaggagtataaatacactttcaaagtgccttttttttcctgaaaaaacaacagtgctaagcattagcctactaatctattttctgcttgtgtgatttagaacaagttagtttcttagagtttaatatataaaatacagatggtaattaccttgctgaggttattgggaagtttaaataagatggaatacataacacagagtgccctgcataagaaagaaatccccttaacaaatggcagtttctgtgtctggaggtttaaatttttgctgtattcctgtgtatgcatctaactcttttgttactttccataaatactgaaaagttcaatgagtatggttcaaatgccattcacaatttttacctcccaaaacaataagtgtagaacaacttaggtttttcattttgtttcatcatttattaaacatttacttctttttgtaagtattgatatggattattctttaataattgttctattttagaagacatgagagatttaccagtataatctgaaaggaaatagtgtaaactgttattgtaattcattttatttccattttttgcaccaaatgttcttatcatctggtttattagcattacatggtttttttcctaataaaaatctttcacattcatgtcttacatagatcatgaaagaattgctttgggaaacgaagaagggttatttgttgtacatgtcaccaaagatggtaagagaaaactttttttttttggagtaattttaaatcgtgttaaaaaaatttaaactgtagattctaaattctacaaagagcaggatttgctcttatttatcctgcgactaaaattttccagacctaatttgacgtttataaattaaaagattatttttaaatttctataatccccctgaggtttaaaacttcaaatatgtattgtctttcttgtatcattttatttaacagttctgtacgaactcagattgcatttctttttttttttttggagacagagtttcactcttgctgcccaggctggagtgcagtggcacgaactcggctcattgcagcctccgcctcctgggttcaagagattctcctgcctcagcctcccagtagctgggattacaggcatgcaccaccacgcccggctaattttgtatttttagtagagatgaggtttctccatgttggccaggttggtctcgaactcccaacctcaggtgatccacccgccttggc

SEQ ID NO: 58771 - DNA, 1441 bp, Homo sapiens
aataactcctaaaatttacctttaacttgtacttttttagtcattgaaaaactccattttcaaggattggtagagtttgccaaaccgaagatgtcaggtagcttaatgcccactagtgacccttgcaacagaaatttcaaggcagataccaagttgcagtgggatgaagagcaaaaaactctagaaaccactcttttagaaaatctaaatcaatcattttattcacaaggttagatgcttcgtctgttgcttctttttttgatcactaatgtcaatacagaacagcagtaatacaagtaattttttaaatatttactatgtctcattaaaattgtcattggtaagcaaatgaatcagctacccaaatgataaaacagttatttaaaataaaattggagataagcattcatctaacatagcatcttgtatgcagtgagtgttacgaattttctttttgttaaaatgaatttttatcaaacgtttcttttttccctctaaaagtgtgtggattctcatgccatataacttgtgtaaacaaagctccaaccacttgtccagttcctcctgaacagacaaaaggtcccctgggtatagatcctcagaaaggaataggaacagcatatgaaggtcatgtcagggtaagtatgattaagttgggtttagattaatcctttaagatttattaatgaattaaaatcaaatccagttagtttaagaggatagttcttgatggaaaattaaatgaataaaattcatctaataattttatttcatctagaataatgatttgcaaacaaaaacctagcttttacatggaaataagttataaaatgtctcaagtttttccatattgttcctatcttgtgatgaaatcttcataaaggagtttgtggcccctgctcttgcaagagaggtggcatatggttatgaattatgagctattaaggcatagtcttgttatcttgggtagtatttacaatgtaagctgaacttcatcttacaccaagtttgacttttatgctatttagaaagaaacccatgagtgttattttaatgaaatatgagtgaaagttaaaatggtaccattaaaatgtttctcagaataaaaagtcattctgtatttgaagaatgtgttctcacattttctcatagcttaatgatatgtgtctcatctgctactttaccaaccagaatggcagacttataaaacgtgtacattatctgtaggtcttcaccatgcaattacatatgtaatttaagggatattttcatttgagttgttttggctgtttgtctgtctaaaacaaaactaagattcctaagccagctggagtgaagaaagggtggcagagagcactggctatagtgtgtgacttcaaactctttctgtacgatattgctgaaggaaaagcatctcagcccagtgttgtcattagtcaag

SEQ ID NO: 58772 - DNA, 1019 bp, Homo sapiens
ctctttttcctaagaaggtataaagcatattaaaatcctatatttgtatcagtataaatatgcaatattttacttaactatttgctgaacaataatttggataatttattaaaattctgaagctaagatttatgagccccccaaaaaagctattgtttattttatatacttttaaaatggcattgaagagcaattatcatttaacttcttaattattttagcttagtccagttcaaattacctaataaaaatgtttaaagaccataaactataagaagatgtaatgagaaatggaaataattcattctattcctatttagaaaacattctagaaagtggtatggggcataaggactcacattatggaaatcttttaaacaatctgtgtgtttttttatcaatttgttttgcagcgcaagactcaccagttttttgtaaaatcttttactactcctaccaagtgtcatcagtgtacctccttgatggtgggtttaataagacagggctgttcatgtgaaggtaagaacacaaaggaaagaaaatgtgacttcactatctaaattgtaatcaaataagttgattctctttcaaaggtgtataaatgtttgttttacttaatcatttgcttttttgcataacaggaatggaaataatctgtgttgtctgttgaatgttcgagaaactagacatatttttcaggggcaatatatttaaatatggttcatttgtctttgttttgttattaaatttgtagtccctgccaaaaaacattaacctgacagaagaaaattcattgaattttaaccttgtttaatttattagagaaattgttattaaaaagtagacagtgtgggaaccttttcagaaatattaaatgtctgccactatgtctgaaagatattttattcctgtattaatagcagaggtttttttttttcccctaacatccatgatttattcatcacatgtttatggaacacccactgtacttctaggcactggggacataatagtggata

SEQ ID NO: 58773 - DNA, 1518 bp, Homo sapiens
attttcactcccccagcagtgtgtgtgagttccccatttccccacatcctcacctcacagtcacacattaacttttgccagcttgatgggtattaagtgtcatttttgtattacatctgttttctagtgttattcagcatctttttgtatgtttattgaccattgatgatttgcctgtttgtgtcctttgttgttctattgaatcatttttcttatagctttttgtgttcattatatactctagatactaattctttgctagctatatgcattgcaaatattttctcccagtctgtggcttattttaaaattttatttgtggtgtctttttgtcttgcaaaagttttgattttaaaatagtcagatttatcagtctttttctttatgacttctgctttttatgtctttttaaaacagttctctatgcagagattataaagattttcttctatattttcttctaaaagtttttaaattttgcttttacttgtttaggaccttaatcaaactgatatatattgttatgtataatgggaaatgggcttctaatgtctttttcccatgtgaacaagtgaccctgctatatttccccccatcgatttgtaatggctatttctgctttatatgcatggatctgtttggatactctcaattcttttccattgttcttttggtttttcctgcattggcagtaaattgtcttaattacaattactttcactctaaaataattcctgatacctggtatggtgagccatcccacataccttcttccttttcttcttgaccttttagtttttcatattacttttaaggtcagcttgtcaaatttcacatggggcttttgattggaattgcattaatgtatagatctatttgaggagaattgacatctttcatgatactgggtattccatctatgaacatggtatacatattagggattctcttatatccttcaataaagtttcattattttcagtgtatttcatattgcttgttagatttgttcctaggtaccttaaattttttgttgctgtggtgactgggattctttttaaatacattttcttactgtgcattgccttgtctttataaactctagatcttgtatccagcacccttgcttaattttttttaattctaataacctttggactttctatgtaaatttgacgactttgtttcctattgttttttattaacttttgtatagattttcagtgttcctctcttttatctttcatatgtatcttttcaaatgttaaattataagtttggtttaaaactttttcaagctatttaaaagtaaataaaatctaaattagagctaaactcacaaacagaaaactctgagaaactcaactgaattttgttttaaggctgtagtgcttataaaatattctgtttttggaggttgtatggtaacaaagatagattgttgtatagtaacaacaaagatgaggttgtataataacagcaaagaaaggaccatccatttttcttataatattttaa

SEQ ID NO: 58774 - DNA, 1514 bp, Homo sapiens
atcatacattgctgatagtattctacattaattatcaataggaaaatatccccaacttgagaaaacaatttgtgcccttagagattgaagccacatgcccagagttctgttgagctaaaaacaaatctatgaagttaatttctaggggaaccttcttttccaagtgtttctactctcaattatttatcattcattcaaagtgaaattttgcttttcacttagttttgagtacaagggcattgtattttaattcattgttttaatagttctactttgccagcagtctcaactgcacctgactctttcagcagtggcatttctaagggatacgttatcatcatgtcttccctctaaaatatagccatagtaagaacaaaggaaaataattataagttcatgtttaaattcttaaactgatggtgtttttatgatttgtgatttctgatctaaacattgttttgctgtacaacatattcaaagtaagttcctgaaccacttttccaaattaccttcattgtcctttcattttaaaaactcaatcctagtaactctgaaacttgccatacagactagtatggttcaatcagtatggttcataagatcttttatgctaaattttaacccaaagcatttttaatttctaaaaatacttggtgtaaaaggatgcgactgaatataagtgctggtttttctactgatgcaaaataaagggaagacttactttagtgtcctgcacaaaactgataggttaggttttttttactttcagttaatgagtagtaaaagaccaaacttcattcttatcaaggacaaagttatctttaatctgccgtatgtatctctattaagtacccggcatttatttcacatgtatgattccttttgtgaaataaaaagttccatgtggaataccaacatagaatgtgcagtaggaccagggctcaaagtaacagatcaacagtgaagatcagggaggagcctttggttaactattctgtcaatccttgtttacattaaaggtagtggttatgcttttgtataatgatgtatccctaacgtgaatattcaaactaaagtttgttatcctcctttctcaagaaatgttgtcataatcatgccttacagaaatttgctaagcctgcacattgttgaaaagtgattttttgggtttttatttttcccgacttattttcctagactgatcccgttgagaacacatatgtatggaacccgagcgtcaagtttcacatccagtcacggtccacatctccttccacatctagtgaagctgagccagttaaggtgccttattggagcatccctgctccccaacttttcacttgtgtcagaaaagagggaattgaataaaacaagtctgtctctctcctcttaaccaaatatgtaataagttacagtctattggagatcattacatttaactgataatgtaggtagaagtaaaaaactaaagagcacattgtcctcaaatagtcaatctgaaatagacaaaacta

SEQ ID NO: 58775 - DNA, 1202 bp, Homo sapiens
ataaatggcatagttcaactttttaatatgcctaataccatctcaaaatatttcagtattttcacttatttttaatattttttataggaaaaattacttgattttgtttaaactctgaaattgatttttatttaagagtatatagttctaaaaagctagtatggtaaatttcattattctactttattacaattaaatattttcatttaaattaaatattttctatttctgaataaccaccttttacctcattcagcaaagaaaatcacttttaaatttgtccatatccatattctctttcatttttattgttggagaaaaactagttaggagaataagacttgacagaggagccaagaggtgtgtgttaaaagcctcaagaaaagagttactaatttgtgtagttgcaaattaaattgatagtgtatttttcctttctccaatatcccactgtcataataccacattttcataggatcagcaaacatgctggtaaatgttttaacaaccagctctgggactagagaaagccctgctttttaggttcactgatttcatgatataaccttccattagtccatatactgacaaaatggcttaaggcagtattttctaattttaatgcgagaaagtagaagacagtatgcccaacttctgtcagcatgtgtttaaacagctcaaagagcagacctgctgtaaaatttcaaccagtgctattgcaaacagcaaatacttggcctttcccatttttaaagagtttttgaaataatcaaacccagataatacaaagccgttatatcagctattcacatatacacagcattacctttcacacaggaacttcgcattttgtgtctttctgtcaagctgtggggctaaataaagccttttgcaacaggtcagaaactttacaattttcttaagatggctcagtttcttacacatagaaagtcccctacttagataccttaaaacttcttgagatgacatttcagtcagttttaagttcttactggtataaaatgtatcaattctgctttgcttctcagttccattttaactaaagcccctctccatggacacctaattcttgcaatgtgtataatcttatgaaaactaggaggaggagatttttagaaactaaaagacatttctgccatattcccaactcagagtcatatttcatatttataatctaaact

SEQ ID NO: 58776 - DNA, 2328 bp, Homo sapiens
agaaaacttgatcattcatgttgtacaacattcaaaaatgatttggaacaaattatacatcttattgactataatttatgtaaatcagttctagagaaatcttgtttttttttttttaatgtagttcagaggaatctcccaaactaattatctagatctgaggaaataatgttaataataaagcctttctattctaagataattccaagatttaaaaaatatcagtaacattatttatatatgtattattaacaaactgtaaatatcttcctatactaatcctagctctgtgtttctcaacttgaaatgagtcagccactacctctgtgctacaagattctgacatgcccagagatggaatttttctaaaccagccacatcccaacactagtcataaacacacatacatactccctatttgaaaagcgacagggtagctgacagtgttgggattttcatatactatgtaaaatagtaacattcaaaaggaaagtcagtgatggatacaaattcgtaatgttcaccagtcatctccgtggagactgatcaacactttacattccgaattcttagactcggaaagttctagatgagggaattctgtggtttgtggtaggcatgggaagcagtaggggtggcctgctgcttcctgtggtcctgtctttctggtatgttggagggttggttgtaaaataaacatgaataactctaatatagcatatataatattttcggattacagcttaataatgaataagcatttcagatacctgtactatggccagtagaactgcattcaagtgatatctcattaattattgtgtttatgaaagattactagttcaactgattgcttgattattttgaaacttgtagagacttaaaaccattagatatttggatttatcaaatgaatctgaatatatgttgattacattacataacctctagaagggaaaaccaatatgttgtgtgcccagttatattagggtcaaatcaccagcccgtgaattgactaaatttttaactacttgctgttttttcaataaggttataatttaggatttgtttctctcattttattatggattaattatgtctcacttgccttgcagactttctggggccttggacacctagaacattttttgtgaatcttgaaataagaaaaaaattttggagggaaatagctgttataaggtctctccttaattctatgtctttattctatgagatatgaataaactataattaaccataatctattgacttattattacatatgattattttaaacgtagatataataggcttggttatctgctttcctggcctccttcaatttttctttggttaagtatctcacaaaaaaagtcagccactgaaaagtaatagtgcctgtgaagatgcttgaagaattacaaattactcagctgttaaatagaagcatctcagtggtatagtgtagaacctcagtgttccctgggacatcagtgtatttcagtaggacacatgcagttaccattcttaacaatggcctctgttgtaacagtagcataagattttatgttatataccatgtttttagacaagaaaatatgcagtattttaataaatttaaaattaactatgaaatgtcatatgaatgaggtagtattacaaaataatgtttcttgcattcttgtttctagtatgctattaaacctcatttacagtttgaatgattttctttataaatagtattaagtatagtagaagaaaaagtttttattgatagtattgttaatgtccaaatacaaatgatgagagagatttccacagtgctttcattaatagtgagaaacactgaatgtattatttcagattgttcatttagagtttggagcagagattttatagcccacgtatggcttaactttctcttatgttttcttagaatatgtgtaaattctccagactagatattccaatcagtatattgaaaataacttgagaataaattttcttaaagggaaacaaggtgcattatgtataactagtaagcttacccttactggtcacaacctttagtcatttgttaggatttgttctagcgcaataaaatgtatttactgttttccaaatgatatagtacttctgtaatactgtttttgtatcataagttcaattaacagaaataaatatatcactaaaagatttgagtttatacttgttctcaatacaaaatattaaattaccttctactttgttttcaaaatacttctagctagaggataaagaaaattgatagaaactggattttggccaggcatggtagctcacgcctgt

SEQ ID NO: 58777 - DNA, 1035 bp, Homo sapiens
tataaacttactcctgtatgtgctccactttcatggttgcctgtaatggtataatatctaacaaagtctaacagaattctaaaattaacctttgattttgtaacatttttaaatttaataatttagttcagggtccacaaatgttttctgtaaaggttcatttagtaaatattttaggctttgattagcttccatcacagcttctcatctctgctattgtagtgtaaaagcagccatagtcaatacttaaatgaatgagattggctgtgttctagtaaaactgttaatctacatgaaagtaggtagcaagctgtatttgttcttcccgcagtaatttatagtcccctaatttaccatgcctgacatttaaaccaagtaagtttggctacatccaagatggctcactaaccagcaataaaaattaatgacatttttccttttttctccttatttaagtaaactaaaagattcagagaagaagaacttggaactactctcagaaatcgaacagctgataaaggacactgaagagcttagatctgaaaagggtatgggagtgtgtgtttgcctcactcaggacttactgttatgttataaatatattttattacagaagaatcaattcattgcataggtgggagaattgttgacataagcaattctggcactcatttatgaatatacgtgtgtatatatgatgcatgtgcatacacacacatttggaagactgacctctgagtcattttgttttacttaatatgcattgtttaatgatttcatagtaacagaaaaagacactttgccataaatttgacgttttttttcagtgcagtggactacttcatgaataacatttttgtgattggaaaaaaattttattttataatgtactttataatattctcaaatgctatgatatgaggttatcactctgacagtggcaatgtgtgttaacatccagaacttggtaagggtacttgaacaagtatttcctagcactttttatgtgcctagaatgtataaaaattggggggg

SEQ ID NO: 58778 - DNA, 1042 bp, Homo sapiens
caaagaaattatttaagactatctttgaatttcctaccacttatttctttaggaagctttaaaataacatatattgcactgaagcttttttgttttacttttgtactttgtctttatatattctagggtcagcgatgaaaaggatgcacgagggtatcttcaggccttagcttctaaaatgactgaagaattggaggcattaagaaattccagcttgggtacacgagcaacagtaagcttctatgattttgcatggaggcttatcatattagaaaaaagagatttaaaaaacactataataaatccaattacttatatcagtttgtttagactttgagcctactaaagagttttttatgagaaaactattagtttgggtcttttccagtttagaaaaacataacacacagctggttaactataataatttaaatgttaaaaataggatggaactaaaaacacagtcattatttcataggatatgccctggaaaatgcgtcgttttgcgaaactggatatgtcagctagactggagttgcagtcggctctggatgcagaaataagagccaaacaggccatccaagaagagttgaataaagttaaagcatctaatatcataacagaatggtaagattgaatcatatagtcccactagaataatttctaagtttgtcataattatttggagagaagttacatgtttagtttccattgcttgcttttagaaaaatgatggccaaatatgttacaaagatttgaaaataactagatgcttttaagccttgtagatagtgatgaggttttaatatagccttgttttcctctggcttgtccataaagtagaattaatagtattaaataatattccattatttaattttcctcataaaatttagttgactctcaaattttattaaacctaaaattctctcatgtttaggaatattatatttgtataataatacaacatatggtgagaacaaaatataatcatttgaaaattgtggcctctaccataggtcttttataaatgaaaattcta

SEQ ID NO: 58779 - DNA, 1050 bp, Homo sapiens
gtctgaaaaaaaaaaaaagagagagagaacaggcgtacaagtgaaacaagattgatgttgaagtaatcattgttgaaattaggtagtggggctcatgggaattcatttttattttccttttctgtatatgcttgaaattacatgctattttaaagaaaaaatgacataaagacatttttggagaaaaaaaaaagctattaccaacagaaatgggcaattcttaagccaagtagagaatgttcacagaaccaagtcactgtaggttgtaagggaaaagcaaaggtagcaggagaattcagagtacttgatatccaaattcagtgagcaaaagggattattataataagacaggcatttttgggtagatgatgttgagtaatcaaatttgacaatacctgtctgaacacctcgaattcttggtcctaaaagtcatgcatgtcttaaaactatctttcagcttactactttgtatgagaacttaagtatacacaaccagcagttagaagaagaggttaaagatctagcagacaagaaagaatcagttgcacattgggaagcccaaatcacagaaataattcagtggtgagtgctcttttaaacgtttttttgtggatgattgtgagtatgtggccaagttggtatgaattccaggtggctactaataatggtttttatctcatttgtcagatgtgataaataagttactctgaaaagcacagttttattactgatctgttgtgttctactgtgttttctgttacattcctctgttccctaactctaacaaatgtcccataccagcatttaacacagcttcattgaaatctgattattattactttctaagaaaatgttaccaccttcagagtcaaagttggaattcatctgctacctatggatgtttctttctaagaccaaaagtcctgtatttgtgagtattttaagaaatggaaggcctgcaaaaaaaacttagaagctaaagatactgtactgttatcttgtatcatgattataccagattaattcacacatggcatttttaaaacctta

SEQ ID NO: 58780 - DNA, 1082 bp, Homo sapiens
tattgaatatgtacatttaatcttcccttttaaatactttgtttcaagacttgtaggtttctcatataaatcagaaatttctcactattatccttcaattaacaatgaaatttttgttatgtttattgcttattttaatatctggaagtattgatttgtgtttatcttatatgctattgctttactcaactatcaattctaacacatttcactagatttatttgtattttctgggtgaacaattaaatagaaatgataaatatgttatttttctttacaatattcatttttttaactattttacatgttggtcagagagacaattttatatgttggtctgaaatgaatgtcgcataagagtggtaatggaagacatcctttttgttgatatttctgaatttactcgatgtatctctgatgtttcacgtaaatagtattttgatagctcaaaatggatacttttaaattaaaagaattactggttttttttatgtaatggttttattgtgggacttagagtagtatttggaattattactggattttataaaatgctattgggtaggggtacatactgagattatcatttggatttttacatactgagattatcatttggattttaaaatttaatctattaaaataattcattttatgacacatttattaataagtttgctgacattaaattatcttcggtgtctgcaataaaacctattatttcttggtaggtttttcttttttacagatggtttaataatatcatttgtgttctatttggcttttcacattcttatcaataagtgatatgcatctgtaaccataattgttggtatctttgttaggttttgatttcaggggaatttttttttcttgaaacttactgtacatgctgctgccatcccaacagtcatcacaataaacagaacatcaaactaaaagtgttcttttctttaagtagttagaaaaatgcaagaatagtacgggtcagtggtaagtgccacagatgtcaatttagttctcattttcatagcgatgcttcagagcaagaatctgccttgctctggttcttctcaagttaa

SEQ ID NO: 58781 - DNA, 1236 bp, Homo sapiens
acaaaactgtaggaactagtccaggctagtgagcgattaaaaaaccaatccaaagagctgaaagacgcacactgtcagaggaaactggccatgcaggaattcatggagatcaatgagcggctaacagaattgcacacccaaaaacagaaacttgctcgccatgtccgagataaggaagaagaggtggacctggtgatgcaaaaagttgaaagcttaaggcaagaactgcgcagaacagaaagagccaaaaaagaggttagtagtcaggcaaattttgtagtgcccatgggatagtgattaaagctgctttttgagactagtaatataatatataatttttaaaatatttctaaagttatttttatagttcattaatattatttaatatggatttaaacatttgaattatcttcctgttacaaggtaaattctcattgggataaatgttttgtttggaaaaaaattataaccgtgaaatctgcatttttcattctgttttaaagctggaagttcatacagaagctctagctgctgaagcatctaaagacaggaagctacgtgaacagagtgagcactattctaagcaactggaaaatgaattggagggactgaaggtatcttttgacttcacatttatgaagcttaattgattttcttctctttaggcttgttaggagtgttagcttgtatactgtattcggtgtgcagtgaaaactagcctttcttcaaacctactattcataattctcgttcttaccagtaggaagctaatacagatttcttaattatgctgaagaaaatggaggactatgtttagtgggaaatatgaatctatcaggagggagttagaatgtttatgcagacctacacaagatgtactggtaatctgcatgggagtcatggttagatatccagaccctctatatatctcataaatgactcaggagaagctcaggggtagctttgcagacacttgtgtctgttaggataagatgataatgggcatagtctaaaacatctcagcagaaggtgctttgcaagggaaattcttgagccgttctggagttagactacctattcttaacttcttgctttcaccagttacttgctgtgtaacatgtaacattggacagaacattatggggccgggcacagtggctcacgcctgtaatcccaacactttgggaggccgggatgggcagatcacttgaggtcaggagttcgagaccagcctga

SEQ ID NO: 58782 - DNA, 1040 bp, Homo sapiens
cgtgtttttttttttcctcttttcttttttttgatattcagattatactggtccatagaaagagttgaattgcattcctgctttttctcacggaccaatgagttatttataagtatcttttaaaattttcaatatatggagttttatctttttttgttgacttctaatttagttgcagtgtcattacagaacttgctctacgtggtatctgttctttgaaatctactgagacttgcttcatggcgtagcctgttccatttttaaaacattcaatgtgtgttcttgaaaatagttcgtgttccaatttagagagcaagcttctgtgtatgaagcttttcagatcgtctttatattcactatttttttttttttgcctacctggtttatctattaatgactaagaaattaaaatttttcattatagtgatgtttaccaatttttctctgaagttctaacagtttctttttaatgattttgagactctcttatagaaggcacaaaagtttaggataatatttcttcttagtgtattgaattttatcattatgtagtgatattccttatccttagtaatactttttctactgaagtcaagatttcatttcttaatccagtataatagatggcctttaactggttactaatgtatatggatgtgtttctactatctttttttctgtttgtcatgatttttgcatgctgctttttatttcctttcttcccttctcaaaagtttttaactgtggtaaaatacgtataacataaaattaccatctaaacaattttcaagtgcacagttaagtaatgttaagtgtatttacattcttgtgcagcagtctccagaactctttttgtttgcaaaatcatttcttcttcactgaaatttgttgttgttgttgttgacattttagtttactctctagtcttttggtggttactcttggcttctaccatgtgtattaaccaagtttaagtttaagttaaatatcctaaaactatttcccacaaacaatttaaagacgtttaattttacagattg

SEQ ID NO: 58783 - DNA, 1037 bp, Homo sapiens
ccaatttttaatgttttagtattaaaaatcctttttatatattttgagaagatgatagtgctgacgaaaagaaacagattataccaataaaggactttgagtgatttgcttaatatcctataggcagtagaaaatgatttttctccacattccttgccaacacttgttatcctttgtcttttaaaaaaaatagccattccaatagatgtgaagtgacagctcattatggttttgatgtttacttctcttatgactagtgatgttgaatactttttcatatacctattggccatttgtatgtcgtcttagagaaatgtccactgaggtcctttgcccattttttgattgagttagcaaatattctgattttttataatgccaaactgttttctagcataccaacttccatttccacgagtagtgtagagtttctgtgttcatatttccagatttattacttttggccaatctagtctaaattgagattttaggttttagaaaatgtttggttgtggtcttaatttgcatttctctaattagtaatgaggtcaagtatcttcacatgggtctattgtcgtttacatttcttttgtgaaatgcttcttaatatcttttgtatatttttctgttgggtttttttcttactggttataagaattcttggaaatatttgggcattctaatcttttgtgagttatatgtgttacaaatatctctcagtggcttatctttttgcttttaggaatctttttattaaaaagtgttcttaggtttgttgtggccagatttatcaatatttttatggttagtgtatttgctgtcttgtataaaaaatctgagattttaaaaaattctcctaaatttttatcttaaagttttaaatttttaggtctgtatctcaactattttttgaaaactgtgaagatggaattttgattaaaactgcatttaatcagctgggcatggtgacttatgcttgtaatcctggcacttttgagaggctgaggcaggaggatcacttgagtccaggagtttga

SEQ ID NO: 58784 - DNA, 1009 bp, Homo sapiens
atcttaagctcttgaatgtaatgtgtatgttttcccttctggctgctttcagtattatgtccttaacttcaatttcaaatagttggactgtgattcacgtacgtgtcgctttctttatgtgaacagaaaatcctggttgagattcattgagcttttgcaattttctttgatgtcttttatcagttttgcaaaattctaagccataatctctgtagatattattttgcctcatgcactttctcctctccttctgggactgtaattgtgtatatgttagatggtatctcacatttcctttatgctctgttctgttccttccgttctttctgttttttgtgtgcttcattaagatattttctattgatctgccttcaggttcactagttctggcttctgctttatccattttgctgttaagtccatctaattagtcttaatttcagatattgtcttttttagttaaggattattcatttgattctctcagtttcagttttctgttgaaatttccccatatttttatgtatttttttctctgttttctttaacattttaatattttgaggtccttatctgttactttcaacaactgaatcttctgcgagcctgcctttctgtttttttctttcatttgtcatgcttttctgcttttccaaatgtctcatgtgaaagatgtcatgaataaaaataacacagagaaggaagtttatattatttttgccccagagaggtttctcccttttcattccatcaagaattgagcttggacaagactaaattgctttttttttttttttttttttttttttttttttttttttttttttttgggagacagagtctcgctctgtcgcccaggctggagtgcagtggtgtgatctcggttcactgcaacctccgcctcccaggttcaagcaattctcctgcctcagcctcctgagtaactgggactacaggcacgtgccaccatgcctggctaattttttgtatttttagtagagacaaggtt

SEQ ID NO: 58785 - DNA, 1043 bp, Homo sapiens
gtccctgagaatcttctttacagaaccattttatatatgattatttttctaaggtttgcattcacatgcaaaaacaaatacaaaagctggtatatgatatagtttagatttgggtatcttacacaccattgacttaacatccaaagacaatgaaagctttaaataatatagacagtctattaggcagttgttttagttcttctgtaaaatcaactttatgaagcaatttctttgtgttgtcatgacctgcagtaattgagactttatctatctgcagttatcttaaggtctagaaagtatatttttccctgtccagtttcatgggctagaggatagtattttttgtggttatcaggtaatgttgactcttctgtatgcagaaagtaggtctaccatagtcacattggaatctgtgtaaatcaaaaggaaagatagtaagattaatttaaccagaatgaaaattaccacactactttttatctctagaagaatactgaaattacatgtgtttgagaaagttttaatatgaatcagaaccaggatttgaattaataaagtaattaaatagattttcttagaatattacttttaaaataagttgagatttttttctgacaaaaagaatatcttaccaaacaatgaattgtttatttttccactaaaaattgaatttatttattttttcagagacattaaacctgacaatatactgatggatatgaatggacatattcggttagcagattttggttcttgtctgaagctgatggaagatggaacggtaaataaagataaatcctaaattattttgttcacagacatttcccttgctatttgtctgatatatctgttttagaaaccatctatttatactatctacccatccatccatttgtctatctatgcgccacctccttccacaaaggcatttgggcatacttacagtggggttgtctaaaaagtcacaagccatttcagctgcttatatcagtgatcttaagattgataaaatataccctttatgagacccttgtttgctcctt

SEQ ID NO: 58786 - DNA, 1052 bp, Homo sapiens
ttccttccgtctcagtgggcagtggtttaatctgcattttattgccccattactccccgcttttctcttctttttctcatttgctgaatttgaatgtttattttcataattacacataatttgaatttcatagtagtctttctttgaattacattttaaatgtggtatgtgggttgttttacttgttctccttgttgattgtatctggatggtttttggaaagatgcagagaaagattaggatttgtataaccaccattattttgcagtacctggaattatagaatcattagttttttattcccataattcttaaataatagcttcactacccagtggaaaagattagtttgagaaaagtttactgacagaattttttgaataactgttttctcaaatgtaggatgaaccccaaattaatgttccataaagaattctaatttctgactgacagaaaggctgttggtgatgtaattttaccagtgtggactttcttttattactgatgtaatatttctttgacaaaattaagagacaatttcaaaaagcagtttcattttaatataatgcagtatgctgtttttatgagtataaaaaaggaggagtaggaaaattagaaaataaaagtattgttttagaagagtccactaccctaacctatataaatgataaaaaggaaccgaatgggagatattaatgtgatgttgctgggaagagaaatgcctgtcttaaattagtggttgtcagggaccaatcccctgtgcaatattttgattagtggtgtctgggttggggccaaggtacatgcaattaaaataaccctctatagttgaattcagtgtccagccagaattgaaactatatagattaactaatgtcgtatccgcattttggtcttatgggggtaatatttgtaataatcatgcttttggtactgatgttctagtgaagttaaaaaaaaaatcacccatagaatgttgccctttcaatgtaatcgttgttttagaatgctttttttttgagacaggatcttgctctgtcacccaggctaga

SEQ ID NO: 58787 - DNA, 1050 bp, Homo sapiens
tgtttgtagacatatacatgtgtgatcaagtcatataattggactatccactgacttcagattattacagcaggggagaaagggaagagaatgggttcacagtttggagtaggaaggatacaatttacatcttatttctttaaaaagatcagaagtaaatatggcaaaatgtagacatttatattatctggatggtgggttggtccatggttcttaaattattctgtgcatttttctcattgttttgaactataaaagtattatttaatataaaatatatttttaaaaggtactattccagtagcccagtttctgagggtggtttgaaacttgtgttattgaaatgtcttataatatcaggtgtattccttttccagaacagaaataatataataaacatagtaattctttgtatatttcctagttttacataaagtatgctctaaaaattttctttttgtgtttcagacagcatgttttcgtgaagaaagggatgtattagtgaatggagacaataaatggattacaaccttgcactatgctttccaggatgacaataacttagtaagaatcatttttgtatttctatatactgtttttttgttggaagaattagcattatttttatttaagcattgtttaaatgtaggtttcatatagaaaattaagtgcatttcatacagggtaagttgttcacttgatatgtggtgtttttttttctccctggaaatttgataccttttcattggaattctttatgctttttaataagcaagtcaaaactaaatccaaacatttaatttccattggttaagttctatagacggtcttcaggagtttttcatgatacctttaacaccagtaccattcctcttcccttgttcctgttgaagtccagctagtactttaaaattgtgctcaaattcatcttaaaataatcatttccagaattttccactgaaattaatctttctcatctcattctaactttacatttttaaattatttttattacataactaacacatgtatctctgattttttttgata

SEQ ID NO: 58788 - DNA, 1068 bp, Homo sapiens
tttatgggaatttagattgtttccttatttttactattttgaaccatgttgtaaaaatctttatatatactggataaacttttgtgagtttatcggtagtgtgaattcttacaaagatgaagtgtcaaactgtcaatacatttcattattttaccatttatctatctgcatgtgtttggccaagagaaatttcaaaacaggagagaaactagtgcttcaaaactagtcatgctacccaaaaagtatatgccatgtaaaatttaaaaaaattttactatgaaatgctgttagagatattggtgtgggctaccctgaggcacttcagcttgtgtatactgaagttgaaatgatttcaaggataatttttacatgaagggattatcattttatgcttgacctagaacttatccactccctaaattaaactccttgctagtcaaactctgggattttagttggggaggggagacattaaaactttgatagctattgttccaataaaattatcttctataaaagttggactattatctttgcactcatagtatgtaaacatgtctgttttctcacacacttggcagttgcggatgttaccaaattatttctatatttaaaattacatttaaaactttttactgaaaaataagttaaaaatgatacatctcatgtttgatttggccatgaaatatatattaaaatgaagacttaaaagtgaattgatgccatggtaatacttggaattcttacattttgcaatttaaaatttcactgatttagattttaaaaatgaaaaatgttgttctttccctcaaatattagagaaagattcagttattatttgaaagagtttctctgtgatagtattctatggaagagtgaagtctttattcctactaaatgataagccaaagtagatataatcatcagtggattttgtttctttttaactcatgctttccaagtatctgtgcaattttgatgagcagtataagcttgttagtctgatgagtgcatcttatcaatacgatgaagagaatcctgtgtcaactttccagaattaccatttat

SEQ ID NO: 58789 - DNA, 1473 bp, Homo sapiens
ctttctgcatattagagtagcatttctcttcctccccaccaacccccagtaactggaaacatcctcgttcaacctttgttttcctcttttgtgggctagcctgtggcctatggcaagtccaatggcctggaagtggtcttacagattatctggttaaactgaagcagagagatagaaatgtaatcaatttgttgagagtgagaaagggattttatttattgtatttgatagtttttgatctgcaattgaaatataaaatacagaaatagatgttcctttttttttctttttggaagggatgtgtaaagtttagtttttgtaaaatcgttagttttaattgctctctatgcgtatgtatatgtgtgtatgtggtttgggggttatggtatagtatgtaagagtatgtgatatgaaaaataggatcgttttcagtttatttcatattgtttgatcctcacaaaacatatttgttttggcagctggccttccttgtaacatggtgttggaattttgcatgcattatttaataagctctagttctttcctgttgagcattttgttcagtttcttagtgatagtagatattgagtttgaattccagggcagaaaagttggaaagggggattaatgtgtaattaccaactaatacagtgttcaaaaataccaactaatacagcgttcacaaataccaactaatacagcattcacaaatacagttattagtttggcacatgttcactaactttttcatctggcaacattatttaatttaggatcttagaatttgaactgcattgacataattgataattggtatttatttttttacagaggaaaaaggaaaatggatggctgaaaaaattatttgtcattattttaaaatttatatttcctttatcttttctaggttgctgtagtaaaactaaaaaatgcagataaagtgtttgccatgaaaatattgaataaatgggaaatgctgaaaagagctgaggtaagagtcttatgtattggaatatataaatattttagaaatatttttcaggaattataaaattccatagagctcattaaatattacttggtaacattttgtctgtggtgacattttttaaggcataaaagacaaattcaacacaattgtgatataattatgataaaggttacaatccataatgctaatttaatattagtggaatactaaatggaaacccttgtaatggggggcttatgcagctatatttaaaggatgtctgcaaactactttcttctatagaaagacattttgtaatggttgatttctaacgtgacgtaacttgtttatattattctgtatttatctgtattctgctacaagcaaaagtcagcaggagttttgaacatgccctctagaaattctgtttaatgctgattatgcagtcactttgtattttgttttatattacaggagttgtagtaaaatctagtaatggaaga

SEQ ID NO: 58790 - DNA, 1101 bp, Homo sapiens
agattaccagtcattcatcattaattcagctaatgtttattgagtagctatagattcccaattactaggtgtgtactagtgaacaaataggaaaaaaaaatccctgccctcattagcttatattgtagtgaatgaagcaaacaatgaacaaagtacttaaatagaatacatagttcatgaaataatgacaactaatggtaaagggaagcaaagaaatgggttagaaaatgtcaaggggtaaagtgacatttcattgaaggagtgagagagaaagttgtgtggcttcgtggggctagaatattccaggcctagggatcaacaagtgcaaaggctagttgggattgagtgtggtgatcattatagctggagcatagtgaaccagggggagagtagcacgaggtcagggaaggtggagggccagaacatgttggccctataaggcatagtaaggattttgacttttacttggagacagatgggaaaccattggaagctgtggagcagaggagtgtcatgatctgagctacatttcaagaggatcaactgtggcttcagtgttgaggatgggttgtgggatgagagggcagaagtagtagagaggtcaggtaggacaatccaggcaagattttcttttttttcttttctttttttttttgagacagagtctcactcacttcagcccgggctgaagtgcagtggcgtgatcttggctcaccacacctccgtctcccgggttcaagcaattctcctgcctcagcctccctagtagctgggactacaggcgcccgccaccacacccagccaatttttgtatttttagtagagatggggtttcattatgttggccagactggtctcgaactcctgacctcaggtgatccacccacctcggcttcccaaagtgctgggattacagacatgagccatgtaatagtagcttggaatgggttggaacagaggagatatggtgaatgaattcttgctatatgcaggaagactagatttatagaactccgtggcaactgtttctgtattctacaacctgtaacttaagaatgaacataaaatactgttacagcattctgtaactgcaatttgtaa

SEQ ID NO: 58791 - DNA, 2540 bp, Homo sapiens
gagagaatagtttcagtctagtagagtgaaatagaaattagattgaaataggtgtttgaaagaggttgagaagcaaacaaatgatgagcaagtggaaaaagcaagcatgtactactctttcaaaatgtgctttttggagaaatgtgttgtggaaagggatgtggtatcagttccttgaggaaaaggtaaaatgggggtgacgtttttgttcatatttttgttcttggatggggaatggtcttggaaaagtttttcaattgatatccaggagaaagggggattgaaagcaggaaagaaatttttaatggaataaggacaggaagggaaggaaggagagggtttgggatcaagatgtcaaatgatactgttagccctgaaaagtggtagggttcaaaaggaaaagaggtatgaagcgcaaaaacatttagagttggcatgagggaatgtaaaaggtctgttatctataaagtaggcaaccaggtcattaattgctggtgaagagtagataggacaggaatgggatagtttgtggtggcagggtggcacaggacattttggaagattagtaaagttctgttgagagtgatagaattaatgttaggactgcaggtagatttgagggttcagctgagattgagctatggaaataaaaagcaataataaaaagacaaagtatatatatattcttatatatattattccttacataatatatatttccttatatataaccttattttatatatatccatatatgtatgtgtgtgtgtgtgtgtatatatatatatatatatatatatatataacatgactttttttcattaaagagactgaagaaaaaaagggatttgaaaaattacttgtagttgctcattaggatatgtaaggcagttacttaaggacagccaaatttgctctactgtcctgatacttggaagaattaaagaatggggtacagggctggggagttggtggcagcagagagcagtccagcagtctgtcaagtcctgcctggtcacaggtcagtgccatttaaacctccaggatcaagtcagagcacttgacgcatgactgataatatttgagatttagtgtgaggtgtctttttaaatttttttttggtgtgttcttgctgtatgtgtgtactgattaaaatatgtaaaataaaagcaacaggttgctggtaattaactctgttatttcaagacagaattgattttgtatagaaaggtagtattggctggattatgagctttactgcttattcattcctgatgaaaatatctctgctgggcttacataccctgtagtgtttatgaactagtaggtttagaaatgaagagaccctagagagataatcatttcctccaagatgttttgtcttctaccaggaatttgtcaatagatatataggcccagtgggtaggctcacctctgcatgaatatttgataggagcatttctatcagttatgctctttcttaaaaaaaaacatgaaaataaacgcatcatttatgtaactcttataagaaatgcataaatcatgggaaacagtgagcaagatataattgaaattcagcagctcagtgagttacgaaccttctctctacaactcaattgtgttagttactgcttaacttaacgctgggttttcctttttgctttcaggaaaacctttaacttacgccctgggtgttgcctgtcaacagtttcctggtggctcaccgcttctgcctgctccagccttgctccggcagcttcaaggcttctgggcttcagagcttgttgtgaaagcttgctgctttggcctgctacccctgcttcaggtgtcaaaagcttttaattagcttgcttcctctaattactataactaggcccttacgtgtctgcataatccagttctagggtctgaaaggagaattacctttagccattcattcttctttaaaagatcttttactttggccctcctggcattcatgggagagtaagaagttatattgcatgattcacctttgatggtgctagtcttcagtctgtaggggcaaactggtgtgggcatactgtattttatagccagtgtttgttctgattggttgatgcccatgctgtcccaattttaaagtattttgactattgctactgaatatataaattgtgtctccatagaaaggatatctctagctggtttaataaactctttgtagtgtttttagtttgcttattaaagataatatttagttccctcccccatttttaataaatattttgaacacaaattggtcgctcacagaacagtttttaaaaatgcagatacagtgatttctatacattttgtaatgatcaccattaacatgtgtcaataggtatcagaattataggtatgatgaatgggaagagctcttcagtacttatataactattcagtacttggagtagtaaagtatactagctctcttatcagacagccaggtacatattctggttctattacttattaattttgtcactatgagtaagttaattaacttctccaaacat

SEQ ID NO: 58792 - DNA, 1377 bp, Homo sapiens
gagtgcagtggcataatcttggctcactgcaacctccgcctcctgggttctagtgattctcctgcctcagcctcccaagtagctgggattacaggcgcccatttactaccatgcccatttaatttttgtatttttggtagagacagggtttcaccatgttgaccaggctggtcttgaactcctgacctcaggtgattcacccgccttggcttcctacagtgctgggattacaggccactgtgcccagcatcttcctattttgttttaaaacagctttactgacatgattgacataccaaacaattcacctgtttgaagtatacaattcagtggttttgatatcttactaatttttaaaaattgtggtaaaatacatataacaaaatttgccattttgaccacttttacatgtacaattcagtggcattaaattatatttataatattatgtaacaaccatcacatagctgtctctaaaactttttcattatccaaagagaaattctgtaaccattaagccataagttttcattctcctgtcccccagcccttagtaacctttaatctactttctgtctctatgaatttgcctattctagatatttcatttaagtgacataatatatttgccttttaatgcctgtcttactttacttagcatgttttcaagatttatccacattatagcacgtatcagaccttaacttcattttaaagctgcttaacatactggtgtgtgtgtgtgtgtgtgtgtgtgtgtgtgtgtgtgtgtgtctgtatatatatatcacattttgtttatctgttcatctcttgatggacatttggataatttccaccttttggctactgcgaataatgctgtcatgaacatcattgtacagatatctgtttgaatctcttcttttgattctcttgggtacataggaatggaattgctgggatatgttggtaaatctatgtttagctttttgaggaactacccaactgttttacaaagcagcagtaacattttatatcccctctagcaatgaatgagggttccagtttctccacatcctcttcatcacttgttattttctgttttatttaattaatttaaaaaattcagctattgtagaggttgtgaagtggtatctcattgtggttttggttttcatttccttaatgattagtgatgttgagtatcttttcatatgtgttttggccatttttatatatcttcatatatatattattttacttttaagttctgggatacatgtgcagaacatgcaggtttgttacataggtatacatgtgccatggtggtttgctacacctatcaacctgtcatctgtgttttaagccccgcgtgcattagttatttatctaatg

SEQ ID NO: 58793 - DNA, 1082 bp, Homo sapiens
acattgtatgaaactcatatttttaatgccagggacttgtttcttctttgatttaccctattttatttcaaagtaattttttccttttaaaattatttaataattagaaatagtgataataaaaattcaaaagtggtttttgtgtttttctttttttgttttttttttgagatagaatcttgctttgttgcccaggctggagtgcagtggtgtgatctgggctcactgcaacctctacctcctgggtttaagcaattcttctgcctcagcctcctgagtagctgggactgcagacatgtgctactatgcctggctgatttttgtatttttttgtagagggggtatcgccatgttgaccaggctggcctggaactcctggcctcaagtgatgcgcccacctcggcttcccaaagtgccaggattaccggcgtgattacaggcgccaccacatgtggtcaaaagtgatttcttatatgagtagtcatttattatcccctagcagttggcaatttgtaaacaagtacttcatggtggtgaggtaaggagaagagggtgctgctatttaaaagaatgaggtaaaatgcagataatctcaaatttttcaaggtaaaagttcttagattaactctgcatttaactttatttgcacaatgtccatcataaactttagagtctggtgatgatggattgagcatacaaatataacttcatttccttctgcaattcactaacactataataaaataatttttttaaagagtcataaacctttaaggatgataagagtggtagaagagactatagaaacaaaattttggaagctgaaaagcaggtagatgagtggtaatgacttaggaggtctgagaaagtcagattccaaattagcagtggtgaaagctgaggacctgttcagtttacttggcagaatcttcagaagttttagaaattgctatctttaggaacctctggaagttgaggtatgggtagggctaaagtacagaggattgattgaggctggtttagaagcagtagaaactctagagcaattcccctgttgagtgccattgggttactttatccct

SEQ ID NO: 58794 - DNA, 1051 bp, Homo sapiens
atatttctgtgtgactatgcaaaaaaatcttacaggataagctttttgcattggaacattttgttgttatataattattcttcagtaagtatcaagttaatgctcattcatccaccaacaacaacaaatatgagatgactaattacattttatttttatatttatatatctccaatctgcacatcagtggtagagttctggacctcaacgcagagggttaaaatcatcatgaaaaattattgatgtgttgttcatttaggactttttatgtattgaagattatgcagcacccgtaaatgtatttgtgacctgacagtacgacacaaacgtgtggtgtggtatgtagaaacttaatgtacactagtgtttcctaaattatatttctagagatataaatgaatattctgaaaattaagagttcagtggctgtgtaagattggaaaatagtgctttttgtatgcctctttggatattacaaagcacattatcatagaaaaagtttcaaaaagtttgctgtagaaaccatttaaactttgttttacctagaatttgcctgagtaatttaacattggaactccttatgaagaacagctgacagagtttgggaaatgctggtatatacttaaccgtaggtagtgtgagagcctttaaactggttgtgtgacagaaagtggttaataaagtcttctaacacataaattgtcacaatttatatcaatttccaaacaaaggcaaaggtttgaaggtttgcctttatcctttccatattttttagcgtatctgtttatgtcatctaagcaatattaagttggtgtggagttttgcatggggtgtatatatctttacaaagaaaggacagtgagacttgatacatgacttcgaggagtttatatgtgcacttcttggtttgcaaagatgcacctgctaagctagtgattttgtttttttccagtaaagctttattatgttctaatccagttacctctctaaccattggtacagaatttgggatcgatattgtcatggctgtgaaatagaacaatgctaatta

SEQ ID NO: 58795 - DNA, 1681 bp, Homo sapiens
aaagcaccctaaaaagtagagtgaaatttgacatcataatgaaccactgctgtcaacccctaaagtccttgaaattactgagagatctcttaattatgaccttttcctgctctaattaagcttacttttctttatgtgtaggcatttacattaaatacagaaattgtcactttattttttacagctttcattactgtagatgttgcaaaactattgtctatctgaagagattacattcattactttgtgatttttaagaggaaaatatcatggactcatagttttaaaatcctgttacagtgttaagtattgttttttgcagtgtaacacattttggctaggccattggtttcagacttttggactagtgtgggaactttactactatttattacatccatgaagcgctgtgtttctagtgccagcaactatttatatatactgttaaggaaactagaaaatatatacttttattaaggagaaaacataattggtgctattttggcattgtgtgaacaattaaagctgtggttactattaacttttgttcagagtttttgggaggccagataataatcatagaggacaatctagtttcattgtttaaagacagacagcatataggggaataaaattagttttcttgcttatttttttttttttttttttggtagagatagggtctcactatgttgtccacgctggtcttgaactcctagcctcaagcaattctctgaccttggcctccccaaagtgctgggattacagatgtgagcagccgcacctggccttttttcttttttctgatttagatttatttttctctttaactcttcctcaccagtgccattcttcccactcctgatctaattatactgcaaagtactacttatatggatgaaaacaatcttttgaaaagattgtgaattatttcagtcatgtgcaatcatgtgttaactttcagttttatttcagattgcttaaacgtcactgtaggcttaatcaaagacaaaaacaccttctgtttaatttggtctattcatagtgataacacttaatccagtttccttagagtttccatggtgaatatctacaagtagaacacctaacctgaaatgtttctgttctaaaccaatatactggaaaagagcaaggggttttggattaagactgactgctttgattattaactgggtgatttagttatttaacctccctatgtctctttatgaaaaatggacataagactaatagtttatttttctaaaaagttaaaagttggtttaggattcttccttttctggtgatttatggttgtattttgtcagcttgcttcccattctgtttttttttttttttttttgagatacagtctcactgtgttgcccaggctggagtgcagtggcgtgatcttagctcactgcagcctctacctcccgaggtcaggcaattcttctgcctcagcctcccaaggagctgggactacaggtgcacgctgccatgcctggctaatttttttcttgtattttagtagacacaaggtttcaccatgttgcccaggttcatcttgaactcctgaactcaggcaatccaccgggctaggtctcccaaagtgctgggattttaggcatgagccaccatgcccgtcctcccattttgctttttaaaattttgataaagg

SEQ ID NO: 58796 - DNA, 1012 bp, Homo sapiens
accccgtcctgcatggctggagtgggaggaagagagagaagggggagatgctacacgcttttaaacaaccagatcttgtgagaactcactcactatcacaacacaaaggggaagtctgcccccatgatccagtcacctcccgccaggtccctcctccaacactgggattacagtttgacatgagatttgggtgacggcacaaatccaaaccatgtcaagggtcttactgtgttacctaggctggtcttgaactcctgggctcaagagatcctcccacctcagcctcttaaagagctgggattacaggcatgcaccaccacacccagcttttttaaaaaaggaatgtattgcttcatgagtgaaaacaggatgtcaggattaacactttaggaattttagacatatatttattttatatggaaatgtaaggcataccttagtatagcagtatataaaaacaaatagtgcagtatgttggaaattttatgaaatgtcccataattcctaggacttgaatactattacacagtaagctcaggctattttaggataaaataatttagctcaaataaatattttattgtaccactcttttatggcagtcaaaaatttattctctgacctttttctcatttggtacatttattgacagtatgttacgtatgtagctcattgtttttctcctgctggttgtgataggttttaaaaccaattactaagtctaaccagcatttaaaaaaaattaaagactagaatagaaaatataaagtacatcaaatatagaaggaataagtattgttgtgcaaaacattgtgttttcctgtagtccttattcccatatttcttactataggttgagataaaaatagtttgaaatacttcagtgtaggtgcagctatgctatgttgactgttaaacagtgaaaatatagacagttcattttttcaaaaaggacacacgatagattagggacttactcaagaacctagtgaagggaaagagtgtaaggtat

SEQ ID NO: 58797 - DNA, 2682 bp, Homo sapiens
ttggccaaatatgattttgtacctttggaatactaatcattttagtttgttcttatgctaagttcttatgctaaaatatctgttcccaagtaaaactttattttcctgaagtaaaagtcaagtgctgattgtgtctttttttttttttttttttggatttgaaatttattcaaagttagtttctcaggtaaaccactgatacaagaatgtctacacgtaataactttaattattcaatttgccagtataagaaggtttctagcaatgtgatgtcataaggtttaaaaaaatatgtaaatgtgaatagaataacttttcaaaacagactgccagactcatcctgggaatgtaagaaatctaaaccatctttcaagtaacttctcacttaagagtgagacaattttggctttggtactggttttgtgagtatacgtcttttatttgttgaataaagtattttgtaaagcatatgtagttttacatcccatgtttcacaaattgagaaattctgtagtgttaatttttttttttaagacttaaagggttttggtacttttagagttggaacttgagttcttaagttatggttccttaatgacactctagtctgtgatttttgtcatttagtattctttcctatctgcgaagctatgggagaactctatgtaccagtagtaaatataattttaaatgatttatgataaagagaaaactgtatcctccattgccttctgattattagagtttaggtaagtagttttatgttatgagatatttcgctgtattatcagaataatttatatatattttccattaaatatgttttcttggatgttgtttcttatatatgtataagaacacctcatttatgtatatttttatataagccaaatatcaaataagtatttggctgagtattatttttattagtatggaagtctggataaagagtaaaaagaaagttaagaatggaaaaggctgtcaggagttgcgtagtgagtagtggtatttgctgtctttaagttatttgagaatttaggttaagagtgccagtctatttaagaattgaaatagatcagatgttcttcatatgaattgataactgcattttggggaaatgtcctattttattttaattacttaacaatatgtgaaaatcagttaagactaagaatatttccaaattgtgaattgacctcagttcagtgttctaaacattattttttgggactctggtggaaatttacagggattgttgttggggttaaatttggtaatttagatttgccttaaatggtgtaattttaagtttaatttttaataattgaaaaaatattgtcttttatttaaatctttaaaagactatttgcaacaggaacgcagtattaataacacaagttgttacatatttgtgttcgttatttatattaatgaaagtgtcagctagatgctacttatctttatgctgatgatagattactcttaaagtacagtcagccaagattcttaccggctgtattcagcttcatttctatcaatttcattttattcctagttttagtccattttatttttatattggtacagttaatgttttgttcatagcagtatcaaaacaataagaaaactgacaattcaaagtcagatatgttgtttttctttgacagcctttcttgcttttggtgctgatggcttgagggaggaaataagtggaaagagaaagagaggattaagccaatgatcactagagcaagggaataaaagtgccttaagactatagatcacatttaaatttaataagatgtattatttttcatttatagtaaatagtatttgaaagactatgttttttgtctgcttagttttaagttgttgaaatgattatggtttgtatgtttgtgtatacagtaatagtcgatgtcagcataactctagaataaattacagtggagttgtagaagtaaaaataacttccacattgtaaactaatttgctagtaatgactgaattagtatatcattcgttaaatcggccaccccctactttgaaatgggaaattggaattttggggaattatttaccaatttacttaataaatgtaagataatattaatacaaaataaatatgcaaggctgtctgtacatggataactattttgatgctttttgaattttggactttgtaacatacagaaattatcactaaataactaattttatagcttattcagattttgtatatacatagaaaatagtctgtttaataaatttgtacctagagcatatcagcaggtactatgctttaagcttttctttttattagtatagttttaaagctgttcactttttttttatgacacgagtgttaattaagtgaggtgttgatggatatgtatcttttctaggacacttttgttcttcacatatgctgttcctcattgttagcttttcctgagtagaatttattaattaatcagtccgaattatcaaaatgttcacttaatacagatgattacatttattttatttaagttctcaactagaataatcagcaatattggttgggtacttgtttcctttatactagccacctaatattctattctaggaatgataatgagtaattacaattattttatctagtacaatgctggcacatggtagaagtgtgttcaatagatg

SEQ ID NO: 58798 - DNA, 1585 bp, Homo sapiens
cccggcgcggcgcggcgcggctcggcccacgagcgaccaccgacatggagtgggctcgggcggccaagtagccgcttctccggagcccggtgccagtgccgcccgcagcccgccttccacccccggccgcgccgccggtcaggccctagggtgaagccgggaggaaaatgaagagttttcaccggaatccgttgaaaataggactgactgcaaagccttaaagaaagaaggacctcgggaggagaaacgaaaagccgcctccgggcaagacttggcgtgctccgagccgaggggctgcttcagggacctcgccccctccctttcccgctggagaaattgccgctgatgcattatccaagtggtggttgggaggatttgcagcaacatttttggttttccctcccccttctatgcattctgtttttttcctcccttttctgtttttcttcttcccgggaagtgaattgctgatgcaaatcggactttattcattaatgatgcaaccggattcgtttcaggattacgttgcacgagttgaattttgaatgaaggagaagagtttttttttttttttttaaagaagtgttgactctctagttcgttgtacttttaattattattttatttaaatatacgacttaattgtattcttttaaaaatgcattaagtatatattttatggtaatttaccctcaaaatatatgtatatgggtgaaattgaagacgcttcagttaagtgaggttactggtgtgttggatgtttaattcagcaccagcattgcatgacagttgtttgaataacaagtggtttatttttaaaaccataccttttaaaatttaggttcagataatagtaaaagtcatcataataatttaaaggaaaaccagcagaaatcgaagcaaacatgtctggagaagtgcgtttgaggcagttggagcagtttattttggacgggcccgctcagaccaatgggcagtgcttcagtgtggagacattactggatatactcatctgcctttatgatgaatgcaataattctccattgagaagagagaagaacattctcgaatacctagaatggggtaagtttgtaatttttaaagaaactgttaatctttagctggtcattatgatttaattggtatagagagttatgagtaaactctactccgttcaaagaaaaaatacaataaaaaaacagacactagttattcaagattttccgctagtttttggtaaatattttcccaggagtagaattgtgctgctcaattgttgccttgatttaaggcctagctaatgtggaacttggctatgaagaacttatgtttttaggtcaacagtaagagattttaaatcaattctgtgatgggcaaaagtggattattggttacagttgcctaatacatggcactataatagtccttcatttgaaaggtatttattggtggaaacattcagactatggaaattattctcaaaataggaggagatattaaaatatctgtgtttgccttaggtcaacagaaagctgaaggtggtgatcagtgggttttatttcatctctacatagtacaaggaaag

SEQ ID NO: 58799 - DNA, 1067 bp, Homo sapiens
gtccagggaatagaattaaaatcaataattattcctttcacctggcacatgtgagcctcttctcaaagcagtcagagagtggactttaatatctcattctttctctgaagtaatttaatgatcacataagaaaaatgattctctgaaaatataatcttagaatttggctccacctccaagttgaaagaattttgtaaggaaagaaagaaaaaaacactcaagaaatatgtctactcctcacgtctgactgtgaaaagtctatataccatgacctgaaaaggaaagataaacatagtccatgaaattctgtggcaaaaaggaatgaaaatgtgcttaagaaaaaaaaacccaaaaactggaattgtattctctgcaggtttaaaggcaacctttgccaaaatctgctttctggaaactttcctctagacctggctgctaccatcagccttggctgcgggagagagacctggaagactgtggtttggaatatgtgaatgttaaaatcagacattgttcccttttctttacaacaacaagtctttggttttggctatatacatgctgggttttccggtaccacgttgttccttttttcactagaggtcagaactattgaagggatcttgatatttttcagtttgtttcctttttgaccactgctctcccctttcttacaatgcccttgagaagctaatgggctctgtttccatgctgaaatgaagaaatgatcgagcgagtatgaaatgacgcgtggaaggccacacagcaagttggaagaagattctggatgagaaacttgaaatttccatgtcctccccaggtctgtaaatccagtccactaagctaagtttttctaagacattgaggcccaaagatgcatgctgaaccacaggcatgaggtgtgacttcaaaccaagagtcaacactatgcggagtgactagatacagaatgctctaataaaataattatcacctgctggggcagagttaagcttaaaatcaccttaccgtggattattcaaatttatagcatattacatataattcagatagaacagggtaatgtt

SEQ ID NO: 58800 - DNA, 1047 bp, Homo sapiens
ttgctctggggtaattcaagtggacacagcctgtcactttttcctcccggcctcacttagtcatgtctggtaatggcacacacagcactgcctggtaggtgtagccagctcactctgcaggttcctagtcaccttcagatacactcactgcctccagaacattcttggcctgggtctcgtttgctcagggtttttgagaaatcccaatactgtaaagatagacttacctgattctttcccagccatcctcctgagagtgcctcggcacgtggctgagactggcaggatctgagcacaccccactcccacaccccacaaaggtgtccacggccgagatactcactgtatcccacggttgtgtttagactgaagtaggagcaaagctttaagatgaaaaaataggaattttacctgttaattgcaatggtggccatgtagttggagaggccctcaagtgtccacacatcagactctcctgtcacgtgtggcgtgttcttcacctcaaagcccgggagcgttggggaggtggtcaggtgactgcacggagctgagggtgagtggggctccccaccagccatccaggctgtgtctcccctggggctgcatgggcactgccatcattaaagatccagcaagcccagtggctcaacaccgggaggaacaggcttcacattcacgactgtggcatcaaggccagtggcagagcgggaggaagcagtcacccaaggtatggggttgggagggcccaggaaggcctggtgtgccttgggggcaagggcagcacgttggtcagatgcgggcccccttccttgcaggaggagcctagtttcacaggagactgtctttttgaggcaatacatgtgtttcctatttagagaattcctagtgcacagttgaagctcaagcagaagccagagtgagttacatttctggggaaaataaaaatgcacgaaaccccccttcatccagctgtggtttttgttgcagatgctattaaagccatcatgctgaaacgtgtcccagtggtgtgggttgcaactgggggtg

SEQ ID NO: 58801 - DNA, 1026 bp, Homo sapiens
tatgtactttaatcccaaatttgagttattcgcaagagtgtatggacatagcgacgggggaaaaagccagataggagtgtgcttgtgtcactgatggtgccagcctaacagtggtctgtattatgggcagattttgttttattccttaacttctctcatgtttcctggttttctacatgcagttattaacagaaaagacaaatagtggtgtctcctgatagcactgcacgccatggtcatggagagggcagagctgatgcaggggctagtgggaggcattggagctgtgggtcctggcaggggccttgggccatctccccagccgtcagctcatgggagccctgtggccctgaaggacatttaaattctaaatacacttaaatcacattttagtatggttgacgagggacatagggactgagaccagatcccgagcggatccatgtccctggcttccaggaggcctcctcacaggatgtgggcacagggacagtgtgagtgtgcagcccagccatcccttccaagggctgtgcctgctggttccagcaatgccctcaggatcacactgacagcaggggcaggtgagaagggagcaggttagcagagccagcaaggggtgggctgaggctttcttccctgtcacagcacaatttgggtgtgggccacgtgagatcatgggccaggcggtggaaaagacctcctgtgtgaggtcatctgcccgtcctcctggagccactgaccccaccatatactttccagagccccatccagcgatctaagtcatgactcaacagatggagtttctgccagctcccgagggtgtagaagccctgctgtctgggactggggctctagtcaggcatttattcatctgtcttatgacaaatatctcagcaggaaggccaggtttggaaagggacatgtggctcatttcacctctgccgtgtgcctgtgagtgacctcagcccccaactccctgtgccatctgcagaggggctgggcagctggccggggaagggctccttc

SEQ ID NO: 58802 - DNA, 1082 bp, Homo sapiens
cccccagccccatgccagccagccactgccacgtggtgggccagccggcggcccctgccctgcaccctgtgggcagacgcccggcctccaggcagctcagtgcagattctcgagctgggggtggtggagaggggcgggcatggtgagggggcagggcagccctttgattggttcatgtcatgtcatgaggaagctgcttgctttgtgtcactgggggacagattgggacagatgccggtggaggcagtcttgggctcgcatctggccatggaacgccatgctttatggccctgctgttgtgtgtgctggggacagggtgacctgcactgacctggcttggtttgagggtgtagtgtgtgtgtgtgttgtgagagtgtgtgtgctggcgtggtcagtgtgcatacgtgtgcgtatgttgtgagtgttgtgagtgcgtgtgtgctggcgtggtcaatgtgtgtaagcgtgtgttgtataaatgcatgctggcatggtctgtgtgtgtgtgtgtgtgtgtgtgtgtgtgtgtgtgtatactggcatggtcagcttggctgtgctgtgctgtcagtggcatggcggtgccttaggttcccagagcctctcgccctgggctccgtcttgtgggtgtcctgatggctgtgggctgggttctgggcgggttgctggtatggatacaggaactactgagtgaataggtgtctcagagccctaagggtctccagaaagccggggtgtctgtgtttttaaaagaaaacctatttatgttgctgtgggtctctgccgtccctgtgttatagtacataagaacctttattctcctgtggttcagagagcaccccgacatgtgcctgcagctgcatccccgtaccacagtgtgggtgcaagacgctgggtttgtcctttgtctggtgaagcctggctagaaggggtgggggtggtagcccctgccctctgcagtgtccgcatccactggtccctgagcagcatagctggccacaccctcatgacatgacaagactgtcactcagtcactattgggtctatgaagggcgtcaagtcagaggaaggtttttattttt

SEQ ID NO: 58803 - DNA, 1023 bp, Homo sapiens
ggacggttgggattagcggccgcgggggccggtgggggtcgtggggcctcccccacccgagtacaggcgagcgagcggcatccgggcggacccccgcctcggggaccgggaaactgaggctcgggcggcctgagacgccgtcaaggtcatgtaggtggtgggggcttgcatcttcgcctcccgactccatccagttcgtgtttgctgtgaagacggtaccgggtcaggggtggtgagagcgggcgggcaggtggacaggaaccccgtgcccttccctgtctgctgaacggaatgcgtggacctccgggggagcccagagtgcctcccttcacaccagtgagacgcaatttggggtcagcactcagggcaccggtggcctccagagggccggtcgatcttcgctttaactccagggtggtttccttgacgttgtcggcagtagataagaaggcctcttctgagctggtgaatctttaacctacctgaatctttaacctgcctgcggaacgacctgctcgcagactctaggccgcagaggccggccccagcgctctctcggagcacagcctgggtggttacggcgtgtgagattggggctggacagccgtgcgcacctagagtgttaaataaccattccgacggcacctcctggcactccctttcagtccaggcagccagttgctgctttgcaggaattgagcagaaatgcactcggaatcgcgggcaggaaaagaagggaggtcggaggctttggatggtccccgaagtcgccgcctagttgagagctgtagagttggtgccactgcccctgttggagtgggcagttgtagttcttgtttcagaactagtggtcagcagttttctttgccggctgttgcaaggctggtggttctggcgttttccgcagtgtgttgggaggagtgtgagatgccgcggtgcagttgtgtgcggcccctgtggccctctgctgttgcgttagccattgtctaacacgtgtgaccgcatggatggtgtcctcattta

SEQ ID NO: 58804 - DNA, 1052 bp, Homo sapiens
ggattccaggacttgccttcatcctcaggttaatattctcctgtgattgttacaagctctctaaggcatagttgcatttattgccttacagctgcgcagctgccgcaccgtccagataggtagtttcacattctcaggtgggtcagatgaccttgttagcgacttgacagacatgtcctggatgctctttgttcccaggaggctctcaggtcctcccccagggtcctgtcactcagccacctacagggatggggagacagtgaggctggctgataagccataaagtccttgactaatcctggtttcctggttctcacacagtggtaacaagggcttgcagccggttgtcagccaacagactgggaagggtggtgcttcttacaggccctgataacaggagaagcctaaatgacaagagaagagacagggaaagcataaaaggcaggcagattttcacaggcacagcaattgaaaatgattctgtttagaaggcagacattctcccacacccttgaggcccagggctcactgctggtgtacagcatgaagtggacaggagagttgattcagtccatgaacatttcaggaagttagaagtctatagttgtggattgcaaaatacatatctggcctgcctcccatttcctggctaaaatacttggaatctccgaagtgatgatgtctttttgtaccctaatgagttgaccagtgatgggcagcccctacgaaacttcagggtagggctagtcacagggccaaggcaggattagagggtttcagccccaccctccaattttcccagagtggagagggactgaagattgagctggtcaccaatagccaataatttaatcaatcacacctataccatgaagtcacacttttgccttcagtagttaacagcatctacagccccgtgtttccacatttgtacaaaggaatgttcagactgaaccacacttaagtacaattttgaaacagcatgaggctgggcgtagtgcctcacgcctgtaatcccagcactttgggaggctgaggcgggtggatcatga

SEQ ID NO: 58805 - DNA, 2852 bp, Homo sapiens
gacagcttcccaagatgagggcaacagtttctcaattcctgactcagccattttccctcagcccccatcctgaggtggatttggggggcatgggaggcagggctctttccctgtttccctgcaggcttccaggaggtggggtgaggcagtggtgcatccctgggtgggtgggttctgagcaaccactgctgggcagcacagaaccagacatggagcaccttgtctctccaggtgtccctggccagtgtccttccacctgtccacaagcatggggaacatcttcgccaacctcttcaagggcctttttggcaaaaaagaaatgcgcatcctcatggtgggcctggatgctgcagggaagaccacgatcctctacaagcttaagctgggtgagatcgtgaccaccattcccaccataggtgaggtgggggccagcagggagtgggctgggctgggctgggccaaggtacaaggcctcaccctgcatcccgcacccaggcttcaacgtggaaaccgtggagtacaagaacatcagcttcactgtgtgggacgtgggtggccaggacaagatccggcccctgtggcgccactacttccagaacacacaaggtaagtggctggggcctggtcccatgggcactcctgcttctagagagggggggccagcccatagatggggcatcgatgcccatagatgcggcaggggggctgtgttcccatgaccatttgacactggctgcccggcaggcctgatcttcgtggtggacagcaatgacagagagcgtgtgaacgaggcccgtgaggagctcatgaggatgctggccgaggacgagctccgggatgctgtcctcctggtgttcgccaacaagcaggtaggcgcccgggccagcctggggaatgtgaggagccagtgtgggttccgcctggtggtaggggttactggaggctggtggggcccctttctctgtcctgtggacagcccttcccaccaacccttccttcccccaggacctccccaacgccatgaatgcggccgagatcacagacaagctggggctgcactcactacgccacaggaactggtacattcaggccacctgcgccaccagcggcgacgggctctatgaaggactggactggctgtccaatcagctccggaaccagaagtgaacgcgacccccctccctctcactcctcttgccctctgctttactctcatgtggcaaacgtgcggctcgtggtgtgagtgccagaagctgcctccgtggtttggtcaccgtgtgcatcgcaccgtgctgtaaatgtggcagacgcagcctgcggccaggctttttatttaatgtaaatagtttttgtttccaatgaggcagtttctggtactcctatgcaatattactcagctttttttattgtaaaaagaaaaatcaactcactgttcagtgctgagaggggatgtaggcccatgggcacctggcctccaggagtcgctgtgttgggagagccggccacgcccttggctttagagctgtgttgaaatccattttggtggttggtttttaacccaaactcagtgcattttttaaaatagttaagaatccaagtcgagaacacttgaacacacagaagggagaccccgcctagcatagatttgcagttacggcctggatgccagtcgccagcccagctgttcccctcgggaacatgaggtggtggtggcgcagcagactgcgatcaattctgcatggtcacagtagagatccccgcaactcgcttgtccttgggtcaccctgcattccatagccatgtgcttgtccctgtgctcccacggttcccaggggccaggctgggagcccacagccaccccactatgccgcaggccgccctacccaccttcaggcagcctatgggacgcagggccccatctgtccctcggtcgccgtgtggccagagtgggtccgtcgtccccaacactcgtgctcgctcagacactttggcaggatgtctggggcctcaccagcaggagcgcgtgcaagccgggcaggcggtccacctagacccacagcccctcgggagcaccccacctctgtgtgtgatgtagctttctctccctcagcctgcaagggtccgatttgccatcgaaaaagacaacctctacttttttcttttgtattttgataaacactgaagctggagctgttaaatttatcttggggaaacctcagaactggtctatttggtgtcgtggaacctcttactgctttcaatacacgattagtaatcaactgttttgtatacttgttttcagttttcatttcgacaaacaagcactgtaattatagctattagaataaaatctcttaactatttcaccggctctccagtgcttccacacaggcatgctgcccccaggagatggtgggtgcatcagccagctttactctaggaagtacaggtgactgcctagggccgccacctcagtccacaccctccccatgttccctcctgagtgtgcaggcacttctctgtgtctgtgtgagaggctcttccagcatggttgcccacagtgaccttgatctcgtttgcagtcctgtcgggcccagccaatgagacctgggccatacagggcaggggtcagcaggcaccatggaagacctcagcctccgtccttccctccatcggcctgctgctgaaccccactttgtatagctggctatggggcagggccactgctagcatacatagggctttgtgccaaccagggaatggtccctgcctgagtgggcacagcccccacctctcctcaagatgccatgcagcagggggctgccagtctgggggtacctgtttctgggatg

SEQ ID NO: 58806 - DNA, 1033 bp, Homo sapiens
tggggctgtaaggaggaatggcggccgtgggcagcctgcttgggtaagcatggacttttaggtccctggggattactgtcaggggccaccccagggaacccctctcttcagcaggaaaccgccattctaatcctccctagtccttgctattgtccactgtcccctgtgctggaagctttgtgcccttgctcagcctggcagcctcttcctggctagggggccagaacgcctctgaccacagcctgtggctcctgaggaagccccgaggctcatcctgccccggcacgggtcaccagctctggtaatgtctcctgtggcccggcagtgcccaatcacagccagcctcagtcatgttggcactctgctgcagcactgtcggctgaccagagcttgaacatttatctgcagccggctgaggcagagcaccgtgaaggccaccggacctgcactccgccgcctgcacacatcctcctggcgagctgacagcagcagggcctcactcactcgtgtgcaccgccaggcttatgcacgactctaccccgtgctgctggtgaagcaggatggctccaccatccacatccgctacagggagccacggcgcatgctggcggtaagcttccctctccaggtgcttccaggtgccgggctggggtcgaggctgtggtgggggtgctggtgaccagtcgccttcggatggacatgtggctgtggtcactgtaccacatgacaggagtcaggggagcaggtggttgttggaggagtggaggaaggcttagatccaaaactgactctaagcaccaaaattagataggactaaccagtagtgtgtttttattttttaaatttatttttttgagacagggtcttgctctgtcaaccaggctggagtgcagaggcacgatctcggttcactgcagccctgaccccctgggctcatgcggtcctcccaccccagcttcccaagtagctgggactgcaggtgcacaccaccatgcctcactaattttttgaaagatatttttgtagagatggg

SEQ ID NO: 58807 - DNA, 1054 bp, Homo sapiens
actttgccagattttcatgttaagccagccaatactaaaattgtttagatatacaatttgaactccaaggtctgagtcaaattacctatgataaattggagaaacaactggtattcaagaggacataagtccagtgttaagcatggactcatggagaaccaggatggccaccttgtccctcttgagactctaaggcttttgttattaatggttctggattttatgattcatcatggaaaagataaaatgacccaaatttaatatactgatgtggttaacttgtaaattgtgaaaactgtttaaaaccaatacctccacagttgccagggatggcagagctgaggctgctttcctggacactgagcagaatcctgtggctctcgggcctctttgagtggggagctgcccggcagccccggatcatggaagagaaagtgctagaggtttatgatttgattcgaactatctgggacccagaaaagcccaatactttagaagaactggaattggtaacggaaagttatatggaagttcaggagataaatgaagaagactatctggttattatcaagtttacaccaagagtacctcattgatatttggcgattcttatggggctgtgcttaagaataaaacttcagcagtgtttaccatttaaacataagttggaaatctacatttctgaaggaacccactcaacagaagatataagtatgcagataaacaacaaagagcaagtggaggctgcaatggaaaaccccagcttatgggaaattgcggaacagtgtgtccttgaacctgactggtagctattttaagagccactgacctgtaatttatatatttgtttaaactctttgtataatgtcaaagactcacgtttaatacatagatgatttgtacctcagatcatttttaaaggattatttccaagcaagatttaattttaaggtagtacctaatttgttcagtgtataacattctcaggatttgtaacacttaaatgatcagacagaataatattttctagttattatgtgtaagatgagttgct

SEQ ID NO: 58808 - DNA, 1109 bp, Homo sapiens
tgaggacagccgcaggccagtgggctgctctgggggtcgtgtgggacctggggtggggctgcatgggctcactgtgccctgaccccaggccccacccacaggcaaggagcccggcctgtttgatgtggtcatcattaacgacagcctggaccaggcctacgcagagctgaaggaggcgctctctgaggtgggcccatccttgtgcctacctgggcaaggcccaaggggaggcctgggggccaggcctttgttgtccatgaggccactgaggttagatgggacagtcctacccaagcactggcatgagacaccgaggtccacggtggagggagagcaggaagcccagcccttcctggataccagccctcccaactccctttcttcctcactggcaggaaatcaagaaagctcaaaggaccggcgcctgaggcttgctgtctgttctcggcaccccgggcccatacaggaccagggcagcagcattgagccacccccttggcaggcgatacggcagctctgtgcccttggccagcatgtggagtggaggagatgctgcccctgtggttggaacatcctggggtgacccccgacccagcctcgctgggctgtcccctgtccctatctctcactctggacccagggctgacatcctaataaaataactgttggattagaaactccataaatgagtggaatgtggccccaaggttggtggggccccatcatcccgatcgggccctgagctccggcagcccaccctaaccaccagccccaaggagggccacaagatggcctctgcctaggcatctgctgcctgccggctcgtggctgctgccccagggcagcatgatgcttgactggcaggcagggaaggtggcagggctggtcccaacccacctggcaggctggcaagtggggagcaggaagcggctgcatggggcagcctgaggctgcaggggtgggccctgagggctgcctcttggtgcccgaccctgtgggtctggcatgggccagaggttccaggagaggcccctgagctctggcagctggaggttctagatctcgaggtctaaggggttccctgagggagatgcccctcccctagctgc

SEQ ID NO: 58809 - DNA, 1074 bp, Homo sapiens
cctctgcagatgtgagcattcgctagcacagcccatggaactcagaagagcactttacttactgtcattggtttattgtgaaggataccactcaggaagagccaaatggaagagacacatgggcaaagcctggggaagggctcagagctttcccaccctccctgggtgcaccttcccagcacctcagtgtgctcaccaacctggaaactccctgagccccaagagctgtttaggtgtctttgtggaggttccattacatggttatgattgattaaatcattggtcattggtgatggggctcaacctcagacccctttccccttcctgaggtcagaggctggggctgagtgttcccgccctctactgacaggattggtctttctggtggctggccttatgctgggctctcaggtccccacctcagccactgcagtggcatcaactcaggtgtgatggaaaggggcatcttatgatagcacaagatgcttctatcagtcaggaaattcccagggttctgtgagctctgcgccaggaactgggcacaaaacccaaatctgagtcttgtatcacagtcacccaaaggaagtactatcctcagctcttgctagcaggtcaggagcctgttgtgtaggaactgtgtgcaggcctccagaggtggatagatctgaaatcggagtggtcagggttgggacagctgccctaattcacatccttcatttggagattgaaaggaaaaacagactggatgcattggctcacctctgtaatcccagcactttgagaggctcaggcgggaggattgcttgaggccatcagttcaagaccaacccgggaaacatagcaagactcccatctctacaaataaaaaacaaaaaaatgagccagccatggtggcacacgcctgtaatcccagcagcttgggaggatctgaggcgggaggatcatttgagcccaggagatcaaggctgcagtgagccatgatcgcaccactgcactgcagcctggggccacagagcaagaccctgcctctttaaaaaaaaaaaaaaaagcaaccaagattccctcttgatatct

SEQ ID NO: 58810 - DNA, 1153 bp, Homo sapiens
cagcataggcttggtccaaggcccttatgtgagccagcaggtgagaaggaagaggaggaggagtagacactggcttgggaacaggagagctcagcaccttcagagccagcttggggacagatggggtgggcagccagaacccttgaggtagctttgcaaaggggggtgaggcctgggctagggtagcaaggtcgaggactagaaatgccccatatgagaaaaaggaaagaatgtggctggggctgtcagcctctggcaagaggctgcccacctaccatgagggctcacgcttattggagggcattgagttccctgattcaccaggcagatttcagtttgtccccattgtctttgaggaggggacagggtgtcaggtgcaaaagggcaggcttctgtgacaggactcatgtctcatggtcctgcctggcctctcccgcaggcgaagctggagaagtcactggagcatctccggaagcagatgcaggatgcgttgctgttccaagcccaggcggatgagacctgcgtcttgtggcaggcaggtgctggggctcccagggtcctgggtggcagggtagggggtgaaggtcctgtataggagaccccagggggcgatgctggccaggcacacttgcccttggcgccccaggaccagtcactgcttcagcctggccccaccgagcccactgaagggctggtcctttcccacgtgcacctgtcctgccaggtcgtgggcgtgggctcccatactgcaagggccccatcctggggtcccagcatgcttgggtggcaactctcaggtgtatttagggtctgggccctggaggtaaatttggaggttttgagggactaggtcatagatgtgggattcagccatcctgaggagtagatttgggatctgtccagttctggggtagatttggggtctgggaggctctgggtggtggatttgggatctgggaagccccaggggagaatttggaggtcaggagggaccctgggtggtagatttgtagtccagctggccccaggtggtagatgcagggttctaccaagccaatgggtggatttggaagttggggagggactagatagtggatttgggatctagtcggccctgggtttagatttggggtctagccagtcctgtgtggta

SEQ ID NO: 58811 - DNA, 1102 bp, Homo sapiens
agaaggtagaaacaacccaaatgtccatcaactgaggaatgggtaggcagattgggatctatccaattacaatgaaatattattcagtcattcaaaaggaatgaagcactgacatgctactacagggtgaaccttgacagcatgctcagtgagataagccagatacaaaggccacagattgtctgagtccactgatacgaaatgtccaaaacaggcaaatccacagggactgaaggcagactggtggctgccaggggctggaggagaggagtgcctgcctagtggggacaggtcttcctttaggggtgatgaggatggtctggaactagacaaaggtggtaactgcacaacattgtgaatgtactaaatgcacctgaattgtgtactttaaaatggtacattgtgtgtcatgtgattttcaccgctcgatttttttaaaaatctgaacctaatacacgaatgtgtagcaaatcatcaccgtaaccaggagaacaagaaggaaaggcaagaaagcctggggtcccagaagggctatgaggagggtagaccagatgcccaagaggagagaggcccatcctagtgcttttcaggatgccactggcctaccccaggtataaagagggggagcagggactgcccttggtgcagcagcagccatcacttggggaccttgtggagagaagagggccctcttggtggctgtgggcaactcatctctgcagggctggctgtctgtcctgtggatgcatcgtgacttttccctgcctgttgcattccccgcccgctgcattcccaacatgcacccaccttcactggaagtttgctcatcacacttcacacatccctatgggcaggcactttatggaggaggaagagaaaaggagatatgtcccaggaggagaatgcagctgaagccagcctcaggagtaacccacagagagagcttgcagttttgcagaactctcggcttggctcagctttgtcccgcatccctctcctcctctctcctgactgtgggtctctccccagccccagctggtcagttcccacatgctcaacaccaaaatgctcgagtcttccaattgaaaaacgaaaacgaaac

SEQ ID NO: 58812 - DNA, 1439 bp, Homo sapiens
acgaaggagttcatgatgcccatggccttggacgagatgccggtgtcggggtgcacctgcttcagcaccttgtacacgtagatagaatagctctccttgcggccgcgcttgcgcttcttgccgtccttcttctgtgccttggtgacagcctttttagaacccttcttgggcgcaggagccgatttggacgggtctggcatgatggctgagtctctccaaacagaaacgcgcggcgctcggagtaactctatttgtacgttttgtattcaaatgaaggctcaggatttgctcacttctgattggatcaaacgttgttctacgtcatcgctgggaaaggaatacgcaaattaggagtgccaggttctttttctgattggctaccatagccatccaatcgaacgccgcggtctagcctacctctgtaccatacataagggctcgctggccttcactgccctcttgtttttagtctcgcttttcggttgccgttgtcttttttccttgactcggaaatgtccggtcgtggtaagcagggtggcaaggcgcgcgccaaggctaagtcgcgctcgtcgcgcgcggggctgcagttccccgtgggccgcgtgcaccggttgctccgcaagggcaactattcggagcgcgtgggcgccggcgccccggtctatctggccgcggtgctcgagtacttgactgccgagatcctggagcttgccggcaacgcggcgcgcgacaacaagaagacgcgcatcatcccgcgccacctgcagctggccatccgcaacgacgaggagctcaacaagctgctgggccgcgtgaccatcgcgcagggtggcgtcctgcccaacatccaggccgtactgctgcccaagaagacggagagccaccacaaggccaagggcaagtgaggccgcccgccgcccccggggcccctttgatggacataaaggctcttttcagagccacctactatctcgagaaaagagccgcactgatcctgcagttctttataggccggaggcctgatcaccctaggctcatgaatgagcgcagtggccatggggaagggcgcaacgggaaccgagaccctggggactgattgggctgcatacttgcgaggtgggcaacgtgttctgttaacaacagggaaccctcgtccacaggtggccaccccttgctcttgagtcccacccaaaacctctagtagggttttaataacgctcaccgtaaaggtgtcttcataattactagtgacaagttctcttgactctagcaaggttcccgtgtggtcatcaagtacagaatgcaatttcttaatgatttatctgatattaaaagtatttatgatctctaagtagtttgcactttaattctgaagagtaagtctatggatttctatttaaattgctaagttttaacaatgtgagctccaccagtgttaa

SEQ ID NO: 58813 - DNA, 1041 bp, Homo sapiens
agcatgttttggagtggcatgttcttaactccttcaagagcaaacaggttccccttcccctggggagggtgggtgaggacacaggtcttttcctgccacccgtttgcagggacacgtgatggaccgtaggaagaaggcactgaccgactacaagaagctgcgggccttctttgtggaggaggaggagcatttcctgcaggaggctgagaaggaggaggggctccctgaggacgagctggctgaccccactgagcggttcaggtcactgctgcaggcggtctcggagctggagaagaagcatcgcaacctgggcctcagcatgctgctgcaggtgcgggagccccgctgggtctgcccaccatcgggccagggtggacgcaggcagcagcgagccattgggggaccattgcccgaagtcaaggcttaaaagcccagcctgactcccactgccgtggccttgcagggctgaatttcgggaatgggtgggtggtcagggaaggtgatgggaaggggttttaagttgaggagggtctgaggtgtccctgaccttcacaaaggagggcacttggcatcccgagtgcccgagcatggaaggctcctgcctcgccctggggtcctgaaggcagaagcagccaagaaacccaacctcagggcttttcttctgcctctgcccagggcctggcctgaaccccagaccctgcagcaacccagatggccctgaacggttcagttgcccgtgccagccataggtgacaaggctttggccctggggagacggaagtctgggccaggccctgggtttgttgtgctcaggacagtacctcatgcgctgtctcatgtgcgctctctctttcgctctctccttttgcctctgtctctgactctgtgtgtctctttctctttttgtctctctgtctttccctctcccctcccatgcagtgatggcgccaacccgtggcagtcccagagctggaggcaggaggatggatcctcatctccatgggaagtgtcagcgtgtggctgccagggaagcgtggcagg

SEQ ID NO: 58814 - DNA, 1328 bp, Homo sapiens
cctgtgcccgtcccttcctgaagtcctagccacagcccatcctccatgagtcccggcagctctgggtcatgcccttccctggtcacccatctgcccctcacctcgtcatccagggacccagaccctgcaccttccatgtgggcccacagatccttggcaggtacctgaggtgcaccattgagtgtcggatttggggttagcatccagaaagaagaatgcgcatgacgctctgtgaaggctggaactcaggtcttcagggagagaaaggaagactggattgcaccttgatgcctcctgaggaggcggcccccctcttgaggtgggcgtgggcccggcccagccttatccaagtcgctctgtccacctcccccttcctggcccccaccccactcctgtgcctcccaggagccctccctgtgctccacctgcctccgcagaaggaagcctctttctctgtttccctgggtgagggggctggcaggtggctaaccccatttagcatctccaggccctgccatcgtgtctcatcttgctgttatctctagctctttccctcctcccatttcctttagtagttgaattttgcaaagcttgtagcagtagctcagttgcctgcagcatccttgtgtgtagataaattagtcgacagaaactcagcactggggacaggattgcaaagtcggggacatagatgcagacagttgttgagatttggggatagccgggcttgtgagcggtgcccatttccagatgaagcctttcagcccttctgagtccccggcccttggtgcgatgtctgtgagtttgacctgcccagcgtgtgggctggctcaatgctgaataaagtgggtttgtgtcagctcgtttgcttcgtctccgtgtgtccacctggcctcttccccctgccctggccaccctccagtgtcaaaggaaacttcctcgtgacacgtgctaaagcatggtgaggaggactttgattgggaccattgagatgggtgtgggaccctttccttggggcctggggggagatggggctccaccccgacgtagcagggcaggggttggaggagcgaggagcagtatagggtccatgggtgggaatgactgtgaggagacatcagggctgagggggctctggctaaacccacctcacagagtccttgctgcaggcaggcagggcgatcagacattggctgcaaacggtcagagaggaacccagtcaggtaccattgagggtggtcagatattatggttaaccaaattagggttcttgctaaaactggatttcataagaaagggcaaagagggccctaggagaagattccaga

SEQ ID NO: 58815 - DNA, 1861 bp, Homo sapiens
aagagttgagagtaggtttgggttacactcagctgaaggcttaagtccattttatttctagaacccacctactttgagcactttttctatgttaagctgtaagtaggtcttgagtgtcgatgaacacgttgaacatgtttggcagtgttcagaccatagctggccctgaaagcagatggctgccacaccttcgctggtgcactggccccgcttgggtaaacagtaggatcgtttcaaggatgctggctcttccttctagaaccagcgggtcttctatcacctgccagaccctttcatgaaaaatgtgaaggtgatctttttactgatgagaattcatgaaaacataacttttgggtactttgcttggttgcaggatgaatttgacaagctgaggcctctctgctacaccaacacagacatcttcctgctctgcttcagtgtcgtgagcccctcatccttccagaacgtcagtgagaaatgggtgccggagattcgatgccactgtcccaaagcccccatcatcctagttggaacgcagtcggatctcagagaagatgtcaaagtcctcattgagttggacaaatgcaaagaaaagccagtgcctgaagaggcggctaagctgtgcgccgaggaaatcaaagccgcctcctacatcgagtgttcagccttgactcaaaaaaacctcaaagaggtctttgatgcagccatcgtcgctggcattcaatactcggacactcagcaacagccaaagaagtctaaaagcaggactccagataaaatgaaaaacctctccaagtcctggtggaagaagtactgctgtttcgtatgatgctggcaagacacccagaaaggctattttcagatgaaatcgatattagaagctatattagctgaaacaactccttttactgcgtagaacctatatcgagagtgtgtgtatatgtattataggaggagctctcaattttatgtattctttctgcctttaattttcttgtttgtttgagcttagggatgagatacttatgcaagatatttttgaagtaaattaaacatttttcacatctctggaaatttagagttctagacctctggttaatttatatctaatatgaagaagacacctctaatctggatgttaagaatgaagttctgctacattataatgtacagaagagcaaaagggaggaacactatggttaaccctctcttgattaagggctacttaatgcacagtgcattatgtacacaggtcaaccatggtaacaatagttcttagctttgaaactccatgcaaaccatgccttttttttaaggagcaaaaatctgagaaaaaaagtgagagacctctgcctacaaaacctcaaaccagtcacttttgtcaattgctaatacccagttacttatgatttaaaaacaaccaacagaaaacatcccactgactgtatggcactctgtagtcaaaaaaggaaacttccttattgggacttttctttcttagtccagttgtgttgacacatatgaacacagacaaagtgctatgcggaggaaagcaagtgttggtcagtagtttcatgttttagggagtggttcctgtggagatcagaaagtgacatttgctttcggtactgtaatacgtgcaccaaactgcctcaatcctaggtaacgagggcaacagggagcacctgtctggattgtttttaaacctccatactcaagctgtctcttcggcagggaggtgaatactcttgaaaggccaacagcaagtgtttgtgggacacaacacagataattttttcttaagtcggccaagatgtacttctctgtgtgcacacccatgcacactcatgcacacagatac

SEQ ID NO: 58816 - DNA, 1029 bp, Homo sapiens
tgtaaagccagttagatagaagaattttatttttctgtgggttttgtgttgtcttttttatgttaaaaagaaatccagtttgtgtttttctatagaaaaagtaaaagatcaggttatactttaggttaggggttctatttattcctgttagtaaataaaattaacaaatttctttgtttaacaaaagattaatctttaaaccactaaaatacatagactgattgattattcaacacattggaattgatgtcggtcatagtttcctgaagcatttagttacaacctgaaggaataaaatgatttgtggaaatgcttaaaatagacctaactgaatacagtctcatcttgccgcgcctggcttacctatctgtggaaagctaggcttcccaggctgggctctgcctgtctggtgcctggaggtgtgggagggaagatgagttatttaactggtaagcgatttgaaacactatttttatattaaagtaaatggcatggagtatagtgcaaattcatttttaagatagaacacaaaacttgaaagaagttttatgcgtgtgacagtgtatggggctgcagttggtctccctggaggggacttccacacctcctgcctttaggccatgggtggaaagtgctcagtgaagtacacctgtgtggcccagttctgaaagctttatacagttgaattttaagtggggttgataacaccttggactgttagtgttaaaaatctagtgggttgacctttaaatgcaacagtttttaaaatatattgctgcattttatagaatagtaaaggtacgattatacttgagattttcctccatttttatttcttcgtgaacatagagtttggggccgaaaatgtttttaaagtatgtgtttgagttaaatataaagttggttcacttcaaagctaaaaaattgttaaacttgcagcttggtattgcagagaagattttataagaattttgctttagagaatgccactttggctgaactacaagtgtaggccaccattataattta

SEQ ID NO: 58817 - DNA, 1023 bp, Homo sapiens
accattagtattcttatttcatggtaacttccaagtatgtttttactttgcaactctgaattgaatcttttcttctaatagaggaaattaatcgaaaactagtagaaactaataaatagaaaatgaggccagaggtgatggctcacgcctgtaatcccagcactttggaaggccgagttgggcggatcacttgagctcaggagttcaataccagcctggccaacatggcgaaaccccagccctattaaaaatacaaaaaattacctgggcatggtggtacgcttgtagtcccggctacttgggaggctgaggcatgagaattgcttgaacccaggaggtgaagtttacagtgagccaagattgtgccactgcactccatcctgggcaacagagtgagactctgtctcaaaaaaagaaaatgagttttagaaggagcaagcaggacagttgaagtttgccaagctgaagtaaaagtcacctagaaccaagtcctaggctgtcactttgacgtatcagtggccatatttatacagcattgttccttaaaagtgaaacagtcaggctctcttctggacatttgcctctgagctggtgaaggaatgtttgcctaacctttaaactcctttgtactctgtgcttatttgctcttctgtaaaaggaggctctgtgtagcttgacagagagatgaggaatgaaatgtactgggtttttgtttccctttttttttttttttttttttgagacaggacctcgctctgtcacccatgctggagtgcagtgacacaatcacggctcactgccacctccatctccccatctcaagtgatcctcccacttcagcctcctgagtagctgggaccacaggtgcatgccaccacacctggctaattttttttttttttttaattttttttgtagagacgaggtctctgtctgttgctcagtctcatcccgaactcctgggctcaagtgatcctcgtgcctccacctcccaaaatgttgagatcacaggcatgagccact

SEQ ID NO: 58818 - DNA, 1048 bp, Homo sapiens
cagtattacagtatttgccatataattttgagaattatcagaatattttccttaaaaatgtatcattttaggctgttcaggttgaattgtgttccccaaaatatctgtttaagtcctaacccctagtacctgtgaatgtgaccgcatttggaaataaggtctttgcagatgtaatcaagttaagatgaggtcatcgtactgaattatggtgagccctaattcagtgactggtgtcattataagatgagggaaacttagacacaaatgcattcagagagaaagagatgtgaggatggaggccaagattggagggatgcatctaccagccaaggagtgccaaggggtggctggcaaccaccagaagctagagagaggcaaggagggatccttcccttgagccttcagagagaccttgaccctgtcagcactctgaatttgaatgcccggcctccagaactgtgagacaataaacttctgttgttttaagcttcccagtttgtggttctttgtgatggcagccctaagaaactaaaatataggctttgctcatcaaaatacgattcatgagaaatttaggatgacaaggcaagatgaagtgaagaagatatccttggtaaaggaaatagcatttcttttccttttttttttttttttttttctttgagatagagtctctcactgttgcccaggctggagtgcagtggcacaatctcggctcactgcaacctccacctcccgggttcaagcgattctcctgcctcagcctcccaagtaactgggactacaggcgcccgccaccacacctagctaattttttttttgtatttttagtagaggcggggtttcactatgttggtcaggctggcctccaaactcctgacctcatgatcccgcccttctcagcctcccagagtgctgggtttacaggcgtgagccaccgtgcccgtgtataaatagcatttcaaagtcacctggttccaataaagtatgaaataacttgctcttagggaaatcaccccaattgccctttaccttaatttcatgaaag

SEQ ID NO: 58819 - DNA, 1016 bp, Homo sapiens
gtgtcttatttaattaagtttatcttaagaaagtatatgtgaggcatggtaggtggtgggtaaaaaggagaaagaaccagtttggggtgttttggcagaaagctttgaagaataataaaatcctagaaatttactctgcttcttccattttcatcacccaagagcttgttggagcctgtttgtttagtgacatggacccagtgtggcttagtcacagaactggtccttactgaatttaacaagtattcattcactggatagtttatttacaagttgccaagactttgtgtggtacagtcttagaaaagaatacccagagggtactgggccaagtacccagcttatgtaatcattctgtcctcctcagagaactcccctgcatggtcctctctgcaactcctcacaacagtaatgaacggaaggtctctctttgtaaccaggatgcccctggcctttagttactattttttttaaggatcttaccctgcatttttcctggtagtttactcctaatggaatttccatactagttctatactgtctgggcatgaaacagactagcatagtcactgtaaccatttatctaccctctgccctgtaaataataaatccagttgccagtggcatccctgatctctgaaacaattaaattttgttctgcagttacaaaatataaactagccaatggactgtatagctgcgatattcaatttcagcttatctgtttatcatcacagaaatgttctttcataggcagtgtattcccgctgggtttagcaaaatacttattttgcctgtctcctgcccattcaaatagtactaatttctccaacaaattcatcccaaatcatttccatagaacactacgattaatgaaatctcaaacacctgtagcttgcatagggttttgttttggggtttattggagggtgtattgttttggggtttgttggagggtgttttattttggggttttttggagggtgctttgttttggggttttttggagggtgttt

SEQ ID NO: 58820 - DNA, 1051 bp, Homo sapiens
ctgagtgacatcctctcactggacaggttcctacccagaaagggcccccagatgatgccatttagatgacacatttctaagacagtgctactgagatcagcactgctgaatgtgatttcctcatggataggaatgttctataatctgtcctgatatggtagtcaccagccacatgtagctactgaggacctgaaatgtggccagtgcaatcgaggaacagaattttttatttcagttaaattgccatatgtcacaaacagctactaactgcttcacattaactaatttaaacctcccaataacctcctgaggatcatgtgattattactatctccatcttacagacaaggaaactaaggcccaggcagctgaagcacctggcctgagagggtcaatcagctagtgactgcaactgggatttgaacccagcaatctcagcccagagtctgtgtcctcaccctctctcaactcacttctaataactttccatacataaagctttgtgaaccttaaggaaagtgtccaagcatcatgtcaagaaatgtaatgtaatagcatggattgctttatccacctaaaaccttacaaacacatttctctgcaggggaaagcagtggtaggggctcgttcaaagacctctgagaccccagatggaagggctaaggggcttcctggatgccagccacaccaccgtccctggacacacaaagcacacactgcacggagggcacctcgccaagaccagcctttgggctgcagggcactgagcaccctccttcaccagggggagctggcattacctggtgatatcatagacgaggagagccccggccgcgcctcggtaataacttctcgtcacggacctggaagaattatactggttttactttcaaccaattgagaccctttactgtatcccactttcccatgaaaaaacacccatgcttgctttgtaaaccacaacacagggacagacactggtttaaaagagaaatgattcaaagatatttgaacatacatgtgaggggttattctgcctgaaatcacatca

SEQ ID NO: 58821 - DNA, 1070 bp, Homo sapiens
atcaatcaggctagcaaagtgccatgagaagaactcaatccttagacacatgagggccaaaaatagtaagtctgagagttggtcctggagtcagacagagctggtcaagtcctgactttgccactggctgctgtatgacctagggcaacgtaattaatctctctgggccttggatttctcagagaaaaggggaataatggcagtctgtgtcatggaatctttataaagaatcaatgtgataaagtcctgtaaaacaaagtgctggcacattgcaaggattcattaagtggcagcaattagctatgaaatcttgcctaccagagtctagtgccttgcgcatgctaagagctcaatagatatttgtcaattgaatgaaggaacatctctttccttttgccccatgactgggcaaacgaaaaataacaaaatatctcacttgctgtctcattttaccagaaacaaaatggaacaaactgtgggtatggtatatacttggtgcattcacgttgtctgagttatcttaaaggtgttggtgccattaccctgaaatgttgaaaagcggtatgagtagtgagaatgactggaaagagttgctagttttataaaatacatgtattattttcacaatcttatattacgcagccgagaaacctacaatgcgcttactaattggttaacagatgcccgaatgctagcgagccagaacattgtgatcatcctttgtggaaacaagaaggacctggatgcagatcgtgaagttaccttcttagaagcctccagatttgctcaagaaaatggcaagtgaccttttacttcttactatttttcaaatcgcatatttgaggataatagcatttctttgaatttaaaacatatattggaatttcaagattaaactagatttaggaaatgtggaatttccaattgtttttttctataaattagacctattaagcatatttttagtatattgcattctgcctgcagaagttactataatgataaaagcaaatgtagtaacattatgtaatgacttttcagtctagggtctttgaatattagagatcttg

SEQ ID NO: 58822 - DNA, 1044 bp, Homo sapiens
gctttaagctgtatttacttttgcatttatagttatgcagattttgaaattgttcttaatattttttaggtgttcatacagtggcatttgggacacaatcgttggaacctgaagaatctgaagttttttttaccaccatctttttctactctgtatggaagtagatctttatggggaaaagagaatttggggtgttctgcaagccagtcaaagtggcacagcaaatcatataaatcgaattaaatggacaacaccgttagatgtgtatgtaaaaattttctgtttcatatttttcctttcactttcggtttaaaacatgctatatgtactgtatgtcctgtagcccagtgcggctccacagcatggaatctgatgtatgatatgatagaatgtggcactaaatgcagtttcagattttattttttttaatcatatgaactaaaattgtcaattgtgaggtgtgcttttctcatcatgttggttatattgcacaattggttatatttatgacctgatattcaaagactctggcattgatagccagtgtgttttcttatttaactccgtttactacattctacatggtgtttacgtgatccacacttgaaatactagatcagtagacattcactaatataccaaaataaaatgaaaaattgagtttttccgtgaactttatactgtccagctctgttgattttaaagcctcttcatccaggtcagttcaggaagtatatctggagtacctgctctgtttttggctgtgagactagcactaaggattctggtacctttacccaaacctactgggctactaatacttctctcagcagttgatcaaatacaatagaccatgtaagctggggccgctcatccacttccagtttgctggtctccctgctagaaaacacattgtactgtgctttttctggaattcagtataatggcatcactgcctgtttttcacatcttttgtttcctgttcattttaaggaaacctactaaatccagttaatattaaatggacaccactcattaagaaat

SEQ ID NO: 58823 - DNA, 1052 bp, Homo sapiens
ttacgaattgtgcagaattatcttctggaagttatggcttccaataacagccatcttgcttgctctcgttcttacaatttagtcagctgagttcaagtgacccaagtataaatacccttcaagttgctagcaattgatcttcgatgaaacacaatgacaaagatattacatatgaaatggtataaatatgtgcctcctacctaatacgcaagtaagatcacctatagcctattatacatttattcatttttaaaatgaatcttttgaagatccatttattcacatttttccaagtaaatagaatattaactataactactaactataatcttttaaagattcattttaaaagtgaataaatgtgcttagaaattttaggggggagaacacacataacatacatataaccagaggtgccaagtattttaacatctcctaactaagggcagttaaaagacaaagaatcgattcctgttcacttctcctcccgcggacttaatgtccagcagagtgctagacaatattgcttcaatattctattactttaatattaaaagcagtaacaaaatcaaaaagcatatttatgacattgttttaattaagttaaaatcaaaattttaaaaagagttttatgtagcatttattttaaatatcattgggttctctgtttcagactttttcaacatgaaaggtaatttttaaactgtctcactgtcttgcaggttgtcccaagaattaggaacatgattacaaccacattcatttctagaatgaaaagaaagaattaggaccatcagactgttaacaactatcaaattttcacaggttcaaaaggtaattgacactctttaaaaaagaaagaaaagaaaccctaaccaactaaggacttggatgtaagatgaaggcttacaattcatactgatttattaaccattcatgcactttaaaagcactttaaaaatcccgttcatttgtcttccacttaaaaagaggaaaaaattggccaatatttgccttctacattatatctctgtctggagttttaagtagta

SEQ ID NO: 58824 - DNA, 1128 bp, Homo sapiens
ttcacctcaaaactatgcaaatatttaaaaagtttttttaagctcacaatacttcagtatgtgttttcaaagcttaaacagttatcatgtgtgaagagtttatggggaatgaaagcaatatgttctaaaaattgactatggttttccaaagacccagagaaaaatactaaggtaatactcagcctcacgtccactcacacatcttcgggtgccaagctggcataggcagagcaccattatctcttataaggaacttagcacatatccttctagcagattcttgtctccacaggatggagaagacatcattcatttgatggaaaccagtgtttgttaaaaccatttttctacccccaaagcaaacatactaaagagaaggagcactatttacataaatttgtgcctacccacacaccaccattctctcccattaaagtgtagataagatctactggctaggaatcaaagagtaacgtatttcaacctaaagtttgaatactgtacatcatcaagactttgttattgttaagtgctataaagaaaaagagaaagtaggggtgggcagtctatctaacaggcatcttcacactggtccccatcccagtggaacaagcaatgccaatgtaccaagtgcaattccagattgtaagtttgaaatgtcattgccagccattacagaagaggcaaaagtccacagtgggtgtatgccaaaaggtcaagtgtgacaagggactgaatccacagtatgtattctttaaaaaaaaaaaaaaaggcaataaaaaaagtgagtctttgactactcaaaagaaactttactactactgtacacacatattgtgttgtgtgcacttcgtctattggaatgtacttgagctattaaactattaaataataactgcctagatgatcactgaaagagaaaaagagaccctcgcccagcccagataattcttaaatatcacaatctacataaagatgctgctgaactgaaatacaaataagttaaaaattttcaggaactagcaaagttctactttcattatacatggaatcagtagtagtgctgacactcatttttgacttgatattctttcacaaacaaaacggcatataaggaaaacgagtctt

SEQ ID NO: 58825 - DNA, 1027 bp, Homo sapiens
ttttttttagggaatttgtaaaagattgttttattttgatgaatattggtcacctacctcggcagtagggcagacagttgaagccatagacatttggttatttatgaagataattccctaaatctttgatattcttataaggtttttgttttaaagcatcttaatcttttaagatactgacaccaaatgcctttaaatggcaacagatgcttacagttcagtattcttttcataagcttaggtagagcctattatcatcttgttctaaataactttccagattccatagctataagatcattccatcctacagcataagactcgttttccttatatgccgttttgtttgtgaaagaatatcaagtcaaaaatgagtgtcagcactactactgattccatgtataatgaaagtagaactttgctagttcctgaaaatttttaacttatttgtatttcagttcagcagcatctttatgtagattgtgatatttaagaattatctgggctgggcgagggtctctttttctctttcagtgatcatctaggcagttattatttaatagtttaatagctcaagtacattccaatagacgaagtgcacacaacacaatatgtgtgtacagtagtagtaaagtttcttttgagtagtcaaagactcactttttttattgcctttttttttttttttaaagaatacatactgtggattcagtcccttgtcacacttgaccttttggcatacacccactgtggacttttgcctcttctgtaatggctggcaatgacatttcaaacttacaatctggaattgcacttggtacattggcattgcttgttccactgggatggggaccagtgtgaagatgcctgttagatagactgcccacccctactttctctttttctttatagcacttaacaataacaaagtcttgatgatgtacagtattcaaactttaggttgaaatacgttactctttgattcctagccagtagatcttatctacactttaatgggagagaatgg

SEQ ID NO: 58826 - DNA, 1069 bp, Homo sapiens
taaagaagcgccaggttatcgaagctgaaggaagctgaaacagctcaagagaccagtggcaaatccagatgggccgtcgccagccttggctgtgctgctcctcctaaccttccggccccccaggaacttgtgaaccccaactccatctacatctttgcctggcttggtgtcactaaactcttctgggtaactccaagccaaaacccctcgctctgcaggccaccaacatgcagaatcctcctttggttcatcagaggctccattctggagttccccaacccaccatgctatcccctaagatctcccatgggcccaaagcacccagtggccaaaggacacgatgcccgatgacaggcgcatggcccagctggccactctcaaagggaacacagaaccacaagggcccagagcgcacctcgtgcacaggagcggacgcacagacgttgtgagtcttctggcttcctgtatcggtctgtttttctccccagccataaagagcaaatggatgcttgttttcttttattttactcgatgatctttggggacttttgaccgctttcctgtttcctctagcaaataaggcacttggttgctgtcgaggctcagtactggtgggtgatttgtcagtctctcttgttctggtttgttgttcaggtttatcttctacatctttcactggcagtgcttttgaaaagagataaatgagatgaaaatactttgaaatcagatttatatataattaaaatatttatgttgaaaaatcataatgcttaagacagtaacattttcacttatggctcaactcatacgatccacttaaagtagaaatacaggaacaagttagcataattttcaaaccatttatctcattttaaaatcaacaacaaatataccaagattgaaccaagcttattcaaaagcaaccactgctactccgattctgagacttagcatctggaatgttaaaagatagacagcaccacaccctaagggctttctccgcaatcccccaagataaatccaatcatctcaattttgctttccttcacggaaagatctggatttgtgg

SEQ ID NO: 58827 - DNA, 1048 bp, Homo sapiens
tgggattacaggcttgagccactgcgcctggccttctttaactgatttaaagtgtccagtttggctgggagcatttctaaataaataaataaatgaagtgtacaggtcagtggcattaagtaccttcacatttttgtgcaaccctgttttcactttgacctataggttatttagaaattttttttttttttttttttttcgatggagtctcgctctgtcgcccaggctggagtgcagtggcgcgatctcggctcactgcaagctccgcctcccgggttcacgccattctcctgcctctgcctccggagtagctgggactacaggcacctgacaccacgcccggctaatttttttgtatttttagtagagacggggtttcaccgtgttacccaggatggtctctatctcctgacctcgtgatctgcccgccttggcctcccaaagtgctgggattataggcgtgagccaccgcgcccggcctagaaatgtttttaagtttcaaaactgggagggattttttgaagtttttttgttgtatctagtttaattacattgtggttagagaacacattctatataatttcaattttgtaaatatcttaagatttctttatggccttggatatgcagattcttataaatgttccatatatgattgataaaaatttacattctgcagttgttgggttcagtgttctatatatatccattaggtcaagtttattaattctgtttaaatacatttgaaaaatcagatgttcagtacagctctctctgtgatgatgggcgtgttctccatttgcgctgtctgccagggtagccactagccacatgtgggtattgagcacttgaacgataactagtgtaacttgaggaactgaatctttaattttatttacttttaattaattaattaaaatttatatttagtaaccacgtgtggttcatggctattgtattggactggccagttctaaattgagactgaatttatttttatttgaatgttctgccaattactaagaaaggggcattgtaatcttccacc

SEQ ID NO: 58828 - DNA, 1006 bp, Homo sapiens
tcttatttctgttttttttttttttcccatttcttttttttctgaagtccttagttggatattagactttatcattttatcctctaattttctaagttttttcttgacagattttcatcttttattgttttgttttctgggtgatactctcagctgtatcttctaaatctcttattacattttccatttgagggatcctatttttcttttaaatgtaagagctcttgaattgttttctgggctgccatttattccctcccttacctccctcctttccgtccctttttatttctttttacaacacagtatctggttcctgattgatgcatgtagggttttatcttactgaggatatatattagaatttttcgtttgttttcttctctttctgtgtttcttcagcacaatctttcacttctgcctctttgtttctttttgctggtaattctctattttcatgttaggcacttttctcaaatgtctaatgatccttcgtttctcattcttatttaagggatggatactaaaaagctgttaggaaattctgtgtgtgtgtgtgtgtgtgtgtgtgtgtgtgtgtgttggggtttgggggtggaagtgcttgtgaaccgtgagattcttttcctcccatagccaatatgctatgaagagtggtctagactgtctccgattccttacttcatagtcacgttttctttttaggttagattttatttttagcaaagtttacatgtgcagtaatttaaaacattttgcttaaaatgaaaaaaacatgatcctgccccatttcccacccatgccccttgctcctttcactcagtttcgctttcctttcagcattggccaccctctttttatttaatcttatctgttggctttttgattgtgaacattatctactgacttcccattatgggagatgaagatttagctcaggatcttagctctgccttccctattctacccccagacacataccaacacccatttcctcttctccata

SEQ ID NO: 58829 - DNA, 1077 bp, Homo sapiens
gggtaacctctgctgacccccactctactttaccataagtagctccaaatccttctagaaaatctgaaaggcatagccccatatatcagtgatataaatagaacctgcagcaggctctggtaaatgatgactacaaggtggactgggaggcagcccggccttggcaggcatcatcctctaaatataaagatgagtttgttcagcctttgcagaaggaaaaactgccacccatcctagagtgccgcgtccttgtccccccaccccctccaatttattgggaggaaggaccagctaagcctcatctaggaagagcccctcacccatctccacctccactccaggtctagccagtcctgggttgtgacccttgtctttcagccccaggagagggacacacatagtgccaccaaagaggctgggggagggcctcagcccaccaaaacctggggccagtgcgtcctacaggaggggaaccctcaccccttcaatccctttaggagacccaagggcgctgcgcgtccctgaggcggacagctccgtgtgctcaggctttgcgcctgacaggcctatccccgggagcccccgcgcctcctccccggcgctccgccctcgcctccccccgccagttgtctatcctgcgacagctgcgcgccctccggccgccggtggccctctgtgcggtgggggaaggggtcgacgtggctcagctttttggattcagggagctcgggggtgggaagagagaaatggagttccaggggcgtaaaggagagggagttcgccttccttcccttcctgagactcaggagtgactgcttctccaatcctcccaagcccaccactccacacgactccctcttcccggtagtcgcaagtgggagtttggggatctgagcaaagaacccgaagaggagttgaaatattggaagtcagcagtcaggcaccttcccgagcgcccagggcgctcagagtggacatggttggggaggcctttgggacaggtgcggttcccggagcgcaggcgcacacatgcacccaccggcgaacgcggtgaccctcgccccaccccatcccctc

SEQ ID NO: 58830 - DNA, 1096 bp, Homo sapiens
gacaggaggattgctggaccccaggagttcaagaccagcctgggaacatagcgagactttgtctctacacaaaagtaaaaaattagccaggcacaaagtggttgcatgcctatggtcctagctactcgggaggctgaggtgggaggaacacttgagctggaggagttcgaagctgcagtgagtcatactttggggtccatactgaatatgttacttactaatagaattttcttcagaaagatacctcactacttggtttctgaaatcaaataggtaagagttatattgagtcagtagctaccttgagtataacatctttttttaaatgtgttttccttggcgtctcttgcatgttccctagagtgtaatgtcttatatctaatgtagaaactgtcagggtattcagcatgtaaagtgcctttatttaaatgatttgaaacagtatcacaaaactcagattctccatcccccacagccatcaaaataaaaccatgatagcaaacaaatcatttaattcagctatatcagtgatttcatttttccctcataatgattttgttttctagctggtccagttctgatggcaaagatgatccaattgaagtatctaaagacagtatatttgtgaagatcttacagaaacttttaaaagatggtaagtggtttgttactataccgttggaaattacagtgtcattcctcagttttttgggtttttttttgagacggagtcttgctctgtcactcaggctggagtgcagtggtatgatctcggctcagtgcagcctccacctcccgggttcaagcaattcttctgcctcagcccctggagtagctggaactacagacctgtgctaccatgcctggctaatttttgtatttttagtaaaagcagggtttcaccatattggccaggctggtctcgaactcctgacctcatgatccacctgccttggcctctgtctaaagaaaaaaaaaaaagaaccaagaagctttcatttggagtctgtccacactgatctccaagcattagtattcagatttgtagcttcctttcatagctgtaaaaatgccacagactgaattgtgtctaatt

SEQ ID NO: 58831 - DNA, 1061 bp, Homo sapiens
gacttttacattaccttattttaaaatcttacccctctcaggccgggcgaggtggcttacacctgtaatcctagcactttgggagaccaaggtgggcggattgcctgaggtcagaagttcgagaccagtctggccaacatgctgaaaccctgtctctactaaaaatacaaaaaaaattagctgggcgtggtggtgtgtgcctataatcccagctacttgggaggctgaggtaggggaattgcttgaactagggaggcagaggttgccatgagctgagatcgcgccactgcactccagcttgggcgacagagcgagactccgtctcaaaaaaaaaaaaaaagaaaaactcttacccctctcaaggttgctgataaaatcatcatcaccacagagtaacctgaaagtaattcatagatattaattggcttctatgtatgtagtattaacataatgaaaatttaggcatgtatttctttcagagccaggatttaatcaggattttttttgttttgctgtgaaggaagaagatataaatataaatgatctaaaactggaaatcctttgcaaagctcttcagagagataagtaagtgctcgtggcattgcttctttggaaagtatagaaactgcttttcctctgctctcaccacatgacagtcaataacagaagacttctgtgaccagacgtgttgggatttcccacctcctacactgggcaaccagtgagttctgttggtgggcaccagctgaatgtcctttaatttagttcagtcctgatacaatctacaaccacaggttgagggctcagactgcccctgactttgatgccaatttaagcaccagggggttttgcctgtgttcctcaccgaccagctataaattggggttcccacaaccccctccttgggtttgattaatttgctagagcagctcatagaactcaggaaaacacacctaccaatttattataaagggtgttgttaccagagagcggtcccgatgaccccaggagaggcttcttggatctcgtgcaagaaacaatttggggcaagtccacagagt

SEQ ID NO: 58832 - DNA, 1024 bp, Homo sapiens
tttttactataaaaatacaactggccaggtgcagtggctcacgcctaaaatcccagctctttggatggccaaggcaggcggatcacttgaagtcaggagtttgagaccagcctggccaacagggtgaaatcttctctactaaaaatacaaaaattagccaggtgtggtgatggattcctgtaatcccagctactcaggaggctgaggcaggagaatcacttgaacctgggaggcagaagtttcagtgagctgagatcgtgccactgcaatccagcctgggtgacagagcaagactttgtctcaaaaaaaacaaacaaacaaacaaacaaaaaacaaactacaacttccttacaagacataatgacttcttttctccataaatgtctctagtattagttacatgattgtataatcttctaccttattttaacttgtcatagctatatatctgtgaagaaaatagaagagctaatgaatatgatttcaagaaagctttggacttgttggaatatattgatgaggtaagtaaaattgcttgagatgatctcaggcaactgaatacatatataaaaagagggagatccctcttttagtcaatcatgaaaatgaattaagcaaaaaagactgtatctgtggttcaactacctttaatccttagaatgtaaacaactcttcagaaaagctgtcaaggtcaagagactcccttttgtgataattctcacacattcctgggtatctttttttgtgcacagataaatactgcttttcaaagtcctgaaatatttttttgtctttcatttattaagtcattagtttctgaaggtaatatacgactttatcagtttattctggctgggtgcagtggctcacgcctgtaatcccagcactttgggaggccgaggcagacagatcacctgaggttgggagtttgaggccagcctggcaaacatggtgaaactccacctctactaaaaatacaaaaaaatacaaaaaaaaaaaaattagatgggtatggtggcgcacg

SEQ ID NO: 58833 - DNA, 1007 bp, Homo sapiens
ggctgtagtgcagtggtataatctcagctcactgcaacctccatctcccgggttcaaacaattctcctgcctcagcctcccaggtagctgggattacaggcgtgtgccaccacaactggctaattttgtatttttggtagggatggggtttcaccatattggcctggcgggactcgaactcctgacctcaggtgatccacccgcctcagcctcccaaagtgctgggattacaggtgtgagccaccgcacctggcctgaatttgcatctttaagaaattgatgtgaattgtgaaactaagtgccagtaagtgggaaggtttccattccattaatgattgttggtttataataggaataaagataaaatttcaagtaacattttttattacagattttaagttttgctaacaggattttttcccatcttttctcattcccacagtttcactaggccagtacctgtgggctgcttctctagcagagaaatactgtgactttgatatattggtacaaatgtgtgagcagactgacaaccagagccgactccagcgctacatgacccagtttgctgatcaggtgatgagtgttgggtgtgtggccactgagtcctttagttgccttttcttgaaatggctttgccatttcaaatctgtaatcagggcttttggaatatgatacgatctttttgtagttaactttgatgagaagatactaatttgtatgtcgcgtttctttgtaaattttgtccagtagcgagatcacagttcacgacagcctcaacctcctgggtccaatcacttctcccacctcaccccctcccacacctcctgctttccagtagatgggaccacaggagctcgccaccatgcctggctaattttgttcatttttcagtagagacaaagtctcgctatgttgtccaggctggtctcaaactcctgggctcaagcgatcctcctgcttcagcctcccaaagtgctgggataacaggcatgagccatcgcctg

SEQ ID NO: 58834 - DNA, 1011 bp, Homo sapiens
tagcaagttcactttttgaggtcattattttagtctattagttcattagtttggggtattacattgtaaagtgatgtcatctgtaacctagtgctatttaaagatgcactgagcagagtagctataataaaaaatatcatcgcttaaaaatctcagtaacaatccagaatttgcctgtttataagacttatttgggcactctgacttttaaaagttaggagatgtgacttttcttgatttttgaatttatttttaccatcaactgccaataaattttcctccatctataggtctgaggatatggcttaatgagtaaaactcactgggtagttgttacccatcaccataatttttgttgtaagtagtttacttctgtgtattctctcaggtatcccaagtagataccatctgtgagtgcttactggagcatgaggagcaagtcttgagggatgcacctatggattccattgaatgggctgaagtggtgatcaatgtgaacaatattctcaaggtacaaaaatatagtaaaggcttcagcaaatcaaagcccagggcatggatagacaaggaactggtttccatgttcctactctgtattgccgataatgtataaggttgtagacatttgttaatcccaaaaaagttagaaaaatgtcattttattattaatcagctaatgagtattttgaatgttagcctggtgcctattaataaatttctataatcttgagtttctatttggtagaataataaacctttcatttgggaagatgtgtttgtatctttgcaattttttagttggttttttttctgagagaaggtctcactgtcacccaagctggagtgcagtggcaccatcatagctcactgtaaccttgaactctgggctcacgacttcctcctgcctcaacctccaagagtgttgggattacagaactgagacaccatgcctgattgcaaacgtattgttaatgtaactgtctaaatatttctcatttctatttttttaat

SEQ ID NO: 58835 - DNA, 1006 bp, Homo sapiens
agaacaggaatatctacatttccttgtgggtgttaatggcctggctgaagtgtctgtgtgttagaaacagttaaaacaagagacagctggagggacttgctgggggaaagctggggccagtgactgcccagggtgcttctggggaaaatacagctatggtattttgcatgttaccataattgctttctgagaatatgtgtttgcctttttgcaaggttggcttatttggacgtctaggcagttttccagttagagggacaccgatggccactcgactgttgctctgtgagcatgccgaaaagctgtcagccgccattgttctcaagaaccaccactcccggctttctgaccttgtcaacacagccatattgattgctttgaacaagagggagtatgaaatcccatccaacctgactcctgcagatgtctttttcagggaggtaagatgagtcctctttcatgtggctttgtagaactgtgccatttagtgatcatgccctaggcaggaaagacggtgaggacgagttaaatcacaaaagatctcactgaaattttaaattggactccagattttctggctagagtgtcactcagaagtctcattgatcagttacctgtaaagaagagtttgcaaagttgactaagaagtgctccctgtttacttttttcccccaataactgtctccaagtacctatttgctttgcatgctgatcttctttttttttttttttgagatggagtctcactctgttgcccgggttccagtgattctcctacctcagcctcccgagtagctgggattacaggtgctagccaccaccccggctaattttcatatttttagtagagatggggtttgatgtcgaactcctgacctcaggtgatccactcgcctcagcctcccaaagtgctgggattacaggcgtgagctactgcatccatcctgatcttctcctttgtctctctcgatctactcttttttctgggggcagggggcactaagtc

SEQ ID NO: 58836 - DNA, 1116 bp, Homo sapiens
ttaaaagtaactttgagccaaaacctataaatggtttttaggttacatttaacttcacaattaacttaaaattttttttttatttttatgggtacatagtaggtgtatacgtttgtggggtacatgagatattttcatacgggcatacaatgcgtaataatcacatcagggtaaatgggatatccgtcacctcaagcattcatcttttttgtatgttgtgaacattctaattatgctcttagttactttaaaatgtacactaaattattgaacatgtaaagtttgttacatgtctttcgtgcctgacttatttcacttaacatgtcctccagttccatccctactgttgcgaatgacaggatcgcattcttttttttggctgaatagtagtccataattaattttttcttggtgagttttgaaaatattttgcctcccttaatacttgtgttttccaattttatttcagaaaagatttaggtcatgctcaaatggtggttgatgagctcttttcctctcactctgatttggattctgattctgaactagacagggcagttacccaaatcagtgtagacctgatggatgactacccagcatctgacccacggtgggctgagtctgtccctgagggtaagaatgtttcaattatggaacggtgtgttttgaacatattctggtttctttattagaagcatctcttaaagcatattttttagcttctcaaacaatttaatattaattcaatattttttaaaatattgtgaccttcctttttttttttttttttgagacagagcaaggctctgtcacccaggctggagtgcagtggcgcgatcttggctcactgcaagctccacctcccaggttcacgccattctcctgcctcagcctcccgagtagctgggactacaggtgcccgccaccatggctggctaatttttttgtatttttggtagagacggggtttcactgtgttagccaggttggtcttgatctcctgacctcgtgatccacccacctcggcctcccaaagtgctgggattacaggtgtgagccaccaggcccggccaggtaaccttccttatagtatgttttgaaaaagggtcagaacag

SEQ ID NO: 58837 - DNA, 1063 bp, Homo sapiens
tagatacactactctcttctaccagtcattacttccttggccatgttccgttggaactcagggctcctgcttacctcaattcttcacttctgctgaactctgtgttactgctgcctagaaaagggtgtatgtggttaggagtaataggtgagggtgaattcctgggggacatactgagttagctgcgggatcctgatatttggctgagagtctaagaaattgtttcctaggtaacttggtataattactctttggtcatgctaattttaaatgtcagatgaacaaatcaagagtaaattgggaaagttccataggaagcctaagcactcatcttaaccttacttagtcttctcttaactggacttttctagcccaggaagaggttaggatagttgttcttcagagtttggtctacctttaagttttcatgattcaatactcttaagatactttgttttaaaattactgaaagcctgattaaaaggagatgtgagaagaaagaatatttgtagaatggtgtttccagcagtgagtcagaatctaaaatatgcagagaagggaaatcagatgcatcttcaaaatactggatttgatgtgaaagattttctgtttgggtttgttctacagttatccgtttgcaaagaacttcagctgccacctagtgatttccactggagtgccgacttagtggctctttcttactcttctccctcaggtgaagcacattctactcaggtaggtgacttaaaagcttatttaaataaactttttacaacaaggacatcctaaagttagaggaatcatcctctttgattttgagatataactataaacctatagaaatcaagatattgtggtattggcaaagagagctacacacataggtcagtgtaacagaatagagaatacagttatagatccacataaaggcacccatttggtctttgatgaaggtgcaaaagcaattcagaaaggatggtttttgacgatgatttttctctgtatcaatgcatagtgtaggaacatttgtaattttaaaattacaaatgaccaatttgtattg

SEQ ID NO: 58838 - DNA, 1086 bp, Homo sapiens
gtcctcagcttggaatgaggaacatctttcatttcacaagaggttcaggaactaccagtgtgaaaagaggctacgttcaagctgctggagggccagttccacctaggcgcagtcaagaagggcgcctggctttccggcttcacgtccctggaagctcggcactgcagcggttctagatctggggccgccggctgccttcccgacctacctcgctgactgggcaccgcccttaacgtcacgatcccgcccccgccagcgctccgaccacaacccgcgggagccattgcgtttgacgtcatcatcgcgcgccatctcttcccttaggtgtttaagttccgcgcgcaggccaggctgcaacctgacggccagatccctcgctgtcctagtcgctgctccttggagtcatgttcccagccgccccttctccgcggaccccgggtaccgggtcccgaaggggcccgctggccggactcgggcccggctccacgccccggacggctagcaggaagggtctgcccctggggtctgcagtcagctccccagtgctcttctcgccggtcggccggcgtagctcgctaagctcgcggtaagtgatctccctggttgggtctggcaaccaacagcctcacgggccgcagtgggccggataggttgttgtctttagaagcctttggaaccggggcggcggaatagaatgccacagtattggaaaatagaccttttccactgctgcaggtagtatctgcttcgttttgattatcagttgatcagttgattccccactttgcatttttcatggatacctttgtgcagaagtgaagtacaaactggatttgcatcagtgtttacctacttcccacctactacccgtgtgatctggtgtaagtcactcgtgattttcttcatctgtgaaatggcgataatatatctcacctgagccagaggagttattatgaattgccacgatgcagatgtaaggtgatggtgataatgaggacctacaaccctgaaagatcattgtttaatgcctaacataccaactgacattaatatctgatgattggtaattaaagggtttctagctac

SEQ ID NO: 58839 - DNA, 1056 bp, Homo sapiens
tataactaattttcagccttaagacatttaagtttggaagtccttgctattcaacagaataacaagaaaacttcagaatgtatcactctcctgaaaagaagatattaataagcccttttatttatggttatagttttatttatagtctcaaaattcctaaagcaatgctacaaccattgaatttgccatattttgtatcagtgctgttaatttgctgttgcctcaagaaaaagtgctttttctccatggatgaggctagaccctaagaagtaattaagtcaatgtaaatcaaatggaagttttcccatgaactaagcatttattagttccctgattagactggaagaagaaaccactatttcatgaaaagcatggaatattatattttattgttcataattaatgaataaaattgatatgaatgaatatagtgttctttgaattagtaaacagtacatctgtgacaatcatttttaacaagctctacttgtgttctttataaagtgtgattttcagaaagcaaacaacacaattacaaggttgaatctgaggaaaataatccttgtgccatagaagtatttacgaaattgcatttcattgttatgttttattttctgatacatgatgttcaattttatctttaggtaatattttatatcatagattaaaatttatagtgaactttatctgtgtctgtcactttttttttttttatgacccaggaaccaaagatgcagtctgtcatttcttataaaacttctcactacattgtttcttagtagaatttggctgtggagattcaggaataaagaaaagactaacattacacatatccaaaaacatgttgtaattaaaagttccattcattcctccttaccaagtttgttgaatgtcatcacttgtttgctacttacaaatattgtttaattgtttcactgcagtaaataagtatctcctacctacatcagggacaaggaactgtgctgtgaagttgatagatgagtaagccacagtttctgccctcaaggagcttctagttttgaaggagtgggaagg

SEQ ID NO: 58840 - DNA, 1445 bp, Homo sapiens
cttttaattctgtacctcaaagtgatacaactgaaaatcctttttcccccctttactctaaagtgagggaagctgaattaataatgacagttgaaaaccagtgggcagactgagtcctagttgagagttctaggtccacttcagacatggttgccatcaatcctaatcactctgtaagctgtaactgtgcagaatgcttttctccttacatcacagtatagttttatggagatcagaaagtcctaaacagttgaaattttgatcatggtaaaaattcattgctcaggaagggctgctgtgtgtatcaggaagcacatgggtgtcactgacgtctttgctttcttgtgtgtgtgctcctgtgtcagtgcgctggatgccgaaaatgagtaccttgttcaagaagctctagatcgactgatggatggaagaacggtgttagttattgcccatcgtctgtccaccattaagaatgctaatatggttgctgttcttgaccaaggaaaaattactgaatatggaaaacatgaagagctgctttcaaaaccaaatgggatatacagaaaactaatgaacaaacaaagttttatttcagcataaggaagcaattactggtaaacaatatgagactttaatgcaaaacagtgttgcagaaaaaaaactcagagactatgaaatacataaaccatatatcaagttatttgaaaaatacctatttttttccaaagtgtgtaaaagattgttttgaaacgtacctgttctcaagatctttttattcagagttttaataattgtaactttttaaatgtctatagcactgaagttattttcaggttttgtattttcttttcttgtggaatattttaattaatatagcatggcacctcattttcttttgcctgctgttaaagattgaagctattgtcaaatgacaactttaaaaaggcaattataaataaaaagcctgattattttaggccagtttaccaatcactgtgtaattcttctggtagtattctacctacttttaagtctaattttacagatagaataatggaaattgaaaatttaaccctttattccgataatctcatgaagcaaacctaactatttaacatcagctggaaagaagggaacatttatattgcccatctcctgtgtcttcaaaggtgtgagagctgaggaatatgtgttcctatgggaactatgtttgaatatgtgcagttttcaacattttggcacatgaaagcctgacaagtttttaaaagggcagaagctttattttttgaacaggaaaacatgttttttaaattcacatgtttgtatgagtacttttgcgaagcaaggcatgaactgctaggtattattaagaatgaatgatttttgcatttaagttgtttgaaggcatgtattttgaaaaatatctgttacaaatttataatttcaag

SEQ ID NO: 58841 - DNA, 1025 bp, Homo sapiens
cacagtctactattctgcataatgagtttcagggaaaagtgagcaaagactatggcaagagccagagtcctccttgcaaagaagttgcagatttcaaagcagagtgttaatgtaatgtggtcactttgataaggccattttcacaagaccctttggggcagggaaatgttgctgcagctgttttaatttttattaccaggctgtgcacacagcatacaaacctgagcctccccccatttctgaacctctctttgtgattagctcatcctctccccactccacttgggtgagggcaggtggatggtgatgggtgctcaggagtgtagggacatcagtggtgtatatgattagggatggagaaaagagcctggaagtttgcttattttttaggactactccatagggttctgtcagaattgtttgttcccatgtggtttgtgtgtatttcaaaaagtaatggatggagatggattccccgctttgtcctgagtggaaggcaggcagctggaaaatgcaggtggacttggggtctcctggtgcctcctgattcctaaggcaggggactgacatttacaaagttcctaccatgtgccaggtgccttgcgggcacctgctgtgaggtctcattgcttgcagcatggtgagaactacagatgataaaatcctgttcatggcaaaacataaattttaaaaaagactgctaggtctaaatttattagacatgttttaagtctgtttgaaattcgtgatatgttttatttccaatttgtaggaacccattttgttttcttgctctattgctgagaacattgcttatggtgctgatgacccttcctctgtgaccgctgaggaaatccagagagtggctgaagtggccaatgcagtggccttcatccggaatttcccccaagggttcaacactgtggttggagaaaagggtgttctcctctcaggtgcatttctttactgctttgtagcaaagtctctatatccaaagaacttttcacatgtttcttgtttttttt

SEQ ID NO: 58842 - DNA, 1043 bp, Homo sapiens
ttttttggtgacttcaccatcttggtcattttgatgggacgtgttgctgtggttgttcagtgcctgcaggtggttcagacctgaatatacaactcctgaggtggactggagcgtggagcagaatgggcctctgccaaacccccatcctgtctcttcccactctgttgttaaaccgcgtggtctgatctagtattggcctgaggattctttcttcagcaatttcttgtcacatttcttctatgtggcatgctgaatatttatggggttttgtgaagaataaagatgtctgaaaaattccatcaaaacaggatgtaacaacttggggacagtaccttcaagcctgctgttaatttaaacacacacacacacagacacacccacacacacactcccctttcgtaggtaatgagaatgtcttgccacccaatgtaacaaacacctctgaatttttttttgtttttgacagttttttgtctcacctaatctggccacctttgttttgagcgtggtgcctccagtgtcaatcattgctgtaatttatgggcgatatctacggaaactgaccaaagtcactcaggattccctggcacaagccactcaggtaaaggccccttcctgtccgcgtggtttccagcagaatggggtcatagccaggatcctagagggcagatcctaagggatgtacttaggtttttcaatgaagtgcctgcctttcctttcattagaaattaccccaagatccatgaaacttaaactactctgttttctagactagatttctacccatatctcaaagtagatctaacttcactaaacattttatggagtcctcacttgttactatcactatttcttttctttctttttttttttgttttttttttttgagacaaggtacatgagaaaagttttttcatgcactctaggctggagcgcagtggtacaatcacagcttagtgaagctttaacctcccaggctcgagtgatctcccacctcagcctccttagtagctgggactatcgccccatgccaccatgcccac

SEQ ID NO: 58843 - DNA, 1050 bp, Homo sapiens
gactgcccagatgttggagttacagattattttagatcaagcactctcaactcttcttttatagttgaagttgagctgtaagggcaatcatgtcggtcttatgggaggtttgaaaataagcccctcgggctgggtgccgtggctcatgcctgtaatcccagcactttgggaggctgaggcaggtggatcatgaggtcaggagttcgagaccagcctggccaacatggtgaaaccccgtctctactagaaatacaaaaattacccgggcgtggtggtgtgtgcctgtaatctcagctactcaggaggctgaggcaggagaatcgcttgaacctgggaggcagaggttgcagtgagcccagatcataccactgcactccagcatgggggacagagcgagactccatctcaaaaaaaaaaaaaagaaaaaaaaagaaaatgaggcccctggccatgaagctggacttctgaggcttcctgaaggcttcagaaacccatttacatgccccatgcttgtgtttctccttaagtagcagctgggatgataactttgttagtatttctctgaagaggtcttgtttttacaggcaggtcactgccacaataatgagagaacctgggacaccaactcgaagtctgttgctctccatttatctctgtggataattaaccaattcttgccatttgaaggttcaatacaggaaagggtttccagggaggaacaaaatgagcttttggaagttaatgtaataaaacttctttgtaaataataccttaaaaaaatctcggccaagtgtggtggctcatgcctgtaatcctagcactttgggaggctgaggcaggaggattgcttgagcccatgagtttgagaccagcctgagctacatagcaagactccgtctatataaaaaataaaaataagttagctgggtgtagtggcggacatctgtagtttcagctacccaggaggctgaggtgggaggatggcttgagcccacaaggttgaggttacagtgaactgtgatcgtgccacttcattcaggcctgggtgat

SEQ ID NO: 58844 - DNA, 1095 bp, Homo sapiens
gaggggacggcgaagcgcgaaaaagttccctgcgcccagtacgcaggcgcagccgtgctcctgggcttcccgggcctcgtcccagctggcgcgcccggcgctcctccgccagcgggcagttgggggcgctgcagggagggcacccgagcgggttgggggcgctcggaagggtggcttgcaaggtccgggtagctgcagtccccggagtggggcggagaggcgcggcaccgcgcggacgaggatggggcgggggcgggcgcagcccgagggtgcaggcacgataaggcgggtgacagccagcggggaggggcgggcgccaccgcgtccacgccctttgctcggggccgggccgggagggtcctcgggctttgcgcgcgcctggccggcgggctgaggcgtacgggtcgcacgcagcgccatgcgaggcccccctgcctggccgctgcggctgctcgagccaccgagccctgccgagccaggtcggctcctgccggtagcctgcgtgtgggccgcggccagccgcgttcccgggtccctatcgccgttcactggcctgaggccggcgcggctatggggcgcggggcccgcgctgctctggggcgttggagccgcgcgccgctggaggagcggctgccggggcgggggtccgggcgcctcgcggggcgtcctgggcctcgcgcggctcctggggctgtgggctcgcggccccggcagctgcaggtgcggggcttttgccgggccaggcgctcctcggctcccgcgcgcccggttcccgggcggtcccgcagccgctgcctgggcaggggacgaggcctggcggcgcgggccggcggcgcctcccggggacaaggggcggctgcgccccgcagcggccggactcccggaggcccggaagctcctggggctggcgtaccctgagcgccggaggctggcaggtagggtcctccccggccacttccctccgccgggcctctccttctccacacgcggggtcccggggcgccgagagggacacggccgggccgcagagcgcgtgtcaccgccgcctctcctgggccactcctaaccccggaggagggaggggatcgctcacct

SEQ ID NO: 58845 - DNA, 1417 bp, Homo sapiens
tgatgagtgatcaagaattagagtgccctggaggtcactcacaagtcctcatggagactctgccgtgacctcgcgcatgcgagcaccttcctgtctctcattttcaccatctgactggggctaggtttggttagagggcggctgtagagcaccctcaggagaagtggcgccgcaggggtcacgcatggtccagccctcaggtgggagggaagtccttgttggcagagggatgtggggcgggaatgaggaaaggggagggcatgatcctggcaaatagtctttccttttccgtaattacagagaaccaggattttttttaattattgttattataattataattattattattattgacatgaggaaacctagcactggcagagggcaccttctctgcttttaatctttcaggtttgactcctggcactggttttgatacttggaattttgaggttcagggaattcagagaatttggtagcacagtgtattgggagaaagggaaatttcgggtgacagattgatcaccctggctgacatgtttctggaagtgggtgggtgggtttgattgagaacactttgggctcctgcagtgatggtgggaaagaaaaattctttccaaagctgcacttctcttaataattctctcccctcaaaagaaagattatgataaagaataatttggagtaataagtaacaagatagaattagaaaaatgttgaatttctgaatgaccattcagaggtgtggctttttccacgtctttttctcctgcaatgaactgctcccacgtcctgcactgcaataccagtctaatgaacactttgtgaaacaaatcgtaagtatgtacgcacgcatatcaaactatgctctgaggataaagcaagttctaatttgtggaaaaaggattaaatatttctgttttctgaaaagagttattttgtattttgttttctattaaaatgtatttagtttcaaaaaaaaaagtgttggcatctcatttcatctctgaggacaggcgggtgagtgttctgtcctgggatggtgtgtctctctcacctctcatcagggcaataacccgtcggttacctaggccacactgtccccaacgaaggtgcatttttatctgttcttgggttctgtttagcttactttgaatcatgattcccttagtattcacttggattattgatggcatttaatgctgtttgtacatccaagattgatagttgctgactggagaccacatatatttcaccatctagagtcatttgatgagatcctactttgcacttccttcaaagaccccactataaaatctccaaggggcataagaactggactgttcaataaactcaaactatgtattgaacaattccagataaaggactcgttcaaagtaaagtgaacttcaaaaca

SEQ ID NO: 58846 - DNA, 1029 bp, Homo sapiens
gtagaaaaaaaaggtgcccttttcttatacaagaacctaaggctgccacaatgaaccaacaaagctgactggtttggggatcttcatcatactcctttcttctggtgtttaattaaaacccattttaattgatgaattctgggacagaagagacagctgtagttttgaggagtttatctatgtgggaataaagggaaatgaattttgaaaacagatggtatacttgtggggagaggaccaggaaagaggactctttctgagtaccattagttgccgtcttttctgtcgtcacacacaggaaattatttcgaagaatcacatgaatcgcttggctttgcttcaagcacttctgaatccacaccttgttttgttacgttgggggagatgttttttgagaccctccagaaagtcactttaaaaacttcattcttatttattttgaaacactaagcagtttgtggctggtcactaggcagggggagctgtgatttactagtaactgtacctttctagcttagtgttaattcttaaacatccaggttttattttggctaaactcctctgatagttctgggttttgtttgtgtttgtttttgttttgggtttttttgggcacagggtcttgctctgtcccccaggctggagtgcagtggtgccatcacagttcactgcaacttcaacttcccaggctcaagtgagcctcctaccttagcctcccaagtgtctgggaccacaggcatgcgccaccatgcccagctaattttttaaatttttttggtaaagaatctccctatgtttcccaggctggtctcccaactccttagctccagtgatcctcctgccttggcctcccaaactgttgggattacagtgcgagccaccatgcctgaaccaatggttgtgtgttaatcttgaagtgaggctgggcgcggtggctcatgcctataattccagcactttgggaggccaaggcgggcggatcacctgaggtcgggagttcaagaccagcctgaccgacatggagaaacc

SEQ ID NO: 58847 - DNA, 2903 bp, Homo sapiens
ttgtctacctccatctcaacctggtccaaaacagtccgaagagcacagtggaaagtttttacagccgcttccatggaatgtttctgcagaatgctagccagaaggatgtcattgagcagctacagaccactcaaaccatccaggacatcctatctaacttcaagcttcgagcattcctagataacaagtacgtggtccgtctccaagaagacagctacaactaccttatccgctacctccaaagtgacaacaatactgccctgtgcaaagtcctcaccttacatattcatcttgacgtgcagcctgccaagagaacagactatcagctgtatgccagtggcagctcctcccgcagtgagaacaacggtttggagccccccgacatgcccagccctattctgcagaacgaggctgccctagaggtcttacaggagagcattaagcgagtcaaggatgggcctccctccctcactaccatctgcttctatgccttctataacacagagcagctgttgaacactgcagaaatctcccccgatagcaagctgcttgctgctgggtttgacaactcctgtataaaactttggagtttacgatccaagaagttaaaatcagagccccaccaagtagacgtgtcccgcatccatttggcttgtgatattctggaggaggaggtatgaataccatttttttcttccctgcacccgccttcctaatttccttagaatgtccttaccaaacacgacatatcttagaatggacttcctagtttccctcatcatatagctaaagccagactaatgacatgttacctgtagccattgaattcctgcacatgcctaacctaagatgcaaaaacaatttttagcagcattaacttcttattaatgaatggtcagtatttatactatgtgaaatgtggatagcaacactaagcctaatgaaagacctttagctaatattgactttagctgagatttgcagtaaatatacacttatgtgtgtgcacatttgctcaggtacaaataatcggtagtaggataactgagtcgaagggcctccattgtcaactgtaatgaatattattttccccacagaaggttgtgccatttcacagtctcagcaacagtagtaagaatactggcatccctgcaccctcaccacactggatggatggtattggctttctgaggccagtgcatatcctgtggctccatgtaccccggggtgttcccagaccccacttggagaagtaacacaggaagtagagttgccagctcccctccccccgtcagtcagtgttcaatcttgtttggcttgtaaccgtttaggacagtcattgaaaagggcaggcgcagcttgggtttcaggtcaccaaaaatcactaccttagaaaaaatgtgggccaaggaagatagaaattaaacttcacagcattaacttttctttagagtggtcctgaaaaagctgtgggccaaagtatttttgtcttatcaccactgaaattcaggtagctctgcctcacattactttggatggaaaattctttacacaatgttgaataattaaggagcaaaaaaatcactctaattaaattacagttaatgataaggatgtcaagaatattgggtgccctaaattaaaccattgttttcctgttcctgttttctgagtccacttccagttaggatggcctttgaatttttgattcttgcaaccgagacagtataattgaaggatttccttgtgatgagtgaagagtctagattcccatgtagaagctttaatttctagaattttatagtactctccaaaatattttttattacatttgtatttgaattttcaaacatctcttttccttggagacagttccctttttgggagttcttctgataaaactgaggaatactgcctgcatttgctttcgattttctgtaaatacaaaaaaaaattacactgaccttattagctttgatgatacagagtttggagattattctgtgcattaaaaattaatattaaagaagatagcattatgacatctgataacagtagaccaaaataaaacattttaagactctggccactactggtaactagctctgtggcttgtcctatgtttatttccgggtatcagaagtgtatctgaagactcagaagtgaggaaccgcatgcggaattccaggaactgaaagaaattaagtatggctggagttaggagaggggccaagacaggaagtgatgtagtgacactgtcttatatgagcaattatggcggccaaactagggtagtggcagtggcaaaggagacatggatggactagagaagagctcggttattcaattactgtaggggataagggagagcaagcatcaagggtgacgtttgtgtttcaggcttaaacagttggatgtccatcaagaagaaagcaaaagacgtcattggaatggtggttttgtttaagcatttctggctttccatcatggttcatactgaaagtactgtagatgctagctaacctctgccctttttaagaataaaccttttttttaaacttaagaactaaagctgagattctcctattctgttgttgaggggcttcctgcatgcccgcccattttatcacagcaatttgagaagttttctttttggtttctgacaacaagcatttggggagaaagccaggcataaattagttacgatagttggtgtttaatgtttctccagtgaaaatttggacttttctttttcccttatagaatgcataattaaaacagactattattttgaaatgaaatattgaatattaaaaaaaataaaatagagactcttaatacaggagccacaaactcacatacctagagaaaccaaacaggtaaaagcaagtggtgaagccaca

SEQ ID NO: 58848 - DNA, 1104 bp, Homo sapiens
ccttacctccattgtgtagcagttccagttcctcttgggcaggatcaattaccccagccaacactgtaactcccttccttgcctattgattcagaggtgtgaggagcccaaagtggctgggtggctgtcttaacttccagttcagtggaatgattgtaatttttcatcctctaaataatgagtagggatacatttattctaaaatgcatattatgaatattatgcagcagattcattcaccttgtgataaagtgaaatagggtgttaagcagaaataacatgcagatatcttttatcatcaaattagggagcaagattctctgatgcagtattcctcagtcttaaaccctgtattgatgccttttcatgaaaaaaaaaaaaaatgctaccagaacataagtgctgacttaaaacatttttattttaatttatttaaatatgtacaaacattacactagatctaaaacctttatgcttattatatttctttatgaaacccagactcattacagataagggacaagcaaaaccccaaaggcagtcaagttgaaaataacactgagtgaatgtaacggatggattttgccagaactaccttgctactgcaagcaggcatctggacagcactggtgactgtgacacgggctggtctcagctccttggggggcttctgccctgcagtggccctgctgtctccccactgtgtatgaatcacatcgaaacctttgctccctcacagcatgccttaagcacttatttaggtgtcaattatacctctgttcttttctcattcacccatgaattcaagctgtacaccttttaaataacattctctgtcttacagtttcatggcgctaaactcccaagttagtaagtagttgagtcttaatgacgtaaaatggtcttatttgtaaattatcactgcaaaagagaatttaacttgttaaccaacaaaatcagaatgaatatgctgatgagacaattgttaatgaaggctgtcatgttaacacaggacacgccagcctgtataaccagacatgttaatgagcccactaaaataagtgctttgattttacttgagacaatggatgccaaaagtaatca

SEQ ID NO: 58849 - DNA, 1050 bp, Homo sapiens
gaaattgtaggagtcttggaagatagggaattatcaaaatgattccagaaaacttcacagaactagaagacatgaatttccagattgaaagggcccactaagtgcccagcacagtgattgacaatgaacccacaccaaggcacctgtgaaatgtcagaacataggatcaaacatttcctgatgaatctcatggattgatgtacctgtcctctctcattcaccttatcctgtgctttatgcctttccttccctggccttcattttattgggcttcaggagggaggggagagaaacaagtgtcatcagtctgtcatgtttaaccaggacccagcatgctttggaaacctgctgaaatgtcagttgctgtgcgtgtgtgcacaacaccctccttcacccatcctgccacgtactgggttaataatcgtctctctgtttcccgccctgacttgtgtatcttctcctctttagtgcaatcagaatctggttgtgccaacatagtgtctgcagccccttgccaggcagaaccccagcaatatgaagtacagtttggacgactgcggaattttctcactggtaagtactcagctctagaaccttttctttttaagaaaacagagtaatacagaccaactttgggcacactgcttgtgagttagccctgctccacaaggagcggtaaaaagaaaaattaaaaaatagagtaatgcagatttccctcagaaccaactatattccacaattggtttgaggtactagggattcgaaggtactcttaacacagttcttgcattcaaacttatggtctattggaattcctgaagagttcaatcacgaggtttaagtttacaagggcagagctctgggtgtttattcactgttttattcatggccttcagcacagtgacttgtgacttgtattgaataagtaaaaactgtcagctatgcagagaagcatccttaaatacagcacatttgaaatgtacatgacatctctactaataatatagtacatttcacaatggtctttgccccgtatttccaaaagtgcaa

SEQ ID NO: 58850 - DNA, 1758 bp, Homo sapiens
actctcaaaggaaaatactaatgcatgtaactgaaactgagaacttaaaacacatccaaataaatgatcaaaaacagatctcccacacaaaacaactgggaaaccttgatttagagaatgttactttggttgggatgattgtgtgtgtatgcgtacatgaaatgcattccaaaatggacacaatattttggtcctggaggggaaagtatgttttacatgacagaagtgaaccccaaaattcatccagctgtcattggtcatctggactgcagtatttatttctggcaaagtagtgtttgaggccatggcaatactaggggttcctgtcattgttgataataaactcaatagtcaaaggaaacagtgcctcttttttttttttctttttcccttttctttttatttttgtgaacctacaaattagcttgaattattcaaaaataatttacttctgttcaggtcacttcctaccactttcctttcttacaggaatttatgagacatatgctaacacatatacataccctcttagtgttgtgctgcctttctatacctgtggtttaaataaagagcaaaaaaggtaaataatattatacaattaaaatgaaaacacggccaggcgcggtggctcacgcctgtaatcccagcactttgagaggccaagccgggcagatcacaatgtcaggagattgagaccatcctggctaacacggtgaaaccccgtctctactaaaaatacaaaaaattagctgggcgtggtggtgggtgcctgtagtcccagctacttgggaggctgagacaggagaatggcgtgaacccaggaggcagagcttgcagtgagctgagatcgcaccaatgcactccagcctgggcgacagagcgagactctgtctcaaaataaataaataaataaaatgaaataaaataaaatgaaaacacattttgcaaatccctaacttagagctggcagtcttttcctggctattaagcaaaaatatcacaatccccttcaccattgttaacttcatgctttgttaacatctatttatccagtttctgtggtctttgatttggcactgcctcctgcctgcttttttggctagttcactgctaattaacgcctctctcacagagtaggcaggagaaatcaaaggccctaaatttcagactggccctgtttgctctttgttagcttctctaatgaaaagtttcatggggctgattggaatcttggtattaaacagagtttgggggtgatctaaggactttattatcgatgcttttcctattttctgtaattgaagttggctgtattgtcattggagaaacagacaaaatggaagagtataccacgttggtattagggaacttagatttgcgtcttaactaggccacttagccacatggctggtctttctctcccatgtgtcctacccatctgcgatggtgcagttagataggttgctctcccaggcccctgatgtctctgtatcctgtcgttgcctcccttgaaggtcatgaaacgagtgcgtaccgagcagattcagatggcagtgtcctgctacctcaaacgccggcagtacgtggactcagatggtcccctgaagcaaggactgcggctgtcacagactgctgaagagatggcggccaatctaacaggtaatggtgggggctcgtctggtggggtgagcctggagcaggagaactcacgtcaatatccatgtggaattacttctcctcttctcaagacagtgccag

SEQ ID NO: 58851 - DNA, 1125 bp, Homo sapiens
atcctccagaaatttttgatttccagaaataccaatctggcaactgttgatacatgagaatagatatacattgtgtcaaaatcctccagaaatttttgatttccagaaatatcaataatgtgatatgaagagcagagtatttgacatctgtttttacctctgaaagttaagtattttatataaattgaaaatgatgagaaattctgaaatgttaacaaagagtataattatatttaaatccaatttcagtttgaaagattttataattataggaaaagctaggcaggtaacgaaactgcactgttcgtctcatgtatgagtctctccagagacttaggtctagtttaaggagagttttttttcttcacttgtccctttttggatattagtactctggaaatcagtctgggtggaggggaccgatttatctcaggttcattaattatccatgtcacttgaaatatatgtacattggaataaaacccagctgagttgattgggtcgtgtctctagtatttgagtttagcgtggttatgcaagagagtcattgccagaattcctgcccttaagatccatggccatacagttgattcaccacccaccctcagggaagcgcccttatcataaatggtagtttggactcagagaaattgctatttggggcagctaatttaagcatatttgttagaatcagtattacagactagtttctagcaatcttaaatatggtcagtgttgactatcattcattcttactccgttctgtttactctttcctaacttcacatcttttcccttcctcctcagacacataggtatattgtcgcaccttgaggacactgtgtcattgcagagcctgttctccagatcagtcattcacatgtctttcacatgcagagttttttcctgtcagaggtgatctaagagatcgaggcccatctgcctggaatgctcacggatgtgcatcaatatttgcatgcattcccaagtcagcaaaagatcggcagtgtggaagccggaaagatttcagtctcagctagagtagggaattgggctgctttgggaaagcccgcagagtaggagatcttgaagttagatgaaaagcagctgtagcaagtgatagga

SEQ ID NO: 58852 - DNA, 1557 bp, Homo sapiens
gtggatagagcttggtgacagtagacctaggatggaaaccatgtagccatctgcataacctctctgaactgtagtttcctcatctataaaatgcgatgataaggaataacttaaacgtggatttttttttatctttaagagacagggtgcctctatgttgcccaggcctgggctcaagcagtcctcccgcctcagcctcccaaaaaacgacctttttaaaggtacccagaaaaagaatgatgtgtatgaaaatagctaaatgttagctattatcgtttcctttttggcaaaataccttctaggttccctgtagtcctaagtttttgcgttaaatggaatatatgctaattttttaatgaatcgtaaattcttcctgccttaaaaatcagcgctaagctagaaaattaaaaggtgggcttgttttgagtatttttctttgtcatcaacaacaaattaaattagtgtatcttggaatagttttgttgctcctgcctgtaaatgtgaggcttatgtgagcttctgtcactgtgaaactaggtaaaggcctcacttaactactcagtaactggtttttggttttgcaagcaatatattagcacctgtgaaggacatctctggggaaagaaagggggttttgtttctgctaatttgttttgctggaagggagctctaggggtcatctgttaaaccagtattactcagtggacagtactagaagtcacgtttccagcctgtcttgtatgtgactggtggcttctcaggtagtaagtgttctgatcattctctcagcaagcttctagtaagcattcattgttgtgctccctcaggaagcccctggtcacatgtagaatcctttgagcagcaagatgctgtagaaggtgagagctcagacccttcagccaggtgtcctgagttcccatcctggcactgtgtaacttctttgcgcctcagctttcccatctgaagaacgttacctacctcataggtttgttgtgagcttaaagaaggcagtctatgtaaagcacttaattttaaatgctttaagtgtcttagcgtcgagtatgctcagtgttaagtattcgtagtggtagtgtatgaaacagacaagaatagggtaagttctgtgacagatttgttcctgggttcgtgtgtggaagggattgtgatcaaggaagcttttgggaggaagacatggctaagctgagctgcgaagtgcgggtgggatttagccaaaccaggttgtagtgccagtgtggcagtgcctccaactactggagggcccctgaggggagaaggtggagtgggacccaccagtagagtaagaagaaccaaggattggtccagtgaggtaaacaggcagattagagcaacctggaaatgacacagtagacactcaatttttctatccttcacactagtggaggcagtagaaagtattttgttttgttttgttttgtttttggagacggagttccactcttgttgcccaggctggagtgcaatggcgtgatcttggctcactgcaacctccgccttccgggttcaagcgattctcct

SEQ ID NO: 58853 - DNA, 1091 bp, Homo sapiens
tttgaagtgtatgtgcgttgtaaatttatacacgactgaataaaagtgttagtggaaggttactgttgcagctgaaataactgtattcctttggggttttctttttcacttggagacatattactttctccggatattgcttatgtatcttttcctctttcaatttgaaaccatgtatgaatgactctttccacaagtaatgtaatcactgattttggccttgttgaattcctgaacactcacctttgtggaagtgatgtttgatcatagctggaatacatatagtccatcttctgtgtgtgcagtccatcttttgcttgcttttgtctgaatttcccccagaaaattctggagtcaagcatcttgtatgtagatttaccccgacaaatctgttgattcattaaaaacttttaaaagaatacatattaggtaaacaagatacagtactgcaatactgttggttttctggtgcctgctcagtctgacattgttatagtattttttttcccattgtttttaaattttagataaagcctagccatggctgctgtttattctggcatttcccttaagcttaaaagcaagacaacttcctgggaagataaactaaaactagctcactttgcttggatttctcaccagtgctttcttccaaataaagaacaagtaagtttaatgtgaaactcatatttttacagtctgtcaagataattatcacttttataatttggatattgacaattggttaaaataaaaaaatagagaaaaagttggggagggaactttgttggaagttaaatgtaatgtcaatgaaaaaagtaatgagtcaggtacttcattaatacattttttttttctgttaaaaaacctcatttaggtcggggacagtggctcatgcctgtcatctctattttgggaggccaaagcgggggatcgcttgaggccaggagttctagaccagactggacaacataatgagatcccatctcttaaaaaaattatatatattatatatgtatatatatgtatatatacatatataatatatatataatatatatagtatatgtatagtatatatgtatataata

SEQ ID NO: 58854 - DNA, 1494 bp, Homo sapiens
ggaaaagttggaaatactgggagaattaccaaaatgtggcagagacatgaagcaagcacatgctgttggaataaaggatctgatagacttgcttggcacagggttgccataaacctccaatttgtaaatgcaatatctgtatctacaaggcacaataaaatgaggtatgcctgtataacctcaaaaaacgggttaagacgtgttagtttcacctgaaacttttaatttgccctagctgaagacaaatttgttgttttcctgttcttatcctttaataataaacattttaaaataccagaacacgtaagtaatattatcaaaggtaagttgtaaaagagaggttctcccccgccgcccccgtggcaattggatttgcttatacctgtaatgtccctataatgtctaacatctttctctcagcaaataaatttattttcagtgtatgtgtccttcaaattcaggtgttacttgattgggcaagacaatcattggttgcattttataagaaaaagcttgaactgaaggaagatattgttgaaaggctttggatctatatagataacattttacatagcagaaaattgcagaatctcctcaagaatggaaagaccattaatcttcagatttccctagtcaaggtaattcacttttctgttctgtatgtgttgcatgcatctccattgatttcttgttaatgctggaaacttgttttagtgtcaattgtatgaagatataggaaatactaaggtaggagaaaaaggatgtaatattattggaattaaaatagtaactattgaatgtgtatcatatgctctaagcattttgttatttaatattcaaaaaaagcttggaacgatttcataaacaggtcattgattacctttttaattggaaaaggtagctagcaaattatgcttctctgatttgtttttcttcttctttacctttcttttgggctagagggagatcaaaggccaaaatccggacaggaatttcctcaaaggttttttttttttttttttttgccactacggccttcgagccacaagtgccactagtggcttggccggcaacccggggccacctcagtttttgactgaaagtgattttgaagtctcagatcagaagtaggaacttcattgtcaaaactgagtgtgtttaaataccatgagaatagctagatacaataaaaactactactagtgagcacttcatgtgtgccaggctcaaagaagtttaactttcctaaagtcacatggctagttagtggcacagctgggatttgaacctcactctgcctgagtgtaaatcctgggctatgaagccataacactgcctcaccctcatgagtgtgcgggctgagagaaaatcgttagaggctagtaacggaggggaacgaaggttgagctgcccaatggcgcatagggcttaatggttcttgagattgtgttccaaactgggtcactttttaaaataataaaccagtggtcacca

SEQ ID NO: 58855 - DNA, 3807 bp, Homo sapiens
ggggtgagtttgttgatttttttttttaatacttttcttgtgtatgtatgggtttaaggtcagtaatgaattttctttctttcttaatgttcagatcatcaatgagagagtagctgagttctctctttcgggatcccaaagaaacatctgtgctgtccttcgatgttgccagggcatcctgtcgacacctgccctggctgtcatctacacggccaaacaggagctgatggtggccttgctgagccagctttgctggtcggcctgcaggcagcccgaaggagctgtggtagcccagttgtttgaggtcattcacctggcccttggccattatctcttgatcctgcagcagcaggtcaacccaagacgtgcctttggggatgtgactgctcacctgctccagccgtgcctggtcctgaggcacttactctctgggggcacatggacgcaggctggccagggccagctgaggcaggtgctgagccgggacatcaggagtcagattgaggccatgttccgaggagggatttttcagcctgagctactgtcatcctacaaggaggggctcttggaccagcagcaaggggatgtgaagacgggagccatgaagaaccttctggctcccatggacaccgtgcttaacaggctggttgatgctggctactgtgcagcatcccttcatacctctgttgtggccaactcagtggccttgctgtataagctctttctagattcttactttaaggagggaaaccagcttctctgcttccaggttctccccaggttgtttggctgcttgaagatttcacacctgcaggaggagcagagcaaagccctgtccacatcagattggaccacagagcttttggttgtggaacagctactaaactcagtggccaacaacaatatctacaacatcgctgccgacagaattcggcacgaagaggctcagttccgcttttaccgccacgtggctgagctgctgataaaccatgcacaagcacccataccggcctggttccgctgtctgaagactttgatatctctgaatcatttgattttggagccagacctggatgacctgctggcttcagcgtggatcgatgccgaggtaacagagtttcgaaccaaaaaagcccaggaggcgcttattcgtactgtcttccagacttatgccaaactccgacaagtgccacggttgtttgaagaggttttgggggtgatctgtcgtccagctgctgaggcactgaggcagcctgtgctggcctcgggcccctccacggtactctctgcatgcctcctggagctgcctccaagtcagatcctggacacgtggtcccttgtgctggagaagttccagtctttagtcttgccctatttgcagagtgatgccgacatggccctgaaatcactgtcactgagcttgctgctgcactgcatcatgttcaacatgaggagcctggacagcagcacgcctctgcccattgtcagacggacacagtgcatgatggagaggatgatgagggagctcgtgcagcccctgctggcccttctcccggacaccccaggcccagagccagagctgtggctgcagaaggtcagtgactctgtgctcctgctctcttacacttgggcccaggtggacgctatgttcagtttgaactgtagccagtatcactctatgtctgggccccttataggtgttgctctggagatctcgaacctcccttcgttgctcccaggtgtaaaaacacagcattggaagaagatagagaagtttacagctcagttcagctctcttggtacatattgcttagaacagctgtacctgcagaaaatgaaaaggactttaatgcaaactagtttccggtctgaaggagccatccaaagtttgaggtgcgatgctgcctttattattggttccggcagaaaaagcttgaatcagagaacgacggcttcctgggatggccaagttgggatggtgagtggactcacataccctgtagcacactggcacttgattgtgtcaaatctcacaattttaatatcctatctgtgtccagatgatgtgggatacctggccagtgtcctgctgagaactttacccatgggcaaagcccaggaagtctcaatagatgaagaggcatacatcacactggaaaaaatatccaaagccttccttcatagccctctctttccagagatgcagtcccttcattctgctttcttaacgtgcgtaaccacaagttgctccagcattctgtgttctggtgcccagcgtgactcaggtcttgtcagtcagcagcttccctggctttttgaaaaggaccacatggttgtgggtcattgggaaaacagatttgcaaaagctggacccgaaggtatagaacctagaggagaaattgcccagaacttactgtccctggtcaagagtgacttccctatccagctggagggagagcagttggaaagcatcctggggcttttggaagtgatttctgccttacagctggacagcctcttgccaccctatcatgtgcattattttcttgtgttactgtccatggccgtcaccaaactaggatgctcttgctcctcctcactggctctcaagttcttgacgacttgctaccaacttcttggttacttgcaaaaggggaaaagtgctcgctctgtgttcaagatcatgtatggtagtgatatttttgaggttgtactgacctcattgttcagagctagtagtaggttccttattgagatggatgatcccgcttggctggaattcctccaagtgatagggacgttcttagaggagctaatgcagatgctcatccaaatgaagctgagcttggtgctcaattttagaaaaatcaccgcattcctctctagttccaaaccatacacggaggcagcttcaagcaaacaattagaaaatcagaacccccagggcaggcagctccttctggtgtctttaaccaggttgtgccatgtcctgggacctttcctcaaagagcagaagctgggccaagaggccccagcagcactgtctgagctgctgcagcaggttgtgctgcagacaggagctgtgctgcagctctgctcagtgccgggggcccggggctggcgccttccctcggtcctcatctcatccgtcagcacgctcttggaagccgacctgggtcagcactgcagggatggaggggccgacatttcccaaggaagcgacaggacgctgctctcccatgttgccctctaccagggtgtttactctcagatactgttggagttgccagctctcgcgggacatgatcagtcttttcaggcagccttgcagtttttgactctgttctttttggccccagaactgcatcccaaaaaggactccgtgtttacctccatgtttcattctgtgagaagagttcttgcaggtaagatattttctcttgagctaattctgtgttatagaggtctggtttccactgctcccctttttggaactgggaataagtgaacacgtgatgtgttcaaaaggtaccacatgtgcggctgggtgcggtggcttacacctgtaatcccagcactttgggaggccgaggcgggcggatcacaaggccaggagatcgagaccatcctggctaacacggagaaaccccatctctagtaaaaaatacaaataattagccgggtgtggtggcaggcgcctgtagtcccagctactcgggaggctgaggcaggagaatggcgtgaacccaggaggcagagcttgcagtgagccaagatcgcgccactgcactctagcttgggcgacag

SEQ ID NO: 58856 - DNA, 1591 bp, Homo sapiens
cctgcacagagtcgacctttacagcccccctggtgaaaggttaatgggttactatgcagccgttaaaaatataattatgaaaactattatgaagacaagggctagaaatatctagaaaatattaagcaaaaaaagtacagtatgaaatgttaaatatgccacaattacagctatataagatatacatgcgtgcagacaaaggctagaaacccatccaaaaattaaaataattattgtattaacatgcatgtattaacatgcattgtattattgcattaacatgttgtgattgttgctattttcttattttgtacactttaatgttgcattttaataagaataaatcaaaatacttttctatgatttaattaaatatgccataagcaggggatagattataatgtttttggaggcccatttagagtttgttgaggttttcctctacagtgaaggatgattaagatttgttacctttattagggtatacaaataaaacacacttttactcctcccaaacaaacagttaatggaagagatttcttgtttcaagatggcacacatcacagttgtggggggtcttttcttttttgttttggtggtaacgaaagggctggggtcaggtcagtcttttgaggtgaggtctggaagtcagccgaatctgaccctcgttaatgtcacattaacgtctgtgttaagcacaccttaacctctgtgtttctgggtggagaagctgtgacgggtggggccacgggcgtgcctttcggtacgtgagggttaaatgggttctcgcagaaagtaaagccatctggtctgcctgtgccagtgccagaactgaagtgccatgggccaaatcacgctgctgttgtctccctttcagtaacctgtctctggctggattgtggattaactgaaaggctttgatattacattgttctgtcttattgtgttagggtctcttttagcgaatggtgttcaccttcttaatgggggctaaaatagagtcttttattaagcctaattacagtgttctaagtgactggcccaagaaatggcagctggtggtctgaagctctgccctgtgccccttagctaaagagaatattgtgtcctccttttcctcttcaaccctactgagttgaggcaatctctttttttttttttttttttttgagacagagtctcattctgtcacctaggctggagtacagtggcccggtctcggctcactgcaacctccgcctcccggctttgagcgattcccatgcctcggcctcctgagtagcttggattacaggcatgcaccaccatgcccggctaattgttgtatttttagtagagatggggttttaccgtgttggccaggctggtctcgaactcctgaccttaagtggtctgcctgcctcagcctccgaaagtgctgggattacaggcataagccaccgtgcctggccaagttgaggcagtctttaagtcctaagtgtatgtccctggactgctggtaccttatttcctcagggacagagcacctcggtcacagtgtggtcagggttgggcaaggccagcctgccacactgtgccctcagctcatggg

SEQ ID NO: 58857 - DNA, 1049 bp, Homo sapiens
gaagggaaaatgtatttgccattcattaagtgaagtaggttatcatcaaggtcttcatcctcttcatcctcacactgagtaggttgaggaggaggaagaggaggggttggtcttgcagtctcaggggtgctagaggcagaagaaaacccatgtataagtggatccatgcagttcaaacattgttcaagggtcaaccgcacaaagcaataatcactgtcttctgtggttcaggtttacctcctaagcatggctgtcgtcttctgtgtttgtgtgtgtacacacaatgcacaggcgtagctgtgcgtgtgagagcatggcatcacagtaactacgtgtacctgctttttccaccagtgcttatatcaccatgcccctaacttggtgatttttgatggcggccacagctgtgcgcagtttcatcctatggctacttggtagtttatttcacctgtcacatcttaacaattttggtttctttcccacacagatcctgaaattcctgttcaggtcactcaggatattgagcctcatttgggagccttgttcacccaaatgttagaggttgggacgacagaggacttgaggctggtgatgcagtgtattctccagggactggatgtcagtaacatgtggaaagcagatgtgcaggtgggtgccttctccctccttgtgtggcaggctcagaaaccacgtcggctcaaatgggaaaactgatttgagatgtggtgtcacccttaaaactaaacaagttctaactggtagagactctaggcaaagggggaggctgtgagagggagccctggcctgtgggacagcccaggctgcggcatagggaggccttagttttcaaacgggaagtttttcaaataacaaatgtgttgtcttattacgttaaatactaagtgttacacattcacaaaactgatccataaaaaagttaaattctgctcattctttgctgaagacctctcacaccatacttcttgaaacatgtggcctgattgggccatactgccttcatgccagcatttgagaagcacctaggttag

SEQ ID NO: 58858 - DNA, 1041 bp, Homo sapiens
ccaagtcaccaggattataggtgcatgccactgcagccagcttgtagatgcctatttaatcagatgataaaagaaggaattctggggctttctttgtccccacaaaatgttgtggttagtttaatgcactcatttatttgtaggagttgtatgtgtgtgtgtgtttaaggcctatgatacagtgagaataaaatgctttacaggatgggatagtaatgttgcagataggagtttattttgttacagtcttactcaaatgttaaaatttgtgtccagttgttgctaggctgtttgtttcactagaacagtctggttcagattgggactgcctcctgccctctaaaaaccctgacctgggtgttcttacacttaggtgcgaaggagcagtatctattttaccatcatactctgccctaattctagctgttgctacctgagacaattgccctgggttagcatgttcctggggcaaaagggtctaaaaaacagacttaatattctctcttgtttccaatttggctgctttgtcattttcctgagcatccgtgttggtggatggcaggggtcatcgtcaccgagcatgtgtggtgagcatcaggagaggcacgtgacccatgctgacgggcagggacagtgttgatgatgcgtgtggtaggccctcactgataagaacactgggctagaatccacttacgtccacccagagggtgtagcaggggtccgcacagccagaatacccagcagaacagtgagcattgtgagagacaggacccaaaaggcctcaccagggctgctgtgtatctgagaaggagggtcacaggtgagctgtcccaggttacttaggtaagactttgagctgtccttcctcttgggtctgttctctttatattctagatcatgaattgaatatctttcactagagctgatctgtaagaagtttagcaaatagtatttaacggcccacggaccacatcaattcattttggagcacagacatttctacctcagtcactcagagctgcagtgtttgtgttatttcct

SEQ ID NO: 58859 - DNA, 1011 bp, Homo sapiens
tgaagttacgcagtgtgggttctctaccctagatagttaaaacaagggtcaaagagtctaatacaagatgggtgagcagtgacagcagcatgtccaggcgaaaggatgtggctatccctgggcacacacaactggtttgagtgtcccgatagactaggctaagaaagaaataagtatgagctcctttaaagtagaaaaacttaaataatcacgtatgtacttttacattctgttatctgtcattacaggtaatgctgaaagccatcccttctttcttgaactctttcaatagattggtgttttcagttatgcgggaagggcggcagaaggacaaaggtaatttggagtaacatcagacacagtttcaaatatattcatcatgaggtgtggctgctggccacatatgttactgaaaataaaactactcacttgtgtttaaataagagaaatgatatcaaatgaatactcaaaatatatattttttaaaatttcaaatggtcacattttatcttatccaaaacagtggatgaatcaggcatctccttattgaaatagttccttttctgggaaaaaaaatatcagatttaggaaatgtttactgagcatgtatatcatgtaaaggggatataaaaatgacttacaaccccattcctgcccttaaggagcttatagttcaatagggagatgaaaaggaacaggcaggtatagagcaatctcattttataaaagggataaggtcctgccgctcactgttccagcctcaccttggcaagggtgtgtttgtttactagggaaacactaactgccatatggcaatagcatatattatgtgtacaattcatttttcagctttgaagttgattcttgttgaatttctaatttgagggagacttttattattttaaaaattgctggccgggcgcagtggctcatggctgtaatcccagcaatttgagaggctgaggtgggtggattacctgaggtcaggagttgaagcccagcctggccaac

SEQ ID NO: 58860 - DNA, 1072 bp, Homo sapiens
actctgtctccaaaaaaaaataaaaaacaaaaaaaaaaattgcatgaatttcgattttattttgcagtattttgaaattgcatagcatgtaccagccctgtactgtctgatgtgctaagcagtaggtcagggtgtcagctcagaggctctgggaccataactcaactcggggtgtcagagaagagcctgtgaccgtagttgtgggccgactggaaatacaggagtggtgctcagcttctctcccaccattgtggttcagttttgtagacctaagcaataggcttttaaccagacatcttttgagaaaaggaaaagggcattgttaagactaggcttcaattcctctgcccggttttgggatcaatcagtggcacagttagatatttcgcttcttcctgtatctggtgcagagcacgtcagcttcatattgtgaatcgatttaggagcagccttagtaaacaagtttcccctcccatgccagcctcagcaagttggtggtggctgcctacagttctgtgtcaaagcctctcccatcatgtctgagctcagcaaggaggaatctctgttcttgtagtcatgtctgcctggacggaaggccggggccttgctcagcagtggtggagcacagcctggtcacactgccacaggcatgtcctttgtcatgtatttgaggaagcacaggagcacatcacacttctgggactctgtgctgtgttcatgtgaaggtagcttcgtcatcttatctgctaagacctggttctcagacacattcatggcttaactgagtagagttttaactattttattatctcttttattggtatctaatatgctctttctaatgagcatgcattaaattggtggccgaaataacaagtgctatgtattcatgttgtaaatagcatgtatatggtgaacagtctgaaaagagaagaaacagtcaatgttagatattaaagcatatcactaaagtatattgtctgttgaaatgctacatgaatgttaacagttgacatcatttcatacaattacattgatctagaaaaattacatctataaaagatgtctgtat

SEQ ID NO: 58861 - DNA, 1804 bp, Homo sapiens
ggtcttgccatgttggccaggctggtctcaaactcctgacctcaggtaatccacccgccttggcctcccaaagtgccaggattacaggtgtgagccaccgcgcccagccattcaacagttatcttactttggaatgtcattatgctattttcaaaattccacaggatcctgtgtgacccatagtaagttcactacagaactttgtaaatctatgctgtataaatcttggtttaaattgactgtcataggcttgagcaaagtgcggtgtattcttttgactgtcttcttctgtatgtatagatatacatttatattgtgttcaatctctctgtaaaatacccatttcccctttgtaaatcttgtaagaacaatagtaaaatcacaagtaagcttgttagggtagaggtgtcagcatttgtccagggaggctgggttgaatgggcttccttagaaaacctggagctgcatcacttttcatccctgctcctgttttagatacatctagaactactaaataatttctaccccgctggccttgctcacctcggcaggtggcgatgcctgtcctgtgggtggggacatgggggcagcctggccatgtgagtgcacacaccttaccgggtgtggagcccacacctggtaagtgttgtggatcttgagaacaccccttcacgttgtcctttgaccaagatgtgggcttgtagtttggtttcattgcagttatttggcctttttatggaatcttagtatttcccaagcacaccagtcgttaacatgtaagcttttgatgaaagaaaagctggcgttattttctgtcttactgaataataaaatgagacatagtaatatcacttcactaagagccaagaagagaagcagtaatttgaacccttcagtcactaattattattctgaaatttactttatgaaaagcctctggcttcctggcctcattattcatgtctaatttatgctcattagttatattttatttttaatcttgaaagccaaaggctttgggaattagctagggccatagcctcccagaatccactggcaccacagtccatgttctatctttcattttgtttttaaattcagcaatgaagaaaatattccatatgcattagcagcttctactgagagagccataaatctttctagaccagcgtgtttaagtttaattaaataccagatctaatgctaaatagatctcctttgcattttccttgtacttctgcagagttgagtattgctggtgggacctgtcagtagtcagggaagacgacctggtgagatgtgtcagtcaggagaaggggcagctccagaggcccgcttgtcttctttcctccaagcagtaatgagtccccatggaaacatgcagggaaattatggttactttcatctccttttttacctgtagagcaaatttacaatgtccctctacagatgctcctggacttaggagggggctgtgtcccaataaagccatagtatattcaaaatatcattagttgaaatgcattcagtacttgataaacccatcgtaaaagtgaaaaaatcgtaagttgaaccattgttaagtccagatgctccttgacttaatgatgcagttatatctggataaatctgttgttaattcaaaaaatgtcaagttgaaaagtgttaagttgaaccgtcttaagtcaggaaccatctgtatggtgatagcttagaataagtagtttgtgctgctcatcttatctaaggttttaaaagctacttagtgatgttttcatttgttggccagtgatcttagtgttgt

SEQ ID NO: 58862 - DNA, 1298 bp, Homo sapiens
tggagttttattccaggtttgtgtttgcttgagttagcttctatttccccaaaatacaaactttaaaaatatgagtatttaaaggtttgacttagtaataaaattatattttaaaagtgaatgtcgatttttttctcaatttggaggtcagtttgaaattacttgttagtgcttcccaaggcattgttggcaggtggtgcggcttgatctctgcccccaattgttctcacagaggtttgcctttttcctcaggtgaccttatatccagctgtgaaaagtctgctgcaggagggcatttacctcatcctggacctctgcatcgagcctgacgtccagttcctgcgggcctcgctgcagccgggaatgagagacatctttaaggagctctataatgactatctcaagtaccacaaggccaaacatgaaggagagaaaagatatacggcctaaggctatgggacagaagtgccgccagtgacactgtccagaggctttggctgcatggtctgaaagagctggagaatgaaagacttaagatgttctaattcgtagtattggtatacatagaaaatcctttggggtttatgtagtatattttgatgtattttacatcgtgtttttcttactattttttaatacatagttttatgcagtaagtattgcaatagaatcctgaaaattgaccctgggatgagattaattcaatagaaaaattgctgactcttgggacctttctgtgtttggttctcgtcttggctcagtggtttggtgttccctcgtctgcactggaaactacataaaacttggctttttactttgggtacatgggcgtataattcagccctgtttaaatatacttgcctttcaaattcttcaagtaacatgggaagtattcttgaaatgtcacattttctgccttccctctaagtatgctttctgaagaagtcagggaaagttagagtctgtggcctgaggtgtctgctctgggtggcgatagtgggcacctcaggcaggtcggtgacgtttagcacaggtgccagggctcctgcctgctcctcctgtgttagctctgtgaagttcatttaggaatttttttttcctatgcagtttaagaaataatcctaattgttttttcttattacctaagcaatatatttttattatagcaacctcagaaaagaaaaataaaaggataatttaaaaaactcattcatagtctcagttacccagataacctcggttgtcaccttggagtatcttgttgtagtccctttactatgtgtatgtatatagatgtg

SEQ ID NO: 58863 - DNA, 1876 bp, Homo sapiens
ccaaattgccccctagaatattactaatttattttcctactagtgagtcaactttaatattattgatttttgtttctttatgcttccttgataggagagagatgttattctgttttgaatttctttaattactaagagattatacatttttcacatttaccatttttatttcttatgtaaattatgtttatataattatctttcttctgtaatagcacatttctcaattgggatatttaccatttttcttattcactgtctttgggggaatcatgttggaattccctttttaattagttcaaaatgcagacttttgaagttatttgaaggatcatccttaagcaaaggctttttttttttaacactgtattttcaagcagatgtgattggagcagacaatataaaatgaatgtctttgatacctaagagaaatggcccttgttttacgccccacatttgattttatttcctgtgctatcttgtgggggctgggggacagtcctgccttacgcactgcacatgtcatctgttcccttcccttcctcatctagactgtgtgtgcagagggcctttcgaagctctggccaccagaaatgtcttcggctggtctggcatcctttcgcttaatgctttgtgttgacagaattttgtttctgtagtaaactccctgcaggagcctcgaagagagtctggtggcgccatttcttgttcacaattggagatgggtgttggtgtgagcgggcgacctttcaaggacacgagctgtaaacaagcgggagctaaaacacggtcttaggtttgcctctggttcaagtgcccagaccggaagctaactgtctccaaggccttcatggagccatggctagtttttcctgtgctgaaagttctgaaggccagaggtgaggggaccatcctttccccctgccttgggaatgctgggtgagctgacgaacgtggagcagttcatcaggcgtcctggtggtggcactgcagggcctttcgaagggagttggcagcggctgccaggtagtcagccttgaaggaagggaaggacgaagagaaggctgggactccacctcctccctgcacagctctgaagggctctctgctgtgttcccatttctggggaagcagtcacaggttcctcacagtcatttctatttgaactctaaacgctcctcagcaaagaatttgttttaactccattttgctgattcatagggtagaagaaacatgtttctggctggcaaatatggaggctctgttgttcatttttatcctgttagaatagacctcacaagcaaagagagttggcccagccagctctccacatggcagagttggggactcagcttggggaacggcaaaatgctgggcttcagagagactgtccccactggacttgctgtggctccagacccccatcacctgacagatgtgcatgaatcacctgtctgtaccaggcacggagacatggccctggtcctcagggagctttctagtagaggacattgacaatgagccaggaaacaaataggccagggggtgatcgcggggttggcagcaaagcagacaagttcagtggctggagaaagaggtgatatttgaactgagacctgcctgggtggtgagaggcgcccctggaagggcctggggtgctgatccttaatgcctgcactgaatccatgtggcagcctggttttggctgagggcggacacctgaagggaggggtgggcgtaaggggagttgggtgagagaaggctcagcggggtgactttgcctgggatgttgccttgggcggtcctggacagtagtacatcagggggcccccaatggcacagacaacacacagccccgttctcgaccttgccctgc

SEQ ID NO: 58864 - DNA, 1004 bp, Homo sapiens
caacgtgcagtttcctatcccttactccctcccacccttccctgaggctccatggtccattgcatcattcttaggcctttgcatcctcatagcttagctcccgaaggtatctcttagtacatttcccaccctaggcagcccctggtctttgtctcctgtgtcttatgtcccttggggtataaaaacaggaactttggtaagtttctatcttattatgatggtttcttattttttctgtattttaaaacttttcatttaagctaatttctcacttacaaaaaaattagagaaaattaccatataccttttcccaaattccataaacattaatatcttacataattacattatgatgatcaaaatcaaggcattgattttgataatacgattttctgatttatgactgatttgtattttattattagaagtttacttataataattataagtaagtggttccgtatgtatggactccttctagattcttttcttgtcttttcttgtctttcttcttttgttttactattaccaacaatgatgaaatgaatgaatacacagctaaatgaatcttattttattaacaaagaaaattgtatttacttagaagcatttagaatgtcaacaaaacaaactgcaactttttttttgttttgcggctacagagtggtattcattaacagaacaacaattatttcatataagctgcatcagaaacaaccgaagatgaaaaaactaccatccccatacgttcctaatttgtgctgtgcaccaacaacaacctgcttgaaatatccatgccaatttacaaccccatactgtatcaggcaaagttagtggctattgaacatatcaccaagacagggctatctaaagacacattcagtaatgtgttaactatacaaaaaaaaacactgtacagttaagaataaatcttacacagcctcccatttcaatgtcttgctttaaaaggagtgagttgtgtacaggggggttaaatgctttaa

SEQ ID NO: 58865 - DNA, 1048 bp, Homo sapiens
ggcgatttaagttgtttccagtccttgctatcacaagcaatgctgcaaggaccatgtgtgtacatgtatcttttgcatgctgcttcaagtatctctgcagagtaaaatccttgaagtgcttcatcaaagctacgttcatgtaaaattttgacagagattgctaaattgctctccaaacacattgcatcagttcacactcccaccaacagacaagagtgtgggtttcctcttatcctgccacgctcagaattatccagtgtttaagtctttgctaattgttgtgcaaaaacaattacatctggttgcttcaattctttattagtgaggataaacatctttccatgtagctactgaccattgcatttcttttaaggaaatcacttttgtctatgtttctgtggggtgcttcatatttttcttattgatttggaagagttcttcatgtgccgatagggttttaatgattgaatcaccacagtgagaattcttttcgggctccttatatcagatttcccctgacctggtttatcatccgaatcatctgggaaggttcacaaagtacacattcctggaccccatcccagaattcctgactcagtttgtctgcagtggagccaaatatccgcatccttgtattttttaaagctccctaggtgattctggtgaccagaatcctcagtggctggcttaagggacagcagaatttaccactttcaggctgccctttgtgtaagacaggttcccatcttcttagggcaagtgagaagagcctgcagtatcaggtgtctgctactttctcacaaggtttcagaggacaaagagagcagagactgaaatcagggccaggttgagcatggttgactctgactcactaggccttaaacccttctcccccagagggaagcattgcccaaaaccaagagaggcagctagcctcctgcttcagacctcccaaaagggaaatagcaggttgcttgcttagggtcgttcaggatgtggctcaccctttttgtttgggtagattgtttccttagggcaccggttgctg

SEQ ID NO: 58866 - DNA, 1073 bp, Homo sapiens
aaagcatctctgatctgggcagtctgctgttcaatgcctcctaatctgctccttaaatatggctccattcataaggtgagcatccactgaaaacagagggaaagacttattcattctccttggtctgtcttcaagggcagtgactctgcacctactgaataaagccatgctttcatgcagagcatgccgcaatctggccacagcatgcctttagctcactctctcactttctctctcctctcctcccctttgcctttctctctgtctctctttttctttcctttccaagctctattcagaggcttcaagtatgcactgcatattctttccttgaggcatttgcttctatgcctgatacagatcaaacacacaataggcatgtgttgggcaaataattttgaaaatgaatgaatgaatggtgtgattctgtctgcctagaagatttccctccttgtcctcactaattccaaatccttactctcctcttacttcatcgagctcttctcagaactcacacaacactcattgcccaaacctctcctttgacctctttcctgtgttactacacacaccaccaagtgtgtcctcgtatgtccttgtgttccctgtgctttgctggcatgatataagttgttgattagtttattccactattttctacaattgtttactatgtaattcgtctcaataaatataacatctatgccttgctttacagcttatagtgttcttggccttgtgttaccccaagtggtacctataacaatgatgatgagttagagatcgggaccccattgacccaacaagacaaccaaggctcccacaaggagctgtagatgatgaaacagacctccagaggcaaaatccactgccccttccactggtccagtgctgccagatcaagcctgttaaggacagacggtcactgtgatgattaattctgcatcaacttgactgggccaaagggtgcccagatagctggtaaaacattatttctgggtgtgtctgtgagggtatttctggaagaagttagcatttcaattggtggacttgttacaataggtatttaggca

SEQ ID NO: 58867 - DNA, 1407 bp, Homo sapiens
cccgtgcgagccaggggccagtgcgcccctgcgccccgagcgaggccagtcccggccgttcccttgcggccccagcgttaccctctgcccaacccggcccccggccctcccgcgcgagccggacgtggcctcctgcgcttgcattttccatccccactccccgcttcagggagaatccctcttctgtggctgtgtttttaacatgctccaggggccgagtgatctggctgtggggaccgtgtgagccgctctgcggttccgcgtcctcgtgccgccgctccggacggccgggccctgggcattcgggaggatggtgagcgccgagaggagccgggacagcgcggtcctgcggccgagcgccggccgggagagcagggcgtcgggctgtgtgctggagcatgccggcaggggacgtttgtagtgttttactggctcctcggctttgaaagcagcgttatcttttccgaattcctgtaaccctcgttactgtgacatttagtgtcaccgcaaacccagaaaattctgagttaatggagatggactacgggtggttgggttggaacaagagagtggtatcctgaaacaagccagagggaactaactagatgaacagacttcagttctgaagtcagacccctaaatgtccacgccggggtttggctgcttcagaggttttttctttgcttcattcattcattcatagccgaagatgttaggtggaatgggtgccttatgtggtttctggtaaattacgtggatttgttttatctagaagggcagaaataaagccctctttccacgtgctgaatcggcctagcttctgagctgacattgtactcttagcgttgtttttgtaaaaaatggtataggtagtatatgtacgcgaagacttggtttattcttgaacagcaaagagcatgcaggcagcaaaagccgtgcagtccattcagagatataatcgtgtaaaactggaatgatttttaaaactttgcttcccggtaaactgtgccttggccactctgcatagcctggtgtgctggtgagacctggcaaagctttctgcctttcatgcaaagaaaaccaaacacataagccacccttggcgtttctctttccttagtctgccactttcattagtacacgtgattagaaagagcaagcgtgctcgttcgcctcccggaggctgattcctcactctggtgggcttcagttcctggatggtgtgaggggtcttccatgcagaagtcttcagacactcctgaagtgtgtgattcttagtttgtttttttttgttttgttttgttttgttttgttttttttaaagaattcctggtggcaatatagacaggtacggagaccaggtagaaaaagtgggggaaatgaacaattaattacacatggattggt

SEQ ID NO: 58868 - DNA, 1983 bp, Homo sapiens
ttttctctctgctgtaagagtgtgtggagcctgagaccccttgcctgtgtgcctgcatgctgggaggtaagggacggtgttagttgagggacatgatccggagccctgggagcctgtccactttgcacagtagcatcacccttattccctgagctggcacgagtcctgtggcccttgcccgagagtccaagggtgggggactttgggtgggatcttctaggaatcatgcggggaggcgggcaggttatttcttggaacagtgaaggaccttgccgggctagaccatggtacacatggaggggaacgttagggtgtaaagttggagaaattcagaactaaattgtaacgggcttcaaatgccaagctgaaccatttgggaactagtaatgtttttgagctagtagtagacattaaagggaaatggcacaaatccacttattggcattgagtgagacctagctgtttacctctttgtgcttagtgaccttcactgatgcattgaacctctctgaccctcagtttcctcatctttgcagtgggagtaatcattcttacctcatggccttgttcggagagttaaatactgttagtgggtgctgaataactgctatctctaaaagaggaaaatgaaaaaataaaagcctaaatatccccttgaaagtgtagtgaaccaggaatcttaagttcacggtattcctgatacaattcttgatttctggaaaatagtcgtctttcttttttttatccgttacccccacctctgagattgatctgactggttcatttggggtttgggctatgaatcttaaatgctgttagagacggactttttgggaagttgtccagacaccatgccagctctcttgtacccaattgtggtgtcagaatggggatcccagtagtgggcagccatcgggaatgtgggtggagggtgcagcttgccttggcggttaggcagttgtagtgtccaacagtggacagacgtgtccctgaacgaggggttcctgtggtgggatcccaggttctgagctccactgctctccctctgtagccctgcccctcttgttagaagggcaggtcgctgtgatccctggaagcatgcatgacttgaggtggagcatggggccctcacgtggtttaatgggtgccaaaaatctgtgagcatcttggtggatgcggaggggaacacccataccactccttgccacctatcatcagtttggagtttaaagaaagtccacttcaaatgagagtttgaagttgacacagggaggacagtagcagggaaaaccactgtatagccagataatccgacagtggcactgtaacataaacttctctctttaaagaaaataaagtttcccaattctggagtgaagctgtggctgcctctgggtcagcaaacataatggaaacagattgtgtgactgctgaacagtgcaaaagtaacgagctcttccctagacccttgagcaaaaatgaaaaagcaactgctttacccagcactgagtggggtcagcttgcccaggctctgttggaccttggggtgggggacacctgggaggctggtgaaggttttatgagtcttcagacccgctgtcagtttccccaccctagctcctgtttggatgaatgatgggtgagtggttggtctcctgtttggaacagaggaagaggtggtcagaaaaatgatgggagagggggtgggggagattgggttggggaagacataatttcttcttgctactgctcatgtttcttagggctttggggagagggaagtcagtttgggaagatactgattttagtgtcaaagcaggcaaggccactgtcctgcctaacttctagcaagtccagaggcagtgggcttagtgaaagcaggtgtggtggggcgggggtggcggggggtgcggtgaggctgcctgggacagagacacaggtgtaagcaggagtcgactgtgaggctctggctgagatcccagg

SEQ ID NO: 58869 - DNA, 1066 bp, Homo sapiens
tgcccatgaattaagtactctgttatcagtatttgggtaagtgtagatgactgttgggtaggggcatttgtatggctgtcctggatgatgagagggttggcccagtgtgggatgcctcccagtctcattgtttcctccttgctgcctctggggctttccccttgacctagatgttgagcttttgctctgtgaccttcaaaaggcctgccctgccgcactctccttcccctcctgcccttgtcctgccccatcccctgtgccagggagctcacttagttgtcttcctgtctcacttttgatcatcactaatttcccctgtgtctggaatacaactttttcatcaattccgagaggccattatttgtcaaacatgccattattttgtggaccactaggaaagaaaaaacactgtccattgacctgtgacacaacgggttcttatcagttggcattcttattttctacttattgaaagagctctttcagaccgagacatcaatttttccatatatcactctcgggcatagatagatacaaaggaaaatacaagtgaaatacattgagcaaagtgttctaaaagtttttcagagtccaagcactctgagtcactttttgactcagatgttagtgcctattttcttcaaacagagtcatccactgtgccaccaaaagcgctggtgatgtagcatttcctaaggaaaaaaatccataaaaatactaagagccattggttctggactttgaagacagcttggcaatgaagtcgaggtagccagcctttgactcttctgggaattttgcctaactcctcaattcaccatccattcctatcccaccatgatttggtttttagggattaagagtgcttgcttcattgtcgtttcttggattttcttctaagccattgacgtatatgtcctgcagatgtggatgattgagcatgggctggtaagaatgcatcatgggccttgcccagcccatagcattgccgacgtcattgattgtgagctgcattccagtcgggggtggtggaggaaagggcatcttagaattgaccaattacagc

SEQ ID NO: 58870 - DNA, 1053 bp, Homo sapiens
tattttattttatttatttatttttagagtcagggtctcaccctatcacccaggctggagtatagtggcatgatcatgatcatagctcactgcagcctcaaactcctgggctcaggcgattctccacttcagcctcccaagtagctgggacaacaggcatgagccactgcgtccagccagatgttttattatcttgactacacccttctcatttgccaggcacctctttatgttcagtctttctgccagatttttcactcatgctaggcagctttgcttgtggttataagctatccatcaggagctgtggatgacttgggaagctgagtgggagaccgttaataaatatgtgttagtccttttggttctcccaacaagatattgatgctaaaggctattttacgtggtatttgtcaataagagattttggcaaattatgatactgcgtatcttctgtaaggtataattcctggtacttcaaatttatgtcagctttgtctctgagatgtctgaaatgctttagagccattgctcatttgtcttgcttttcagcatgcctgggagaatgaacagctggggagaaagaacagcttttcttcccacattcacacacagtttctgatggacccacaggttactagcctgccccacgggtcatgcagtagcaaagttgggactagaatttcagtgttcctccacctgcctaaagtacggctctggagaaagtcagccctggctgtcctggtcttagtaaagctatagttcgtgaaacatcaggttacaaatagcaggtttccctcttgctgacgcagagctgcagcttcaggcttggaaggtgctgattactggggctggtgatctactaaccctttattgaaactgctgatgtggatgatcgagaagcagagagccgggaggagaatgtaattcaagtctgggttcttggatggtctaagctccaggcctgaggctggccgtcatgaaaggaacataactgtggctgtccaggcctcataattgggctcatggaggcagacgggctcatgaggaatg

SEQ ID NO: 58871 - DNA, 1044 bp, Homo sapiens
ggttggctggctgtagaggggttggtgactccagtgtcctgtggtggtagacagtctccagccaagggcatgtacttctcacctccctgcctcgtgaatctggtcagtctggtgtcaaacttgaaccagtagactgctgtggatgtgacactgggcgtggtgcaggctctgtccttgaggggcctggtagccccacctgggtcccctggggcccaactgccatgctagaagacgtccaggctgctctgctggagaaagaaaccgtgtggggttgcctggagggtgagacatgttggaggggagggagggagaggccaaggcctcagacaggtgagagagccccagccgcgaggcacctgtggtctcaccatgggacataagaacttgtttaagccatgacgttttgggagggcttttgtgcaggaatggcacccggaactcctgcttcccatgaacccagggctgtgggcctggctgctgggagtgagccatttgctgggccagggatttgccctgctgcagggacttttctaacccagccgggccaggctcacctgggggcccttttgattttgagaggacgcatacctcagcctgcattttggtgtcctcttgctagcacctgccagctgaggttgagccatggtggacaatttttccttttaagacgattctagttactgaaccaaagatattaattatgtgcttatctgtggtaattacaactaaagcattctttatcactgcagcttagtcatttgcttacgtgatttaaatgtgatatatgttaatatgcatatctcgtcaaagggagtcatgggggtggcatggttagagcatgctggctgagggcaggaggccagaggtgtctgcgtctccctcgtccatctcgttctcccctcccgccttccttcccctttcccctctctcccttctttctgtcccaccaggatttctttaaggtttgtgtttcatcaccatcatcctgtttgaaagtttttttttgttgttaatccatcagtctttctcaattcataattaatt

SEQ ID NO: 58872 - DNA, 1003 bp, Homo sapiens
tatctcaggaaaattttaaataccgtttaatagtggagaattatggtaacacgcaccaaatgtacattatatttttaattgcttggcaatttgggacaacttacaaattctgtctttaggtttggtcgctatacaacagataatgctgctatttctgctttagtttcagggatcaaaatgagttaatacgtatgaatgtcctttgtaaagagagaatgtaaatgtttgtcgatagaaccagaatacattctgaactttcttgcttgtattctgggtaggtagacatttaaagtagagatttggcataacttagttcttccagaaacttcaagcactttacactcactctttttagcccaggtttgaattatgtggggtcattcatggggtttatgaggtttgaagacatacttaaataacatgtgggttctctagaatgaatgtggaaggaaacattgtactcctgtggaatgctggcaccctaacaggagtgactttctcttttctctctcttttctccttttggtcaactctgtttgtatgtagtgtgagctctatactgtgggatagcattctttttagaatgcatgcatgtgaattgtgtagtgcagagatttgctatatccatttccagaatgtacatattgaacactgttttgcgaaaggcaggtctatgcaaactaccccaaagtccgaggaagctgagaggctgaaggaagagcctgacaaatcccgtttcttagaaagaaacatttaatagagacctacaagcagaagccgcatctgtgtctagggcagcggtaagacgagatgggggagccccacgccattaccccccagacccagggcttctatgccatagcggggagggaggagtggttccaaagggatacgtaggacaattgaagtaagataacatcaaggttgtttgatctgagggcaggatttactgtaagcacctgctcttacacaggaatagtagataaatgggaagtcttagagg

SEQ ID NO: 58873 - DNA, 1017 bp, Homo sapiens
atgcgtatacagtcataaggacgtttcagttaacagtagactgcatatatcacagtggtcccgtaagattataatcttgtatttttactgtatcttttctattttagataacaaataccattgtgttacctacagtattcaggacagtcacatgctatacaggtttgtagcctagaagcagtaggctgtaccatctagcctaggtgtggagaaggctgtaccatttagttttgtgtaagtacactctgatcacacgagcaagaaatagcataatgatgcatttcttagaccagatctccattgttaagtgatgcatgactggatatacacatacacatatgtgtatgcctgtatagatgcgtgtattctacatactcctaaatgtgtcatatggcaagggtgcctcattgtaattctggctttttccataaatgttaaacaagcatcttctcccaccgccagtccttttcttccttcaaggggacagggcctctggagcttatgcccagctcctgtcggatgcccccgtgttctggtcactcgtgtgcccgtctcttcacactcagttttcccacccctgagcacctcaggtgccaaggtgtgtttgttgaactgaaattcttaagcctgctgagtacattctcagtttgtcaagacagataaacaaataccttttttagatgatttaaaagattcttgacacagtcccagtggtgttttaacaacttttcaggtcctgatcagccaaactctgggccaaaagtaaatgtttaataaacaacataagagtgatggaggaaaaatgtatcttaagtggaactgtgtgttctgtaaatctatgacagattactgttcctgcttttgttgtgtataattattcttgttcctcctgagaattgccctctctttcatcatgaaacgtataagatggcctcctcctctggtaatttggagcaattggcctgggagaggattgatgtgtagtaaggacagtccgtaggagagatttagtggggg

SEQ ID NO: 58874 - DNA, 1490 bp, Homo sapiens
aaaaaaaagaaggaacactgttagggaggcagtcagtgagcctcaagtcagaaagacaaacaagctcattttatgcatttgctaacatttgacctcttctgggacgcgtaggtctctcaagttctgtttctgtttcctgtcacgcagatcagagatgtgaaacagacctggtgtacacccgtctggggtagcactgggagccacggcgtcctggcagagcaggtgtgcctcccacaggctgatgcagccgttctctgtgcagaggctgagccatcctaggagcagctgtggggtgaaagtgtccttccttaaacttagtgctcctgctcattctctcagtatggctaatagctcatttaaatatactatggtggtttttaatttttgtgactcattccctcccctcctcacctgtgtttttcctgtgtgtcagggacattttagggggaccaaaaggatctctgtctctgctctgtgcttgctctgaggttgaatagagaatgttcagggctgttcttatttgagtcactggagctgttgtgagctctgacggcctgggagccccactactgtcacatgaggacagggcgtggggtggctcaagcatggccgcttggggttgggtcctagtgctgtcatgttggaggtgtctgacctttgcactaagtttccccacttacactaaatggggataatcaaagctttgtgtggggattaagtgagttaatgtaaccagaacacttagaatggtgtgctgcatacagtgataatgcagaactactcactgctgctggagtgcgctgttatattctttattaggtcctcagactttttctatgcctaagccttgagggtctctctcagctgtgcttttctgttttttttttttttgtcttcaatagatttttctagggtcttttctggtaaaaagagactgggaatgcaaatacattgagcatgagttgagaggagtttggacatcagcctgaccgtggaaaactggggaggcgtggagtatatagtttcctctgggtgggttactgacagaccatgggagttctggggaaaatgtatgctcttctctttaagtacaagccaccattgccaggcagaagctgataaagtaattagaattgttgttcatacctgacttgcaggaatgtgtgtgcgtgtgtctgcatgcgtgtgtacgtatatatactgtgcatgcatatttgtgtgtgtgtacatacatatgtacacactgcatgtgtctgcatttatgtacatatgggcatgtggcatgggcatatggcacatgcgtatctgtgcatgcacacatgtacacagcacacatgcacacatgcagtgcatagtatgcctgcatgtacatgtgcgtaccatgcatgcatgtacctacacgtgtgcatactaatttgtgcacacgtgcacactgcaatgtgtacttacatgcaagcctacgatatgtgtttgcaggcacatacatgttc

SEQ ID NO: 58875 - DNA, 1012 bp, Homo sapiens
tactgtgcaggctggcttaagcagaaaagggaatttattgtggggacatggtggggaggtgtctcattactgagaggaagaaggctggctggcctcagaaggcatgagaactgggacctgggtccagcccagtccatggtggccacagctggatctcagctctgctcctccaggccaggtggctgctttctcctctctctgcagtgggattttctctgcccaggactcatgtgtctacctgtgggtctaatctcctagcataggctgagcctgcacctccttgagaaaacagattagcttagcttagtctgagtgttcactccaggcgcaccctgagagggagtgcagcctgcacatggggtgggtagttcttaaagggagcctgcctccagaggcgccgggggagggggggggcctgcatttagagtgtgtgcgtggagcatgtagcttgttcctgttttcatggagtcgcagagatcagaaagcatttatgcctgtttctgacagagatgcacacagctggtctgaatgggcaggattggggtgagggcagtggaggagggatctggccacacaggcagtctgctgtgagggccacttcaagccactcttcccttgctgagctgtgattcgttcttttccaagtgacttaaacagaggccttttctcttgtttgtggggatgaggatggcgaagggaggaggagggagagggtggctgagtggaggaagcgcagttgtgctgcggagattcctgctctgcagcttgtctgctgtggattggcccagggggtaggtggcacagtgtgtgtggcaggggggtgggggggaccaggcctggctccgctggtccactcttgggctgtgagccaggacaaaatcttataccaagcaagcatcttttccagtaaaatagagtgtctccatgcccttaggaactgcctgggacagcctcattctgtcctggattttgttctgggctctgctgcctgttgagcgtggaccagtgacct

SEQ ID NO: 58876 - DNA, 1056 bp, Homo sapiens
cctggttctctgtgctgggaagcgtttgcggttcgctattgggctcagggcggcctgctttcctgttcctcccctgtgccctcggcacctggccggagcatctccaagcgtctgccaccatacactgcagtcctcactagcctcttgcatgcgttgggggtgggggtgggggtgagtgggcggtgttaaaggctacacctgggattctccaggcctcagcagctggtgttgtaaggttacatagtaacagtgttaaccagcttgccctgtcttttctcaaagttccacccattcagttccaggggtccaggacgtgcctatcaggaacagcccttggatgcccttggatgcctgccttgtggatgtcatctgctcccatgtcagccatctccagggctcttcccgagaagagggcagtccccgccaagggtgttgcctctcaaacctgccaaactacaaaccctcttggtacctccacacatccctggagtcggctttggggaacactgtgttccatgtctaagtggagtcccgggcctctcccctccagtgtcgcctgtgccagctggacacgaagcagcagatcagtcatgaaaatggctgctcagctccgatctgcccttccttccgcaggactcagggacgcacagctccccagggctggtcacccaaacaacagcattcctttctcctcggcctctccccaggctgcttgggagagaaaacttccctcatcctcctccgcacacactaaatgccctgccggtatcttctttccagtgactgtggccccaggtcgtcacacatggccagacacagctgaatctcaggctagatcatgttggcactgcttccaccccttggataaaataaaattcccagtgacttccttaatattttgataggctgagtggcttatatgcaaactttgatgtaaacactaggccagaaattggttaactgtggtttaggactcctaatctttctccggatttattgaaaacatgtcttagaatggtacgcaccaagtggttctccctggtactgcatcctgct

SEQ ID NO: 58877 - DNA, 1094 bp, Homo sapiens
tggttatatttggcaaactatataaccaaaccaaacttgattatatttggctagtggaccagttcttttgtagttggttagaaaagaaaagatatcgctttcccttgaaagaattcattctccatgagattgaggttcagaaaatctgttaaataaatcccaagccctgaggcctccaaatcagtggctgctccgctgctcctctctctccctcgacctggtctctcagtgaccccctcatcttttcaaatcatagcatgttgggacaagtgttccagggaaggcctctgtcagtgtttagcttacatttcttgggtgtatctttttgacaaaattttccccccagggataaggaaaccagaaaaccacagtggatcagcgtgcaggaatgcataagggtggctctgtgtgtgtgtgtgtgtgcatgtacatacgtgtgtgtgtgtgttcatccgtgtgtgtgtgttttccttcagagcattttaaaggtctcagctattattaacatgaatttattatctatatttaggataagcccactaaggatgatttgggatgagctgtgaatctgtggtgtatatatagatctctgcacacgcgtatagtgcatatttatgtctgcacgtactcctgggcgttgacatctgcctgtggaatgcagacatctctgtgcagggttgtggcctgtcgtctcttgattggcagttgaagtgtcccgcatccccttgttattaataacttgcttggggctacattgagttggggatgtgcagtagtgatttatcaagacattgttataaagacacaaggctggttgtaatagtctaatcagaacaagtgtattcaaagtggcgagtttcaagcatgctgtttaggagacttcacacttattttcagcgttcagaacattgttgaacctctgcttttggcatcgtggtcacagctagtctatgagccttaggagaaattatacttgccatttggtgcccactgtgagtttctgaccaagaacaaaatttccaagcttgatcacctgccttattcgtgacgcttggctccaagtggttgttagctgtttccaaaaaacaaatgtg

SEQ ID NO: 58878 - DNA, 1070 bp, Homo sapiens
tttctggcctccacagctccacagcacctccagaagctttcacttggctctgcacctacaagaccatcgcttctgctcggctcagtcggccgtttggctctatgccgtttgaggggaagaggatcagagaatgttggccttcctctctaggtgcttctcctttctggaaacctgacctcacacctggctgctttgctagctctctagtgccttcaaatagattcttcagtgtatttcatcccgaatttctggttgcttttagtgagtaggttggtctacagcaaggaactttactgtcactggaagcaggaaaaacacctgagtgttttatttggaattcaaatccactctgaatttggcagtttataaattttgccctgagcaataatgtctatctcgaaggagagtaaatggaaatacaggcttgaagttgggatgtgttgcttttattaatagctcaaccagctgttagctcccagactgaggttaaaataatctctgtaaaccctgggtttcttatctgtaaaacaataatcatgcttgcctggcctgtcttacagcatttttattaggctcagatgtacacataaactacatacattaattacacaaattcaggacattaatatagtgactagtggcttgtatatatatcagctttaagtaaagaatgaactgttattttgttacactttgctctcaaaatgtgtgtgacatggctggcagactttcagcttccagtatgtgaatgcctctgtcacactgagatggtattggattgttttatcatagaaccaaaaacagttgtggaaatagctgtgaagcagtgatcctacctatttcagaaagaaattagaccaggaaaaatggagtcaacagagttttgcttgataaatgagatcaatcttcgagtcctaacaaactgtcctacttcaactatccatttaaaacccatcactttgccccccgtcgtggaaccatgaaactgaaagaacaactttctttttcagtggaagggttttgtatattttaggaaacagtcaaaatactgtaaaatttattttaacttt

SEQ ID NO: 58879 - DNA, 1005 bp, Homo sapiens
actgagcagaaaacagtggcagtgtggctgttctgaagatcagcttattgttagggaatcaaggcttggccttggcgcaagggtgctggcaatctaaccttgactttgccctctcctccctcccccctcttctttctgcctctttagaacccccatgattgctggtgggctgtttgtgatggataagttctattttgaagaactggggaagtacgacatgatgatggatgtgtggggaggagagaacctaggtatgtacaagcctcaaatctcaggacagagaagtgcctcagctctgcaaaaggcagggtgccaattggaaaaaaaatttaaaaggcttcagagtgaccattcactgggcttaatcgatccttgcaaacacatatgtaacaccccttttgctcttgaaagtctcatgagttgggcattaaaatgtgcctccctaggttagagtggaggatgccagaatacggataaagtctttgaagggaaatgcaaactctttcaaggcgtctgaacccaagtgtttggaatgttgcaggcttgcaaaaacagagggaaacagtccaggagctcagattcatgctgagtggtggagagtggaaaatgaaccccggcgaggctggtgggattgattgaattgaaatcatgaaaatccgatggggcagggaggccttggcacttaatcccttctcgactacctttgcgaatggttctcatttgtttttctgtttgtttgtttttttgtttttaaataccccatgcaaattatttttacccaggtttaggcacagcaaaattttgcacattgtggtctatattggtagccttatatttactgcataaaagatgaaaagatgtgttttgtttgtttagggtttggagtgggggagatcttttttgcttgtttcaattaaagccttttgtttcaaatgcttgacattctgagcgaattctcctgggctgctgagtgttgttaacttacattcgtccttgggtgagtgt

SEQ ID NO: 58880 - DNA, 1102 bp, Homo sapiens
tttagtggctcttctgagaaatgatatgtatgatccagtatcccccagcactttaagtactcattgttgtatctgtatattttttaatagagagaaagtaaaaattcatcagtctcatcaccaaaccagttgtgccataacactctcataatttgatgaattcgtctgtcagtatctatttctgtctctctctcttgtttgctcactggctctccttctgcctctacacacatatccactatatgcaattctgcaaactattttattttcccacaagtccaggacatcatttctgtcaacatgtaagatgcacactcatgtttttagtggtcacagaatatttcatttgattccttcctcatatttagtcataaagtttctcttttttttttttttttttgctattataaacaaagcagaagtgagcatattttcacatgtatatttcattcctaattgattgctgccttgagataaatttctagaagtagagctgctgggtcagagaataggtgcattcatatgttcttatctgtgttgaatggcattatggataatagtccatattctacttactaaaatgaaaaagtatatatatcaccttatatgaaagatataggccccatacagaaattattttaataatggtatctcagatcagttgaaagtttcgccattttaaggaattattttaaaaggcgagcattacctccttactgtatttattttggaagaacacagtgccttcctatggggttcttaaggagggctagctatagcctgaagtgggagtccaccttatagccgagaccagaatatgggagcaaagaggttagctgtgtgcttgctacttcatggatgctttaagataattcttggcagaatacactgctgatacctatgcagatgatagcttttaatgcatgtcagacattcaagagtagcttgtcccaggggctttatttatggcaaatcatggttctctctatgagatttaagtacatggttttctttccttctagaaaagccggctgggcgcggtggctcacgcctgtaatcccagcactttgggaagctgaggcgagtggatcacaaggtcaag

SEQ ID NO: 58881 - DNA, 1159 bp, Homo sapiens
tcttgtatattccccacaaagccgttcgcagcttccgggagaaggggccagagcccggtggggccagtttctcacagagggaggaggtggcctttgtcccctggagcccgatcagccagttggtgctactgctgtggccagctggggggcttcctccagaccaccggcctcggccccggcatccctgttgggcgtcagcctgagagtccctactgtgcgtcagaatccaccttgcgtgctgtgcgtatctgtgaacctggagcggttacttattttgacagatatcactttgggtctttttacattaaatttcttttctctaaggaatataagacataccccatagctctgtgtgagccagcaataccgctgccccctggcgacagggcagaccaatgatgccaggcagctgtcacacgctagtattggcttcattgtgatctgagccctgcacgctgggccttcagaattaatggccagcagtgtcagggatgagcccgtcagccagggcacaggcctggctcacagtcctgcacacctgctggcctggggagctccagccaggcagcgagtcctgccccgcccgcagctccctcccacaccccgcctggccaagatgactgcttcagggggctttggggaaagaattaggaagggtcagaaccaaacaatacctgctcatttacactgaggattcagggcgggagacaggagccttggggtcctgttaaaccacagacagttatgaactgaaagtcataacggggagaggtgcctggcttctacctgggtgctcaggaatgttcctcgtcacccctgccactctgtggtcggtgccctgcttcctcctccactcctggccgccttctccagcgccgcacacacagatgctcagtctcagagaggctggcacggcctggcagtctgagaaaagcgtcagttaggcacacctgcaggcccctcggtgggacagcggcggccttggagttaggagccaccctgggaggttgtgccggtgccatgctcctccctgtgtcttgtatgaaaggggccactgtgtgtcttcctccccggcgggagccccacatgtgtgcactgtaggacagcggccccgaggtggaagcctggctggagggctgccctataggtcttctcttcc

SEQ ID NO: 58882 - DNA, 1316 bp, Homo sapiens
cctcccctgccatgcaaccagatgtgttgtgagtgggcagcgtgcccccacgctggagtaactccgcacgcttctgtctttcacggtgggcgctcggggggagcctgaggaaaacccccttaggtacctgtgcgaggctgtggagtgcaggccagagcagggtgtgcgtagcccccagcacccaggttcttctgtcagaccctgtgacctgcgagctgctactactgtaaggagggaaatggatgaatctggctcgttttaaaatcacgttttctgacgaatcctttgccccttcacctttaccccgcccgcacccctaggccctctcagccttcctatcatcccacgtgtctacccagacccttgtgcggcccatgccctgggggcggcgtcctgtccctgagctgggaggcggctttggatggtccgggcgtcaagagcaggggtgggccggggaggggtcctttgcggtgagctatgtttacatgacacagtgtgccaaagtgacttactgcggttgcgttagtttttaatcatcaggactatctcaccctcccactcctgtttttaaaactcagaattctttcctaagagcccttcgagcaaagcgtgccgaagttagttgtcttctctgtgctggtcctttcttatgtcctcataaaagctcagatgatggtatctgtgagtatgttttgcaaattcaaaatatagtttggtaatttttttttccagttgatttttaaaaagaactgctgtacagagcttgtactttgtccattttatagatggaaaccatccttgaaaattgtttaacttaaataaagagaagatactttctagataccgctctttgctggccagagtctgtcctggtgtgtgagggctgggtggggtgggtgtggggactgggattggggtcagccttctgcagctcctgctcagtggctgtttcttatcaccttttgcagatgcgcttttattgctgtgccctttggttggttattcttacttgtaataataatcattatcatttgtggagtgtttatgatgtgccaggcacccagccaagcccttaaatacatttgcattttacagccacaggggaagctggtgaaggaagttgctagcctgctcaaggtcacgtccttcctgtgtacctgcctggagccagcccttggcactcgcacccagaccctgtgctccaaaccaggggacaaatatttttacagtttttcaagtagttaagatttatagacttgtttaccagttacctggggctcttcggttccatccaggcgtctctgaggttcttcaga

SEQ ID NO: 58883 - DNA, 1429 bp, Homo sapiens
ctctgctctgcaccaaaggcaggaagctctatgcccagagaagtgccctttctctgtgagtgggcccttacttgctagctgaccgtaattgtagctgctgtttattaagcacttagtcagtgcctggccctgtgttaagcactttacaaatgccatcccaggcctccttctgacagtcttgtgagcaaaggaggattatccctttcttacagtaggaatagtagcaatgaagttaggacctgcttattgcctggagaaagcaattagttttttttaaagagccagaaagaaccttagacatccctagtccaacccctttattctgtagaggagaaaactgagtcacctgcctcagccccagacctcgggcacagcattcaggctctgaccctggagttgtgtgtttgcagtgatccttgggatagaatgaacatcctgaacaatggtgataggagcggaccattcagtgacagtgactgccctgggggcagctctgcagagggcaggaaccatccaactgaaccatccaacaagaagccagaggccaggacctcaggcatctcatgcaggatacacagccaacaaagggccgattgacacccaggctgttggtgccagaatccactcagccactctagctggtgtgggaaggatcattctgaggtggtgttggatgataattctactttctgtagaattctgggcttccaagtgtggaactctggagcttggatacagcaggtcaggcgggctcagtccaggacgacaggactcctctgagacaggtgaaacaagctccaggtttgatgggaggcagggagcagcctcctgccagcttggagtcctcttcttagtgaagtgtgctaataaattacacagcacatcagctctctcaagtattcttggaactgtgcctgcatagaaaggaaggactccacgcatcccaccttggacaccctgtgactctgcccacgcttggctctctctgttgctccctgtcaaacaaagaggctgtgggatgaccatgaaaataacaacagcagcaacagtaggaatagctgctgtttcccaagcacgtgctgatatgcgctcactcaatccttacagctctgcaaggtaggcggactgaggcatctcacacagggcacacaaccaacaaaggccagattgacaccccggctgttggtgccagaatccactctcagctgctctagctggtgtgggagggtggaaggattaaaacaaaacaaaacaaaacaaaaaaaacaactgtagaagtgctcctgacagctgccaacactagtacgtgtctaggggatggaagaaaaaagctctcttctgtctgccaatgacctcctggatattttcctctttccttgtgaggttattccatgtactaaaaaaaaaaaaaaaaaaaaaaaaaagtcaa

SEQ ID NO: 58884 - DNA, 1049 bp, Homo sapiens
tttgatttctttgtgctgtgttagatcctgtgtctaccggagaggccagggaaggtgggcatagaagcagtccaatactaggtcccatgtggtagcttaaaatcctcatcaccaccaggaggaacatgaacattcccagaataacttctgctgctcttgattccagaagtaaaagtatgtttggtatttgtctgctaacgtgtgacatgctcacctgctgagctttctgtacttggactcaaaggagtagccagaaagggatctcaatgaggagtgcatgttttctattttcagtctgtataaatatcacattgctcctcctcagactcaaattcaagccagagttgcattcttatttggcctcactggtctttaagaaagagcctgattaccatgtctgcactgggaggcacatgcccaaaatgctagcattgcatcagacggcattcataatgatggccagtgcttatcccaaatgtatgagccggatgctgcactgtgctttatgcacagtatttcattttattctcacaatgactctttgaggtggatactctaatctttgccattttacagatggggaaatgaaggctgtgtgggattatgtaccttgaccagggcacctgttcggtaggtcagatatgcctgactacagaactcgagctctcttcgtgcaaagtactctcggggactctgcaggacctgagctgcagttgctcagcatagtgcccggccgggatctgcagccaagcgattcattcacaggtacagctgtcttagtaaggcccttccagctctgggcaagagatcttttcatccatgtgttattggcatcttcatcatcatcatcacagcttctgcctttatgaaggatttatcacgtgttgatgtcagcatttcacctggatggccattgcttctttgtgcctatgacagtcactgctcacctctctgattctgcaaaccacagtggcacacaatgttggaatcagggttaagtcatctgcaggacatctgtccctctcttctgttggaggtaaaccaccatt

SEQ ID NO: 58885 - DNA, 1129 bp, Homo sapiens
tgagggcacctatggctgctgtccagcgcgtgcccagtgctcggtgggtgctcagcaggtaggaaactgttaggagggattgtatcttgcccaaggacacctcgttcagcttcacatgccaggggcagaatttgaacctgggttggtctctccccagagtccctctacacagtctcaccacacttctgtacctgctggccaagtttccacacatacatccctcagatctcctctcccttccctatttcccaccccatgcagtcaaaatgtacatttcacccagtgatccagagtcacaacattgaaagtactggcaaatgttccctctttttactactcctgtttgttgtttttgttaacatgacgttcagtagtacttttaaatgtaacctaaatggttgaaatatatagcatccaatacttccccggttgctccgaccctctttgcaaaaagtattcccccaaagaaatcaggaatctttccgtctgtgcagaaaaccagcttgtgttaagttggaaggcttttcaactgtgcttggacggacgggacaagcacgctgtttctctgggttccatcaccactgttgcttatccccgaagtcacaggggaggaccgagcctgatctactgccttcacctgggcttctctcaccactggcttcatctcctcctctactcaccctgcccacccacacagctttgtccaaaggcatcagcacagtgtgacttttgctggaacaggttttgtttgggaagccagaaatagaggcaaaagccaggcaaagctcatggggctcaggccccttcagaagccactggctcccagtgctgtctctgctgctctccaactttgaggaattgggagtctctcgagagactgtggggttggcatgatggctcacacctgtaatcccagcacattggaaagccaaggggatgcggtggggtgggaggatcgcttgagccaggagttcaagaccagcctgggcaacatagtgagaccctatctctacaaaaaatacaaaaaattttaaaataagccaggcttggtggtgcacctataatcccagctatttaggaggctgtggtaagaggatcgcctgagcccaggagtttgaggttgcagtga

SEQ ID NO: 58886 - DNA, 1195 bp, Homo sapiens
tggccaggaagcactgaggttatctgaagctggtggcagctggggatcagccccatgacacatgaccaaggcactcttaagagaaaaaaatcaaagcaagtaggattttcgtttggagatctggtagtgaagcttcacagtcctagtaagcctcggtccagccttttcctatgaaaagttcatttcatcttctgttcctttctaaccgcatcattaaaatgagcaaacgcccagcaggactcctgtgtcgggctccctttgggggagaagggcagcttggccccgttctctggcgtaggctcgggccactgctgagcatggaagaaagaaatgcagcatggggctcgttttttattgaatttaacgaagatcagtgccaggtgtttggggctgcttaataattataaagtctctgctatttattggctactagaaatggtgaggaagaggtttatttttctggaaatagcatatcctcctaagtgcaccaaaatacagtaggagctgtgttttatggatggccaaatacaggtctctctctccttggtacctcacagtttggtcttggaaattgttttactgcaggaggcaaaagcttgtcactgaggtcttaaggtgtgaggaggagggagaggggtgaggagaaagggtctgatttgacgtttgctttgtgtgttatacttttccctgattccgggaaatttcacacataaggtacaccttagcatataccattttgtaatgatgcaatttgagaaattctctatccgtaaaacctctattacatccctgcagggaaggagacagcaaactcatattttttcctaggggagaaaatgagggggcaaaatcggaaaattgctaaactgtaatcccatgcgcaatttctgaatctttcctaaatgttttgatgactaaaaggagggtgagttgggactatgtctcaggccctcggagatgttaccatgaagtccccatctgctttgttccagatgtcagccacagcgacaggctggtagcagctccctcccgccccaccccccacactcaggcaaactgtcctgcctcggtgacatgccctggtgctttcctgatggactgagctcagtcgctatgactagtcactatgaaatggaggtggataaaaactggcaatgaggctgggcgtggtagctcatgactgtaatcccagtac

SEQ ID NO: 58887 - DNA, 1058 bp, Homo sapiens
gggcacagccaccagttgggtggtgatagcttctgagcaagaggagtctgtgcccatgtaggggacgctacccccaaagccagctctgtgctctcacatagagctggattcttcccggcagcatcctgtggttaagctttagagaaggcaagacacataaggaagatgtcatccaattcagaagctctgagcctgccgatcttccttgaggaggtctgacttcgctgtgtgtttgagctgtggaagagatcaccatcttaagtcacaggcccacgatttttgcctctgtgtatgcccaggcattccttgaggagatttggggaaaaatatcccagagctatttttatgtcagtgacatctttgggtaattaaaattacttttatatcattgttctcaggcatgaacttgataaatattcttaaatctcctcttgcttggattaatttgccatttaaagattcatctttataaaaatgtcactttatgtgtcaaaaactaggaattagaagactgggtagatttaaggaaacgagcaaatcttgattctgtattggttttgctatgcttcagaacttcaaaattatgaaagtcttacttttgctactggaatgctatggtggtgtttttactttgaattccataattagggagacaattagaaaatgtagccactgaggttagcaaagccagggttgtagttccacgtgataaagcagtacagcttgcaaggtgggcatccagatttctgagcgggaacagtgggaaggaattcctccacagtggcgggggtgaaggtgtggtgtgagcatgcaggcgcgtgtgcgggtgggcaatgggaggcctcagtggagtcttgattcccatctcttggaatcgggtcacagagagccgaggattcggcataaaccaggtgaactccctctccagtgacaacagtgcacctcccagctgtccttagaaaggacccccaaggcgtgactccaaacccctggaaagggccataggtgtgggacatttccaggagtgctctgacttccagcgtgattttaaatgtgag

SEQ ID NO: 58888 - DNA, 1109 bp, Homo sapiens
ttgttagagatgggatcatgctgtgttgctcaggctagagtgcagtggctattcacaagtgcagtcagcacactacagcctagaactctggtgagtgatccacacacctcagcctcctaagtagctgggactgctgacatgtgccaccgtgtccagcttaaattgtgcaacatttaacatttaacatttctaagaaagaaaacctctttcttagtgtctggcacatgagaaatactgagtaagtattggcacttctcctgctactgttctttggtgaccacgcagtggatagtgaagctaggttttaagtctttactgagcacccattatgtctcaggcactgttttgggcttttagaatacatcagtgaaccaaatagattctggcctccatgaagcacacattctagagtgggtaacagacaataagcagtgaaccaataagcagatggcatgttaaaaaggaaatgttgtagaaggaaacagtaggcaggtttagggggcttgagagtgtgggggaggggtggaaggcgtctgttgcagaattaaatagggtgggcaggcctgattcagaaggtaagatttgagcaaagctcccaggcggtgaaggagttggcccagtgcatttctggcaagtggagatccctcccatccaggtgaggtgcctgacagtgtgaggcccgaggcaggagtgtgcctggtgggcgaggcgcggaggaaggaggaaggcggtcagagagctgcagggtggaggcggggcacagagggccttgcaggctgtgggaagaacttggcttgcattttgaatgagatgaggagtctttggtggatttttagcaaagggataacatagccctgtgtaagttttaaagagatgctgtgagtgccaggttgagaacagaccctaagaggacaagcgtgggatctggctcccgccataacctggcaagagatggtggagacgatgagacgccttcagattcctgacgtgttgtgaagctaggaccagctggctgccctgatggatcgcgtgtttccaccgtgggaactgagtattggaaggatctgcggcaacgtgggcaggagaaataggcgtcattttgtgagttt

SEQ ID NO: 58889 - DNA, 1027 bp, Homo sapiens
taaccctatgctttcttctaagagcttgatcattttatgcttgcatttacatctttggtctattttgagtttttttggtatatgatgtaaggtttccattttttcttttgcatgtggatattcagttgcttcagcaccattaattgaaaaaaactgcttttcccccattgaattattttgacacctatggtcaaaaatcaatcgattgtaatttattttctattttaataactgtccctttcttcttgactacttcgcaataaaatatgtattgctctacagtcatttgaaaacagtatgctatttccccaggtaagactactttcccctcaacaagaccttctatatcaggaattcttatttaacttttatcatactcagtcccagagattgattgttcttttacattacatgcatacatacatacaagatacatcaaatatacatttttgtccaagtgggtaaatgtttgcttaagtcaagacgaagccaattatggaaggaatttctaggatacaagagtactgcctgaaattttgtttaaaaaatttatactgtattagattcaaaattataaaggttgacaatgtagtatagatataataacctctcatgctgtcagtggcttgattgtacctgtagtcactctaccacacatttgtgaaaattaagagcgattcagttgggactggggactgggcaaggcaatttgggctacaactgtgaacacagggtacttctgccagtgacgtctccaccattctctccagcagtagctctctaaggtaaagacttaccttcttttcatctcctagacttgaggatttgaccaatccacaggatgatgcagtttcatggacacaaacccatgaacaaatccttggttcactgcttagaggtattctttgaatatttttaggagtaaatttcagatgttgccccgattataatttttacttgtgatatttctgcatgcagttgtttcctctcataatcgcttgaggaaaaactaggagtgtgtcaatgg

SEQ ID NO: 58890 - DNA, 1086 bp, Homo sapiens
taaagcctttttaataaaaagaaaaatctttctctcaaaaccagaattaaactgagacccttggctctaaaggggtttgtgaactcagagacctggaaccctgtctatggtgttaagtataagaagctgctcctacctttagctctgtacaggattctgtggctccaggaggaactttgaagcttggtgagctgcaagataatcttaggcaaagctacatagtaatcaagtgcaagactgtgtgtcatcttgcagtggctgcacagaattcagagaagggagcttcctgggagagctgttttgctcttttcccaggagtctgttcatgtagggggtgaaactggagctgctactgctaaccctcagttctcatttgtcacttgcattttcatgcattattatcaaactcagtcttcacaaggactctgtggccgagaagttgccactgccatgtgactggggaaggaagttgctgccttcactttcccgggggtgatgagattaccagattaagtgatcaccatctaactagtcagactcaataattcaggaaatgtagtgccttttttttcttttactagaacctttttcagtaaaaaatatttatttttatggttatacatgaattgcttttagttttggggggaagcggatacagttctgtgagttttaactcatgatttgtgtaatcgataccacaaacaggatacagaagagtagaatcttgccagggtgttggtggtatagtggttggcgtagctgccttccagaagaggagaatctggatttttctctagctccctgtttaatccttgctgtcccgagttgtcctaatgagtactcagagctgtttttcaggaggtggggctttgcatacactggaacaggtggtgaggtctaacctagttttagagtccaaaactcactttgtagacttctttttagaggcacggtctcactatgtgcccagggtggactcaaactcctgggcccaagtgatcctcccgcttcagcttcctgagtagctgggactgaaggtgcattccaccataccttgctcacgcctttgtttttaaggactgtgat

SEQ ID NO: 58891 - DNA, 1558 bp, Homo sapiens
tcctattggctctttaagaattgtaccagtccacagacctggtttggcagactttatgccgtgagcatctgtgatgtaatttcgatcctggaacatttgagatccaggtccacctgggactgcacagcaagtctctgcgtgtctcagggcgaaatagagaacttgtgctaggtcaagcctagttatgaaaaagaatcctgaatgtgctgatgtgagaagggtgagcacacaaataaattttaaatccatcttatatttcttagtaaccttgaaatgggagaaattctgcagcagagccatttaatccagccaccgcagcacttacggtcatgaagagcaggatcgtgtgtcatttagcgttaggttcaaattctgcttcctgcagatgcccactgagttcacacctggaccgaagaatcaggtcctttaaccaaagacattagtggttattgccggtatttttacccagttttgttttcctgccctgtgtgggagcttgccttttaactccacatctgatttagaatttcctctttgcaaatttctccctgagggaaatttggagtggtggagaatggagggatgaggttgatggcttgttaaacttgaattcagtttctccaaaacaatggaatatgatttatgggggctgaaaatagatgcagaagtgtgggtttggtcagagaaaatccttgcgcctaccagtgtggagggagatggatgtgtttattaagaggctgagagctgcatcctggccacttggggagcaaagaggatcagcctgctagggtttaccagagcacagtatctaaaacgctacgacaagcgtgcgctccccacttgcaaagaatgcagcctggatctctcttccatctttgttccctgtttattaacaaatctcactgcatgggtagagtggggtagggaggaaagtaagcaggtggcattttgatctctaatcaggctttataatggaaaatttataattcaaattgctcttgctgctggaatcagatgaggaaagcacagaatcgagatttgatagaggcttcctgccttgctgcaactgtaaaaacaggtatatgtgtatgtacataaatgtgttttatggaaatgtgcgggtatgtaaatgtgtgtatgtaactgggtattgtatgcaaatgtgtattgcttgtgctaggtttttggtttttttttttttaatcagaaagataactctgatgacctagaaacctttgcagagtcgctgtgcatgagggaggtagacactggggaccattatgagttgtagtcggagttgccacatccccccacccccaccataagggagtgcacacagtagggagatacttggtgcccagctgggagagggaggaagcagtgctagttcccgtgccagccctaaaagcaacatttctgtagttaaggtgggaaatcctcgccattcttcaggctgttcttgtcttcccagccctttccttctgtttttcagcgtatttagcttcctagatcagctcctccggaagtgcggccagtagttatgggtggagagggccct

SEQ ID NO: 58892 - DNA, 1103 bp, Homo sapiens
atcggtctgactgctcctgggggctccgaacccgtgggtggagagggtaaggcggaggccgtggccagcacttttccagtgacaatgtcgtcggggaccttttccttcacttcctgggagcaccccagcccctgcatgggaagtctgtcacacctgtgggtcggacttttaggggtggattgaagttaggctttcctagttgagggggcttttctgaaagcccggcgtggctggtggaggcagggggagtcgttttttcactgacagcccaagagcaagccttacagcaggtgacgcgggcgaggcaggtaggagttggcccagtgagagttgagagagaggccacccgcggcgtcttgacttggcttagttttctccttaatctgagaaactttccctgtccgcgccattccagatctcttgttaagaatggggaggagtgaaggaagggaccgattgggcagcgttaaggtgcttgcttttccgccagaaggtactttcaggtgtgtcctgcttaccactgtggccacagacaagccccgaatacctggagaaggtggctagggtgctggcagctgcggctgccccactcctcttcactgtctgtttttgtgggagttggctgttgaaatatcaccacttcctctgcagaagctccgcagcctctgccttctttgaaagctgcagaccagccgccctctcatgctggtatttcttgttccacggccttctgtagcaggcccgtgctcctgcatgctgtgttcttccgtagaagtgcgcgcaaccggtgttgatgagggccagggagtggccgcggtgggcatgatgcggcttttcctgtggccttctctgattattgttcaaccggtcaggaacacggcacatgggaaggcaggcccaagggacctccagctggtgcctggacttggatctgggcatcatgctgcagcctgctgggaggccggtagggttagctggactctgagtagggagtggtctgcagacctctggcaggctgcggtgtggatgcgcggagctaaagctgggcttgcaaagtcacagttagctgtgcactgctttgggggtgggtacattttaaagca

SEQ ID NO: 58893 - DNA, 1126 bp, Homo sapiens
cgcccaccagcggcagtgaccgcgcacagggaggtgaagaatgcgaccacggtgatacgtccaacctggaaaacgggcctgagaaccaaagggccaacttctggccatgcataacgaagcagagcagtctcagggtagaaggcactggaaaagcgttgtaggacaatttttcccagtagaaacggtgggggtgggagggagacccgctcaccccttttgacccacccctgcagctcagccacgcctcctagggaggtgggcagccttgcaggagcccgcgcgaggctgcagtaccgccctccgccacatgagggcagcacggcctacccgtgcagcagcggcggcccccgcgcccctcttggccagagccaggcgcaggccggcttgcggtgccgtcgttcattggccgcggcgcgggcgctgccatgttggcggaagcggacccccctgtgccgtggaaactggcggtggccgcggccgccgagtcggtctgcgcagcctcctgcgttttctcgcttggatcttggcactgagaggcggtggccggcgggatggagaaaagtaggatgaacctgcccaaggggccggacacgctctgcttcgacaaggacgagttcatgaaggtgcgcgcggcgtccgctccccggagccgggccatgagggtgcctctgccctgtgccctctgtggcggtctcttcggtcggctgctcctgcctgcgcacgctcagtgtcaggtcctccgccgagacctcgctgcacttcgcaatgagtcttttggcgtcaggtttggcgggtgcagcctggagaaagcacttctgtaaaatcgtgcgtgttacatggaaaggcctgaaagttctgggcaagtggttttgagctgcatgtcaaagccactgttacccgttcctgttaccatgcagtgcagtcagattgccagtccccttgtcggaaagaagcttgtggaccggggccttggagctcattaagtgtgtgttgaataaatctccaagcccacgtactttcctagggactcgggtcggaaagaaaaagaacttaatctgaagttttgcttaacattcagctaaagcttccagaatgggatatttagaagcttagaacattcttaccg

SEQ ID NO: 58894 - DNA, 1227 bp, Homo sapiens
cacatagtatgctcacagtaggtgacataagtaaacattcagtgcatgtgtagtgctgaaaaaaaaaatgcaaaataatagaaatgtcagtgtttagaagtccataagaatggcaggcaagaaataattcttaaaagagaggtctcaagttgtgccttgaactagcaaatattttcaaatgtttatgtcttgtttgattttttaaaaaagcttttaaagtacttcttcttggcatggaaggaaaatagtttttgtgatccactgttggattccacactctgggtggcttttacatggctcttgggtggctctcctgccttcttttcagtgtacctcttcctacccccacccttggagatagggtgttttccgagcctcagccctcagtcctcagccctctcctctccctcctctcctctcctcttctctcctctccaaattctctcccatggaggtggattcactctcccgaattctgctctgtcattgttaactgctgtctcacctgcaggctctagtcttttccttgccacctgccagcaccatatgctctccctccttccacagctgtctctatagccacctttttcctgattggtttagccgtagacctgttcttcctttttggcttccaactcatgaagctactctgtgagattctgcagtcgttgagaaatgagactatttctatcttgttcaccattgcatcctcattggcttgcacaatagctggcatttaataggtattttgtaacatttgtgggatgaatgaattcatttttctatagaatttttgtgatttctccagtttattctagtttttccattactttcattttggccctaatttctgattaattcattagcttctggacatgtttctccacttatgacctctccttttccttgcatcctgttcttgacttcttgattctgaattttcccaaaacaactttttcatgatatattagtacttaaaatgtgtagaatctggtctaaagtcttatctggtcatagccctcttgaattaacccttcctgttttatttctacttttgtccaaattgatgcctgcagtacccccggatgtattcctcactggtcctgaaatatgtcattactgttctatcttcctgccttgtcttctgataatcttttctctacgcttgtcagcatccacaaatttttagaatctacctcaagtctcatctcccccaccagacaccct

SEQ ID NO: 58895 - DNA, 1146 bp, Homo sapiens
gcctgggcaacatagcaaaaccctgtctttacaaataatacaaaaaaattctccagatgtggtggtgtgtgcctatagtcccagctacttgggaggctgaggtgggaggatcacttgagcctgggaagttgaggctgcagtgagccaagatcacagcactgcactccagcctgggtgatagagtgagaccctgtcctaaaaaagatggggaaaagaaagaaggaataaggatataatataagaaaccaaaaaaaaaaagtttttttaaaaattctgaaattgtgatagaatattgaaatatgtttgttctagaaagccaaaagatttgcattcttgggaattttgtgttatgtagaaatactaaaaatatagaatgctataggtaattttacgttgacttttgactttgtattttcctgtacttaggatgatgaaataagaaaattaagattaaacatgacaataacttttttccttaatttttatttatagatgtgtgtattgaggcttatacaagttattcggtcagttgagaaaattgaaaaaatcttaaactctcaaagttctaaagaaacctctgcactagaagcaagcaggtaagtattttttattaaataactcgtaaattaatacttcacatccagagtaaaaacttttttagttagaactcatttctgataaagaagaaaatcccagtctatggcttagtgtttttaaatgtagctcaagcaaagcagagtgcatgaaatggtaaagcttatacatattattatatagccttgatggtcgtaggccactgttccaacacagcacctttcagggagtcagagaacgtgtactttctgtggaaggtttttatttttgaaattgccttacccatggactagtgaaatccctactgaccttcaaggtgtggaatagcagtcatcttatttagacaggcccagagtattccagttgatgtatcttgaggttcaaaatgcacgagtgttattaagaaatagtacaggacatatttcactgaaatttataaacagcaaagaaaaagcttgcaaaataagcaaaagatgactgtttcctttgttatactgtagtgtcttattaccttcccacactgaatttaaaatcagtcaggtagttgagtga

SEQ ID NO: 58896 - DNA, 1032 bp, Homo sapiens
acttagaacatgctgtgcatatggcgtctggggaacattgactgatggcacaaaagacgctttagctttcaccttgtaacaaggtggccacataaaacactctgacaaaagtcaaaatacagtgggtatgaaagtctctcactgccaggcgtgtgatgtattctcgtggaaatagagaccttaggggttacacttctataactgttttctctactagcccccttttgactggacaaattttggagagaattgccacagaatttaatcagttacagtttcatgctgttcaaagcaaaggcatgcctcttttggacaaagtaagaccggtaagtgttgttttggatttccacagtttggtgtttagggacttgctaaataattctggtttaaactagtaatattgttgatctacagggttttgaagctaaccttgcattttttttcaatttttaattttttgggcgccagcttcctaagtgtcacacattatagattttgtgtaaagactcagtcacattctccagatgataagagtaaaattaattctgaatttcatggaattggacatcttatatgatgtagacaattaatttatccaaagcccttaattggattttaaatccatgatgtttcctcaagattgacttcgtagcttaagaggaaggtaacttttttctcattctgtaattctgtctaaattcttctttgatgaagcagagatttacttataaagtgattggagtgaggggttcattgttattctccaggaaaagttattattttgattttatatatgtcattatctgttggtgtaagaggcttgttatatatctacttgcagtttcagaaactgttacaactagagctttttttttatttacccaccttttcttgcagcgtatagctggcattacagccatgttacagcagtcactggaaggtctcctattagaaggccttcagacgtctgacgtcgatataatacggcactgcttgcggacttacgccacgattgacaagacacgggacgcg

SEQ ID NO: 58897 - DNA, 1049 bp, Homo sapiens
ggcatattaaattcagtagccacattgtgttttatttaaactcagcttatcttgtcatatcattcttgtctcccaattttatcacaaaaaataaaataatgaactaatatattttcttctgtctttctctgcctcaaacccttccctaatctgaatgatggtagaaaaaaaggccaggatgaagacagtgaggagttgtggtggcgaatcatgtgctctgctttaaatctttttttaaaagttgttattttattttcagactcccagggaagcagatgagagtgcatggtttgtcagcccatgtctcccccacagttgtatctgtacagcctaatccaaggaagtagttttgaatgtgacctgttatttacttcactgtttagaaaatgtgtcacagggaggagggtgagtgtgaggaagcagatttgtaaagttttctttattgttttctctgaaatagatcgtttgtacttcccttttaaatgcttttttaaaaaatgatttttcttttaataggtgattatagagcagtttgttgaatctcatcccaatggccttcaggtcatgtataataaactcctggagtttgttcctcaccattgccgccttcttcgagaagtcacaggaggtgccatctccaggtaatttaaacaaccctgtgtggacccccacctccctttcagtgaccgcacctgctaattgcaggtgcacgatggacgatgactgtcttgtatgaactgtcttgtatgaatccattatgaatcttgttatttcattgtttctactggtgatactgtgaggcagattccattagcctcatttcaaagttgtggaaactgagatgaagctgagactgaagaccacatttccgaatccaaagcctagcctttcttcttctctgcactttttcctaaatttagtttgaagtcagaattgctttccttccatgattctaatatgtcataatctgtctataaatattaattcagtttatttcaacaggttttatactaattgtgaactcatcttcaatttttcctccttttgtt

SEQ ID NO: 58898 - DNA, 1029 bp, Homo sapiens
tttgataggttttctgaatctgagaattggtatctttcatccattctggaacatttttatatattatttcttcaattgtgcttttctttcattcctctatcatctccatctagatctcttgtttagacaggctcaccctatcctctgtatttgctgcattctcgataatttcacagtctgtcttctaggtcactaattccttctttagttgtgtctaaactcttttccacctgcacattgagtttctggttaattatcatatttttttatttctagaagtcatatttgttgtttgtctagcctccctggcgaatttgtttattaattttttaagtgtagagaggcacaagataagcataaacagacagcctggggcccagcaggtttcccacagataagacaacacattgggaggtttaccattccagaaatgcaacttaccttatctgttggctgattgtcccatgttacagtgcattgaataacaggattgtgccattttcaataaattttatagcaacatttgtaattttaaaaagtagggctttttaaataagatagcataaggagagtgaaataatggctttaagcagaagcaattgtaagctttaagcactagcaaatgtgaagacgctttacaatttgctgtgtgctttagagactcgtattgaccatgtttgactcaggaaatgtttcagctcagaaatgaacctttctgatagaacttgactttagaattttaggctaatacttaacatttgtgagtatagtttccagcagatagtatccatttatttccagaaatactttcagctttaagccttaatgtaatgtgtttcttgtaagagggcaatatctttatatttgttttagcatccattatatgcagaggtatagttttgtcccaaaagggaagaataatccctatttttgtctcaactccacacacctagaccaccctctgggataacataagtttgcccaaaaccatttgaaataaatttaaagcctgtagtttttactactgta

SEQ ID NO: 58899 - DNA, 1044 bp, Homo sapiens
ggtgagccagctgtcatcagggaaaaaagaacgcacatctaggaagcgctggtacagacagccgtagaacccgaagggcaagtaccatggacgtgggagagggtcacagattagaagagcaccaagcagtgagttctagttttaactggccacttcctgtgatttttctcaagctgccaacacaggtacagaatgcagctttcttagcttggggacgtttaccttcctgtgatggtgttaagatagatgggttggaggaaccaaagttttatggccttgaagtgaatagaggatcataatcaggtgctgctcaccagcaacaacttcttgatggagacttaactggcagtttgtttaatttgagaaacatggggtaagttatgattcagaccagctgcaaataacagagaacccttatataacagtggcttagtcacgatttcttgttcagttaaaaaaaaaaaaaaaaaaaagcctgggagaataggcattccgaggctggacttaccagtgagtgacagaggaagttcctgttacttaggaaaaacagagaatggatagggaaaggcatctgtcagagtcataaacattaattcttcttcttgtttttatctcagatttagagaaatagcgggatccttagaagcagcacttacagatgtcctggaagatgccccaggtaactcccttaaagtgataagtggcatggtatcctaaatgagttcattcagttcaccaagtcatctggattgcagtattctgagcgtacttttactgttttttttttttaatcatacagtaagttggaccttaaaaatcacttagtttgacttcttttttttgctttttttttgagatggagtctcgctgtgttgcccaggctggagtgcaatggcatgatcttggctcactgcagcccccgcctcccaggttcaagctattctcctggcttagcctcgaaagtagctgggattacaggtgtacaccaccacgcctagttaatttttttatttttagcagagacagggtttcaccatgttggcc

SEQ ID NO: 58900 - DNA, 1096 bp, Homo sapiens
ttgggggacccgtgggtaccccaagagagaacctctcactcacctccctttctaggtgtctctccagcttcccctgacaggtcatgtccatatagggtttctaagggtgtgcacttctcctcctgtgtggagtgcattctgtattgtattcacctccaccctgcttccttttcagtagtgatgggacaagcttgagcagccatgctcccccactttttttttcccattagctcaccttattctggtcaggcatgatctttagtgggctggattttagttactttacattaatttaccccgatattttctgttgatgtttaatcttcagctatactttgaaagtgctaaaatattaaaacttcttcctcttttttctctgtatagatccgtatgtttttgcttgtaacatcaactctgtggggtgaatttagtggttaagtcctctgatacacaattctgctttcctcaagtttagatattttgtggtgcttgaataaatactgttttgaattttaaaatttgtatgttttcagtaagaatatggtctttactgtgagctattttcgtattatggagcgccatagagtagaaaatgtttttgcttattctctgtgcctgttaatagccattaaaccatgtgatttctcatgttgttgaaatctttttatagtaaaagcattaaaactgtttctttcctttgatgaaaattactgaaattcctgattttaagttcaccattcattagcaaattctagagtttgtagatgcaaatagaattgcctcttcctttgatttataaaaagtaactgaatatataaagtgcatatttatttcagcttccagaactcttggaaataatcaagccaaaacttgaaatgattggctttaagaatttttcttctatctcaggtaaaaatgaatcttgactaagcaaatctttgaataagaaatgatttaaaataaaatctcagagactgtagggtatatttaacattttcttctgtagttgtaaatccttggttgtttctctattctgtattataacttacctaaataagatgttttatttaattcatttgatctgatttattatagt

SEQ ID NO: 58901 - DNA, 1004 bp, Homo sapiens
atacatgaaagacaaaattggtctatagttttctccatgttcaggattaaaaatttaagcaaaatccacacacacacatatttcttaaattctgagggaatgctatgttagacacttaagaccatatgtgtgtgtgtgtatatatatatacgtatatacatgtatatatatacacatatatatataaaatgatcttaagaaacttaaatacttaccgtggttgaattttcgttggaagtgaatttttatcttaaaaatctctttttttggtccacaaagccagttactctatttggtgttacacacaaatgcctcttttcaccaataaacgtgtcttctattcaaggtactatgaaaccgtgtcagatgtattaaactctgtgaagaagatggaagagagcctgaaaaggctgaaacaagccagaaaaaccactcccgccaaccccgtcggtcccagtggtggcatgagcgacgacgacaaaatcaggctgcagttggccctagatgttgagtacttgggagagcaggtaacccatcagccgccggcagctccagcgagcctgaaaccaaattctgagagccgggcagttacttggtggctcgcgtgatcccagagatgctgtcgcagtggctagggaattgcttcctgtgttaagactaggagtcggggctcccaaattactttgcccctaggcagtatgagacggcaatatgagaattcccgttttgaagtctggtggcgtgctctctggtgctgttgccatctgcttgtttccccagtgcccatgctcacggagctcactacagtgagactttttggtccagtgcctgatacttaattggtgcgaaccccaggcttttgaaatgcttgctggtttagcttaaaataactgaaagcattacccctctatggtgcatgagaaatcctttgagcataacttctctgcttccctgcttggcctttgtagctttcctataaaacacaaattttagaatcatggcac

SEQ ID NO: 58902 - DNA, 1087 bp, Homo sapiens
aaatgagaaaactgaggctcaaaaaggctgagtcatcttcccatggccacacagctaatcattgttcagggctgagtctgtgcctgattctgctgagaccatcaagccctcatccactcctactcatctcatctgtctgagtccattggggggcctcaccggcattccctgttgtctgtttggctggggaggggagtgtctggcagcctcagcgggaaagatgagggagcaatctgatcaagacggtcagcgcattatattgagagtgtcaaagcatcaggcttgtttagagccaggagttgggattattcctaagttttggttcccccacggtcctgggtggatatttgcatggggtatgtctgggtttgaatttcagacttattctcgattttttatttcaggatctaacttggcaagatgagcactctgcccctttctcctgggaaacaaaggtaagttggattaaatttagatctatttgttcttttaaaaagaactgagtagttgtatatttttctttcagcatttgatggactcagaagacagccccctgactgccaggctgcaggggatgtgtccattgttggtagaaaaggaggggatgggaggagcatggtgaggaattaggaaactattgtgtgtggtttggtgatagtgagttcaaagtagtagtgctttctgccagggtccaatgacgccccatgatgcccattgtctaggactcccggccagcttggttaagggggccagccctcttgggggccctgtctctgctcatacctctggttcccagcacttagcaccttgatgggagatgccccataagacaaagctttgagcaaatgggaggtgacgagctgattgatagacatagacatccatttagctaattcatcccaacgtggatcactaattctgtctcccagtcattcttcttctcatcattatcatcatcatcaccagagttgcttaagagcatcaagcttcactgattttaattcattttccccatctcctaagttgccccagtagaagtacattcataagcaaaatgactaaaagacaggtgtctttaacccaaggg

SEQ ID NO: 58903 - DNA, 1237 bp, Homo sapiens
ggaaagaataacaatgctaccttacatcctgcagttaacgctttacagcgtaccttgaaataccttatctcattcagagctcatggtaactttgcgagttaagaacactgtccctgtgacagatcagggaagtgcagcctagagaagtaaagaaagctaataaggagtgaagctggacctgaaacctgtgtcttttgattccaagcccagcatgcaccacagctggacatgtaaatcagagtttaattttctttttcaaagctctggcttaacttccaagcgacttgtaacgtgttggctgatgccgcaggccgttgttgtgagaggagccattctgttcacagctcctccctgcctttctaacactgtttgatattacaacatgaatataataaatataatgataggaataaatataagctctgccctttttttgcaaattttgttaattttcatgccgctactttgtgtttttctttttcagtatttcaccttcttataagactcttccatcagtatcagaaacgtttccaacgttaagatcgatgattgaggtgctaaacacagactcttctccacgttgtcttaagaaactctagttctgctgctgtatttatacaagtaaagggccggacctcttgcttcttaagttattttttaaaacatggaattataaagaaattaggtcctctattacttttgataccaatttttataggaattgaatacttgaaatcattttctttacttttctgaaccataatgaaaatcatgaaagaggctttcggggggaaaaagctacttgacttggagggaaagcgtatgtattagccggcagcctgttggttcccacttataaagtcatataactccttccttacagtaaaaaaaattttcctcaacaactaaaatataatactgaagatgaacaaaaacaaaaccaaataggagtgtttgtattcctttagagatctggatatttttcaaagacttgctttttacgcacattgtgatagagcatcttttgttgactcacgtaacctccatgtgtgggtcctttgttttattagaaccatggaagaaggttcctgggccatcagtatgtgttgcagagctcacagccaggaacacttattttgaacaatgcagacagtacttgccagagtcccaaatgctgaattattgaaccatgtttttttttcctttgttgaaaaaaataaaccagggtgatttctat

SEQ ID NO: 58904 - DNA, 1050 bp, Homo sapiens
gggtgggtgtgggtgtgggtgtgaatgaagttctccagttagtggatataatcctgggtactcttcagaaaaatcagtctctgctttgagcactagtatgagcataagttgcatttttgagttacgggatgttaggtacaactattctgccatgattcaaggttgctgcctactaagatggacatgagaaaacattcaaagggagctcttagaagtgagcagtgccccttgttgacgaagagaacctgtgagcttttggtgctgaggttctctgctggcctctggtaggagctgtggggagcgtaacctgggctctgttggggcctgaagacaggcagagatgtccttggccaccaggccaccatctcttgtatcagatgacctccttggccctttttaaaaacatgtaaggtagagccagcactacagagttgcagttggggtttacagtgaatgaaacactagtaacgtgaattttctttttccctgaaagcagtttaatactaaaacgaaggatgggttcaccgtgaacacaaaagttcccagccttaaagaccaagggaaggaatatgatggattcacaatcacgattacaggagacaagtatgtgcgcttcttaatgtgggtgtaaactagagacgaggcaggaagggtgcctgtgcttattgtcactatagagttttgtggtgttgaacttttgctccatcctgaaatgaaaagtatcaaggtccagtgagcagttataaccagttatttaaaaaaatgtgacatctaaagtattacaccagcagatacattttctgactgtctaaatctaaggactttctagatactatgtatgatgtagtttgtgggagacattcttctgggttcttgaagttccttgggggggcgagggaggcttttactaataaaatgaaaaaagatgagcagttggcggattgaagtccattgtagatttaaatatatatgtataaaagccaatctatatatatatagagagagagagagagagagaaaacagctttaataattaatgagtagtataat

SEQ ID NO: 58905 - DNA, 2085 bp, Homo sapiens
atccccacctttgcaaacacttctacatgttttatttggaatgcttctgaacacttctggttttataaaggtctctgttttataggattgctgacccagaccagcccgtgctgtggttagatcaaatgccagcacgaagtcttagcagaggttttaacaaccacattaatttaatcaggtacgaaccttttgtgcatctttcttcttttcctaggagtttattctcaagacacaggccatggagaccaggagtgacccattgctcctttcctggtgactttttgaccagggaacatactgattgactctgcacctgtggagtcctgcctgcattcctttcctctagcccagctgcagaaagaaacatagcgcatgccatactccttccccaggcccttctgtctggtgtagagcacaaccgaagggtagattgcagatgttttcctagggcgtcagtctttaaggagtcttaaaatatagaaaattattagatggagaacattacagtaaccataatattcttttgatagtacatggctcaaataaattatttgacaagtctctcgtggtggagtctctcacggtgggcggctccccattccaccccaacacacaaagggcttagataaataacactatctggtaactaagctgccatctggggagggcaagtcaggttggctggaaaacttctgttttgtccagaggctctgctagttggggacatgggtgaaatgctcacttcttcactctttctttatgtgcctagctgccttctaaataaatggtgaacaaatattaaaggatatcagtttcttggggacctatattatcagcccatcttttagtgaatttaattttagataaaatgtatagatatggtagttgtgtcacctctaaaatgcttctagttccaggaagctgaattaagaaaatatttttctatacacctttaagtttgggttttaatggaaatataatttgtatgtatatttatttttttaatttctagaaaacaaatttcttttcaccttgtgacttgtatattcctatttctcatggaataatttgtggcatagataggtagactcaagcaactaactttaatcgaaggctaccgtagatcagccagtgtgctgtgctgtgctgtgtgttggggatacagaagggagatacagccccacctgctgaaagctcacagcagacagaccagcagacaactactatgcagtgtgttaagagtgagctgatcacatgcacaggatgccatgggaacctggagaaggggtgcctgataaagccttctggtgctacagggctatttggaaaaatggaaaacagagagaggtggggtgattaacttggacccatggatgagttaggtatggtcaggaaactgtgactaactcattacgcctggtggtgagtttgcaattaagggagtatcaggaattaaggctagaaagataggcagaagtcagaacataaatcattttatagtccaagctaaggaattttttcccctgaagacaatggtgagccattcagggattataagcagagaagtaacaggaacagatttgcacattgggagaagatggcaaaatagattggagaggaggcaggaacctcggaggtaagggaggaggttggaaaattgtgtagttgttcaggtggacaagtgcaaaggcctcaaaagctgtgtggtagtgagttggagaggaagagctagactcttagaagatagaatcaggagcactggcagtgggctgcagtgggaagggcatggagctagaggaaggccaccttccctcaggtacgtggttgtcccattaggccagagagcaccagaacgaaaagtaggtggacatgtttagtggggaggctgggagaagtgtgggttgcaggagggaattcttacttgacagtaacctttgaggtttgagatgcctggtgggaacccagggagcgatgtcctgggagcagtcggctgtgtcatgtgactcagcatgttggctgaacatggagttctgggagtgagtttaaaaggaaaagatcagaagggatagaaatgtgaggaaaaga

SEQ ID NO: 58906 - DNA, 1103 bp, Homo sapiens
ttcaccgtgttagccagaatggtctcgatctcctgacttggtgatccgcccgcctcggcctcccaaagtgctgggattacaggcgtgagccactgcgcccagccaatcaattcctattttgaaaatattagttaagtgtatgtcaaataataaagatgccagcaatttctaacaaactttagagaggaaaacctaacttggaaggcctggtgttagcaagcaaaacagggttcatagcctgttagctaaaacagactgacgttatttgacaatgataagacttatagtttattttcactgagatgttagttaccttctccatttaactgcaatgtcaaacatgtctctccactgcatcaaccgtgtcttcccattcattcgaactttcgagttggtccatgtacgctgcacggcttgcatgacctccaatgcggccaaacccatagctacgagaaaggaatatcgagaagagttagtacactttagagggactgagttccacctactttacagagtctcagtgataactcaagagttaacacataaagggtcagaagtattggtgatataacaagacccaaggcacgtttcagtcatgatggtcctactaaaattaaaacccatcagagttaactgaagacaactcaagttgtctgctcccaactctgcctcctactgaaacaagtggaggtttgcattcttcctcactcctatagtaaggaaatagctccctggatcagctgtctgattttgagtaaggacttaagacctatattctagtttatactacagcaatagcaaaaaagccaaggatggaagcagtcttctttcagaattcagtttgaatgattctacacatttctattctgatcacatggagaatttgaataagcacaataaatactaatttattaaaatgcacaacatggcttaaccacccttcctcttatgccaggaatattttcattttcaggtagtttccagaatacctctgtgtattctcttgtttggcaggaaaccaggtgtttcatattgcatcagggatcccaaacgatcagccacacaaatcagctcctgtacttcaggcttataactctcaaaat

SEQ ID NO: 58907 - DNA, 1110 bp, Homo sapiens
caggcggatcacaaggtcaggagatcgagaccatcctggctaacacggtgaaaccctgtctctactaaaaatacaaaaaataagctgggcatggtggcgggtgcctgtagtcccagctactcgggaggccgaggcaggagaatggcttgaacccaggaggcagagcttgcagtgagccaagattgcaccaccgcactccagcctgggctggagcaagactccgtctcaaaaaaaaaaaatgtagccaaagtagacccagactgactgacttatatttgaccttgttatctcaagtcagtggcaggttacctctatcatatactaatagtgacttactaaaatttagaaactctttagaattcttataattgaagaacagcttgttacaaagtatttgtatggcagctagccataagaaagtttctttagcagtatttggatgtgtcagatctcatttcctttctgcagagtattctcgatatcttcatgcacaccttgataccccccttacggaatataacattgatgtggatctgcctggaagctttaaggaccactgggctaaaaatttgcctttcctcatagaagactacgaagagcagccagggttgcaaccccacataaagtaagtgctttaaatgaagatgatttttttttcctttctcaaaactgagctataagctgggcatggtggcacgctactccctgctacttgggagggtgaggtagaattgcctggggccaggagttcaatcaagcatactatccttgtgcctgtgaatatccatccatcgcactacagcaacacagcaaagaccccatctctaaaaacaaaacaaaacaaaaaacacctatagcaaacatcattttaacttatgaaatggtagatacattaacattaccattgggagtcaaagcaaaaagcccagaatcagtgcttctctgtaatactgaactacaagtcctagacagtgcacagagagaagaaaaagaaatcagtgatatggattagaaaggaaaatagaaagctgtcattgtttgcagatcacatagttttctacaaaggaaacctagaagatctacaaattataggaaatgatgagagtttag

SEQ ID NO: 58908 - DNA, 1361 bp, Homo sapiens
agtgaaggagctcatgacttagttctgccttggtcgttctgcaggtatgagtgcttaacttccctgagcttctggcttctcacttgtaaaggtgctacaaaagctagaaaagaaagacagcgacggaaagtccctttattaggtaccttattcaggaaggattacattcaagagcttatttatctgatagtttgaggagctcttatactaacttggaagaagtgtgtttggatttgtttggggtttaagggatgatatttgtgcttcctgtctcacagaattattgaatataaattgaaaacagatttgaaagcaccttgtaaagtgctgtatgaatgtaagcaggaattatatttttaaaaaatgttcactatttatagagaattgggtcccgcttttcaggaggtcaagtgggagcatcgcctgagcccaggaggctgatttcagcctgagcaatgcagtgagacccggtttctaaacctatttgaaaagcaaataaaaagcagattgatccataacaaccatttccatcctggaatggttacaattctaaaatacacttcttttttcagaattctaaattatataatgatttactagattttaagcaaagcaactttggtgaccaaaaaaaaaaaaaatgcatttttaaggctatgaatttgattgagaatgatgaactgtttatgattataattggtatatttttttccaaatgggaaaagtgtgtttctatccatatattaacatttacacagtttttagggtttgggactcattgtgaataatcaaggagaggggtttgaataagcgtctgcctttggaaatcagcagatgaattttccccacagaatttcaagagctctgtggttatcctatgagctggtgagatttagaagtaagtgaaatgtaatgtgtcagaggctataaaaaagcaacaaagggaacactcccatcaaggtatcttgtttacatattggtccataattctgaggatagcttattctgtatgtttcccgtaatatctatactgtattcataactattattaaatacctagagaactgggcaattttgaagcagccactgagagctttcaaaaggcactgttgctcaaccaaaatcatgtgcaaaccctccagctccggggaatgatgctctaccaccacggcagcttacaggaagcccttaagaactttaaggtgagcatccataaataagaacactgtaattggaattactggattattcttcattgaagtttagtgaaatgaatagagaagggggactgagaatagtgtttctactccaacaaaaagaaagagaagaaatcattgctcttgtcctgtagactagtttac

SEQ ID NO: 58909 - DNA, 1073 bp, Homo sapiens
tggtgaatctaggagcctttttgcttgttttaggaacagtttcacattgggctttcttttttgtctcttggttcaattttaaatgttgccagttatgatcattttaaattatttcacacagctgttaggcttgcttttggtcctagggcctttcttaattaaggatatgatattaataatatgaaggtgaaatgattagtattcaaagttttaatgaagtagctagtaatgaagtagataaaatggaaagctgatgtcccattgtaaaggggagaaatttaaggctcatatttttcatagtaatgcatttgtttactgaaattaaatccttctgacttatagtttattgcattttctgcctctcttttttaaaagtcctcctaaaagaaaatctgtcagagactaggatatatatttaaatccttttatgatttaagtgaatctcaattttaacaattatgcaaatgaaataattttctctacactttttataggaagctattgaatccttcaaagaagctttgaagcagaaagttgactttattgatgcatataaaagtctagggcaggcatataggtgagtaaaataataacagttggggtaggagggaggctgaagagtggggagacaagatagcttcacataatatttaaaagaaatagtatttcttaaccaaaggagatgggtattttgaattgtgcaagtatgtatagacttgttgatattttctctgaaatgcagaaaaataaattgtaccagaggatgtcatgatgcacagtattctctcttaacttcagcgtgtgtattggtctagaaaacgttcatccttcaagggttgttttgaatagtggcattgtaagctattggggtgtagacgctgctgctactttcttagacagtaactaaggtaaatttcctatgatctctttgaagagtcctagaatgaagggatggaaaagttgtgattataatgtacatctgctgagaatgagaagttgtaactagaacttggcttcctgacgccatgcattgccctgatgattagagccattgtgacttttggcttaaaaaa

SEQ ID NO: 58910 - DNA, 1144 bp, Homo sapiens
agagacaagtattaaatggaccagtgagtttgagctatctttatatcctaaaggtggtctctcttggccaacagcaatttagaaattaattgagtgggtgattgcttatttactatatgatgtaatacgttagaagtatattaggcaatattacattacaaattttacaactatctaatccaggggttatatcaggcattttggatcttcccagggaaacaacaaaaacttttctattgaattccattgttttatctatgttgtaaggatatttcacaaaccatgcgtcccaagcaccatcagtcttcactttgagagttttctgagagtgttctcttagttacaaggaacagccctagggtggtggttgcctgtcaactagtaagaaagatggggactgaaaatggtgggatggcatttgccaagcaaattaattcagagccagttcatatgcttagagattgattcattcaaacgtagtttctttgttcccaacgccttaaaatcttgattctactatgtcccctctttggcagaatgaggtagagagctgtgcagtgattagacaggaaccccgaaaccaaagactcttaaaagctgaagagaaatcagactttgaagaactgtggcgtccaagcatgctgtaagtggagtgggcagccccctgggcgtctccacctagctgtccacaagcactccagacttaacacgccccgatgggctcgttattccctcctgccccaccccatccccacctgcagctgccctttctcctgtacttccttacttggttaatgttcttgccacccacccaagctcttcagcttaaaagcttcctaccctttcttctccctcatctcccatacccaggcagccaccaaactctgttgtagtttgcctttcaaaatgtctcctgaggttgacccttcttttctctcctcagagacactttattagtttgagctttcattatctcttgctccaactactgcagcaactccctaattggctccctgtctccattcccttctgtctctagtctgtctttgttgctgctagtagtaatcatctctaaaaagtacatttcctgaggtcatgcacctgtgtgaagccccccagtcctcactgcctacactgcttggcc

SEQ ID NO: 58911 - DNA, 1034 bp, Homo sapiens
ctggtatccacatactcatccattgagattcgttgattccatgtttaagtagattaagtttagataatatcctgccatctgtggaatttgtgataggtagccgggtctaacatgttattgttgagtaagtaggtagacttgagtgagttaaataattataatatcatgactgatttgacatggcacatctcttacatagaagtgaagttcatatttatttttaaacaattggttacatcattactaaattattagttttctcagaaaattttttcagcctggttttgagtaacagtatgtctcatactaagctaatgccttttcaaggacattaagaatgctgagcttgctctgttcgaactgagccgagtaattaccttggaaccagatcgtccagaggtatttgagcagcgagcagaagtgagtgtggctttctttttccctctgtcattattggattagttgaatctcaatttttttcctattactttattatttgtaaattttaatgctcccttaaaactcttatgtttttctatgtcggtacttaatgcctttaagcatggttgaaattaatagaaaactatggattgagtgatattcctgaactaacatagaagagtaatatttagtatgaaaatatgtggttgaaaatatttagtatgaaaatatgacgtgtactacttctatagatattcattgaaaaatataacacataatatttgtgttatattttgaaaaatataacacagaaaaatacaacacacaaaagaaacacagtttcatccatgtccctacaaaggacatgaactcatcattttttatggctgcatagtattccatggtaatatgtgccacattttcttaatccagtctattgttgttggacatttgggttggttccaagtctttatgtaacaaacctgcacattgtgcacatgtaccctaaaacttaaagtataataataataaaatttaaaaaaaaacacaaaaaatataacacaaaagaaaaacacataatattcattgaaaaa

SEQ ID NO: 58912 - DNA, 1081 bp, Homo sapiens
tggcagataccctagctcagatttgaaactgaacagtagattaatctatcaagtttttgcagagtttctttctggagaatccagtgccattctattaaatcccttagcagtgcaagacttccacccaggaccttatagccagaggcagctgtttattcttctttcttaactgtatagcgaaccattcagagaagtaaaaattgtagaggctaaatgtagatgagaggcatttcattcactcaccaactaacctgtgtgtaaggactcaatggccggggtcaacagatgttttgtccttggtcctgatagatgtttcctccaccccatctggattgcagaataacaggagaaagcatgggagcaggctgcaaaaagagtctggttttttatttcaacccattagtatgaagggttgaattaatctccaacagatttcagtgcagcctcatttctagttcgtcattgtgttggcactgagtggttctttccttttcaggtaatttcatggatatatgaaagaaaacacattagttacaggcattacctaatcctttgctcacatctctttacccctctgagcctccttcttctctgtaagacatgattgctgatgctgccagagttgttgagaggattgcattttaaataagatgaccctgtgaaagaaaccagcatgtttctgcgtaatgttggttcccttctctctctattatttttttcaacatgaaacttttatcacatttcatacaaatgagctttaagaacatagacttttcaggttggagactgcgtattgacttacgagtggtcgtagcataaagaagtagagctgtcacttgcggcattaacgtgctttaagcagaaactgattttttgttttgttttgtttatggtttttgacgtgtttttgttttggtctgactaggaggagcctgatctggttagtgcaatttatggccgagggatagcctatggaaagaagggactacatgtgagtatgtaatagttacgattgccatagcgcctacatgacctgacacagaccagggttttgctagaactgctactgttcattgaccct

SEQ ID NO: 58913 - DNA, 1012 bp, Homo sapiens
ctaacatggtgaaaccccgtctctactaaaaatacaaaaacaaaattagctgggcatggtggctggcgcctgtagtcccagctactcaggaggctgaggcgggagaatggcgtgaaccctggaggtggaacttgcagtgagccaagatcgcgccactgcagtccagcctgggcgacagcgagacttcgtctcaaaaataaaaaataaaaaaaaaaggaaagaataaattgaatagagaaaacctaaatactttacagataagcacagtaatcaattcagtgctgtagtaatgatgagaccatggggtgacttgaggggaggcccgtgcgagggcctctgtgtggggcacacatccaatcctgcagtcaagatgatgatggctacctttaggaagttgtcagtgttcggatatttcagctgttgcaaatttttgaatggctgttttttttttttaatttaaaatttttattactataaaaatgttccagctgcaagagctggagggccaccatacgtcattcactgtggcacatctgtcatagagctttgccttcctgttaccctggatcgggctcttgttttccattgacctgcaccccactattattagccatgttgtcctgcttgcttccctttgggaagaataggcttagcagagctgactttgatctgataggcaaatctttgtcttctgtgttggtttttgcttgctattcctagtatgtggcaagaatagcatgactttgcatggtattcctagcacatggaacctgagatagctaacagtaggccctgagtaaataattgtggaatgaatggctgacatccatacagtgaacagtgggaataaaggagaaggagcatatttattttccaggggcgtctggaaggaatccaaaggtggtgtttgaactgagacttaagggatcaaaggaatttcttggggaccgaggcaatgggtgagtgtttcagacagaggggatagcatttgcaaatgcactgcatttgggaa

SEQ ID NO: 58914 - DNA, 1139 bp, Homo sapiens
aatttttggttttcttgagttcattaactcttggcaatcttttttttttttttagacagctcatgagctccagtatgaagcagcagagcatggaatattattctgtttatagaagcaggcaacaaatggggactcaggggcttggattttattagaatcactgttttgataagctcatttaatatgattttcaaatctacatataaagggtattttaactccagaatgactttttgatataaagctcttatacctttcctgttgtcttggtttcaccatcaggttacaaacctgggaaatatttccataatcctcggtgtttcaaagtgtttattggaatgtttattccctgtggtttgattttcctttacagaagtatcaaggtttctaactgagcacaatgacagggtttaatagatgttggtctgcattggaaactcttgatttttaaagcttataagttagtgttgcttctatgccaatgccctgaagtcatttccatgtgtgtcagtgcatcagtaatagtgttcttgagttgaaaagtagaactttttcctgatttctgtgctgctttggtcctcatgcagggatgggtttaacataaatgcttcaacaattttatgagataatttggcctttgctatttattatgtgaccttgagctcatctgattttgatctgattccagtggaactgaacttgtaaaagaatattacttcctattttacattagcatacaaaattggaaacattcctctgcatagaattttaaataacatcctttatgtaaatatgtgtgttcgtcacttaggtgaaatctaatcctcattacattgcttatctactgactgtttcgacttgtttgtttttagatccagtgacttcccagttttaataaaaaagccagccttgtagtggtaaatacagtaaatactgtaaaatttaaagtcactatataagtaatgaaatgaggataatatattagactcttttttttttgcgaattgagacatctaagtagacacaacaccatttaggcaactgttataccatgattttgcagttgcataaagtaaaattggaagattgaagtattcattttcatttcagtctttttaagagtatagaaactttttaaa

SEQ ID NO: 58915 - DNA, 1082 bp, Homo sapiens
taaaggagccccagcgtttagacagtagaaggtatgtatcgattaatactatgatatctattggtatcattgatgttggtggcttatttgattctttggcatcaggctaaccaccagtatttaagaaccctgttcaagccagctctgacttgtattacgatatttccctggaggatgaacactgtatcatgaagctgtaaacataatttatttagatgtttctaccttctttttctctctcccatgtagtacttattttttctagcttggaatttaaaatttactgttgcaaatgaacgacctgagtctttcagatcacctcccctggctgtgtgagtagctaccaacaggtgctaaagtggggcagctgccgctgtggtcacccaagaagtcatttccagaatcaactacttggagctccagctgtttccctcagctttcctggctgcagtatgcgacaaaagccaactctgttgttgtaggggctactgaaatacttctcatttctccctcttcgccctggacaactatgtagaagctggaccctatgaaacctgtttcatttcttctctgtcctaggatgtggggatgaattcgggatttacaactaaccgtgccatagcctgaggggcagctgatgctctgtatccggagacccatttgagcaacattagggtctagacaaatgtcaggatccagaactagtcagttcttcagaatcatacagacttggctttactaagcattgatcatgccatcgtctcttgcttgcctgtccagccacaaacctgttcatatcaatccagcacatatactgaggacaaacacagcagcacaaccacttttcagaatctttcccacagctttcaggttcaaatggctgagctgatgcctgcttgggtctaaatttaaatctgcataccttcttacaagcagtatatgtattcccttgagacagaaccgccagtgattgtacatacaaggacagtggctggtgggagcccaccaatccaaagacaacacactagcaatggctggcccagctatgcacaccaccgtcacatggcatccatgtcccaggg

SEQ ID NO: 58916 - DNA, 1034 bp, Homo sapiens
aacacctccaaaccagcctgcaacccatactgctgccatgtaagtcttcatggagcaccattcctgggggccttctcaatttttccataatttctgattgctgacataggagtttcttgtgtctttctgaagaatgtctttagttttctctgagcattagtgtggccctctgtaatgtcatcatcctaattcttctccccaggcatgttcctacttaagttccacatccaccacaggtcctctcttctccaaacttgccttatgctctccttaggtcctgcagtgcccttgtctccacctaaccagatacggtcagctttgcctctccatggaataagtgaagactttccaaaaactccagtttgcagtgcttactttttccgttgacctccgagtgctcagcttaacacctacagcagtcacgtgcccaagaacttctgacattgccccagggtcagatcttttgtttctacttttcataagtgcatctgcttgtctgacaatcaattataatttatagttaggaaaataaggtcacatatcttgaatcacttgaaagccattaccctgttttttattatctcatgttttatacttatctatgtctgtctggtattaaaatttcatgtgtttatgcctcactctcccagcctgttcagaagtctggtgctgggagaggcatgccttgggttcctttgtatccaccttaactcagggcctgccctagtgtctgtcagtttgattttcagcagaatgtggcattctaaatacatcctttatttttcacagttttattcttcttcactatctgtggcatgaccagctgtatctgaaagagaaaagacatgaaatataaaccaacctcctcatttctgttgagtaaaatgaagcaaagattggaaacactttctgaaaaagaaagcaatgataatagcggtggatacccacccccacaaatgcacccaagagacaagccatttacatacagatattcacagtcacacatagaaacacccacatggacacaaggaatg

SEQ ID NO: 58917 - DNA, 1132 bp, Homo sapiens
taatttcagtggaacactcagccggcgatctgcgcctgccagcacattccttccacacggcgcatgattcagagcatcactcggatgctttggatttccagttttgagaacaccttaattgtgttatgcccatacctcagacgttactcattgagtccagtgaggatcgcatctgtggggcaaccagggcagcctgcagaatttaccctggcgctcctgagtgtgcctgatgaagcaacagcactgcatattctagtggccccacctgctttcactttggacgccaagaaacgagtgtgtcacttcctctcccaatcagactcggagaagacccacattggccttccctgctactgcgttaggatctgactgatgcagtcattctcaactcccaggggcaacagaatgccctttgccagtgacagcagctggccaacgtgacatccccctggagcacccacctctgtgcagttcagtggtcagaggttacactgcctccctctcctccaggcagggtcagtcttatcccagatggttctgggatccctccccagagtaactgactgaatatgaggaagccctggaagatgaagggctctacagttcctcctgaaaactagccccacaaaaacaagcagcaaaagaacacagaacatttataaaagtcatatacttgtttatcttccagttcctccctcccccaccacccatcccagagaaaagagcacggtcacagtcagaacaggaaatgcatcgtttacaccaataccaaagagagaacagttaagcctcttggaaatgcagcatagaccagcatcggtgcctcttaacctttaaagtgcatgagaaccacccggggatcttgttcaacaagcagactctgattcagtgggtctggggccactggatggctgtgcttccaccaagcccctatggtgattccgtgctatgctgctgttccacagaccctgctctgaatggcaacgggaagaaactcaagaagacaccaggggacctgccttcggcttcttggcccctgagcaaggtatttatcaccttcatctccgtgccttggttgatggcaaaatggaacaataatttctcttatggagctattagggcaattcaatat

SEQ ID NO: 58918 - DNA, 1119 bp, Homo sapiens
aataggaaaagacttgggatatcttacctcaaaccccaaaaggaggaccttccaaaccactgcactcctctccaaaccaatacgattattttatacaaagtcaaagcctcccagcctggaggccccacagagcccttgatgctgggtgtgacagctgagcatccaaacagatctaatttaactctctcctaactactaccctttaatctgaaggtcatttactttccaccaccccatgccctaaaacaaaaaccaaacctgtgttcttctctccaagctaaatatctcaggcccttcccctattttcattatgacctctcgtccactaacacccgtggcctttcctctagacttactcctgttttccaggattcctctgcagaattgcatctggatgccatcaacatgcccccaggagtctgactcggccagctctgacgtccctatctttgctaggatttcataaaagaaataataactttaatcgagaaagccacactctctcggggtcacatagtatgtgctcaaaaaccatggaagaagatcatctggaatcctagatctactctcctgctgagtccctctgacaccagtagggtgggtaaacccaagactcgatttcttaccccaggaatgaataatggaaaaacacctaagtagcagtgggcaccctggtatcagagcaggtctgcttttctccttcctgggatggtttgaggtcggcccaggtaaacacaggagcctgaacgcttctaggtttcaaaggctctgactccccatgaccccattccagccagacacgtggctccaggcttttctcctgacagtgccatttccaaggtattcccaggcccaccgaggtgatgcacccggcagggagtcgaaagcaaagaggatctctccctggacacttctgcactgtagcacccagatgactcacaaagctgccttgtcgtcaggtggaacactggcctagaaaggaatcctgaccgcctaggaatacagcgcagccccgcacacacctattacacaacccgacacatggcaaaagttcagacggatttaacaaggattagacgcacacacatacatatgcacacgcacacacacgcctacaca

SEQ ID NO: 58919 - DNA, 1056 bp, Homo sapiens
tgctttttcattttagaaaaaaagtcaaacagaagtaacatttctagttgccgaagtgtctgcttcatggtgctgaacgtgtcaggcccagtgcagcatgaatgtgaagtgaacccactgaaaagtgatttttaatgttctccagcaaacttcactcctgtttcatgttcactggtatttggtgcatttgcttgtaatacagttttttataactttactgttttgtaaatgctagtagtttacattaaattgccttatatttttaatgatttaatgttatgatatcatgaaagaaccaagaatctagtaatttatcagttttgtggaaaagcagttttaatttttagcctaccatgtgtacaaaatctacttcataagaagttatataaataaaataggtttgtagtatatgtgcctgtgactgttaagtaacagatggttttaactcatacttttgtgcccacattcaagtgaatgttatttctatcagagttgtcatcacctttgcagccatatacatgtttttaatgatattgcccttgcttaaagtgacagcaacttctcaaagcttgtagcacatttaaaaaggtcttcgatgatggtgacaatttgggcttttaaaaatttctgttttttcaatttttttttttttgtgagacggagtctcactctgtcacccaggatggagtgcaatggcacgatctcagctcactgcaacctccacctcctgggttcaagcaattctcctgcctcagcctcccgagtagctgggacaacaggcgcacgctgccacgcccagccaattttttgtattttagtagagacagggtttcaccatgttgcccaggctggtcttgaactcctgagctcaggcaatctgcctgcctcagcctcccaaagtgctgggattacagacatgagccaccacgctcggcctgttttttcagttttttagagacaaggccttgatctgtcacccaggctgtagtgccccagcacgatcataactcaatgtggcctcgaactcttgggctcaagtgattctcttgcctcagc

SEQ ID NO: 58920 - DNA, 1021 bp, Homo sapiens
gccaggcacggtggctcacacctataatcccagcactttgggaggctgaggtgggaggatcacttgagcctaggagttcaaggccagtctgggcaacatagtgagacctcttctctataaaacattttttaagaattagctgggtgtggtggtgcgtgcctatagtcctagctactcgggaggctgaggcaggagatcacatgcccaggaggtcaaggctgcagtgagacatgatcatgcctctttttaactgtactccatcctggcgggtaacagagcaagaccctgtctcaaaggaaaaaaaacaggagaaagatgttgtgagagatggtgtatggtaggagagcctccatagagctcctttgaccacatgacagtggagttattattcctgtacgctgtcattacagagcggtggatctgaaatgcattacttctggcagtatgtttttttctttggagttgttggaatgcacttgcgtctgattatgctttgtgtccgcaggctcgtttagaagtgcaccggtttggtatcacgggttatggaaaaggaaaggagagaatcctggaacaggaacgtgccattatgctgggcgctaaggtgaggggctgctgctacctttcatcactagacaacatgcaaaaaaagcaagagcaaggaaagctaagagcaagtcagggcaagggacactggaacatttttgcagaataaaatatgatggtttgtttctttgttctttcattacagcctcctaaaaagagttatgtgaattacaaggttttacaggagcaaattaaagaaaaaaaggcagcaaaggaagaagaaaagagactggtaggtgtgatggtctgtcctttattcaactagaatgggaagatggatgctctttgccacagtggaatgccggaagccgctgcttggagagcaatgaaggcaccagagttaaaggatcccatgctccccatttcttcgagttagctctgtttagtaataccagccaagtaatctggcgtacttaca

SEQ ID NO: 58921 - DNA, 1006 bp, Homo sapiens
gactacaggtgcctgccaccacgcctggctagttttttgtatttttagtagagtcagggtttcaccatgttagccaggatggtcttgatctcccgacctcgtgatctgcccgccttggcttccccaaatgctgggactacaggcgtgagccactgcgcctggccccaaatgtttttaatttatctattcacaagaatatcataatggctttgacaaattcattgctattccatttctgtaacatcccccacgtcctgcaaacctttgtctatcaacaaagaagtgaggattgaacgtattagtttctaagcctgctataacaaattaccacaaacatggtgacttaaaccaacagaaatgtattctcttacagttccgtagtccagaagtccaaaatcaaagtgttggcagggccatgctccctctgagggctttgggggagaatcctttgcctctgaccagaaggtagctctaacagtttccttggcttgtggttgcataactataatctctgcctccgtcttaatgtggttttcatccctgtgtccctgagtctcatgtttccctctgccttcctctttgctttaggcccaccctgaatctgggatgatctccttttgagatgtttaattataaagatccctctccaagtaagatcacattcacaggttctgaagaggagtaggacatggccatatgtttttagaggccacaattctacccactacgaagatggtttggcttgcattgttctttatgaatgtataaatgtatgttagtgtccagtgtttgccacatctttatggttttaaaaaccatctgtataatcttttctaaaattcaggtagcatttcatatcaagcttgctggcatctcttcctcaaagatcgttagcgcattctgcaggctgagcgtggtggctcacgccagtaatccgagcactttgggatgccaaggccagaggattgcttgacttcaggaagtcgagactgcagtgggctgtgat

SEQ ID NO: 58922 - DNA, 1132 bp, Homo sapiens
ttcaacaagtgaaatatagaaagaggaattaatagaaaacaaaggcattcaaattgagccagttgtcttaggttcatcttaattcctaactgtgaaagaaaataggaagactattccatgttcctgtaacccagaaagtgttaaaaagaaacagtggctgcagtgcctgatatttttagtataaagccaattgggattaccagccctggggactattgctgtgatgacactttgagtaggaaccaaagtggagactaaagtgattgtgctaataagggtcaaagacatagttacctaggaaaagatgactacattttggattctctgcattttgcaaatacacttatttgaaagaaaacaaatagtttatttctttgtgtgtgcttctaggtgcatatagccctggaatatgtacaaatacattcgtaggatttgatactgatgatagctaagactgaaaatatttattttccttcttgtgtttgaacaaacaggaggtacagaaggtgaaacagaacagaagaagatcataaagaaaagggaaaacaagaagagagatgtgatggcttcagcggccttggcagcagagccatctcccctacctggttctctcataagaggccagaggaagagcgcttcgagcttcttcaaggaacttagagaagagcggcattgtgctccttctgggacccccacaggaccagagatccttgctgctgcagttcctccctcttccctaaagaacaatagggaacaagtagaagtggtagaatttcacagcaataaaaaaagaaaattgacgccagatcataacaagaacacaaaggtaatgagttggttagcttatatatacgtggtgaaccccctggtattgtagtattaggtgaatagctctttagactgtggcaggaatgcctgactatcctcaggcctgcagatttgccaaaaggactcacaggacccaagactcagcatatagcccttatcagtcatgtaggcctacagactgaccttagttattcaagttctagacctccagtgaaaagcaggtattcaccatcaatcacattgctagtataaactgtctgggaaaacttggtacagcagtggctcaagacctcaggtatgcaaa

SEQ ID NO: 58923 - DNA, 1148 bp, Homo sapiens
aactcccggtctcaagtgatccacctgccttggccttccaaagtacatttatatttttgaaagtctgagaagactataggtttctggtgtgattatctgtataggtaacctgttttgcctaagtagagactgtaggaagagaatcaggttgggtagggaatctgatgcataaaagtggagatcagttagaatgctattgcagtaatccagagaagtaatgaagcagtaacagtgagcccaggaagaagggaaattgatgaatttatgtgatatttaggacagtaaatcatcatcctttggaaccatttgaatgtggtggctaaggaaaatagcatagtctgaagttcactgttgggtttctatgatttggcaactgggcagatgatgatgcctttcattgataagaaatatggggagaggagcaggtttggtcagggtaatagaattcagtttggggtgtgttcagtttgtgatgtaagagagaaatataatgatttttaacttgtggattatcatgttatgagccagatacattccatagtgtttggaagagatccaagtagggttagaaatatggtgccagagcaagagagggggtctggcctaaatgtatagatttttcagcatgtaggttgtatctatagcattcggtgagcctgaaatcattcagtgagaccctagaatgaaaagaagactgaggatgggtaaccactggtgtgccataatccagatgatgacttcctgttaaagtccaagtgaaagatgcagatgccttactacagtgtcccacaagactgtacatgatctcttaactgctattgctctgactttactaatcttcttgttcactgggctttagccaccctggccttctgtttctcagacagtaaaatgctcttccctcgaatgctcatagtcccttctgtgtggcatgctatgttttctcagaagttttattgctggctctttgtattattgaggtcccaactcaaatatcacttcctcagagaggccttccacaaccattgaatctaaaacagctatccaatcactattcctcattttcctcattagttgcctaattttctttttttgttgttgttaatttttggctttttaattaattatttttagagccaggatcttgc

SEQ ID NO: 58924 - DNA, 1266 bp, Homo sapiens
gtgacttgatagatctgatgtagtctgagtcggtaatttcaatgtgatcttgtatattaccttgtaatagcattgagccagctggtggagcactgcagcaatacactgagagaagccactatttgctaggacactagaccatgggcagcaacttattttagagtttggatataaacttattaacaaaccaaatggaaaggtgaagtgttttcttcactctaaaatgctatcctagaaagccatttttcttttaatttctggcctttaaacttctttaaataggctcatttatctactatgactgtgttgggaagttgtcaattaagaagacactatctttgagttatagaagattaatccatttggaactagtcatactggtttgagtaaagctttctgacttttctgttattgttgttagaaattattcctgcttttcctttccttttagctttccaaggaatcccttcaatctgtggatgtcctccgagaggaagtgagtgagatcttagatgaaatgagtcacaaactgcgtcttggagccattcggttttgtgccttcaccctgagcaaagtatttaaacaaattttctcgaaggtgtgtgtaaatgaagaaggtattcagaaagtgagtattgattattaaaaaaataaagaaataaaagtctcatcttaaaattaaacaaaaaaaaaaacagtctctttttcaacccctcacaatttaatcaactcaaggacagctcacttggtcaatcaaaagcctagggcctaatcatcaggcctccagtctaggcagaagaggatgtgcatctctgaaggttgttttctgtttttttgtttccttttaactgcagacctacaggcttcagactaacttagtcaagtaagacttatagactaacttaatgccagatattcagtaacgttacaaaagaaatacaaagaattcctgtatatacttcacctagattcccttacagcatttcctttatccttttcctaatactctgctgtgtttttcctataattaagggcattatcttatggtacaagtatcaaaataaggaaattaacattgaacaaatactagtaatactgacctgactcatatttcaccagttgtcccagtcatgtcctgtctagctaaagaaaatcgtagctcatgtgttgcgctagaaatcctagaaagtgttcaactttcttctgtatccacttccatattagactcttttaatctaaaataattccttagtatctgtatttgtg

SEQ ID NO: 58925 - DNA, 1082 bp, Homo sapiens
ccattcaccctggcagtgagtccagcacatagagaaataccattcttctcaccttgtcctatgaatttgtagattttttttaatctctccaagagaagctttgttttctcttactacaaccaaccaattcaatacagtggttaacagttggctttttaagtcagactgacttgggttccattcacagctctgccatttattggatgcatgaccattttacaaacaagaaagctaaggcttagaccttgttaattatgtggtattaaacaaagcacgtaagataactgtatataaaatgatgctaatatagtgcccaactaatatatgttagcgatcatcactgttattattctgatccataaaaatttacatttttaatattcttgcattatgtgaaattgtttaactagaaacagtacttttaccttatcagagcaaatcgtttatgtgtatggcaaaaaggcagaaaaagaggatgggtattccctctaaatatagacttattcttccgttttctgatttgagatgtgatttgataacatgacaactgaaattattcaaaatgtaacatttactttcaagctacaaagagccatccaggagcatcctgttgttctgctgcctagtcatcgaagttacattgacttcctcatgttgtcttttcttctatacaattatgatttgcctgtgccagttatagcagcaggaatgggtatgtattgtttttctgtttttttaactgtaaaaattaaaaagttcactggcatattctagcagtactgaggtatttgaagatgatgatgaaaatagcctctcctcctttcttccagtcctagcactgaataacttgagttatgtcctttgtcctgtgctttactgtgcctgaacagacatctgcaggagttcatgcacacagggttctttggtgtaggcttaaaaaatgagactgcactacttacaggtattagctgccttttgctttttttatttgataatatattaatggctacctctctaggcaataaatagatctaactttttaaagtttatttttaattgtgataaaatacatataacatcaa

SEQ ID NO: 58926 - DNA, 1741 bp, Homo sapiens
cttgtccttttgtgactggcatatttcacttaacagaatgccctcaaggttcatccatgttgcagcatgtgtcagaatttccttcctttttgaagttggaaatgcatctgctcaagaccctgctttccatttttttatatatatacaaaaatggtatatatggaattgctgggtcttgtggtaattttttttcattttttgaggaaccaccatactgccttccttagcagctgcaccattttacattcccaccaaaagtgcacaagagttccagttgttctacatccttgccaacacctgttattttctgatatgttttataataattttaatgagtgtgaagtggtatctccttgtagttttgatttgcatttccctaatgattagtgatgctgagcatcttttttgtgtgcttattggccatttgtatatctttggagaaatgtctgttcaagtccgttattttttaattaggttgtttggggctttttttgttgagttgtaggaattgtttctacatcctggatattcaccccttatcagacagatgatttgcaaatattatcttccatttcatgggttaccttttcactctgttgattgtgttatttgatgcatggaagtttttaattgatgtagtccaattgatctatttgtttctttggttccctggttccctgtgcttttggtatcagatcgaagaaatcattgccaaatccgaggtcatgaagcttttcccttatgttttatcctaagagttttatggtttcaggtcttacattaagatctttggttttttgagttaatttttgtatatggtgtaagttaagggtccaacttcatgtctaacattaattttaatagccatataatattcagcagtgtggatatttcataatttagtagttttgctgttataaacaatgtcataatacatttttatattggtgcttttattcctgtaagatcgattcctaaaagtgggattgctaaggcatataagttgtttatccactcccttttagggtagccaggaaagccaggattcaagtatacacgtttgttaataaatgcagtgaatggtaaggttaaaactgccaagaacttaagcactttaaaagcattttcatctgaacaaacttgtgaggaagttatttgaaaactaggggaaatgaagagaaagactattttaaaactgctggtagcaatcttcctttcttacaagatttgccttatttaatctcttccaacaaaagtaggttgatgttttttcctggtaggcaaaagatgagagcgggtttggcctggctgtccagagcatgaagggcacatattggtctgttgtcaggctcagcagcatggctgactaaagacattgacatcatgacattgtcatgttgctctgctgttgcccctggctctagctggcctacttgtaaagggagtggtgcatggagaagcacaaggtaacctcccagtgagcacctggcccacagaatcccttcttttctataattctattaggtatctcttatgtattttaatgtcaaagtataataatatcataggggtgtcttacatttatgaaatctttcttaataatgtttgagtttaggccaggcacagtggcttatgcctgtaatcccagtactttgggaggccgaggcaggaggactgcttgaggccaggaagtttgtgaccaacctagccaacatagcgagaccctgtctcataaaataaa

SEQ ID NO: 58927 - DNA, 1307 bp, Homo sapiens
ataacctcagcaattggtttaatctgtgtgactctcttgtttaattttcactgtaagctgtgtttgttcaggaagcttgggagggagcttgggaaaaggaatcaaaagaagcatttatcattttgagagtaggcaatgggttttgtgttttgtttgttttctctttaaagaatggttatgctcctgttgaatttttcctcgaagggacaagaagccgctctgccaagacattgactcctaaatttggtaggtcactacagattaaaaggaaaaatacaaacccaaagacatcagctgctacataaaacttgacgctttatttaacaagatattcttttcaagtgtaaatgtataactgttgatatttacgggattagtgtataatgtatgcttttagtattttccgtttatgtgctcatgtttgctctgctcttcaatatgttgatgaagcatttctccctgtgttttgcaggtcttctgaatattgtgatggagccattttttaaaagagaagtttttgatacctaccttgtcccaattagtatcagttatgataagatcttggaagaaactctttatgtgtatgagcttctaggggttcctaaaccaaaagagtctacaactgtacgtgagcttgattttagcttaattgagagaatgtgctgactgacacatcaactaatttctaaatttactgcttttcgttttcttccccccctgttatggtactattaggggttgctgaaagccagaaagattctctctgaaaattttggaagcatccatgtgtactttggagatcctgtgtcacttcgatctttggcagctgggaggatgagtcggagctcatataacttggttccaaggtgtgacctgtgttttaataactgtcttagaaatgaggattaaaatccaaaggtgtgagttgcaatgctggagttgaccacttctcttgatttacttaagattacagagaaaatgatcagaaatgctgttatcattccgttttcatcagtggaaaccttcaattaaagaagaattatgtgtttgtcccaaaaaaagataagctgtgagatatgtatgtcaaatatgcaaaatcagacaatgatcatgtttctcaagggaactaaagtgggaataaataatgccattattaacaagtatatgtgcaggaattgttgagcactattggtaagctagccaaagtatgtactattatttttgaccctagaaaggattgcataatggtaatgaatgggagtgagtccttagtctctagagagttatagttttataggcaagaaaat

SEQ ID NO: 58928 - DNA, 1022 bp, Homo sapiens
cttgctgttagaaaactttagattcccttggttcctgaagtacacagaagtggtgttcattttcagagtagaaactgatgtgcctttcagaatggctgacaaattttgggggtaagaaagtatgttacatgtccttagagagagagaaagaattgatttatgaaatagtacttttaaatttttcttcagatttggtatcattaccgtaattggtagacagtaaaacctgtcacttgaaaatgagcatctgtcacgttaccattaataacgttaacgtacgctaggcctaagactccctgcagtgacccatcttgtttgaatgaattgtctttgtgtgtagataataaacctgctgaagaagttgtcccggccagcattcttctgcattccaacattgccagccttgtcaaagaccaggtgattctgaaagtggactccggagactcggaagtggtcgatgggcttatgctccagcacatcactctcctcatgtgctcagcttataggaaccagctgctcaacatttttgtgcgcccatccttagtagcagtagcattgcagatgacaccagggttcaggaaaggtaattttcaggaatgcaatcttgacttttagaagaggtctggccattccattccatttagggagccacatttgaagccttgtaatgttcagcctcacgccggtgaagagcaggcctatcactgagaaaaagttagctttgttccccaaatacttgttcatctgcttcgaattttggaattgggaggacctggaaataatctaaacctttccttctataaatatggaaaatgaggcctagaaagttgcataattactgagagaaggatctggcatttgagtacagttctccacttcctggtctgcggcactgttttggctgtgccagctccctgatccagcaaaggcaggtgggcagatgagcagtcagcagtcgatgagtactcccgagatgcatggtcttgttctaattgtatcaggagtataaaaatgagtacagt

SEQ ID NO: 58929 - DNA, 1044 bp, Homo sapiens
taaattaaggagtggttctgcaaagtaaaagaaaatccatcacccaggttgtgatttgtaaggctcagaaatgttgtgtttgaaaacattttgaatgtagagcagatgcttctctggctactatctcacaaccagaattgttctggaggttggggaaatagctggtattctgttgtctgagggcatgtggctgcatatattcagataggcagtgtatccattaacctagatgagggggtacatgtattcagatgggcactatacccattaacctagatgaacattatggcttcctcttcccttctaggactttgaagaaggctgttacctgctttgtaaaagtgaagccatacaagtgactacgaaagacatcctagttacagagaaaggaaatactgtgttagaatttttagtaggactctttaaaccttttgtggaaagctatcaggtatgtaaatttggcaagttctccttcatgccccccatatcaaatataataagacattctcaccctgtgcttatttccagtctgaagggcaggtatcttccccaggcaaatggaagaaggagagagagtgactaatacgatcagtgatttcacctcaccagtgagaccttgctccccgcattcaggaggaagcttggttcattacagacccaagaggacaacagcttagtgatgccatggtcacagtattcacaggaccacagttacacccacgcatcatctgtcatactgtgtctcatgtcttaatgaggccttcatgtcagtcaatatgtaacctcgaggtttgatatatatcaggcactcagtaaaggcaagacttgagtgatacataaagtcagttacagattaccagatgtttatgttggaaagaaaaagttcaagtgcaagttctgaaagcgtttgtcagagctcttgggagtagttagagagatgggatggtatgttgcccagcaggaattgtggcaggactcaacgggagagaaagagtctgaaacataaactgtaggaaggacttccacatgcttgagagaagagga

SEQ ID NO: 58930 - DNA, 1879 bp, Homo sapiens
taatcactgttctacagtagaaatcatcaagtattttagggcatggtactttcttaggtgtatttagagaaaaaaagcaaagttattaaaatctgacccctctcttcccaagtagcataagagatacgaagctgatggtaattaacttgtaccccttgaagtgagaaattatactttaataaatgtcattattattttaaatctttttctaattgtaaaatgtaaactcaaaggagatgccctaaaaattctttggtttttctgggctcattccttggagggtctttatgctgctctcttgtgatatatccttctcttaagaggggcaatgtaaagttatttactattctgttgaacttggctatcctttttctctttctgttcccctcatccttcctcttaaaatcagataatttgcaagtaccttttgagtgaagaagaggaccacttcagtgaggaacagtacttggctgcagtcagaaaattcacaagtcagcttctcgatcaaggtcagtcactgctctgtgggtgctgatttcttttagttgagaatagaaactggtcaactaactcttcctcacccccaattttaggtacctctcaatgttatgatgtattatcttctgatgtgcagaaaaacgccttagcagcctgtgtgaggctcggagtagtggagaagaagaagatgtaagtactgtacaagatcccatgagtgctcaaggaacaaggaaatgaatgacatttgagctcaaaatccagagagacatagaaatggatgatctaggaaatgctatattctactttccttatccatcctctaattagttaagtcagtgtgagttatcctgaaaattgtatgtggttatgaatagaaatgcaactgaagcaaagaaaggaagaaataactttaggccaatatttttgctttgacttaatgttgaaatttataattacaagaaagattttcgggagtgtagtgggcatatgagtgtagacacacataaatacacacataatacatatatagatacatacctgtatatgtatatataaacatatagatgtatgttcttctaagtggttgaatttaacagtgataaagcttaatagtaaactctggcagtcatgtctcttatgtggtcagaagaatgaagcaagaagccaggaggtgggacaggagcctgaggcctttcgactacttaggcccagccttgaggaaggcaattgaaaagtagtcttacaatagctacgtcaggaacaaaatataaaagttgtcttttccccagagtttatgtaataataaagcttattattttctcctagaaataataactgtatatttaatgtgaatgaacctgccacaaccaaattagaagaaatgcttggtaagtgcagtttaataaaatacaagttttcacattttgttgatgaattaaaataagaaagtatactgtggcaccaaatactttatcaaaatgatcagtaagtagtagagttctaacataaaagggaattacttatgcagtctggaattttctcaaggaagctaacgagaaagcacaaagaaaattaacaaaacacagcaggcataaaagaagcagtcttacacagtagaaagagtcagtccctaacatgactggtctcagccagaggcccagacccttcacatccttgcctcagagagagtacctcatctccactctttgtttgatgctctcactgtctgtcttgcattgcttctttcccaagtgagagattagtgtcagtgtctctatcatgtagactttctgaactcagaattagggctgatagcacatccttgggagaataatccaacccttactcttctctagagcctatcagctatgaagaaatagtc

SEQ ID NO: 58931 - DNA, 1395 bp, Homo sapiens
atacgcatataagattgtaattttaagatgttttgtgtctcagggtgctacattcactcttgccttaggtatactgtaacccaggttctgcctgtcgtgtataagttttagatacttttgttctttcttgctcttaaggattttaaaaacctgttaatctttttatttgtatactttcctaaaaatattcatatggggaatcctgtcaggtgtttggttatattgactatttattaatagtattagaactcattccctgaactgatgtaaatcttcatagtgtcagacatactgaccaaaaccacaatctagactacaaagtatattgttttagagtactcaaattgtattatttattaatttttttgtttgcaaaatcttaacaggaactgtattttctatattttaaagaattttatttgtcccacttttactaaacagtggcagcagattttaagttaaagaatatggaatatagtaaaataagtaaatttcttttggaatatttttagtaacaaatagccactataattctgtaggccaaattttatattgagtttagctgttttctcaaaatttagcagagtggttaaaattctgtgctgataagtaactgatacatataacataaacataacaaagttgcctagttgatgtaacagtggaaagttatctggaaatagtattttgaactttaagccaagtttaaaacattataataaaaggaataccatttgtgcattttaagtaatcttttttaaaaaaaatattttccatgttatagggaaaggacaaagagacttttatcagtttgctttttgtcttgtggctgtacatgctgttggcatagccctaacacagttgttcacaagttttcttttttcttgttgcaattttccttcactttgttgtaatacaggtgcacaaatcttaagtgcacagctgggtaaacttttacagtgttcacctgtgtaactaccacccggatcaagttagagaacacttccattgccacagaaggcttcctataggtgtctgttcccagttgatacccatgaccctcaccacctccagaggtccccactgttttcaccccatcgtcgcagattattttttaattttataatgtagtatctttgttcctatgtatagcaggagttcattttcattgctcttgcatttgtatgaatatactagaatttattcatccattctaatgttaatggacatttgaattatttccagtttggggctgttaagcataatgctgctaagaacattcttatcttttctgttgggtatatatacaggaatggaattgctgagtcacggggtatatttctgtttagctttagtaaattctgccagtttacactcctaccagcaatgtatgag

SEQ ID NO: 58932 - DNA, 1069 bp, Homo sapiens
cccacttaggttttctatctctgtccttgatcttctttgccaaaatgtgagtatacagaaattttctgtatatttcaacttaagacatttttagcatctgtatagtttgtattcaatttgagaccttttctatgggaagctcagtaatttttattaaaagattgccattgctattcatgtaaaacatggaaaaaaattgtgtagtgaagccaacagtggacttaggatgggattgaatgttcagtatagtgatctcacttaggagaatttgcaggagaaagtgatagtttattgttttttcctcgcccatattcagttttgttctacttcctccccttccttccagatgataacatcacatctctacagtaagtgcctctgccagcccaacccaggagcgcaagttgtctttgccatctggtctatagtacagtgcgcggcgttaggccacaactcaaaagcattatcttttttagggttagtagaaattgttttatgttgatgggaggtttgtttgattgtcaaaatgtacagccacagccttttaatttgggagcccctgttgtcattcaaatgtgtacctctacagttgtaaaaagtattagattctactatctgtgggttgtgcttgccagacaggtcttaaattgtatattttttggaaaagtttatatactctcttaggaatcattgtgaaaagatcaagaaatcaggatggccatttatttaatatccattcatttcatgttagtgggactattaacttgtcaccaagcaggactctatttcaaacaaaatttaaaactgtttgtggcctatatgtgtttaatcctggttaaagataaagcttcataatgctgtttttattcaacacattaaccagctgtaaaacacagacctttatcaagagtaggcaaagattttcaggattcatatacagatagactataaagtcatgtaatttgaaaagcagtgtttcattatgaaagagctctcaagttgcttgtaaagctaatctaattaaaaagatgtataaatgttgttgaaacattatggtggttatttccag

SEQ ID NO: 58933 - DNA, 1032 bp, Homo sapiens
agataaattgtacctaatatagaaaaattatcccaaattcaaacttgatataaaaaagggagagatgaaatgaactcagctagataacagatctggcaaaatataagaatgaaaaaaattctacacagggcacttatttcatatccagatgtaaaaaccattttcaattagtagcttatcttcctcctgtaagcaatcacagatttgaagttgatcatgcagtacaaagtcacagcagtcaaaatcttctgtttgatgcaacacaaaaagttgtttctgtttccttattaaaatgcgaactggttgtctatttttctttatcccatttattcgtattcacaagttaacaaatagttaacaatattgtaggtgaagtggggtattgctggatcaaaggctctagaagacgtctttaccgaccgaatctgaaggtttattgagttcaaccctcacacctttttcacctgcaaggtaaaaaaaaaaaaaattttcattcattcactaagcaccagagagcttctgctactgcattccactgaattcctaagagtatggacaatatttcaactttgcaaacatcatctgagaactatcacgcttgtacttccaaaaacttccctcagcattctattgtgatgaggtttcaaatagtaaaccttcaaggataaaaccatcctctacacagagataatgattttgtctttttattttaaaagccatttgagtttcttcaacagagtgttcagtgtctctgaaagcacactgagcttgtgccacaaataatggctttaaaaatacatagaaaatgcatgaatattccatttttatgtaaggtcgacgtgcgattagcaatggctctggaaaacacagctaatcagtaatgtgaatactcagtggatttttggagatagaaagtagagttaaagaaaagaaggtaagtggtccatcagatgggaaacagaccccctgctcttggagaggcagtccataagtggaagagaaggggaactggcataattaaaggatcttcag

SEQ ID NO: 58934 - DNA, 1028 bp, Homo sapiens
acatgatgtgcccttttcaatcccatgtctcttcccagtggcatcccagtgctgtctctgccccctgctgcttctgtaaagattttctgacacagtaactgcctcatagaccttcctttttatgaaatcctgagtttggtttggttacgtcctttttagatgaataaataacagatacttgggagtttatagtaaataaatgccagatggcatggaggctaagtgctacaggagttgaggaacgaaggtggtgctacattggagagacgggcaagtgcgctttgaagggagaggctcagctggcctaggtgaggagaggcaaggggtgcagtcgtgttagtaaagttctgggggaaaaggcgtagttgttcaagttaaggcatggaaaatcatgcgacgaaaaggattcttgaagtagaatcctattctgatcttatctagaatgggtgataaggctggaaagttagaatgacataaggtaagttgttgatccagatattagaattctgattgctaagtgactaaaagtttagggcatgggcaaaagatacataaaattatgtatctgagccctttcctatttccaaggccacccaaaagtagaagaagccacatggtaagaaaggtagtggaactctggaaagagcagagtctggtctggaagtcaggagacctccttagacctcagctctgtgattcaccagtggtggggtctgtaaacgtcaggctcccagttgtccaaactcccagactctttacttcaaaatacattatgtgatttttcattctgtcatattactggctgtatgtctgataaatgttgccttttcccctgtgtccactggccacaatccacaatatatttgaactaattgctatattctgcccaggaactggtgatttgtagcgtactttcacttcctatagcgtttatacattttccccattatttgtatcagaaagtatgtcttttgtagtatttaataaactagagatgcctcacttattggtggaatgaaatattctaa

SEQ ID NO: 58935 - DNA, 1022 bp, Homo sapiens
caggagttcgagtccagcctggccaacatggtgaaaacccatctctactaaaaatgcaaaaattagctggacatggtggcgcatgcctgtaatcccagctactcgcgatgctgagacaggagaattgcttgaacctaggaggcggaggttgcagtgagctgagattgtgccactgcactccagcctgggtgacagcgagactccatctcaataaataaataaatatccctaaaataagaactaaatttgtccttgcatcagtgcatatacttttaaaattgcagctcatcttcatactttattgagacgtatttgtgaataatccaattaagacattgaaattgtctctttttttccccctaaatttaatcttgtagcatttttggttactcctgcttacatatttggctcttttcctaggtaagtggaggtatacttcgaatttttccagaaggcaaagcccagtttgctgacattgaacccaaatttgatagactgctgtttttctggtctgaccgtcgcaaccctcatgaagtacaaccagcatatgctacaaggtagtattccttttcagaaaaaattggtttagagtatggtaggacaggagggaatctgtagagtaaacgtgaaagctttctaatgagtattttcctgccaggtacttttcacagtcattttaatttgaataattgtataagatttatgttgcacagtcatctgaattcaaataattatataagactcattaacagttagtactaaatgtgtctttctttgcacagccactctgaagaaagggaagcacaggccttcccatctttctagcactctctccgtgctttgtgcatctcttaactactatccatgctttgatttttgtaagagtattttacttgggagagagaaagatcaagaaggaaaagggttttttaaaaggtggtgagggacaacataggaaaatggatacagagtagaaaaatcagaggtaaccagagagtagaagtgaagagaaaaacagaaga

SEQ ID NO: 58936 - DNA, 1049 bp, Homo sapiens
aaaatcttacatgtcatgggaaagaggctgctgctttgtttatgactttatatagtttctgattataaaaataatacagtgctccaaagtagatgaagcaaaatctgatagaaatgaaaggcacaatcaacaaattacaattatagctggaaatttcaatacttctttctcagtaattcttaaataggaaatcaacaaggatataaaagattctaacactatcaaccaatttgacctgattgacatctgtagaatattccttgcattaacagcataaaatacgttatttgcaagtacatatgagacatttaccaaggtacaacaggtgctaggccataaagcaggtcttaataacttaaggattgaaatcatacagagtatattctctaaccactatgaaattaaattagaaatcagtaataaaatgaaattttgaaaatctcatatgtggaaattaaacagcgaatttctaaataacctatgggtcaaagaagaaatagatgtagagcaatggtacagggtgaagagttcagaaatagacctacactaacaatatcaattgattttttttttttaataaagatactaaggaaattcagtactggctaggtttttgttcttttttttttcttctgtaaatggttttggaatacatggctatctatgtggaaaaaataaaccttgacccttatgtcccaccatttataaaaattaattcaaaatggatcactgacctaaatgtaagacctaggctgtgtgcagtggctcatgcttgtaatcccagaactttgggaggccgaggccggcagatcacttgaggtcaggggttccagaccagcctggccaacatggtgaaaccctgtctctactaaaaatacaaaaattagttggatgtggtggcgtgcacctgtaatcccagctactcgggagggtgaagcaggagaatggcttgaacctgggaggcagaggttgcaatgagctgagatcgcaccactgcacttcagtctcagtgacagagtgagactccatctcaaaaaaaaaaaaaaagt

SEQ ID NO: 58937 - DNA, 1114 bp, Homo sapiens
caggaattcaagaccagcctgggcaacatggcaatacctcatctctattaaaaaaaaaattattaagaaagaaaggggccaggtgcggtggctcacgcctgttaccccagcactttgggaggctgaggcgggtggatcacaaggtcgagggattgagaccatcctggccaaccaacatggtgaaaccctgtctttactaaaaatacaaaaataagctgggtgtagtgttgcatgccttttagtcccagctacttgggaggctgaggtaggagaatcgcttgaacccggcaggcagagattgcagtgagccgggattgtgccactgcactccagcccgggcgacagagcgagactccgtctcaaaaaaaaaaaaaagaaagataatggatttggttctgccattagatctgggttggatcctgggtctgctatggtttctgtatccttagtccagtttcttaatttcttgagtcgtcagttgctccgtttataaaatggtgttcagtgatacctgtgtttttagcttctcaggcttgttgtgaggtgaacatataatgtttcatgtaaagcaccttttagatggtaaagcgctatgcagaactgttcttaactattacttctcccatttaaaaaatttgctatctttctgattcttttaagaattctgtgctttccctgtctcattcccctccgataaactggagaaaaaagggcttagaatgatcacccatttttttacctaaccacttttcctgcatttacacatttttttttaaaagagaagaaataacatttttttaagagaaaaaagtcccagagagattaacttcttcaaggtcatagagctggtgacaaaatcaacagacctttgatttagttcattcatatctgtaactttatacatatttctacttaactaattttggcatattttacgcttttttttttttttttttaaaggacagggcctaacatgcccaggctggagtgcagtggtgcaattatggcttactgcagcctccagctcctgggctcaaacaatcctcccacttgagtctccgtagtagctgggactacaggcatgtgtcaccacacctggataatttcttaaatt

SEQ ID NO: 58938 - DNA, 1073 bp, Homo sapiens
tgccttgtcctcccaaagtactgtggttacagacttgaaccacctcacctggccacaataatcttaattctgtgaagtgagtagtgttattcctaatttacatttgagggattttcagctcagacttggcagaggtctaccacttactataaccctggctggtgttcaaacttaagtcattcagatatcaaacccatgctcttttttaactacgctagttataggtagaacattaaatgagatgtagattatttagcacactgctggaactgcaatttgatacatatattttgttgaaagtgggtgaatagcactagctttatatgtgagtaatcatactctatggttgggctgtgtaaaactttttattaggtgactgtacaatgtttatttcagatagtggcttaaaagccacttttgtatttatccacctgaattatgcgcctgtcagtatactgttaacagatgtcagaatatggtttttttatgtgattgcagagggagacttcaattcagaattttatccttcataacattatagtgattttaaaagttatatgcagcaaatgtgtagtatttttctcatttcaactttcacagcagtaggcaggtggttgtatccctttttttatagattagaaaagtgggactcaggaaaagttagttcacttgttggaaattctgcagcatattaggacttaaattcaggttttctgactaagaatctgatgttcttttttatttacatcatgtatattgcatgctctttatgtcagggcatggtaatcagatgatacatgatagtctgtggcccattcagtgtaggctttgttttcccctgaatttctacttcaaacatgcttatctggccgctgtttatgcaactactttaaaaaaggaaccataagggaaaaatgaagtcatacaggagaaaaacagaaatgtaattgtagccactgatacaaccaagctcctgtttccactttctctggtctttttgggattttctcctttttgccgttaccctgccctttgatcctatgtccttgcttatgcttgttttcatcaagaag

SEQ ID NO: 58939 - DNA, 1021 bp, Homo sapiens
gcagagcgagtggcgcccgtatgccctgcgctcctccacagcctgggccgggccgcccgggacgctgaggcggcggcggcggccgagggggccggtcttgcgctccccaggcccgcgcgcctgagcccaggttgccattcgccgcacaggccctattctctcagccctcggcggcgatgaggcgctgaggcggctgccggcgctgcgccggagcttaggactcggaagcggccgggccgagggcgtggggtgccggcctccctgaggcgagggtagcgggtgcatggcgcagtaacggcccctatctctctccccgctccccagcctcgggcgaggccgtccggccgctacccctcctgctcggccgccgcagtcgccgtcgccgccgccgccgccgccatggccaatgacagcggcgggcccggcgggccgagcccgagcgagcgagaccggcagtactgcgagctgtgcgggaagatggagaacctgctgcgctgcagccgctgccgcagctccttctactgctgcaaggagcaccagcgtcaggactggaagaagcacaagctcgtgtgccagggcagcgagggcgccctcggccacggagtgggcccacaccagcattccggccccgcgccgccggctgcagtgccgccgcccagggccggggcccgggagcccaggaaggcagcggcgcgccgggacaacgcctccggggacgcggccaagggaaaagtaaaggccaagcccccggccgacccagcggcggccgcgtcgccgtgtcgtgcggccgccggcggccagggctcggcggtggctgccgaagccgagcccggcaaggaggagccgccggcccgctcatcgctgttccaggagaaggcgaacctgtaccccccaagcaacacgcccggggatgcgctgagccccggcggcggcctgcggcccaacgggcagacgaagcccctgccggcgctgaagctggcgctcgagtacatcgtgccgtgcatgaacaagcacggcatct

SEQ ID NO: 58940 - DNA, 1048 bp, Homo sapiens
tccttcagtctccgctcgtctcaccgtaggctgtgacgacatgagcaacaaagaaggtggcgtccttaacaacacggggcgttatttatccggagggggaggttctccagtctttctatgcagttttccccttttcacccttgaaggatgccttcgtcccttgtagactcgggggcggcccctctgtttctctccccggccagatcggccctgtttacacctccttttttcttaaatttttgaggtgtgattttatcctagttcagtaattgctgtaatgccagatcatagcaccagttggtggaaacttggatgatttgcttggaaaggcctgggcagcgtctctgtcagtctgcggagaaagcctctaaggcgagggccctgtgggtatctggttttaaagcaaggagtaggtttgtctatgttgtgttttgcaaactcttggtgatggaagatccctctctttttttcttctctatataaggatcaggagggttcaggaaaaggaagcatgacaatttcccacataaccaaagaagagaagggaaggatgttaattcatcttcacccgtgatgttggcctttaaatgtaagttctctgcaatgtaagttgaagaaggggagagaacaaaattatttagccatggttatgcgcaagaaaacagtccctaagaatttaatgtgaaactttagctggaggttttgtgatggcgctagatgtaccctaaaagtctggattacaaaggccttcacttttatgtcccattaagagaaatattagtaatcaggtaaacatgacttaaacacaagaaacagtaaacattaattaatatttgacatgtcacatactcaagaattgtgtacctgataatatttactcatctgttatatgctaaaatatattttcatttagtgtgtatttgtttcctctactagacttgaagacagggacggtatctttgttttaactgtaacacttagcacagagtgggagcttgtatctattagtgaatctcgcatatctatatacacatattttcacagtccc

SEQ ID NO: 58941 - DNA, 1050 bp, Homo sapiens
atctctgcttgttagtgcaggtgtttagaccgtttacatttaatgcagttattgctatggttataattaaatctaccatctattcttctctccttcctgccttattttggataattttttatgatcccattttatcttatttgtaggcttattagctatgccttttttgttttgtttttgtagtgattgttttatggttcataatatatatcttattgtcaactattctcactttgtacaatactgtgtttactaaaatttgtgcatacaagaatcttttcactttgcatgattttttggtaacagttactttgccagtgaaggtcacagttttgatgtgcccaagtttcagttaacacagtaccatgcaaagtaaggactacttatcatttcgcgtatggtataaaaatcttatacttccttttccatttcccctctactagcttggccttttgtgctactgttgtgattcatgttatttctacttttgttgtttccacaatatgttatgatttttactttaaacagtatgatttaaaaataagaaaaatatttatccacatttaccaatttttgtaaatgttcattcctttgtgtatagattcagatttttatctggtatcattttccttttgcctaaagaacttcttttaatattttttgtagtgtcaatctgctgatgataaatcaattctttccggctctgtgaactaaggggattgttctgcctgctcactttgggcaattctttttccagccttaggtagtttcctcacatgcctgcactgatcagtactcaactgaagacttgaggaggttgcttctataaatctctgaagctctctgtttatacagctttctcctcattgttactctgctctgcaaattttagctgtctcgatcccccaaaactcccaactccttttctactcaggctgactcccaggctccacctaagtttcctgtctctgtactgtcacttggaagctttccaggcaataagatggggcagtcagagggtatatgttgttctcctccctttccccaggg

SEQ ID NO: 58942 - DNA, 1050 bp, Homo sapiens; identical to SEQ ID NO: 58941

SEQ ID NO: 58943 - DNA, 1050 bp, Homo sapiens; identical to SEQ ID NO: 58941

SEQ ID NO: 58944 - DNA, 1050 bp, Homo sapiens; identical to SEQ ID NO: 58941

SEQ ID NO: 58945 - DNA, 1058 bp, Homo sapiens
ataaagataaagagtttaaataagggccaaggccatatagataatgataccaaaagcaacctagaaagctgtacattgtcttacagaacagagaaatggagagaaaaaggtgaaagggaaatattcagtagattatttcctaatgcaggaaggaagtgctgtactcttggaaagataggacattaagaaaatgggaatgatagatcttcagattttcctacttcactgtatcattgaggattattataagcacagtggtctcttttaggccttcgtttatgatttgtaagtttcctttgaagataacttactcatggattaaaataatgaaggattttctgtatcttttctgtaaaaagtctttaaaatgagattctttgaattgaagcaataaagatgttttttcttaaagttaaggaataaagcagtcaagtaaagaggtgtctaggaccgaaaattttgctgacagatattttatttgataaaataaggttatttataattggattagcattaacaatatgatgcttatgaatagcttgctgcttgtaattgttaaatgcttgttttggtattactccaaatagttgttcttttgacttgaagataaaacaattctggcaatgaactaaaggagttctgtgcttttcctcattaagaatagtgctaatggcacgcagagcatttccctaagggatacttgtgtgagctcaaacattgagtatcctaataattgaacaacaacaaaacgtcaggtctgttttctacacatttcttatcagagtagattacagattgtcccaagggatggttaaacaaatgaacaaataattagctgcttgaaataagtctttaaaaaaaaatttgtgtcctgtcattttttttttccctcttgttgaaaaattaacagtttgggggaaatgtcctccatttcaaagaagaaatacatgtttttttcttaagtttagtttatatcactgataatgataagaattgtcattttttgagacatttcggtacacaaaactaagtttatatcctaattaatgttttaattc

SEQ ID NO: 58946 - DNA, 1058 bp, Homo sapiens; identical to SEQ ID NO: 58945

SEQ ID NO: 58947 - DNA, 1058 bp, Homo sapiens; identical to SEQ ID NO: 58945

SEQ ID NO: 58948 - DNA, 1058 bp, Homo sapiens; identical to SEQ ID NO: 58945

SEQ ID NO: 58949 - DNA, 1996 bp, Homo sapiens
gtgatccgcccacctcagcctcccaaagtgctgggattacaggcgtgagccaccgtgcccggccagaataagcttttcttaaatcctaattacttaaactcttaaaaaaattttttttctggctgggcacagtggcccagagattacaggcgcccgccaccatgtccagctaatttttgtatttttagtagagttggggttttactgtgttggccaggctggtctccatctcctgacctgaagtgatccacccgccttggccttttaaagtgctgggattacaggcgtgagccaccgcgcctggtccccaggccattctttctattctaagtgtctagtctagtactggcattgtagtaggcatccattaagcttttttttgaactagatgatgatcaatatgaagtttttttattatgacattcttactaattaagtgcttattcttagtaattttctttgtcacgctttcaggactacaggaatatgtggaagctgtctcttttcaacacttcatcaaaacacgatcattaattagtatggatgaaattaataaacaattgatatttacgactgaagacaatgggaaagaaaataaaactgtgagaatttaaaatttatttcacatttgttatataatttatgtaacagtatgacgattctagtagatttactggcttatgctaagattgagatgggaatgttctttctaaagtatggttttgtagagtctcaactaggaaatggtctttttaaatatttcagttagtggatagaacaagaacaactctgggcatattgggaaagtaatgctctttacctaaagcattatggagtgcttactgtaagtcctcttttggttttactctctatttttcacttgccctttgtaagcactgtcttatttaatccttttattaaccatatgtggtaagcattattactctcattttacagagaaagaaacagacttttagagaggttaagtaacttgccagaagccacaactaaaaagtgtggcagagctaagatttgaagttaggtattttgaatccaagcctgtgcccttgtccactctgccagcgcttctcacagtgtgctacagggatcccttgcatcaggtacctacctcaaagggttgttttaaaggatttgacttaaaggttattaattaggcaatatacagcagcacctgacacgtaatatacattatatacagcacctgacacggaagtgctcagtagtttgccattataaagtagtttttatatagtgagagctgttaatcatttactcaattcataatgcttatatctgaaatttatgtagcttttctgaattaagaaaaactttgcagtttgacttttaaacaaatactatttttttccttctgggtttcaagatataacaggcagtaaggtaagctgtattgactatttgatactttctgagataccagtacacttaaaattaaatattttaaaataatttatattatttaaataattgtttaaatattaaattattaaattattaatttaatttactaaatattaaatatttaattattttaaaaattttctttattttttcttttaaaaattatttttaaaaacaccatatattaaggataggtaggcaggagatggaagacactgtagaaataatattttcttgaatatcaactaaaatattaatacaaatgagactaatttggcatgacaggtataacttactttaaggaagccatgtattaactttaagttatatgaagtgtattaaggaggaaatttattttgagaagtaaaatttcttcatattttttattcatatagtgtagactgaattacacaaagaagtaaagtaggtctatttgaccctgcttctcacgtgatattagggaagttaccacactttcctttaaagttctctgtgtatcaaaatgaaaatattggggaaaaggccagaaaattgagagtcaaagtactgttttcag

SEQ ID NO: 58950 - DNA, 1279 bp, Homo sapiens
taagggaattgaggatgcagtgagagaataataaattgtgatggtgagtgctgaatagggaaagacaagaagccagaaaaagactgagcttcttaggaaaacattaatggatcacaaacttggagggctgtatggtttttcatttaagaaagtaattgtcgtgcaataaagttattaagccttgttcaagaatatttttattttgtacatcaagtggagttggaaatagttggtttcataatgatatatttcaaaagtatcttgaagtcatctggttcatttcactacccagggcacacattcctcctgtaacatcccaagtggttattaagcaaaacagatttattttatttagaaaaaattagtatgactgatttgctattgattttgtacttctataataaatgtgatacatgctatattcactctttttcacagtgttctttcttgtgtgtgtgtgtgtgtgtttttgttttgttttgtttttttaccagccctcctctgatgcacaggataagcagtttggtacttggagactgagagtcacacctgtcgattaccttctgggagtggctgacttaactggagaattgatgcggatgtgtattaacagtgtggggaatggggacattgataccccctttgaagtgagccagtttttacgtcaggtttatgatgggttttcattcattggcaacactggaccttacgaggtttctaagaagctgtataccttgaaacaaagtttggccaaagtggagaatgcttgttatgccttgaaagtcagagggtcagaaattccaaaacatatgttggcagatgtgttttcagttaaaacagaaatgatagatcaagaagagggcatttcttagaatctaacgttactcagttactaattcttttgagaactcctaagagaccaatttgtaagacttatttagtatttcatttaactttattgtggcttttacatagaaacatattcagttgtacttgttttaaattgtatacaagctgtacataaaattagccaaatgaatcatttcttatatcttattcatgaaagtttgcatacagatgtttgcatatatgcctttttgaatttttgctggttaacctttatcatttatctttgtaatgtgaacatgcttcagagtgtaccttttgccataacctattttaatttactttttctgaagtttggagtgataatttttagtggaagcaatttgtaatttaagttggtagttatattatatatagaaaagattttttagtt

SEQ ID NO: 58951 - DNA, 1045 bp, Homo sapiens
aatacctatcctgctgtgtgggtggaaggttaaatgtgataatgatgtgtgtgagatgcctgcacagtgcctggaggtattgaagaattatttgctgccttttctttttctacctaccacttacccgctacccccgggtgctacatgttagaaaacactgtgtaaagtgtggatgcttctgaaaaatctccctgccagcagttagtgccaatagcgtgcagaaaataagatgcaatgatttggcttcttttctgtttggcaataagaagcttatttgcacatagcctgatttctttcaatctgcaaaaaaaaaaaaaaaaaaaaaaaattggaaatgaagtaaagcaatatatattaaaacatgcaaattataaagaagcatttaaagcttgactactcttcacattgtcgtatggcaaactattttttttatctgcagtctaaatttcatgacctagaatctctcgttttctgcctgatgctttgttgcatgacattggatgacattgagaaaatgaaattgaaaccctgcttgggctttgaaagaactggcaatcctgcttttaagagtggaaggaaaaaaaatggaaagggaaggaggaaaatgggacatacatggaatactaaagacaagactgaagaaagagaggttgaaagctctctctcttctgattatgtttctgtgggtctctactgttttgtggccttcaccctcatgggcagagaaggctaaggtgtaattctcaggtaaccatttaatctttccatttaaaatggtcatttacaaacatggagtccatttcctttgcataatggcaacgagatggcgcctgtgctccttcgtggaattccttgctctgggtgatggactggacagctaatttgtttttataaagtgtctgggcacttaattaaatcttgcatcctgtctaataaaaaatcaatatcaaatccactaccaacacgttctggatggcagagaggcatgccagaagaaaatcttgagtggcggttccttccagatttagcaagctctgcagtttgt

SEQ ID NO: 58952 - DNA, 1027 bp, Homo sapiens
aattcgaacatcatttctatggctttagtaactgtgactggctctatctggatgtgcaatttctgaggaaatgttaaaatcaaaacttgggcactgattttttttaaaaaaggaattatataaaactcaccaaaattatagtttttttccccaaaatgctcattgtgcttttaaaataattaatattaagtatccctctgtgtgaagaccataattatgaccatcatatcactatgtcaacaatgacctttgagagttaaaagaataaaagataggagagccatcttgttggtgcaaagaagattcttagaagtaccaactgagagatgaaagtgctggcctagaaactagtaaccttgtcatgatgtcattaaggcaaaggttcactacaactggagctaagagacaccggggttatctattttgcatttcatggttcttttttcctctctctcatcattttgggtttccagctgagacgttacaacaaagattagaagacctggaacaagagaaaatcagcctgcactttcaacttccttcaaggcagccagctcttagcagtttcctgggtcacctggcagcacaagtccaggctgccttgcgccgtggggccactcagcagtgagtacttgttattgtcaccattttcccctcatgtttcttcctacctctcagctcccacatagtgaagagctgggaggagcttagctgtagagacccttggctgcctttcctgggaagggccctttgttggttgggaaggtggggattcttccagagtgagagatggcccatgtgggtcatgcatctctagaaagaagacttttctgccacttgacagagagagaaccttctcaagtgcagctgcatcccaggtctgaagcatctcttgggaaactacccttctaagaaggtgggggtaatttcctcttgttgaggcagcttggtgtcctgtgatcatattaagcctgtaagataaacagatggtcccctctgaccgagcgatgaaaatccatcctcctcc

SEQ ID NO: 58953 - DNA, 1034 bp, Homo sapiens
agccttgaatatttatggaaattaactataaacatttaattattgtggattccaatgtgtgtgtttatttaaagaagggtggaatgaaaaaaatcagcaacttttacagtttgctacatctgcttttttttttttttttgagacagagttttgctcttgtcacccaggctggagtgtaatggtgcgatctctgctcactgcaacctccgtctcccaggttcaagcgattctcctgcctcagcctcccaggtagctgggattataggccagctaatttttatatttttttagtagtgacggggtttcaccatgttggccaggctggtctcaaactcctgacctcaggtgatccacctgcttaggcctcccaaagtgctggaattacaagcgtgagccaccgcgcccggcctacaactgcttttcaagttaaaaggacagccctcagatttacgcagcagtttttcaccatcccttgtgtataaattggtaatctgtattgtactttattaatattgttgatttcgcactgtaactcagctataaaggaaaccgacgtcaaggggagagatttaatcacagaataatcaggactagaattttaaataggacatcattagcatgttaatgaattttcccaccttatgccagctgcctgagtagaaaagatactgcagatgtagctcaaaaatctggctggttccctggcccagtgagctgtcaggaatctgtgtagggtgatccataagctaagtgaagggattctaagtgagaataccaagcagcaagattttgtttttctgagaacgatggctaactgtgcccagcctaaactcatttgtctttcggtgagtaagaggggaatgggaggcagagaaggggcagttgaagggcaatgaggttggagtagaggcacctttccaattatggtttgggattaggaccttttgctttagatagaaaagttgtaagttcgcaatgacaagatcctgccctaattcttggcacagtctcacaatttttgagcttgaaatagc

SEQ ID NO: 58954 - DNA, 1034 bp, Homo sapiens; identical to SEQ ID NO: 58953

SEQ ID NO: 58955 - DNA, 1034 bp, Homo sapiens; identical to SEQ ID NO: 58953

SEQ ID NO: 58956 - DNA, 1034 bp, Homo sapiens; identical to SEQ ID NO: 58953

SEQ ID NO: 58957 - DNA, 1052 bp, Homo sapiens
acttgcctgaggacagcctgcaggacacagcactgtgatttgaacccagagagtctgacttcagcccccagcgctcaactactattaattgaaagggcattgaagagacatgatgtcacaataaaaagaaaaaaagaaaagaaagcatgtcttcgactttctagtcgtcgtgctttgtatggattcttctttcaaccttgacgaaagggtataattaatctgtaattaaagtcatgatagtttcttaatacgaggaaatgttgtcattgcggttctctgaacacaagagggcgctgtggcaaagcttaccgtctgctcatcctctgccgcaggagggtacaacttcgtgggacaaacttcaaaagaaagatgccatttctaagacctcatttatcacctcgggatagccagtcttcatgcctttaaaatacagaataaaaataacacataaatcaacacaattacattccttcttgatagcatcaccagtcttcttgaggcctggcgtcaaacctctgcttcagtgttacgttatggggtgcgcatgcctccttaatacccaccttgctggtattctccagatggctgtcttcttagcagtagatggaattaagcaccataatgagggatattttatttaaatctgctttaaaaaaatcttccatgacttattcacatgtctggttagctatcacactgccattccatgtgatcggaaatgagaaagatttaaagaaagtaattgtttagcatgcaacggatgtacctcttttgcttcagatgagaataggcagcatagaagaactggggctgattcgtggaaggtttcccgtagctagaccctggaggctgtaaaaagtggtttggaactgtgtttaaaaaataataataatagagggaatagtgaggtacccaggaggagcagagagcgcctgttccagccatgggagcatccccatcagatacatagatgctcttaattaattaggctgctagtaaaccctcctgagtgtgcaagacaggaggaattcattttcaagctttaaaaaaaa

SEQ ID NO: 58958 - DNA, 1053 bp, Homo sapiens
ttgaaaaacattttgactgtgtgcaaggtctcctccacgctcaaaatattgtaaccaaaagccttccaaattaaggtggatttttaagcaggaattttctcattttcttcctccttcaatttctacaacacactttcaaaggaaaagaagtacacctgtgatatgtacatttttggcatatttcaaagccctcagggcagttctgcctggccctcagtcatagacgaggtagagacactctgattctatttgtggttgtatttacatccatgtctgggaagcccttatggaattctgtttctctggttatttggagtgcatggtgcccaattgtttagttttggtggtgcttgagggcatgctctaaatacatccaggtttgtgcacaaataccacagctccgtaggacccttgtttagttcaactttccaaattttagcgtgaacagacaaaggtaacgagagttttgggagactgtcctgcctccttggagatgttttccacttctagagctgaggggctggaagagggatcatgaggatcatggagctccactcatgtagtttatagataagaaaatccagagcctggccaggtgcggtggcttacatcttaatcccggcactttgggaggctgaggtggatggattgtttgagaccaggagtttgagaccagcctaggcaacatggcaaaaccctgtctctattaaaaatacaaaaattaactgggcgtgatggtgcacacctgtagtcccagctactccagaggcgtgagaattgcttgaacccaggaggtggaggtcgcagtgagctgagactgcacactactacactccagcctgggcaacaaagtaagacactgccaaagaaggagggagggaaggaaggaaggaaggagggagagaggagagagagagagagaacaggaaggaaggaagggagaaaggagagacagagagagaggaaggaaggaagggagaaagagagagagaaagagaggaaggaaggaaggagaaagaaagataaagaaagaaaaagaaagaaaagaggaag

SEQ ID NO: 58959 - DNA, 1053 bp, Homo sapiens; identical to SEQ ID NO: 58958

SEQ ID NO: 58960 - DNA, 1053 bp, Homo sapiens; identical to SEQ ID NO: 58958

SEQ ID NO: 58961 - DNA, 1021 bp, Homo sapiens
catccaggaggcagctggagagcactgggaattttctcaggaacaagtagcttgttgatgaaggagagcaaagctggagaaaatgctaggcagacaatagagagccagaataagtgagatgggaaggaaagcttcccatcatttccttctgatcaatccaatcaccgagccggaggtcatgaagtagaaagatccccaggaaaccgaacagtacaattaccaaatgataagatgtgattcagaaagctaatatcttccctaaaggctaaggccaaatgacttgtttgaaacagccaggaaggaagggtattgctcttcgtgtcttccttttcaagtccatggttatttgccttttctcgctgccttatgagggcgcttgttaaaaattcaggaacaatgccagataccaaggtagacagatctggagtatatgacaaataaagtaatctagcactattattaacagcaggtatgttgctcctaggctattttatggctcattttgaatgcattatctccatccgaaaaaggtaaatgtgattcttatgtctagggcagttccaagagtctacaatgaatggggttcctctgacaaagcaatcaacttttccatggttggcaggtgagtaaattgggttttactaggagttattaaatatgggttttggttgatttactacctgctgggtttccatggaagttgagtatataatacaccaggccaacaacattaatcttttgtccttaattcattgccgttttcaacgtgaagacgggcgcagcagtacggacgttacaggaaagccattgctagctctgctcctttaacatgtgtaaaaacatctgtgggtgacaggcagcaccccagctcctggggtcgtgacagaggctctcaggactccttcctattgagatgcacagtggtctaggtgttccccaggcaggaacctgtggaatctttggcttttccttgacctagcccagcttgacccctctctggacttttgcattcctgtccctc

SEQ ID NO: 58962 - DNA, 1484 bp, Homo sapiens
gcagcacctgagacaggacaacatgagactgcaggaggagtcccagaccgcgacagctcagctgcggaaattcacagaatggtttttcaccaccatcgacaaaaaatcttagccaatccgcacctcatcaagggaccactgggaaatgccccttgtccctttgaagtcacaaacatgtggtttttctgtgtgctttcaaccaatcgtagatgtttttgctgttccattctgtgtagcaccattcaccacagcaggatagggagcctcgactctttctcggtaaccacggcagagagcagcgccgatgtgaagatgaatgaatgtaactcctggtgtgaagatgaatgtaaaccctggcgacagttgagacctttttcttttagactctgctaaaacagtgctctggcttgggcttacctcaagagggaagatagttgagttttatttcctgtatatcaggtgacctggtagagatgtaaagcaatttaccatagtttgggctttagtattgtaaaataaacatgagaacaaataatcagacatatactttaatgttaaaggtgctctatttttttggatgtacagtagttttatttccacagccacattaccatagcaataagaaaggaggcatagtacatagttggaaaagctttgtggggggattaaaaaaaaaaaaaagcactgttgtgtttaacactagttcagatgcagttaccttagagacttatttatttgcaggaacaaatggtgcctgaatattaacagtgttctgattaaaaacaaaaaaaagatacatatgccttgtaaatggctcaccgagtggtcagtagtcacttcaactcttagttcacttttgtatagttgctctgctggaaagaaatgagagtgaatctgcttactcactagaacttccctgtgtgctgtgagccagcggaaccacttgtacaatgccagatttgtttatctttgtacagaagctttgatgaagtgtcttgtatttaacacccttatttaagcttatttaaccttaaattgttaattttataaaatttggtttggcctgcactacgatgagggatggaggtagctgcaggctcagaagagactgagcttgcacagatcagaccgagaagcagggtgagagattctaacgactggatgctgctagtaacacattgtttgtattgctttaccatttttaactgttagatttgagatgaacatacattttgcttttttaataaatgtttaaaagaagtccacataagaaatggtgttgtcaggtgactagattttttgtgatctaacatgtcaacagtctgactgtatgtgaatttatttcaggtcatttagaaccttgatttgtattaaatactgttcagctcctttctcatagaatcccagatcgatttcaggaaggagtacctagcagtttttaatagctgctgtgtggcggacactattctctgaacttttcatcc

SEQ ID NO: 58963 - DNA, 1036 bp, Homo sapiens
ctttgatttttatgtagtgtcaagtcttcattaatgtcagtttttaagggcacttttttttatgttagccttatttcctttatacatagttatttttgtacagaaaaaatgggaatttaatcagaaatctattcattgccaagttttttttcatttcatcacagaaaatatctttagaaccaattcgaacttcataatacacttagaagtcccaggctaaatgaaatcaaagttctaataatatttccaatgtttaacataattggaaatgaaccttatctcataaaattcttaatctacttctttaagtaacataataacctgcctgttataaagagtccatttacctaaattgaagaaacctttaaacgccttcttgacaaccatgtgaaaggtcagccagacctaggccactttcctaatatttctccagctgttttctcttttttgtaaaaggtaacttcaatgtcctcttaaaagcttttgtaaaaccaatgaacctctattttcctgcaagtgttatttcatttacagtgtttgaagtgtgcttgtgaactctctgtggtacgtgtgttatgttggtcttacattctacccttcattttgtttccaggtgaaagatgtatgtccttttttttttttttttttttttttttttgttagcttcacttaaaaaaaaatagacttcttagagcagttttaggttcacaccaaaaaatacaggggttttccatatacctcctcaacacattttccccactgtcaacaaacccctgccctcaaagagtggcagtggtacatgtgttataatcgatgaacctatgtggacagatccttatcacccaaaggccctggtttacattagggttcgttcctggtggtgtacattctgtgtgtttctaaaatgtgtaagatgacatgtatccgccattacagtatcattcagagtagttacactgccctaaaaatcctctgtgctctgcgtgttcatccctccctcccctctagctcctggcaaccactaatctttttacta

SEQ ID NO: 58964 - DNA, 1003 bp, Homo sapiens
caatctcttaagccactttgctaaacaatttaaagtactgaaaaggacttaaaggcgatttagcccaatcaccccatttagcaagtaactgaggccccagatggtaaaatgtgagctcttcataaatatttggtgccagagtcagcaactgagtccttgtctctcacttctaatccagcactccctcttgttcatatgaaaaggaaaaaggaaatcaggtattgccatactgaccatgatcagggtaaactgcaggtctttgtgcttctgtcttccctatagtaaaacaattctgcaattaacctaattgtgtttttagaacaacactctaattagacactactgcaaagctgctttaatctgatatgcctgtaatcaagttctgaagaacctgctggtggtgtgtgaggagggaatcccataagaactccatcataatgagtcttttttaaaaaacttacatcaagtcatgtacatgatactgtataagcttgggtgcaaaggcagactgttgtacaaagagtgtaaatagcttttctttttggagggttgaacttcttgacatgtgttttttcttctaagacaaatcaccttcttttcatgatgtaaatttaactttgtaactcacacacattccagttacctttcatcagttggaaagacttgacagaatggaaggaacacacacaataggaatatttttagacttactgctacattcataaatgtaaatagccatttctttgtttgatgatgtgaacattctggcttttactattgtttacctaaaaggattgtggttcagtatgcaaaggaagtagttgaaaattcagatttgatttaacttttcttgagtatttgaccactcatttcttagtaagaattttccttaccctatctgtaattaaacacaacaataattttaatggttcatttaagtctggttatgatccattattgtaactcaattttcaacaattatacagactttggcaagtgatac

SEQ ID NO: 58965 - DNA, 1024 bp, Homo sapiens
gcatagcctacttggaagccagcactcccgtgtgcatgctggcaggtggcacggttgagaaaggacaggctcaactctgtgttcttttcaggtgccagtcccctctactgctcgaacaccagggctcaggccctttggaatgtgacggagccagggagagggaagacaccatggaagcaagcaggcacccgggtaataaggaactcctggaaattgacctcccttgctccccctttccccctctctgccccctcctctcccatcacttcattttattcattcactcattcaacctatgtgcaccaagttgaggtgatcagctgggtctccagatgcaggagggggtgtggtcatggttggttgtggttgtggcacctgcagaaagtgaacactttatggtggtggttctgtatacttttgtgacatatccattggtaagaccagaaagtcccagaaccacaagcctgttcatgtttaccaaaccacttgtctgactcctggttttctttactcttttggtaatactggaaattggaaattcaactcctctctttttatgtgacagaaaccaaatggcatggcccaccttccaaagtcctgggttcctataaagaaagagctctgcagaaagatggaagttgcaaagattcccccaataagctttctcacgtaagtcctttgttcataagcccttcactggcctagccaggactgatctgtctcagcacacagtggtacagcctgattcctggggatgctcaagagcacattacctcacagggctcttagaggtgaggttaaaaaaggaaactatcttcctgatttataaaggacctcaaagaaaggttgcacagcaaattagtggcaaagccaaaattatatcctcagccttttgatcctcaatatccagtgcagtagttactaaatcatgttcccatttgtaatctgttaaccacttatccatttagtggcacaaaacagaagcagaaactgctaatcggtgtgtgtggtcagaggaactctg

SEQ ID NO: 58966 - DNA, 1020 bp, Homo sapiens
caaattgccaatcataaaccactgatatccctgggcatcaccgatacttagtttatttttccatgatttattctgtttcacatggcaatatgtttttcttccttttctttgtcattctcaaagtatatttatttgtgaaacaaaacaggccaggtcaaggggcttggcagatagttcagtgccctgttaatgattctactcaacctttcagaagctcacccagcaaccagtcatcctccagcgaccctggacccggcgggagcggaccctggagaccacaagtgggctacgacgggtactgttcatttttatcttagttatccactgggaggaacctgttttctgtgactcattgaaaagcatttactgtgtgccttctgtacctggggccatgtggggaatataataatgccagacatgcttttaacaagtgacttgtccaggttggaaagctcattatttctgtgtaagtagtgctcacttgtcgatgttctcagcctgttttttcctttttgatgaggaaaggttttcagaacatgaaaattaaggatgtgagggcttagttgcctcctgacttaaattgctgatgaggaaacgccgctcaaaatcagagaagtgggtttagcgtttggcttttttgcttcctgtctgagaagtactgggaggttgccccagcacacctagctgagagctgccctttatagtatccacgcagtccagtccgcagtagccagcagctcaggcagagcctgaggacttctgtgaacaaagacactgagttgaccaatcccaccacctctgggaagagaagagggagcatggcaccagggtgcgctcctgaggagtggtctgctggggccactgtgacttggtgctgctttgggttggagttaggagctagtcacactgattgagaggagagaatggccggtcagtgggaaggactccactctgaggagcagcttatatcactgctcccgcaggtgcactgggaaatttctctccatatgtagtctgagt

SEQ ID NO: 58967 - DNA, 1064 bp, Homo sapiens
ctatgggcatgaattaagtaggccacactactcagccatctgtcttctctttcttttttcctcttaaaaaccataccaaacaaacttgaaggccaaacaagcactggaaatgcaaagatgtctttgggttcacaagattcaaggttcacgttcctttcattcaacatataactccaggatctgtaacttcaatggtagtcagttacagttcctgatgtgcactactcaggcagctggaacctgtgagacaccaaagcctggtgttcacctgaacatccagtgacgcttagagcatcgatttgagtggaagacaaaagtaggttttcttcatgttttattatctactgtcatatctgacccttgatttctgattaggtctttggctatggggatgaatcagtagccctagggatgtggtatcttaataaacagaaaacacttggaagcaatataaatccatgaacaaaacttatagagccttggcattttataagaaaatgatgcaacccaatgtaatttgcatttactcagtttgaccaataatgtaactgttaaactcagtaaatccagagtaacttaaactaaataagagaggtgaattttactttcaggaagggaaacagagttaaaataaaggataagaactaacctttactgatgcacagagaaatcactacctcatgttctataagcaggtgttaagatttctttaggagggtgtattcagtccactctactctattaacgctaccatgaatttggtttcccaagccaaaagttaggatgttgttttttattttttctctttctctgtcccaagctccaagtactatggatttgacaagttagaaatcactttcacccagaattttacaaggatttcctttgttatattttgtaccttctagtattgttgttgagaagaatggaactattccacgcccaggtccttagacccttaggctcccacccaccctgtccccagaaccgtaggcttacttccttaacccaggagtctgaattcctcagtgatgtgttttcatgtggaccattttttattcatt

SEQ ID NO: 58968 - DNA, 1054 bp, Homo sapiens
cacatttctgcaggtcatgaaggctttaagcctagcctgtatcatttaaaactctttcaattcagttttccaattttctaggaatctgaatttgtaaatttttaaatccatatttttgttagttttgatttgttttctgcctgcaactgtctgggtgccctgataaaagtatttggtgttgtgagacaacctctcataaccagataccacccttgcaataccagccctttgctttagaccgcaagtgtaagtatgaagtgtcattttcagtttcaccctcgcgctcagcatgtttagccttctgcattattagatttgttaagaaactgtagaggaggggctaaggggaaatgggtagcacttcactccttttaaaatttaaaatacaaaccctttaaatcaaacatcctttagtactgttaaccatatagcaacacataacaggatgtgcctcaagctaaagctatacatttgacttgcagcatggaaaatgacctccaactttctcagatggactcttcgtgcttgtgagggaggagaaatattatttaaatggacatgtatatgcatgtgtgtgtttctgtgtgtatgtgtgtatatatacatatacatttttacagtagtttttaacataaacactatgaagactacaaaaatggccaaattaaggaattatgagatattttagtctcataaatgttgtgaaaaatgcttcagttcatttttgccatttatcaactcccgttttagaaaatcatttgacatgggagcccagctcctcctgtgggcagcatgagtggcctgtcatttaatagacagtttttcttgtcctcaggtcaaaaggtgtttggttttgactcagaagctgctggaataaatgcagtctttagtaggaaaagtatttattaatctgttgaatccaaagccacctgtgttttgaattcccataaaagtatttatgttcaacctaaagccacctgtgttttgaagtcccatttgccagcctaagggaggtgacagtctagcttgtccctcagcgtgaagggaagtcaga

SEQ ID NO: 58969 - DNA, 1071 bp, Homo sapiens
taagatgggattattatatcgcctacctcctatgatttcaatgaagatgaaataaagtaacacatgtaaagcacttagaaccttctagcataattgccccacacatttaatttagaaaaataaaactttaggggctgggcgctatggctcacacctgtaatcccagcactttgggaggtcgaggtgggcagatcgcttgagcccaggagtttgagagcagcctggacaacatggcaaaaccccatctcttcaaaaaatacaaaaattagccaggtgcagtagtgtgcacctgtagtcccagctactcagaaggggaaggtaggaggatcccttgagcctgggaggtcgaggctgcactgagctgagatcgtgcctctgtacgccagcatgggtggcagagtgagactgcatctcaaataataataataaataaaactttagcatattcattttaatttctttcatatgaaaaaataaattctgattatccaaagatagtaggattgttgggtctactttctggacttactaacctaggtcatactctctcctttctctgtttcctttcttcctcctttaagccagcactctccattagcactttctacagtgatctgtgtctgtaccgttcagagcagtagccacaaaccacatgtggctattacgtacatgaactgtagtgcaacttaggaaacgaatttttccttttaattaatttacatttaattggccacgtgttgctagtggctgccatattggatagatcagctaaaccatgatctccttttaggaaaaaaagccacttacactgtcttcctctatggttaatgtgcaaaatcttgcaaaaatctttctctattagttatcttagcatttgcctccagcctcactttctgtggccttgtttcctgtatttgcccagtgtgtttataaaataaggatttaagaaactaagttttctctgtagagtatcagtcccgtgttaagatgtttcttattgccttgcctgattctgcctagttgaatctgtctgcttttccagagtcccatgaatcacatgtactgctatga

SEQ ID NO: 58970 - DNA, 1060 bp, Homo sapiens
acctgttgtaaggatttgggaaaatggcatggagcaaacagtgtcctgcaaagtgttaacaaccattcataggtatttgactttataatgagtgattttctacaaagttatatcaaatgaaacttttgtggttacaatatattgtaaaatatattcctataaccaccagaatttttcatttaaatattttctaatataaggacttactgcctaatatatttgtacagtaatttgttaatttaataatatttattaaacatctgccacatactagaaacagctccaggcaccgtagataaaatggggaagaaaacaaattcacagaactttctcctggggagagacacacagagagaagcaggaagtccttagaaggcatggaaatgggtgtttgggaagtagaggacaccatgggagtatgttgtggagtcacccagttgcggggagagagatgatcatgaatggttgtcagttcagctcaagcagtggatgctccatttagagggaacagctgggacacaagcctggagagtgggctgtttgaagacttgaaagacgcttggtatgtctggggcagggcgtagaaaacaagggaggagggagagagattaaagaaccacagagtttccacaagctacagtagagcaaaatctcaggggaggagttacaaggagatgggatccgggctgcatcccaggaccaataattgtggccagggaaggaggtattcttaactggccacgtgttaggtgtggagttagcctcacacaaattaaatgattctccaaagcaattcaagccaccattaccagaagaaaggggagtggattttagataggaaaaatcagtagctgtccactaaagctaatgttcttagcacaaacaagttttcaaaattcacaacagaaggaatattctgagatacctttaggaaagaatttcacatgctctgagtttgctatagttttcatcctttgtagtgaacctaatgataagattcagcataaattcatctatttttaatttcgtatattatttatattgtaaaatctttatttga

SEQ ID NO: 58971 - DNA, 1035 bp, Homo sapiens
ttattatttaatagtagctacttatcaaattgtcttatagctttgattttcgtattctactgtaataggaatgtgagttaatgggttgttttatagccatttggttataatttcacttaataccaggcttagtttttggtaaatgcattttaggtgatcagacctcaagtgcgagcagcacctcagctcattgattgtcttcttggccacagagagagggtaaaagtgggatcagtttgttcttccttttattccctgtcctattatccatattagtattagagctgttgggatactggcatgaaaaataagcattttttttactatagttatacttgtattataaatctgctatataattttaaccattttttcccttgaatggggctcgtaatttgtgcattttgtggttttcaatccatttgctacagctgcattcctgataagtggctcaattagaactctaatattggtcttaaagactcactgatgtctcatggaaaacgtcgaaaaacatcttatttaaagacaattatgcttaaatatcaaatgctctccatttcttttctatccctttaaaattattaccaagacagttagcatgagaacagctccttcatgctctaaaattcttcaattttggtcggtggccttccctagcccttcctcacttgggggcaccccactacctgtggggtttctgtctgggtttttaaagtgcttgcagaatgttggtgataattatttatttttactggggagcaaagccatagaattttatgaaatgcaagaataattggaaactatggggagaagaccagtgcccctcacagtaaaaattagcttaaagaacagaaagaaaactgtatgtagacaaaatctagagatctgttttaattagatcattcgaaggcaaactccgtcttctcaccaccctccagatggtcagaatctaggtttaggaaattacctggaagaaaagatattcatgttgctgacaaggtcacaggcctcatatagaagattagtctgtca

SEQ ID NO: 58972 - DNA, 1089 bp, Homo sapiens
agaaaaattctgagttctgtcttatagatagttaagtgtgtaatccctcttcaggcatttgatcagctattctctatttctgcacagaaatgaaaaagaaattcactgtcacagttatcaccatcacactgtatgtattaagagtctctgcccgtgggtgaccaggcttcagaatgattgtagagcaccattctttttccctgctggttattataatctaaggcagcggtggtatagtcaattagcaacataaacaaaacaaaaatgatgaagaaaaataatattgaccagtgagttttatgtcaaaacttgaaatgtaagttggatcagcagatttttcagtttcagaaaaagcttagtttttcctcccttatttgtgcctcagattcctctcctcaatcctccctcccccagttttaggtgaatggtggtaccctgcctcacttatttacaatcattagggaaaaagtgtcccacttaacggaaatttcccacataataggagctcccatcaacatcagataacatgctgatttcagtcattttacatgttaacaattcttgagagttttcttatactacctggcttcttctctaccaactgcttacactctaaagtggtcagctttaattctatataccttttctacaaccttgaggatttggctttcagatctcctctttgggattaattagagaaaaccactgggaagagtgacaggcaggttgaaaaggatgatagtgtaaggctaggaacatctgctgtcgagtcctaagaggaagaaaggtggctggtcaaggaggaaggttctgtgtcagctaaaaggagggtgctgggaggtcgtccaggcaggctggaagtgagggcagtggagtggggacttttctggctgctcctgtcacctctggttgggggaggcctcacttgggttgtgtggaggacagggtgctggtggcacagacccagcatgaaagctccatgtcccttttggtgtgcaaatcctgaccagtaaggggaagctcctcctccttctgtttcccaggttatttcttgcagaatcccctttttcagtgttattcaagcctctg

SEQ ID NO: 58973 - DNA, 1077 bp, Homo sapiens
tattttcttttatttgaaaaatcaactgttagacacttactatttctatctttcatttagtgtacttactcattatcaatttatttactttaaattctgggatacaagcacagaacgtgccggtttattacataggtatacatgtgccatggtggtttgctacacctatcaacccgtcatctaggttttaagccccgcatgcattagctatttgtcctgatgctctccctcctctcatcccccaccctgagacaggcctcagtgtgtgtcattcccctccctatgtccatgtgttctcgttgttcaggtcccacttatgagagagaacatgtgtacacttattatttattacttctcccatctatattaatatgtattaatttattaatacttctgggagaagagtaatacttctgccatcctgtccccacaataaaaacccagagtaagaatctcttttcagataaatatattgaaaaaaggaaaagtaaacgctaaattaaaattggggtttgaggagtgttaacatgtagcttttaactttgtactttcttatgatctcatctgatggtttcttgtagctgcctattgtggcctgattttcattctgtccaggagtgctctctagaagggtggcactcctggcctcttggtggcccatcccttgcaggcaggcttcatgcttgatagtgaccccctccctcctggtttttgttttctgcctctgtggcctgagcagtcgacctgatggggtctaaaaaacctttcttggccaggagcagtggctgatgcctgtaagaagttgcagcgagccaagatcgcaccattgcactccagcctgggcaacaagagcaaaactccatcatacacacacacacacacacacacacacacacacacacacacacacacgaaaaaaaaaaaaacctttgtcgttcagtctggccaacatgatgaaacacacacacacacacacacacacacacacacacacacacgaaaaaaaaaaaaaacaaccttcgtcgttcagtctggccaacatgatgaaaccttccttggccaggagcagtggctgat

SEQ ID NO: 58974 - DNA, 1590 bp, Homo sapiens
ctctttggaatgggcatcttatgatctacaatcaaacatggtagttcagataatttctttatggccagtttttatacagagagcggggaagagttaatacgtttaggttttatagctagctttgggcaaaagggattctagtttctatgacctgtctttgggaagagggattctagtttctatggcttgcttcgaaggagaatgagagaccagagacaggagggcagagagagctccttctgaggcctttgttacatcattttctgagccccagcatctttcagtgtcagaaacagagatagtactattagcagagttatcagtttgagacataattacctttcatggacacctgtagttgtttgagtgaatttagacttccttagtttattacagttgcttttagtagctgtccttaaaatagagaatattcttgaatttaacacatacagtttattctctcctctctttattgatttaatgagtactatttcaggtttataatagaattccccagtcttgaaatgtttatggcattgaaacatcattaagttagagctttattcagcctacacagagaatggaggacactatggttttcactgtgctccatttgaccatggatggtcttcaggctgtatcactattcaactcttaagataactaatataagctacaactttaatgagtgatattttctcatttttagtgttttgcttgtctacaagcagatggtaaaagcaaactagtaaatgatggaaaaacctgtatcagctatatatgctaaattttatgtcctgtttttttcctggatagtcgtgcttgtgatgatgcctattacttcctaacttatatcttttctgctaataaaattgtccctgcttcccatactaaaatgatatcattatttgtaatgttttacaaattgggtggaagaggtgtgtgttcaccaagcagcatcatgacttttcactgctccaccctttacccaggcaagttggaagaacaactatttgagtgtgagaacaagagcaccaggacaagaagctggaaaaataaataggagatattgctagtggcctggttgccttgactagaaatttgcgctttgtgttcattgtggagtagttaaagctttttagcttgaatttagcagggatgtattggtttccaacgagtcttccttatatatcttgtttgtgggaattactgaaagagccacagaattttcaacaccacatggaggctatcccaataatcacaataacttaattatttattcttaaaagctcagagaagaattaatgtaaaaaattatgggaacccttatacactgttggggggaatgcagattagttcacccagtgtggaaagcagtttggagatttctcaaagaccttagaactaccattcgacccagcaattccattactgggtatataaccaaaggaaaatagatcatataccaaaaagacacatgcactcttatgtgtatcactgtgctgttcacaacagcaaagacatgggatcaacctaggtgcccatcagtggtggattaaataaagaaaatgtggtatatatacactatgg

SEQ ID NO: 58975 - DNA, 1919 bp, Homo sapiens
tttgggaggaagccaggtgctcttcaattgccctttgcagtaggactccctggtaataactgtggcgatgatgaacttgtctagataaaatgacatctgataaaatattaataaatacattgtagtggacacctgcttctgaggatgtggatgtgtgaaacctagacattcaatttatgaatgtctttttaattgactcctctggacacagagagaggacccacatgatcactgagaaaatatcagagtacaggtggcagaactgtggcagaatcccctgtgcaaactgtatcgctgtgcggagacagagctaacaaacagggtctcaaggagaaaccgagtcttgtgctttgctttcatgagggatttttctgagttagctgatgaagccaagctaagtaaatattatcttctttttgtgttggccttttgttttgaaatattccaactctatttccttcatagttttctctttattgctgttattatttttacagattagaggtaccaccttttccagtcttgctcatcatggtttttcctacttcaagctgtgaactatttaattcagttcagcaagcatttttggagtgtttgcaagtcagtagctgtgttattaccaaacctgccatcttgactttctgctgttgctataagccctttgatttgcatgttcagtatcagcactcttagcagcttcttctctgtgtttgcctcccttggtaggtttttagattaagggaaccttgttatggagaatgaggcttccaggattggccttcttcctcctttgttctctttgtatggtttcattgttctactttacccttttacatgtgcacagagcttccagtatcaagctgttccttggagtaggaagtagttttggagatgagaaacacagagagaggaggagagagaatattagagaagaaaattattctctttggatcagtttccattaggcattaaccattggcctgtccctttccccactgccccttagacactgtaggtcttcatctgtgcttatataatgaggtctgaattgttctgtggtgatcctatgaccatttccatatatgagattgtaaatatcttcttttactgtggggagaaaggcacttagctagaaaataagagtaagcctccagaagagtatattctgctatgtttatagaactgtcatctttggttctaatacattgctgctgagaaaattgatagaagttgtgtttacttgaatacagcaaattacccaaatggataggtaaagattattcacttttattacatttcaaatggtttcattgtatttccccaaattgtacatttattacagaagttagctttgtgtttctacttttaggtgtataaaaatcaagatctctaccccaattgaggagatatataatggtttaaatctgaacactgtgaagtaatgggggcttaaatgaaatatccccttactacttagtgaatgtttgatgtaaatcagccacaatacttcctctctcccccatatatggatggcaacatagttatataaccttctaatgatggatttatttattctcttccagaagtgctcaagcctattgcagacaaatttctacaaatttatttttcctttttaatttttcttctgtctggttgacctaactcttcacaggtttccatctagcgttttgtataagtagtcatttaagtatgatttaagaagttcatctgagaatggatactttccctttgtaggggccaagggaaaacttccctgtcaccctctgaaaggttcactgaaaatcattgacaagaggtagattaatgagaggaaaggcatacaaatttgtttgatcacatttttatatcacatgagagccttcagaatgaagacccaaagatacaggataaactgtcca

SEQ ID NO: 58976 - DNA, 1043 bp, Homo sapiens
tgttttaatttttatttatttatttttgtgtgtgcgtgtgtgttactgagaatttgtatcttttcatttaatttcaacaacttgttggaaaatgctggccactctgacttctaagatacttagtgacattttatagatagtttggattgtttctatgtaatcatttgaacaaaaccataacaaatcgttttatgaaaagcaccctggagatggtaaattctgaaaccaaactaaaattggtttcagaattcttattctgcgagctacatttaaaaaaatgtaatgtctccagattaggccttaaaatgaagcgcccccattaatatcctgcttatgttcaggaacatctagaaaaaggtgtcagtgcagaagctgaaagcacacagcccgtgcgtgctgagcgggttcctcaccccagcctttctcccaggctgcagaaaggactcaggaaatgtggcccatcattattacttatgcttgttaaacaggaattgaccagatacctcattttaacattttaaagatatctctatgagagagttgaatatttgacttaggacttttagaaaaatatatattattgtttttcttaaatgtgatgttttgtgtttgttgtaaatacgtgatacaatatgtaataatttatgcagcccttgaacacgctgtcttcagagtcgttttgcagctgctgtctgagtttcctaagtcatttggatttacttgggtgtgttcagcccagataaaaatgtggatctacctgaatgtgtccagcacctgcaccactattaaaaccgagaatttcctgaggtcaggaattacagggaactgattctcttcattacttgggactaatttccccttcttccatttttccagtcgtacagcagaagactatgaaatagaggatttaaggagagaagaaaagggcattttcacctttttttttttttcctgtgaacattcggagaggataaactgaagcttgaaatattagtgctcattttaattttatattaaattagttttattacaagttttctaag

SEQ ID NO: 58977 - DNA, 1022 bp, Homo sapiens
cgaattacatttaaatgcagtggctaaaaaatcgcaggatttggaagttttttttttttttttttttgaggggtagagggtttgtcacatacgtaacaggtttgtttcactggagttgagctgcagctgaggcctgtttgtcttgttcatcttagtctgctcaccagtctctacttgcttggtctgaatatttatattcccccaaaattcatgtgttgaaaatcctcacttccaaggtgatagtattgacaggtggggcctttggaaggtgattaggtcatgaggcctgagctctgttgaattggataaatgcccctataagatgcccaagagaggaagagacccatgtaagatggtgacgttctgtgaatcagagaagtgggctctcaccagaccctgaatgtgctagtgccctgatcttggacttccagcctccagaactgtgagaaataaatttcttggtttataagctacccagcttgtgctatttttgttatagcagcttgaacaggctaagacactgcataatttatttgtatatttctgatgctttatggatgaatcaaaagacaacaggtgtctttgagttagctacaagctgtcatttttggttttcttttagagagagggtttcattctgtcactcagctggagtacattgatgccatcaccgcttacttgcagcctctcaaactcctcagcttaatcagcaatccttccactttgtcttcccaagtagcagggactacaggtgcgcaccagcacacccggctgattttttttttttttttttaacagacagggtttcactatgttgcccaggctagtctcaaactcctgggctcaagcaatcctcctgtcttggcctcccaaagtgtcaggattacaggcatgagccacagagcctggcctacaggctgtctttaaaaggaacattgactaagcagagcaagcttctctttgggagccagataatgaaaattaagagatcatggccaggctgaggatgaggacacaattat

SEQ ID NO: 58978 - DNA, 1052 bp, Homo sapiens
tgagattgcgccactgcactccaacctgggtgacagagtaagactcgttttttttttttttttttttttgagatggagtttcgctcttgttgcccaggctggagtgcgatctcggctcaccgcaacctccgcctccccagttcgagtgattttcctgcctcagcctcccgagtagctgggattacaggcatgcgctaccccgcccagctaattttgtatttttagtagaaacagggtttctccgtgttggtcaggctggtttcaaactcctgacctaaggtgatccgcctgcctctgcctcccaaagtgctgggattacaggcatgagatactgtgcccggcgtttttttttttttaaaaaagaggtgaaatatgggaaataagtgcagatgggaacatcaccatgtaaccctacctgtgtgcctgaagactttgaacaaagcagcccttctcttccatggcactggcggaaagattaataaatacgaggagaagtggggacagttttcgttaatgctgagtgctccaagcatggcgttccttgtcttcttggttaagctctgtgcaacttttcataacatagaaagttaattttatggggatttgggatgggcaatttaccccacgaaataatcacaagtggtctaaaagatttatgtataaggatacccaatgtaatatttgttattacattaaaaattggaaaaaatttgatagtaagatattcaattatgatactgcatatgatcaagtaatttaaatcaattaaatatcttgttttataaggctatttaatgacatgggaaaatgttcacataatattaaatgaaaacattttcttggtaagcagtatattaaatatgcatatgcattaatggaacagggatacattaaaaaatttacaatggttattacttgtggttgtgttatgtgtaattatcattttctttttgcatttgttttccagcttttctaaaatgaacatattaattttataataggaaaaaacatgctgttaaaatatttgaatgactgaattatatgtaatcttt

SEQ ID NO: 58979 - DNA, 1013 bp, Homo sapiens
ttcttgaatgaagacatgcaaaagaatgaaaacttagtgataaggatgcatttgtcactttccactatcaaattagaaaaagaggcagaaaactcttggttaaaataaatgacatttcaaatttttgtaagatggaaaggctaaatggtttttaacaggagcatcatggcattttgataattcgaaagttgcattcctttccttttgaatgctgctgtctgctcgaggtgtattatagatgggctatgcatatattgctaatttttgccaataacttaatcatggaaggattccgggaacctcccgagcaataagaacacagctgagcatttcttgagcctttcatttgatttgggggcagtagctgcggctaagcagctgcagatggtatgttttcaattcatgctgtggcagtttgggaattctttttacatctttttgtttatagtgaacaaaagagcagtgtggaacttaatcagttagatcaaatgtatataaattctgaggatggtgtttctactctatctgaactgaagtacgaaacttgtgtgtgaggaaaactggcctgctgatttatggtgcctgatgaaatcctacattaacatgcctctaagatgtgtgtgctttgactttccattaatgggtaaacatttacacaggccttggctgatggaataatgagttattccatcagccaaaaccctttatctttctcttcttacgctgttacacgaagtatctggcaatccctgtgtggagtgtgagcctatgcttttcatgacagtaagttagtgtagtctgttggttggggattttggaggaaaaagggaagccttctacaggagggtgaaggtttctcagagttcatgtctttgtgggaagagtgggaggagatgccaaagaaattgcaaatatactaataatcctcagataagtggtttctgcacaatgccctcctgctaagtgttctgttattgttggactcggaataaagacttgctggactctgcttc

SEQ ID NO: 58980 - DNA, 2043 bp, Homo sapiens
tctgtttatctttgcaaaactgaggaattatttctaattaattcaaattatttccaattatttcaaatgcaacaattattaaaactaaaaaaatttcctgagttcagttttatgataatatgtgaaggagactaatcaattagccctgaaaaaatacagattttcaatcacttatgctgaagagaactggctggcaaaatgaaaacctagttgacctaaaaataaaattctagacttagttaaccacccgcttttctatttcttctactactgaagttctgagttgctaaacctctccaaacataaatgaaagtactaaaacgttttcatcagctgtaccgggttaatggtggttttgcatgtggaatgtgccatcaaggtgggaagacttttccttagggctgtattggttaaggtagctctgcctgctctaagagacactacaaaatgctctggcagtggaaaagctgatttctttctagggtgacagcccaaagtccggacaggtaggctgctctcctccacctgacacgtgtggattcaggttccttccatctgtgtctgccaccatagggcccagcctcactgcattgccctgagtggtctgcgctgaggcttgttgaggtggaaggggcacccaggtgtgcatcacctaaagggctggcccagaagggtctcctccatcccttccactctcattcttctggagctcttactatgacctgacctaatttcaggggatgctagggaatgtcgtgtagctggttatccctgggcttctgttctagtcttgtggaattagcattgccaattgtttggttctgctttgcccagcgggttttatgatgctttgtgtgatgctggatgttagaactcttgtgttgggggcttccctagttagtattcctctctactgtaggataaaagtccttgtgatcttgagctctttttgctatactgtactcccaagatgcagaacacattttggatagatcagacatgggctaagactgaggggccatctccatggctatggggcctgtatgtcagtcagcggcttcctctctaaaagtccccatttctgaacctgtaagtgcaaaaaattcagtctgtgtcatagtattatggagaggatttatcgagaaaagctgcctatcgtatagctggtgctcagatgtattcattcgtcagctatttattacatgttctttttttaccagacacagttctagggactcaggttatggtggtgagtaaggcagacagggtgttgcccttgtggtgctcttattctggaaatacagtagattttctaataatatttctcaagatagagtcctccctgccccccctcattggaagtagtttagttctgggtggaggaagggagggtaaagtctaataattagattgttgacagattctataacttcgaaagaaatgttactggagacatggatcaggggatgtaataaaagacctagtccctgtttaaaattcagactcataatagaaggcttaagagacacttgatgaatggaataatggtaatcacttattcaggagccagagggtttcttgggagcaaaaacctttcgaatgactgcagggccctctggctttcctgtgattcagaggaagttccactggagtccaggggccatctcatactctgaggagctgggatggggtcggggcaaatagtaaggaagcagttgtgtgtgtgattttctccttctctaatgagctcacgttgtgctgctttagcctgaaaggaccttcagcagactgctggctagcaccttgaaaaactcttgaagtgacgattctgatcgattttagtggccactttggagaccgtgtggagtagattccgagcctgtgtccaagctcaagggcagcaagtgctgtggtcagtgcaccatggtgtcaggggcaggagatggagtgtggccaccattcttgggctcttgagttttgtgtctctagagttatcttgtggtttccaaggatgtgtagcagtaattctgatgataccagaca

SEQ ID NO: 58981 - DNA, 1001 bp, Homo sapiens
attagagggatgtcattctaactcctatttgtttacatttgtgtataaggtatgctgtgataagtgctgtaagcaaggcatacatgatagtagaagcatccaatttatcaaccaattttatttgaggatcgttgtaactcatttgtttggaataataggtcatttttcccatttaaaatgttttaatttgggcatagtggctcatgcctgtaatcccagtgctttgggaggctgaggcaaggattgcttgagcccaggagtttgagactagcctggactgcaaagcaaggccccatctctacagaaaattttaaaatgagccgagtgtggtggtgcacacctgtcgacctagccactggggaggctgaggagggccgatcccttgagcccaggcgttcgaggttacggtgggctgatcgtgccagtggaccccaacctgtgtgacagagtgagaccctgtcacaaaaaaaaaaaaatgttttaaatgacaagaataagtgaaggagactaatgttgatttatgaagagaataaagaattggggagagatattcttaaaggcgagtgtaaaatgttaccgtgcttgaactttcatttgtgttctctcatgtatacttaacgagaaccttataaggctggtgggatttttttcccttttacagatacaaaaactaaggtttaatgaaagtgtggttttctgaatctgagtccttatgttttaaacccatttctcttggttccagctatagtgttctttattctacagctcacttgtaaggtatggtaggtttcaataaatcatgatgaaaggaaagaatgaaaagacagaaaggaagaagggagagagggagggaactaaagaaggtgtgtgcatataagaatggcggaattaccgactcactatcactgaaagggggaagtggaggctgagggttgggctaatgagctcattgttctggtctaaaaactgccctgttctctcagccagtgaattgtctgtta

SEQ ID NO: 58982 - DNA, 1043 bp, Homo sapiens
ggctcttggtgtaacgtgacccgtgaacatgacctgtgtagagtacagcaggagtgtcttgtcataggttgcatgttgcttgcactgatgtagtccaagtttgcatttacttttctggtggccagactcaacgagtttccttttcgctaaaacctgccgagccgttaatcacatgctgccattgaacctcgtctttccatcttgcgctgatgtcattgcaaaacctaacatttattgcgctgtggttttgctttattttagctgattctttccatcatgctttttagaatttgattatattatttggcacctttacctgtcctcccaaagaaatgctgtctgtacattattagatcagactcttttatatctttacttaagccggtgatgaaattgttaaactggctgaacaacacgaagtgtgtctctggaagcttccctcgaggcttacaaggagtcacactctcggttatagttaactactaatgctcttcatatcttataactagcccatatagctccacctttccacatggatatcctgaaagagtgtgtcaaacctcctttgctggttctactgaccaagttatgctgagtaataatgagttcattttcagtgtgtccctagtaacgagcactctcttctgcatatgattaagaaaatgtgttaaatgactgactggattgagacactagggtcacactgtgatctgtgacctccggaggccttaggaactgcagtgcttctaggaaaaatcagaatattgttggactttcttcagcttattttttggtttggtattctcttgtgttgaattgctttcagatagtggggaagaacaccacagtctcttccggttttgttttaattggttgatatacttctcttcctattttactaataaacatttagccaaaaggggtgtcttgaactctgcccattagattactccatatttttcacttctacatatttgcttaatcttctgagaaatatccccatttagttgagttcctcaagaaatcagaacagtccgaagtaa

SEQ ID NO: 58983 - DNA, 1049 bp, Homo sapiens
cactagatggctttcttatgacagacatttagtaaactgcccatttgagtcgcgtttgtgtgcagcctaggttgtaatttttctagtgttacaattagtaattgaagaaaaaagatctcccaaactgttgctttttattgctttcctagaaaacctacacataccgatatttttgcggatattgagaggtggcctattatttttggcattcccaaagttgaatttcaagagacaacttggttactgtatttagttacatcatttaagaatgcttgtttcatgtttggacttatttaaagaattcagagttctgttagttttgtcattctgtttagacaatatttccagttaaaagatgtttaccgcttgattgaatttcactgcttgattcagagttataagagagtattattcatgagaaaaatgcagtctttcttaagttttgggtataaatcacattgattcttcctaaaagattccattgatccattttgggaagagatgcagttaaagtatctgcatgattcataccagggattgtgttagggacatctccccagaggatgtttgattttttcatttctaagcacaagcccttttatgacaagcacaatagcccgtagtttcagcagtaacagcagcagcagcagcagcaggctcccagttatgtttttaagcacttttattctaaagcaagatcacggcagcctgtccaaatcttgcctaggtaggcaaacttatttatacgctgagtaaatatcttgaaattatctttgtagctatcatttattgtgtgccttgcccagcttaaaataagacatactgaatttgttctaaattagagtgtattcataaatagctgaaggaaaaagaagaaaaactacagagcaaacatctgggaagtaggaaatgaaatcagaaacagcttttatcagtacccacattctacctatagatggggtgaaatgaacctggataagaagcagtgtaagcacttgatccggaaaagcaagagctagatcacaggtatgggggtggagcttctggct

SEQ ID NO: 58984 - DNA, 1055 bp, Homo sapiens
ccaaatttatataaaattttacctatatatttcttcttctgcatgctttttttaaacatttatgttttcaattcatttggattatgttgagtgtaatatgctatgagattctcagctgattttcttccagatatttagccagtttactaaaactgtttgttaaataacccatttctaattagttttttatgcttaattaattatattaaaactatgtgtgcttgtatgtatagtgtttcagagttatctgttctcttccattgatctgtttgatccttgcatcagtaccatagtattttaattaccatggtaatcgtttttatttttcttcttcaaaaaatggccttgttcagaaactgtagtaatggtggcacttgtaatagtaaactattattgagtgcgaactacgtgccaggcatgaactcacttaatcctcagaacactatcactctattcctattttacagatgaggaaactgaggcatagaatggaaagttacttgcccagggacacactaattgtgtaagtggtagagctggagtgaactatagaatcaagactttactatccattaaaaaaaatgtcttatatggagtgattgggactatagttattttgacataaagggtgtcttaatttttcagataatcttaattctccacagcccaaaacatgtttctctttctccatctgtttctttaaaatttttattggtgaggttattcatagggctctcctattttctggtgctactggaattaggattgttttttctgttttctaatgatcaaggctgataagataatgctggcctttttcataatggcctttttgatagctaccctcaatgctttattaaaatttgatgcaatgtaagatgtaacattttattgattttcaacatatctcctactcacacaaaatggagacaatagattataatgttttaaagaacaaaggacatctactcaaagccctgttttccaggtgaacagtgtcattttttacaaagatctgtgaaaggaagagtaagctaaaatcagaacacccaggg

SEQ ID NO: 58985 - DNA, 1027 bp, Homo sapiens
gacccccaccaaacttctcactccggccagcagtatttcctcaccaaaaaataagacaacttttaccatagactgtgtgtactgacaaaggggaatttgaagcattatcaatatagaaaattacttttaaattatttaagttgttcagatgaaactgagagagaaggtgcttgacttagagagactggccatggggtggaaaggccaagtttgaagggaagaagccagctctgctctctgcattttgtattaacataaaagaggggtgcttctcagtaagtccgcttctctggagagtcctgttatacgactcttgttctgtagtgctcaggacagcattagccagcaatgcacagtgactttgtcaggcaagtgctaggaagaccatgcatgcagacgcatgcctaatgtgtaccaggattgcatgttcccactgagattggggagtgagctataagccctgtttcctctttgagctacagagctgatgttcatttgattggacagttaaggcagaaatccaattactgagctaattagcacctttgaggggtaagcaccaaatttacaggaggaaagcactggagaaaactcaaattacccagtgtggctgacagtccaccctcttagagaatgtgtggagagccagaggtcctgggggtacacaggcagcttaacttagttattgctcatcagaatttagactgtgttctataggcttctgaaaagatagctttccagtgaacatagttttagaaggtgttttagttccctaaggagtttagtaaatgattttcttttgtcttaatcctcctttaaaagttgtttattctgctgcttgaaaattccatttgtggtaggtcttaaggtgaaattaaaattccatttagggactaactatgcagacgtgggacttcagccttcattaaaaagaattttgttggttgctggattttctgctaccctgagatctttcatttttcaaagctgctatgagagtatttgtaaggaaaactaaagctgtaat

SEQ ID NO: 58986 - DNA, 1480 bp, Homo sapiens
cgccccctggccgccccggccacctcgcccacaacccacacaccccggccccggcgccccgggcccctctaaccctcccaccccaccccccacctttcgccatcccggctcctccagcccgcctcccctcactgtcctcccgaccctccgaccttccccttactggcgtccccggcctctgcctgggtgactcgggagggcaagccctgcggagccggaagccagagaggtgactccagacgtgacttggttgttgccgtccgtaactctggggaagtggtccctaacttcggcctgggtggctgcaggtgcttcctccccttgagttcttttttcgcaacccactaagccaaactgtcgggtttgaatgtgtagcagcacctggccgccgtgcggcaaggcagcgggatgatggaaactcaccaccttcctcccgcacccatcccagaggccgaggctgcagtctggtaataataccttctaaagggtcaccttccggagtgtgccgtccctttggaccatgcacagatattccagctcttttgtaccttggaggcagttttgggggtagccgagtgacatcactctgctcttcccaggtgacctctgggcggacaggccgatccggtttcttttcagagtaggaggaagggtgagggagagtaaaggaaccataggattgcctaagatctgacttaattggggcaccctgattcagcagttccttcaacttgaggtgtgcgaggctccccataaacttcgaagcgccacgtccccgtacgactcacccgcggggcgcccggccatggaggagcctcctcaggtgaaagatgaggccgggcgcatgccccagggctcggtcactgtgccagatcagatgaatgaaggccgaatttccccagccggacctagtaaggcacatacccagagtggagatatcaattggtatttggacagtgggaggaatctgaaagagcgttcagcacagtcccttcttttgatctatgagatccaatctttgaaataatccatctcgtcatgcacaaggtcacacacttcctagttaccagtgtcgtcctggaacctgggccttgtgatttctctgccaggaccactttgtaaccccccaccctcaacctttacaggtgaatcacatccctttgtgtgactcccaactcttccttcctccccacccccctccaccacccaaattattgtgtataattccctttgggctatatcttgttgactatcttggtaattacttggtaatgagtaataatacactattcatgtagatcacatgaaacaattattcagaggtctggggtgaattactaaactgatgtaaatctaccctgaaataaacagaagtggaattctagcttgtattgtgagatctaaaaaactgttaaatgtagcgctagacaagacagacctgttatctcactttccaaagaatgcctgttcccttgccaat

SEQ ID NO: 58987 - DNA, 1017 bp, Homo sapiens
gcgtttgagtagttgctgcaatcgtgtttatactgttaattggctttaaataaattattttttgtcagagcaaaaccccaacttcagttcagttcctacgtcactgagttgtaacttaactaagctttagtttactctcatctttaaaagaaacaggcattctttgcattttgtacaatgctttgcattttgtaattgttcaagataacttcttggtacattggcctcagattaaggatatctggcttctctttaatctcttaatattttcatttttgctctagggctcccaatattacaagtctgttcttgacaaggaagttgggatgacagaactactgtatgaaaactcagaaatgctcagaagtgcagacctttggttctgttttcttcctcatcagataggaattttttttaactacgcacagaatcacacttgcgaagtcttcttttccttcttgttactttatttagaagctgtgaactcaagaagtaggtcccatgttgaatctacatgtgcgcaggtgattcttttagccaagtcatttccacactcatgcccaagtctggagatacacaggtatgtggaaatgtttgaaaagcaaaaccaggttgatgagactttcaatctcttgataacctgtcatctaacctctgagggtccactctggtaaatgtcaacgtcagacatgctacctctccaggtcaccttggtcaagtgcactttcagagcagtgagagcaccatagaaacttgatacatagcttgtttgcagcaaaagagagaggtagatattagcatttccaaaagagctacttaaaacaattatagtaggttgaatatgagccctataataatgtcacccttacttctgttcttacatgttctgacaaggaaaagaccgtgcctcatctctggctctcagaattgtccatcatccacagtctattttatttatacctacgtggtaactgctaactcaaataggcgtgatggtgaccgattatcattgtgttt

SEQ ID NO: 58988 - DNA, 1074 bp, Homo sapiens
tcctgagggttttatctcctgatttggttagaagattgttgaatctggctgtgagagcctttcaagtgcctaaaggagagagcttgaacttccctgagagtacaccaggtgatgtgacactttcttgtccttgtaatatgccacctagaagagaacttttaggagaggagacctacagttctcaccaacctttaatcattagaatttaccagcatctactgataagaatgtgatcttggtgagcagctatcatagtgggtcagtttgcaatgaggggagtaagaatttgagagagcgcatttggatttttctgttggggagtcattgtagtcattctaaactacagagtggccacacagttcctctatatcagattcgttcccaagcactgttgttaagtctttaattactgtcagggaccactttaataacatctgttagtgtgggagaaggtctcttaaaggacttggggaatattaaaacgtgtgcagagaacagaggggagcatatagttcatttgtaactagtatagctaggaagagtgtggccaatatgaaagggtgtgcctattgtggagataattcaattagttttttctttccacagcaatagaagagtttaacttcatggtacttcctatgtgcagcgtctgtactaaatgttttacatggattgtttcatttaaccctcataacacctgcatgagataggaaatagtcttcacatttgacagatgaggaaactaaggcatcaaatttttcagggagacatagctaataagaagcagaaccaggattcaaatttagcaaatgtgattcctcagcccgttcccctaaataaagtctttcgaacaatagaaaaaaaaaaaaaaactgttgacttcatttcaagagtgtcttcctccaaaagatacagagattcccaccagggcaaaatggacgccacgtttccctcccgggggcaccagaagccttagcaggtggctgctctgagttcctgtggatggaggctcagaggttgggtttgattctacagagcatccagggttcccgcatccctttacataatacgaga

SEQ ID NO: 58989 - DNA, 1006 bp, Homo sapiens
ctcaaactcctgacctcgtgatccgcccgcctcgccctcccaaagtcctgggattataggggtgagccaccgtgcccggccttcagttggcttttttatggttaaataaagttccatttttcagattctatttccagatctctgcaatcatcggatcatccctccttggtgcctcgctgaagttgtagctcccattagttcaggtggttctgtaatatcagctgccttcctcagaacgagtctcattcttccttcacatatttttttttctcaaaatgaaacattcaaaggctcctgcttccatatgtagcatgaacattatttggcaccatccttcatgttattctcaaggcactctccaacttgcccatttccctctttcaatatgatgcccaaaattagtcaccgcattccaggagcagttgggtgtgcagggaccagatggattcaggagccaacactcagaacaagagtagttcttaaccatttgaggacgcgtaccccttgagagaatcaaagccctggaatctctccatgggaaagtggatgtacaatctcagaggattcctgggccttgccgtagttcattcataaactgtgtaccttctgggacagtgggtcaagaaccctgcctctgccgtggtgaggccgtacatgggaataatcaaggaagctttttaataaccacacacacttgtataagccttaagtataaggcagagaatttgggggatttgcaactaaggagtttgtttatttttaagctgagtgtattttagagatcagattttgaaactacttttcaattataatcacctgtgtggatttttctcagaatccaatttcatttaaaaaaaatgtatttagctggctttttcctgaattgacttgttcagacatgttagttcttttaagatgaagtgctcatgagattttaaaaatagccaccaggccccatgcccagctgggttctctgttggcgttggttggatgaagagtcccctga

SEQ ID NO: 58990 - DNA, 1003 bp, Homo sapiens
tgatgtgttggaattgctggttggattttacaaagaatggtggactttcaaacttatggtgaccactgttgaattttactgggacatgacaattatactagagcccctaaagtggcagacctgaagtctcgctgttctctttggtttgaggggaataagggcagatgataggcatatattgtttaaaaacgtgtttgccactttgtctcttcctcttcgcctcagtgaccttgttctccttgcaggttatggccacaccgtgcccttgtcagatggaggtaaggccttctgcatcatctactccgtcattggcattcccttcaccctcctgttcctgacggctgtggtccagcgcatcaccgtgcacgtcacccgcaggccggtcctctacttccacatccgctggggcttctccaagcaggtggtggccatcgtccatgccgtgctccttgggtttgtcactgtgtcctgcttcttcttcatcccggccgctgtcttctcagtcctggaggatgactggaacttcctggaatccttttatttttgttttatttccctgagcaccattggcctgggggattatgtgcctggggaaggctacaatcaaaaattcagagagctctataagattgggatcacgtgtgagtattacagctccctggctgctccttctgtctcctttattttatttatttatttatttatttattttgagcccagctctcactctgttgcccaggctggagtgcagtggtgcgatcttggctcactgcaacctccgccttccgggttcaagggattctctgcatcagccttccaagtagctgggcttacaggcttctgtctctattttgccattgcaagctccacttcacctctcaatgaggggtcattcataaaagcactgattgctttcttctcattgagaagttttccgaatttaccaccttctcaaccatttcattttatggtttccttcaaaactgtttatgcaaaaatctta

SEQ ID NO: 58991 - DNA, 1235 bp, Homo sapiens
gcattatgctagagcaccagggtcagggtgcaaggaagaggcttaagtatgttcatttttatcagaatgcaaaagcgaaaattatgtcactttaagaaatagctactgtttgcaatgtcttattaaaaaacaacaaaaaaagacaaatggaacaaagaagctgtgaccccagcaggatgtctaatatgtgaggaaatgagatgtccacctaaaattcatatgtgacaaaattatctcgaccttacataggaggagaatacttgaagcagtatgctgctgtggttagaagcagattttatacttttaactggaaactttggggtttgcatttagatcatttagctgatggctaaatagcaaaatttatatttagaagcaaaaaaaaaaagcatagagatgtgttttataaataggtttatgtgtactggtttgcatgtacccacccaaaatgattatttttgtagaatctaagttaaacttactatttataatgcataggtaaccattaactatgtacatataaagtataaatatgtttatattctgtacatatggtttaggtcaccagatcctagtgtagttctgaaactaagactatagatattttgtttcttttgatttctctttatactaaagaatccagagttgctacaataaaataaggggaataataaacttgagagtgaataaccatagtattctgctgcaataaatgtttctaccctcttgcgatagaatggtgtcagatgtctaacatgtttataaacatttttttgaattgaacaggttatgaaaaggatttattaaaaggttaagatactttgttttgaaagtacattgtgatttgcagccacctagcactaaagcatagaacttaaacacgaatccctaaatgaacagattatgttacattaatctgagaattttaaatttagaagctaaaataaataaaaatcacagctggttgtaatcttatgctttcatatatcagaagtgtgcctctatgtagaatatatatacatatgtgtgtgtatatacatatatatatgtatgtatatatatacatatgtatatatatatatatgtgtgtatatatatatatatatatacgtatatatatatatatagtccttcatagaaaacataaaggtcacatttagatgacgtacacaggatactattatattaaggattttagaaaagaaaatgagaaagcccctgtgtgataatgaatg

SEQ ID NO: 58992 - DNA, 1059 bp, Homo sapiens
ttttattagagagttgaacaagtcatccacctccatatgcttatgggattacaaaattgcagctttgtcttttagaagagaaaattcacagagaaggcaggcctttgtagtcacagctctcatattaaagaagcaagggctcagagttcagctctctcacctcccaatgtgccagagtacctggttctggtatcatctgatagagttaggggacagggagctgcacgtacaacagtggccttgctgttggattctctttttcaggattgcaatcatgaagtatctacttcatagtatttcctgagggctactctatgctatatattttaagtattgttgctatgtgctgataaattgtactaatatcctcatcatccatgaaacattttggccacttgcttgcataaattatggcatcaagtctgtcttgggactgaagccctcaacagcagttcagatatttgcttattaagttgcccatagtattgcaggtgctgctctgcgctcaagatgcagatacaagtcttataagtctaccaagcaggacttctggcaaagtaagcaattgtcaggccagggcgtttggactcggtgagtggatgctttttgtttgacatggaaaattaggagaagcctgatgacctcaaacagaaagtgggaaggagctgtacctctgctttatgcaggttcagagacgacaagggatagcaactcataggtttccttctaggccataccatcaggtgtccggaagctatccctgcatccagtaaagtatttctgcaggttgctgggatgtcccacgtgcttgactctggggaagttgattgaggttgctggaggctagcaggtgtttgccactggaggaggcaaggctctgaagaaggaaaaaaaaaggtagtaaagggagacaggacagagcagagaaactgggttggcagtggcttgttgaaggtatccagcacaccgcgctgtttttggccactatcaatctacattgttcatgccacactgaggttgtatgtggaaccactgcctgattgcatgaacgtgattcaa

SEQ ID NO: 58993 - DNA, 1045 bp, Homo sapiens
agtcagctatgtcagatttctctcagatttctcttactgtcctagttttgcaaaggcatttcagtttcagatcatgtctgggtcagtacaagccaacagtatcagataacaacaaaagaagctaatgtcattctgtctgggttaattaaggtacaccatccaactagtggaaataaaagtcatgctgtgttctacactgatgcaaacacttggaatagtatgtcctgttctgagctccaccctcttagaaaggtgttgataagttattgaatccagaggaaggtatatggggtattcggggaaaggggagagtaaaaaccacttcttatgaagaatggttgagagcagtgggaatattaatcctggatgaagtaagactttgggagagcctaatagctgtcttcagaccttcaaaccaaaaaatagagatctgtagcattttcctgttggacaagatgacctctaaaactccttctccctggaagattcttattcctattgtgttaaatcttcactttaaaagaccttctattcgtacattctacttcttcctccagtatattgcataagccttaaacgaaaacctatcactatcatttgacagcaagctaacagcttcccacctcccattagctaattgaaatcaacaataataagaaagaaatagggtttttattcaatccagacggccacacacataactgagctgctaagtagaaagttccaggatgcttctccagatgcagcctgaggggtcctccagttcctctggggcagggttgctcaaacataaagaagccatcttattagccaggcatggtggtgtgcgtacctgtagtcccagctactcgggaggctgagacaggaaaattgcttgaacccaggaggcagaggttgcagtgagcggagatcgtgccgctgcactccggcctgggtgacaaagcgagactccatctcaaataataataatgataataataataataataatttatctcctgatttacactcacaccattgtttaggcagggacagggtaatttct

SEQ ID NO: 58994 - DNA, 1057 bp, Homo sapiens
atttattatatgtgagtagagctagttttctttcttccttcccagtgtgtatgctttttcttttttgtctcactggactagctagacatccagttcctgtcccaacattaagtgttgatattagctatgggcttttttatagatggcttttattattttacttgtatattttaagttcacccttcttccttataaaccttccacaaaccctcatcatttctcacttgggttgttgtaatagctcttgcctgtattaaaatgctaactcccatttatttcacttctatgtatattataaattttatcatctgcctactacccatcctctaattaaaaacaaaacaaaaacaaaacaaaagtgcatgtgtttataacaggttttactttttttcttaaaatagagatttcttactaaataccattttatttcatttcttcacagatcttctggttcttgatcatcttaattatcaagtgtcgtatatagggaacaagtattgatgttcactatgattcaaactattactgttccatagtcagtggagctttttcaatgtccagaaagaatactttcaatctttatgaacagcctaggattttgcagttgtttctgaaggctcaaattgtcctgcttcaaatttttctttgaattttaagtagtctcttcttttatcaaaatattttatctgttggaaaaaaaaaggatttgaaataagggcaagttatgcagcttagataagcaaaagcacagatttaaatgtaacatattattcaacataaatttaagtgatttatattctagaaccattttgtgtgtgtgtgtgtgtgtgtgtgtcagctgtaactatgaatgatgtttttctttttttttttattatactttaagttttagggtacacgtgcacaacgtgcaggttagttacatatgtatacatgtgccatgttggtgtgctgcacccagtaactcgccatttaacattaggtatacctcctaatgctatctgtccccccctccccccaccccacaacaggccccagtgtgtgatgttccctttcc

SEQ ID NO: 58995 - DNA, 1057 bp, Homo sapiens
ttctgttgcgataaagatatacaggagtaattcaactcctttaggtccatgttcatagttgtcagaatatagactatttctaaccactatttgatctctgtgtgcaaaggtgatatgaaaaacttcatataaacttttttttttttttttttttgagatggagtctcattctctcattcaggctggagtgcactggcgcaatctcggctcactgcagcctctgcctcccaggttcaagcaattctcctgcctcagcctcccaggttcaagcaattctcctgcctcagcctcccaagtagctgggattacaggtgcatgtcaccacacccagctaatttttgtatttttagtagagacagggtttcaccatgttggccaggctggtctcaaattcctgagctcaggtgatccacccgccttggcctcccaaagtgtggggggcgtgagccatagcacctggccataaacttactgtgaatgattatggcctagttcatggctttaaaaataaattaaagcctactacctgagcattctgagcctcacagggatgctggctctgcatcctgccaaatgtgttcccgaggggagtacagagacggaaagcggcacagaggctgatgacccctcttcattcggaacctttgcctcaacctccctggtctccatatgactcaagggtatgagtgttcacagatgatcgctgctttaactctgctttatcatagtccacacttctgacaaaaggcgtttctaggaaataaattctctcttaaaaaatccattgttttatttccacaattgcttaaaatattttattaaaggaagaatacaatttaacaaaaagtgtttattaaaggggaaaatatatagtaatatgtttaaggcacatggcaaacttttggcattaaattgcaagaaaaaagaaatacaaattatcacaataaatttcagaatctgtttctttagtccaaatagttttttttaaaaaagtctgaacagcagcagcagttcactaaggaaggcacatcatggcttggtatctccgtgcgagagc

SEQ ID NO: 58996 - DNA, 1077 bp, Homo sapiens
ttatttcatctctctggcatggccagctgaacatggaattgacccatcagtctttttttttacactcttatttatttcccggtactacagacttaacttcatttgttaatgtttcttttagtaacattcagaatatcaaagagaaaaataagtgaataaacaaaaaataaaaagaatatcaaagagaaaaattgtttgttacaggaaaactaatctttcttccattttcttcctcagaaatgaacgtgagggaattccagcaaatctgatccaacagttggacgtttgtgtggaaattcctcaacagggcattatccgctccctgaatgtccatgtgagtggagccctgctgatctgggagtacaccaggcagcagctgctctcgcacggagataccaagccatgatgtgccttccttagtgaactgctgctgctgttcagacttttttaaaaaaaactatttggactaaagaaacagattctgaaatttattgtgataatttgtatttcttttttcttgcaatttaatgccaaaagtttgccatgtgccttaaacatattactatatattttcccctttaataaacactttttgttaaattgtattcttcctttaataaaatattttaagcaattgtggaaataaaacaatggattttttaagagagaatttatttcctagaaacgccttttgtcagaagtgtggactatgataaagcagagttaaagcagcgatcatctgtgaacactcatacccttgagtcatatggagaccagggaggttgaggcaaaggttccgaatgaagaggggtcatcagcctctgtgccgctttccgtctctgtactcccctcgggaacacatttggcaggatgcagagccagcatccctgtgaggctcagaatgctcaggtagtaggctttaatttatttttaaagccatgaactaggccataatcattcacagtaagtttatggccaggtgctatggctcacgccccccacactttgggaggccaaggcgggtggatcacctgagctcaggaatttgagaccagcctggccaacatggtgaaaccc

SEQ ID NO: 58997 - DNA, 1135 bp, Homo sapiens
gatttcattgtactgaagcccattgttaatgaaagaacaaaaagatatacttttttgttaatggcaatttttaggttctgggtaatgagaattgtataggagatgatacatcacctcactgactgtaacaaaatgtgcttatataattttaagaaccataaacatgcttattatgattaacatgtaaattaattcaatatgtaaatcattagacattgcataaattatgataccttctccctttttcaactgtaattataatgtgctgcccttgaatttaaatcactgacctagggcttttcctctgaagaacttataagttattggtaacttaagctgctgtgcataagcaatttttttggtggattactaagattattgataaactgatctgtaaaaaagtatagatctatatattgcaagatatgcatcctagaacactaatgtgtattttctgctgcttcactgcaaatatcatttaggatttttcaaagattttaatatgctctgctctgtgttctttagcgcccagaatgctttgtccggcatctttctgcaggactcctctagtcactctagtgttaagtcaacctttttctattcagtcttccaacaggagtaagtcctttgcctccctcctgccctccctcatccttacctttgaccacctcactctcatatgttttatgatttattctccagtcatgaaatgaattaaaggtgtatgtgtaaataaaataatggggcttaattgttcataggaactgtatctcttcatgtatttgttttttttttgtttttattttattattattatactttaagttttaggttacatgtgcacaatgtgcaggttagttacatatgtataaatgtgccatggtcgtgtgctgcacccaccaactcgtcatctagcattaggtatatctcctaaagctatccctccccccctccccccaccccacaacagtccccagagtgtaatgttccccttcctgtgtccgtgtgttctcattgttcagtttccacctatgagtgagaatatgcggtgtttggtttttcgttcttgcgatagtttactgagaatgatgatttccaatttcatccatgtccctacaaaggacatgaactcatc

SEQ ID NO: 58998 - DNA, 1039 bp, Homo sapiens
tatacctaatgctagatgacgagttggtgggtgcagcacacgaccatggcacatttatacatatgtaactaacctgcacattgtgcacatgtaacctaaaacttaaagtataataataataaaataaaaacaaaaaaaaaacaaatacatgaagagatacagttcctatgaacaattaagccccattattttatttacacatacacctttaattcatttcatgactggagaataaatcataaaacatatgagagtgaggtggtcaaaggtaaggatgagggagggcaggagggaggcaaaggacttactcctgttggaagactgaatagaaaaaggttgacttaacactagagtgactagaggagtcctgcagaaagatgccggacaaagcattctgggcgctaaagaacacagagcagagcatattaaaatctttgaaaaatcctaaatgatatttgcagtgaagcagcagaaaatacacattagtgttctaggatgcatatcttgcaatatatagatctatacttttttacagatcagtttatcaataatcttagtaatccaccaaaaaaattgcttatgcacagcagcttaagttaccaataacttataagttcttcagaggaaaagccctaggtcagtgatttaaattcaagggcagcacattataattacagttgaaaaagggagaaggtatcataatttatgcaatgtctaatgatttacatattgaattaatttacatgttaatcataataagcatgtttatggttcttaaaattatataagcacattttgttacagtcagtgaggtgatgtatcatctcctatacaattctcattacccagaacctaaaaattgccattaacaaaaaagtatatctttttgttctttcattaacaatgggcttcagtacaatgaaatctcacctgcacaaatgttctcactcatttccttttaatgtcagaacagatttctgtttagagttaaatattcccttccattgtttacaagccagacactgcctgagaaatagaa

SEQ ID NO: 58999 - DNA, 1005 bp, Homo sapiens
gtatgagattagtagagggacagagaaatggacaggctttgaggtaaggtaaacaagggcctaaagtactgactggatttatcaagagccattcgatagcataattaggggattgaaaccaaattaaaataggtacaagagggggccagctgcagtggctctcgcctgtaatcccagcactttgcgaggccgaggtgagtggattgcttgagcccaggagttcaagatcagcctgggcaacatggcaaaaccccgttctctataaaaataataataataaaaaaaagttagcggggtatggtggcatgcacctgtagtcccagcacctcgggaggctgaggtgagagaatcacctgagcccaagaagttgaggctgcagtgagcggagattgcaccactgcactccagcctggcaaccgagtgagaccctgtctcaaaaaaaaaacaaacaaacaaagtccaaatgtggataggatgatacattaacatatattacatcagagtggtaggtttactggtgtctataattttctttacctgaatattcggaatatttaaaatatttcatgtctttaacttttcaaaaaatgggtgatgaaggtgagacagagtcaacttatttagaaaattctctcaaaaaatagtatattagaaagttcaacagctagtggtgggggtgctgtcaaaagagggcttctgtttcatttttggtaacattagttgtttttaagtgatactcatagtcaggaagttgaacagtgcagaaaggcatcgaatgaaaacgagacagtctccttccttctcccaccaaaggtgaaactccagtaaacttgcttttcttttaacagctacctaatattccatttgccttaggatatcgcttgagtccattactgatggacactttaataaggttttgttttgttttttaagactagatacaaaagcccttttgaaaaggctgaaggaaaggctagaatagagaagaggggagatgcggaagtt

SEQ ID NO: 59000 - DNA, 1036 bp, Homo sapiens
cctggcatcttggcagatcttgatttgaacctgaattcttccacttactaggtatgtgactttgggagggttattcagcttttctgagtcttttcctttccctgtaaaaatacaggtgatggataaccttccttatagatagaactgatgtccaggtaaattataaagtactgaatgaaggtacttcatcattatattttaatcagtagtttttagagtctttgctcggagagttgtagatccaataaattacttatgataaaaactttaagctattttattttaaatggagactatttttaaattaaaatgaataactgtaactggttaattgtgaactttttttctcagaatttcttgaatggaattattgacaggattttccaggctggtttcaccaacaatcaagcatccataaaatattttatagaatggattattatattgattcttcataaattccctcaatttcttccaaagttctgggattgtttttcttatgtaagtaaagaatattttttatatatttttaaactaagacatgattttgacaatgctgggagatttgtttcacttaaatagttgtttttgactctcagttgccctattgtattgacatcataagttatgttttgcaagatctgaattaattcagaagacagaaatccctggcattcattttgaatatttcatagtttttgagagctgttctattcaacaaaataaagatggaaaaggcatttgtcattaagaagtaagggaaataggtgcattccgtattcttatttaccaagcaatgtctttgtttgatcttagaaatatgaacgatgaggaattaattgcgttccttaaaattgaaaaaaaggttttgggagatttcaaacataacgtagaaagaatagaagtaatatcagttcatttcctttcttgtttcatctgtaccctcacacactcccctaatcgctttccaacttttctcatatattgaaaatcatttttaaggaattgatactaaaattagtgatagagtttatca

SEQ ID NO: 59001 - DNA, 1033 bp, Homo sapiens
agcctggccaacatggtgaaaccccatctctactaaaaatacagaagttagctgggtgtggtggcgggcgcctgtagtcccagctactcgggaggctgaggcaggagaattgctagaacccgggaggcggaggttgcagtgagctgagatcacgccattgcactccagcctgggcaacagagtaagactccatctcaaaaaagaaaacaaacaaacaaaaaacatgtaagttaaaagcaactaagttcagtgtttgaagtgttttatttaaaaatttttttatttttcttaatcactcagcccaaaatgtcaatgtttgaaatattttaaggtgccattctttttctcatcctcctaactgctttttgggggaagaaaaagcccctgtgcctaatttaagccacttacatttcaagttgtcattgattttttcattaatcacaaattcaatagataatttaatgttgactccctcccttctcctttccaggatgaattagtgtccaagtccaaaaaacgctactatgtgaattctctacagcacagagtgaaaaaccgagtgtggcagactctgctggtacttttccctagacttgaccaggtatcatatttttattatatttgtacctttgaagcatatgatttcatgactgaactattttgcagaaactatcatatactattttaaaattgaaaaagataatgtttaaaatttattctgcagttcttaaaattgaagttattcaaaagtttttattaacagagagaataccaaggcaattaggtattgtagaaataagttagaagtgggtttacatggccccatttaatatttttttcccttcggtgttttaatgtgacattttaactgtttaaagtctgatttgccatttgattagaaaatgcaaatacttaactcctaattttctgtagctacgttattttggagtgttacactgttttggattatctgtactgtagaaaccaggcaaattgtatcatttgggatgggaatattgtttcacatggtgga

SEQ ID NO: 59002 - DNA, 1077 bp, Homo sapiens
ttttgatttctactaggcagttactttgttgttaaattaaaatatttattcacattataacaattataatgaaatgtgaacaattataacggaatgtgacgatttcacttaatttatctttccacatttggctactaaaaatgccgggtgttgagagcacacagtgcttcctgagtttgcccctcagttggagaatgtgcaccgatagtgcatggtagagacaggccattgacgtgtttgatgtgtatcatgcccctgagtgaatggaggtatctgtggtcctctttcagggataggctcatgagctgtgatctgttttgtccacaaataaggtattattgaactaggttcagcagcgtgtgcattgattctccagaaatctggatgaatttgtgctcattcatactttctgtatagaccctccttgtaatatattcatttgttatcttctgttatctattctaaattaaaaagtattgtcattaagtatggacctacttaattttagaaaactttgagaggttttgatcgtgtaatgatatttgaaactaatatttgatgttaattttctgttttcaaaatgtattaacataatttatcatttaatttttttagtactaagagagaagaccattatgtgagaatttgtgctgtcaaattcctgtgtttattagatggctccaatatgtcccacaagttgtttattgaggatcttgcaatcaagctattagataaagtaagtgtattttactttaaattatctttgtttttaacagtcagaggtcaacatttgctctttatgttgctagaatatgtacttctaaatatcttttgtcaggagaaaacacaaagtttatgttctgtatttttaattcagtcttgattagggctggtcacactgtggctcacgcctgtaatcctagcactttgggaggctgaggcagcagaattgcttgaggccaggagtttgcgaccagctggggcaacatagtgagaccttgtctctacaaaaagaaaaaaaagaaaaaaaatcttggttagtaattgtccaactcaagtttggttttagagaacaat

SEQ ID NO: 59003 - DNA, 1008 bp, Homo sapiens
ttgagcctgggaggttgagcccacagtgagctatgatcacaccacagcactccagcctgggcgacagagtgagaccccatctcaaaaaaaaaaaaaaaaaagttggttaacagtttttaataaatccttaggttttttttttttttttttggatttttaaaaacatgttctagttccttgactagcttatgtttgttttggttttatatttttgtattatggaagcagggtgtcattaatttaatttacacattaattgggtataggatttccttcctgctggtgcctggcattgaagacagtggttcttccctgtgccttctttagtgagtcgccaccctcacgggaaagcacggaccagaagatgagtcctcatagctgctggttgtctgggtctttcatgagagtaactttgtctaattggatccattagctaaccagttttcacccaattataggtgggaagcaatttgcttatgcttttgaaatggttgattttggcatgtcttttaatgtctagcggaaagcagagaacagagaatgtattgcggatattcttagaccctcttctggatgtgcttatgaagtttagtaccaatgcctacatgcccttgctgaagactgacagatgcctccagctgctgttgaagctgttgaacacatgcaggttgaaaggttccagtgcccaagatggtgaggataagttgtttctcttggtatcttgcttgatatagcattggtatttagagttctagagaggaaacttccgtctttttaaaacaaagagaaaactttttatataatttagaaattatatatatttaagaaattatataattatatattaagaaattatataatttaagaaaaatatttattgagtatctcccagtggtgctggggatacagtggtgaaggagcaaccatctgttctcgtgagttgacattctagtggtttccgtgtgttggttactataatgtaatttcatttgctttttaaaaatattt

SEQ ID NO: 59004 - DNA, 1091 bp, Homo sapiens
ttttttttttttttgagatgaagtcttgctctgtcattaggctggagtgcagtggtgcgatctcagctcactgcaacctccgcctcccgggttcaagtgattctcctgcctcagcctcccgagtagctgggactacaggcatgcgccaccacgcccagctaatttttgtattcttagtagagacagggtttcaccgtgttggccagtatggtctcgatgttttgacctcgtgatctgcccacctcggcctcccaaaatgctgggattacaggcgtgagccaccacacacagcctagagtcattctttagtttggtagatttcaggagtttaattaagcatctgggctgcagccatatggggatgaatttgtcagccgcattgctgccttacatgtcagtagcacacgtgagtgaagtgatgtcggtcagggcttcctagaatttgagagccaggtgtttgtgatccaggaccaggcatatcacagatgcttggtaaatatgttgaatcgatgtgaaatagaaacttggccattgccatcttcctagtgtcatgagtgaagcgttaggcaaaagatgggatttactgaatttagttagtgcaaatggaagaaagaaaaattgaggccaggagttcaaaaagagcaattaaaacattcattcacagttatttagtcatttttcagtcaccagtttccagtgaatatcttctgggtgttctgaatgtcttttgtgctaggtatttcaaaagacacaaagtccgcgtaatatccttttagtagcttctgaggatttcttgaaagtcattctacaactatgtgagaaaacagacattttcactaactacatgagatgagggtccttaagaaatcacagattagcagagaggacagaatgaagcactatccctttgtatctcaaaatagaaatataaataatcgtaattaaatccaaggtagtcaagaaacagcctatgagaaagatgttactgtttgcatatactagaggccactaaccatcaatacttcctatcctgtttttccttcacatctcaaatagaagaatggcttctaatcataaacaattttatcttt

SEQ ID NO: 59005 - DNA, 2082 bp, Homo sapiens
cgaaagtcgttgcggtttttgccttttttttttttttaaaaaaaaaaaaaaaaaggcaaaaaccgcaacgactttcgcaccaacctagtaattattgggggtaaaatggtgagagagatgtggtatttttcacctgacttttgtgttttccatgaaaaaatagttttgattgtaagatatatgaggggaacagacaaggggctgatgaaatggactcaagggtgagtggggtagtcagggaaggcctgtcttatgatgacatctaagctaagagtccaggctgagaaggcaccacctgggacacaagccctgagatgggagcagctgtaggaggcagaacagaaggaccagcagggctgcagcagagttggtgtgtggagtgggggatgaggttggagtggcagtcaaggtcagttcatgccttgtttggactttattctaagaacaatgaggagatgttgaaggattttaagcagaggcgtgacaatttcatatttctgtgtgaaaaatggattgaagtgggataagagaagaattggttgaaactattccaaatctgaagttccaacctgcatgcatggggtaatatttaatttttgtacactgtagcagttacagcattcgtttacagtctttcttattttttcaagacagagtctcactctgttgcccaagctggagtgcagtggcggggcctgggctcactctaacctccgcctcccaagttcaagggttcaagcgattctcgtgtctcagtccctcccccaccagtagctgggattacaggcatacaccaccatgcctggctgatttctgtgttttttagtagagatggagttttgccatgttggccaggctggtctcaaactcctggcctcatgtgatccatctgcctcggcctcccaaagtgcttggattacaggcatgagccaccatgcctggcccatttacagtctttcaaaattaagctgcctgaatacggaatactgaataccaaaatttttttggttgacatactcagatgtgactaaaaacagtctgggtgcggtggctcatacctgtaatcccagtgctttggcaggccgaggatggaggatcacttgaactcaggagtttgagaccaacctaggcaacattctgagaccatgtttctaaaaaatattttaaaaattgtctaggcgtggtttgcatacctgtagtcctgctaggaaactactcaggaagctgaggcaggaggatcgcttgagccctggagtttgaggctgcagtgagctagaattttgcaattgcactgcagtctgggtgacacagtgagaacctgtctctcaaaaaacagtaacaaaaacttcttgtagtgttataatgaagttattgtgtgtgtttgtacattatttatgagtatgtagtcttgatggtgaaatgaagacagaatcagatgtcaacatttgatgtttgtttccacaggatgttggctctttcacccatcctggcatatgtgtatttataaaagaatgtttgaaagtgaaaacaaaatcctgtccaaagaaggtgttatccattttttggagctgtatgaaacaaagattcttccattttcaccagaattttctgaggtaatgacaccctgtccccttccttgctcccattgttgaaaggcgagaggtaaaaatacactaggattctgtatcagcaagtaacattttggagatttgcatccaacaaatcatatttctctaaacccagctttcctatttggaaaaagcttatgttgtttctcaacaagcccaacggtagaactgcctgtattattaccattgtgaaaaagtagttgtatattatcgatattcagaacagcgttaagtcaagaatcgtaagcataagtcaagttttcactatatgaaaactggtatagaagctatcaggtgatgctgttgtcaccgttctgagccactgatgactgttatttgtttagtgatgctactgcctcaattctgactcaatgaattgctgttgtctactatatgaaatagggattgccttctaagcaatatttattagaatctgtacttccatttgtcagga

SEQ ID NO: 59006 - DNA, 1046 bp, Homo sapiens
gtttgcctgaacttcaggagataaaagacatggaacaaaaaggcaactgatggtataaaatagaagtgccagggactgcggaaagggcaactggataggggacacagataaaagagctgaacaaagtacggctagaaagcatttgtttatttttcaactagcagcagaaccagccattctgcaatggtagattggaaagagaagatagtgacgacactggaaagactctcaagacctggagctgctctttgaaaagctttggaataaaacagctacgttgggccataggaaatgcgctaaagacaaaagggatttaaaaaaaaaaaaagccttatactttggaaagcttaggaatgaaaaaagccaaagccatgtatgagctttattgatatcctgaaacttaaatttataaatagagataaaaggtagaaagcactgagacacattttactggctactctcatataataagaaatttcctagatgttgcagcttttactctttttattgattaatggcttggcagacttctctatgaaaggaagttgtgaaactcataaagagttggaggctaggatatacatagagttactatatgttttaaattaaacagcaacagtgaatgtgtacttgaatatatttacactagggtggtctggtaactaggaggggcccatcactatatatattttaatagtttttcattattagtccatttaaggttttcaagaaaccatattcttagcaagttacagatgataaacaatttttcatgtaataactaggttaaaagaaataggatgaactatgtttttgtaacaaaaatgctaaattttatttttagtgaaattgaaaatagtgcagcttgtagaagtaattctcaacatttcaaaacctcttcccaaagatatactttaatgactgcatttcgttttcagttaagaaaacaaaccagactcttgatgtggcagatgtctttgtttattccccaaaggggagttgggggagagttaaaaggaaactatggaaatccttttttaattcct

SEQ ID NO: 59007 - DNA, 1099 bp, Homo sapiens
ctgcaccaaatacagtgtttttccgtagtgtttttaatgagtgcacctattactactgtgcgagaattcatgttttaccagtcattgttatattacaaacagacttgcatgattaaccagttgttacacttactttttcaagttggagtatatatgactcagtgcagactggtctctcttatgtgaatgcacacatgcagaaatgcagagtcaattttacatgcccataaagacatttgtaaagaattcagctcttatggtctgttgtataaatgtgtatctaggcactttggaatttgacctcacagatgttacaacttgatcagtcgtttgacctaatttgtggtagctatctgtatgttttgcaatcttaatacagacatgctttccaaaaagattaatacagaaccatcctgccgttttggataagtctatccagctgtggaaagggcaacctgtggtttctctgtactggtgtttaatgggggaagaatatgaacagctttaaagagctgtgtattgtggttactactattaaaaaataagatctgcacgagtctgactggcctttgggtggcctttgtggacggctcgtagctggaaagtgttgatctgggttttctggcattcttttaagttaaaaagttaacatcgggacatgggtttgatcttttgttgtacctgatgacagtgcagagattctccacagctggataaaaatgtcacaaagctacttactgtacatgggcagtatcagatttcaaatcctaatatttcagctgtgcttttaatactcaaaatattaggggatggggtgttgaagctttcccttttttgcttttaacaatttatagaatttaacagatgtactgtctttcatgtggcctcacatttaaagttatgagaacatacacatggtttacaacttttactatatacctttccttggccaccaagtattttaaaagtgtgccaccttttaacctttactttttttaagttgaaggtgatactttttctatatatgatgaaactcatgtcaactgaagtgagtgtaatctcagataccaacattattatattttaaaatcacgctatg

SEQ ID NO: 59008 - DNA, 2676 bp, Homo sapiens
cagccgccgcccgtgaacggcatcctggtgcccaacggcttctccaagctagaggagccgcccgagctgaatcgccagagcccgaacccgcggcgcggccacgcggtgccgcccaccctggtgccgctcatgaacggctcggccacgccgctgcccaccgcgctcggcctcggcggccgcgctgccgcctccttagccgcggtgtccggaaccgcggccgccagcctgggctccgcgcagcccaccgatctgggcgcccacaagcggccggcatccgtgtcgagcagcgctgccgtggagcacgagcagcgtgaggcggcagccaaggagaaacaaccgccgccgcctgcgcaccggggcccggccgacagcctgtccaccgcggccggggccgccgagctgagcgcggaaggtgcgggcaagagccgcgggtctggagagcaggactgggtcaacaggcccaagaccgtgcgcgacacgctgctggcgctgcaccagcacggccactcggggcccttcgagagcaagtttaagaaggagccggccctgactgcaggcaggttgttgggtttcgaggccaacggggccaacgggtctaaagcaggtaggggcggctgtgaagtgagggggtctaggggagaaaaggggacggagagcagaggaagggtggttctttggattcaccattttaccccagcccagaaacaacaaacaccccacttcctgatctgcctgaggcggaaccagtgcttggtggcaacgtgttcatgtgctgaagcagcataacagagatgagtcagactgggctgatacgctctgacacggggttttcctttcccagcacattcttggatgggagcatgagggcaccagtcaccttttaacctattgggggacattagcagtcacatgttgagtgcaaacgagggtacttttgtgcatgtgtacaaacaggcagttacaagcgtgtcattttcagtggctccattttaaatcagtctgctgcctcagaatcccgtacgcctgaaggttttaagttgcatgtgcacctgaaactcgtatatgagtattttctgtctgtgcttttagagaggaggaattctgtaacgacttttgtttcgggttaggaagagaatgatctctttcagtgcaccgccacttatgttacctttttccttttatttctttgtgtttccagttgcaagaacagcaaggaaaaggaagccctctccagaaccagaaggtgaagtcgggccccctaagatcaacggagaggcccagccgtggctgtccacatccacagaggggctcaagatccccatgactcctacatcctcttttgtgtctccgccaccacccactgcctcacctcattccaaccggaccacaccgcctgaagcggcccagaatggccagtcccccatggcagccctgatcttagtagcagacaatgcagggggcagtcatgcctcaaaagatgccaaccaggttcactccactaccaggaggaatagcaacagtccgccctctccgtcctctatgaaccaaagaaggctgggccccagagaggtggggggccagggagcaggcaacacaggaggactggagccagtgcaccctgccagcctcccggactcctctctggcaaccagtgccccgctgtgctgcaccctctgccacgagcggctggaggacacccattttgtgcagtgcccgtccgtcccttcgcacaagttctgcttcccttgctccagacaaagcatcaaacagcagggagctagtggagaggtctattgtcccagtggggaaaaatgccctcttgtgggctccaatgtcccctgggcctttatgcaaggggaaattgcaaccatccttgctggagatgtgaaagtgaaaaaagagagagactcgtgacttttccggtttcagaaaaacccaatgattacccttaattaaaactgcttgaattgtatatatatctccatatatatatatatccaagacaagggaaatgtagacttcataaacatggctgtataattttgattttttttgaatacattgtgtttctatattttttttgacgacaaaaggtatgtacttataaagacatttttttcttttgttaacgttattagcatatctttgtgctttattatcctggtgacagttaccgttctatgtaggctgtgacttgcgctgcttttttagagcacttggcaaatcagaaatgcttctagctgtatttgtatgcacttattttaaaaagaaaaaaaaagccaaatacattttctgacattgtaagattgccttactgtctgtcattccttattgctggcccctttctcaggccggaggccaagtggtggagaaggaaaggaaatgatcgaacgggcatgttgtcaagtgggcatgccactgggaaataccaccagtttaccctgaaacattgtcctcagaggagtaggaaagtggattttgaatctctattttgctcaaaagttcagttcctgagatactgatgactgagagtgctgctgggaaattttcaggattgtgtggtcttttggggttttttgtttttttttttttaagacaaagttgaccgctgttcactgtccacgtgatcagttgtaagattacaatgctgcatgctagttggttacataagataca

SEQ ID NO: 59009 - DNA, 3195 bp, Homo sapiens
ttggtagttgagcagctctgggggaataagggcaaatatgcttgttatgaactacactgaaatctaccaaagttaatgtttactttgtgtagatccatttgtctattttatttatttttcccagtgaaaagtgtattttgatagagaacttttcattctataaatacactatgagttactaaaatatcatggattttgtttattcctgaaacatagttacatagttaaactgtacatatgacatggcttatgttaaaaatacccagtgctcagttttgaaagataggcaaaaaaaaaaaagtataggagaaactgaagaatgtacacttttttagagggcacattttgctgtaaatctggaaatttgatagacttgactgtgtttgtgaaaactgagcattaaaggttttgattgatcctttctttccatttaatctctgagacgtaaatatgtgaggtgtgctgctgtgctgggttaacagcttccttccctttctgtgtagcagtcttgaaatgttctgtttaaatcagtaggcttaatgtgttctgggtatttatctccttgtattttaaatatatgtagttgcaaatagcaccaggaattagatttctgtacacccctaatctagccttgtgagcttcgctagttaatgtgtgctcactttccctccatttgttacgtgagagaatgcgtctgctgatcactgaagtgtcccttttagcttctgattcattgggttctgttgggcatctttaaatccaccttaacctgaggaatgtatgtgggcaaccaggccctgcatttttttatattctgaattttgcatgcttgcctgacttagtatttctgaattgatgttttttttaatggtataactatcttgattttcactgaaattatatggttctgtcactactctgtaaattaatccgaaacttttaaggtaactgggatgatctgcttgtaaaaatgcttgttgccttttgctttatcttcagtgtacctccttaatcctgcttcaacttgattatcttgtgaaacgatgagagtaagttgcaaccttgtgactgaaaacttgaaaagagtggagcaggtgggacctcttattctcaaatagtgacatattctccgtagtcacagtttcagaactgagtaaggatccttggtacttggtggcatctgttgaactgaggagcatttctcattgtaaagattgcctttgttctgtctaaaagtctggagaaatcccaaagacttttcctatgtactaggcattttattttgattgacttacaaactcttcttaatcattatcaatctcggtttttttgtggtgcagtggaaggagaaataggtctagtttctgcctctgattagccgcacagccttgaacaaatcacatttcatctttgaacttacctctactgttagactaggcgactcacatttgaggacttttctcgggtatcttgagggtttgtgatcctgaacccttaaacagtgcttttttgttacacaggagggcttttttggggggatgaccagtacagacatgccagttagttttactagtgggatcccaaatccaaagcagtgtagtggtgattggtcagtgactaaccaggcagctaagaagtcttaggcagcagcccagacatgtatagaggggcagttagagggagaacaggggtgggaaagggagcaaggggcagatagctcagcaaggaaagaatgggctcagaaaaaggagggctggctggaggagtgaggggcagcttaagtttggggagggtagaaacgccgtttccttgggaactggagtgcagtatgagctgggtgtcacttggctctgaacatactggctttgctgtaatgcttgaaaaggcgttggtatcttcattttacagttcattaacccaagtacgttttcttatttaaatgacaactttggtgctttaaaatgaggtaccactttttaaagctagctgtgtcgagttaaagaaaaaatcagcagttttttctcccagaaatgtaattgccaaacactattcatccccatcttaagttttacaaggtgatgtaatcagcttgttgtagtgatgctggccaaatggtgctcagcaggtgagaacaaaaaaaccccagatctcagtgaactaatacacagcttgagcgtttccatgtgctaatgttgcacacttactaaaaaactttggaaatggaaaataatgtattagtgcaacagttgatgtgcttctttgggcaaagatatagttttgttccacaatttgtacttaaaagcgaaagaacattgaaaacatagacttactggctgtagcaatgctggcctgttaactgataactagaacttaggttcacgtttatgtaaagtgtgtaaaacctagtagagcttgcatagtcggcactcagtaaatgtttggttccttttgccccttggtaagtttattttaccatcctcccacctgccattctgactttattaaatcaacatgtggaccagagtgttaatgagatgttattgcagaagagattgagaaaattggtatatcatgcagataacatacaaaatctttttgtaacgtaaaaaatgcagttttattattgcttgtgcctcaactgtttaagtgaatattaaagggcttggagaaaactttggcttggcgtatgtttggagaagtgaactctgctgaatttattgagtctaaagctgtgggttttttgttgttaacgtctttgaggatgtctagggccgcaggcttccctgccagaagaatgcacatttgcttcagattccaggtgaagaaaatccctgtggtagtgtcagcgcctgagggcttccaggtggtggtgggcccagcgtcaggagatagcagtcacctgggaggcccgttacaacaggttcgtgagaggagcccagtggtggtggtgctgacgtgcgaaacatgaaggcttgttagagaaaccagctgtgttaaggtgacagaatgtgtacgttagcactgtaaaaagcagctaattggtagcagaacgtgctagctgagaatacgttgtattctacatcactgataatgatctgaagtgtacaagtcatcagtatcagatctatgagagtttttgtagttttgctctaacataaatttctctttgccacctccaaagttattatattaata

SEQ ID NO: 59010 - DNA, 1222 bp, Homo sapiens
aaaggccaaggcttttcaggttacatgtaattttatgtaaatcttacaggtgaatatgagaagggcgtagaccatctgacaaatgcaattgctgtgtgtggacagccacagcagttactgcaggtcttacagcaaactcttccaccaccagtgttccagatgcttctgactaagctcccaacaattagtcaggtaaggaattggaatgttatgacataaaagtgagtgggatttagaatcgaatgattagggacattttaaaatgagcctagtgaacatgatgaaataaacttatctgtataatgaaaacaatatgggagatatcagcgcttgacattttcctctctggtgggaaacatccagatgactgcccagatctagtgattgtgccctggaggtggatcaggaagtgtgtgtcttagtgataagtctcaggtcttagtagtcaactgtccaaattcaggtcactcttggctactttctacaagtagctttctgcctactcttccaggagaccatgccttcagttaggtgatctgacagaggagcctagatagctatagcctacacattcgggcctaaacgtcggttctagacattcaagagcatggattccctctgactcacttgtgtaaaggctcatgcctctgctgctgctgaggtgcactttgagtttggagctatttgacgacatccccaaatccctactcaaaaatgcaaaatagcattaatatactgtaaaagattaacttatgtgtaaattaggagttaatgaaaatgctttctcttcattttgagttcttttcaaggagcccaaatgaatcttgctttttggaatagcgtgtctgttacaagtgttgatttcccaagttggtgtgattaaaacagtgaatgatgataggaagtatttacagaactttatagttagtaactgactggttaatttttcaaactgatttttactcaactgaattagaaaaggactggaaagaaagtaaagatcccaacgacttgagggaacaagttggacaaccaaggactttgtctaaattgtttttatttagactaatgtggttctagttctagaggattcatactggaatcatcggtttaatattacgctatttgaaaggcagcatagtatagtacttttggaaaattggcctgagggtgatgtcttttggaatatttgtgaattcactatgaagcctaattccttaaa

SEQ ID NO: 59011 - DNA, 1577 bp, Homo sapiens
tcaagttttttcttttattcatttgaatgtagatgaactcttaattcctacaagtattcaggagtaaagttcttctatcagatttttttagaatgagtgatttggttttttgttgttttatttttattgatatctgtgtattggttatatcccctggcataattgtggtgtcatttattaaatattttatttccagttacctgaccttaaagatgctgaagctgttcagaagttcttccttgaagaaatacagcttggtgaagagttactagctcaaggtaatagtcattgaaaagctaaggaaatgggtagaatttttctcactgatagaaatttataatgataaggggctttgtttgtgtaatttggctgttagaaaaggtactccaagtatctcaagacaagtttttaggcacttaataattggaagattattttgtgtaagactggctctagaaagaaatattccttgtgggatattgttgtccataatatattttaagtgagttttaggttttcttgctatatcatatgatgtagaagatagtaagtttttacaaatgaggttctcttactctgaagtagtttctaatgtatagccatagtgcgatatgtaaatagtaactgaaggaatgtgagctaggaatatactcctcaactccttcatctaatcttcagatcttttccagtatttataggaaggaatggctaatgtaaggtcccagagaaggttaatttacctaatcaaggtcacacggtgagttcatgaccccttatttcagaaccaacttgttatctgatccagaatttagccttttcattacattgtacttcatttatttcatcaacagtgctaagaagtttctaaaaaatattctatctttaaagttcagctatgaaattgaaattatcaaattgacaaacgtgagaaccgtaatttactcaataatctcaaaagtagatttgaagtagttgctatcgttattaaaactgctatcaaatattttaaaattctgattgctgtatcaatagatttagatagaattgaactacatgatgtggggcatttgtgtgtgaatgagtttgttttgttgtttcttttatggggagagtttaattcatttaaaatggtggtaactaactttatcacgtctcccctttgccaagaaatacttttttgatatcaatagaattgctcaattaatttgacctaaagagtcacagtactcaaattgccaacagactgggaaggggtaaaaatcagtgagtagggacaggcatggtggctcatgcctgtattcccagcactttggggaactgaggcaggaggattgctggaagccaggagttcgagaccagcatcgataacaaagtgagaccctcatctctacagtaaatgagaaaataaaccaggtgcagtagtatgcacctgtagccagctactcagagactgaagtaggaggataccttgaacccaggagtttgaggctctagtgagctgtgatggtgccactgcatttcagtctgggcaacagaatgatatgctgtctcttaaaaactatatacataaaatctgt

SEQ ID NO: 59012 - DNA, 2068 bp, Homo sapiens
agtgagagatttgcctaagatcacccagctaataagtattagctaataataagtattggagccttacattttcttaactatgtcagcagttactctctatgtcattggtagtttttagtgattatcactttaggtgtagtcctgcatcagtatccttgagtgactggttccaggcctcccctggataccaaattctgatgatgctcaagtacctttaagtggtatagtattttcatgtaaccatcatatgcctcctgtacactttagattttttctttcatttaagaatgccagtttgcaacattcagtaaagatataatctggcatatttcagtaataaaactccctaatactagtggcctaattcttgcccctgttacatatcctttgttggttggaaggggggacttgatctgcttattgtaattactttagaagtccagctattggagctatctccatcttgcaaattgctagatcttctgccccaaagggaaggagaacgctccagtgcagtgtcacatttcctacagctcattgaccagaacatgtcatatgctcttgacagatcacagggagggatagattcctagagttagaaatgttttgcaaatggaattaatgactgccacagcagttagaattcttttgattcccatttttataatgacaaaatgtaaatataactttgcatttcttgcaggaagaaagaaacagaagcttgccaaggagagagctgggctttccaaggtaatagtctggtttctgtttaaattatatattttgtagaaatattattttaaaatctgtaattggaaatgtaattaaaatgtaattggaaaaagctagttgatactggacattgcttttttattttaaaatacagcttatttttaggagtaggtgaataatgtagttccaatgacagttatcgagtccttcattatttcttttgctggccataacaacaaacagcttactgtatgaacaataattaaggagcaagatgagggcctcaagacatttgcaccaaaagatgaaaagttcctaatcagctgcttcaaaatgatacaatattacacttaagatttaatttctttactccaacttcctgtaaaagaaccatgggttattatttcaaaaattattcaagattattcaagcccactgatccagaatcccactgccctgacaaatttttgccttgttgcagtacatagttctggatataaaacttgtaatttattttttcttctcatagatcctgagttcttgattatttttaatgactatgtaggtttatctacttggtaaaaaaatgttctgtggcgtgtgtaagtaaattaagtaaatgttaatcattgtgcttgcagcttttcctttttattgagatgagttctattgtttgggttcttaggacttggattactggatcattagtggttctttttaaagcaagttgagacaaggaaaaattaagttaaccagtatattttgttattttgaaacagttgtgtaaacacagctagttgactggacatggtaatagtgaagtgaaaatgggaggaaactacttcgttctagtaggatcagactacctttctgaagtatgtaatatgtttattatgcttttggtaacttatatttctaagggcataggaaaacagattgagacatgcaccagtatgtatttttagattcaagaatagaattaaattattgctacatgctggggtagtgtgtgaaagatgtctccactttcagaaatttaaattgtttcacttgtgttggctaggttaataagagtacgtacagtgtaattcaaggaccaaaaacttgcactaatggaagtttaggttttctcttttttttttttttgagatggagtctcactctgtcaccaggctggagtgcagtggtgtgatcttggctcactgcaacctctgcctcccaggttcaagcgattctcctgcctcagcctcccgagcagctgggactacaggtgcatgtcaccatgcccagctaatttttgtattttagtagagatggcgtttcactgtgttggcca

SEQ ID NO: 59013 - DNA, 2025 bp, Homo sapiens
cttcaattgtgtatatttttcaagaaattactccatttaattttattccagttatcataaaatgaggctatcctgtaacattcttttgaaatggaaccactacgcacaatggattgtggcaacctgaaaagaaagtacagtttaattcaaacaagtcacaggctgcctgtgttagacaagatgaagcattcgcagtctgggaccctgcatctctgtctgccacaaacaaggctgtcagctagtcttctgagtacgtgcacgccagtaacgcgtacgcctcgttacagcatggtcggcggatatgaaaaaaagtccgtggtcacgtgcaaattcccgactccagtgcgtacacccagcggcgcaggggaaacgccggcttcgcccactgcgcaggcgcaggagccgcgctctgggcctctgctcaggctctgccgcggacgacctcgaggcccttagttgactgggaccggaagtggcgtgtgctcggcctttctgtgttcctggcccgcggccgtcgggtgtgagctgcgccgaccgctctgagggttcgtggcccaccgctccttcgcggtccctgccgccaccgtccacgctcagcgttgtagagaagatggtgggtcggaacagcgccatcgccgccggtgtatgcggggcccttttcattgggtactgcatctacttcgaccgcaaaagacgaagtgaccccaacttcaagaacaggcttcgagaacgtgagtgggtcctctctcccctggccaggcttgctgccttcggccgccgcccttcacaggaggggtcattgcctcccaccagcctgtgggccgcgcagggcgaccgcgtggtgcggccctcaataggcgatggcgctggctgcgccgctccgggggctctagtgccccgtaggaattccattttggaggaaggatttttcccgttttgttttccccagacactttagccgtgcaaatgcactcttgatttctgttgcaatctcgggtgtgtgtggcctggggaggaggttgtctctttttttgtcgttcatctttttaaacctctactcttaactaaaaagtcgtgcatttttgtcgcaaattttagtctgaggctaaatccgcatgctcagtgcagtatcattgttgcattcttttttttgagacggaatctcgctctgtcgcccaggctgtagtgcagtggcgcgatctcggctcactgcaacctccgcctcccgagttcaagcgcttctcctgcctcagtctccccagtagctgggattacagtcgggcgtcaccacgcccggtgattttttgtgtttagtagagacggggtttcaccgtgttggtcaggctagtctcgaactcctgacctcagatgatccgcctggctcattgctgcattcttaaaccctcttggtagcttcgttctaagtgcttccaagatatgagtgaatgctatagaaattgcaggggagtccaaagggctgcgcttctcccgtggctcagtcttatttcatacctgcgacatcttttaagagaggtctaccagaggggaatcgtgtcatgaaaaccgttgtgatccaccttgaattttcggagaatcttcattcgcatcattgaagagcaaatttgttgcaataagaaatattttttggcttatcttggttgttcagccaaattagtttttggaattaaaattgatacgtaagttactaaagcccaaggggtacaaagaagggattattgtttacttaagtaacagtggttacggtttaattcagctatactaagtcatttcaagtgttcagtagccctgtgtgagcagtgactgcagcgctgatcttactagcactaagaatcagacatctagttccagctttcttatgttttaggagggaagggatatagacataatttgatttatgactaggcagactaatagaatactgttttacattcagaccttgaatttctagggccaggttagcggcataatttggggtttctgaatcctaatttctgtagttgtaaa

SEQ ID NO: 59014 - DNA, 1061 bp, Homo sapiens
acctgggattggatggggcttatctgtgcaagcttgaaagtcgttctcatctgttaaagtgacactttcactagtttctttgcagatgggtttctggtagcaattaatgtattgtgttttcttttgcagaatacagattctgttcatcttgctctgaaattaaataattctgaactcatggggagaaaactcagagtcatgcgttctgttaataaagaaaaatttaaacaacaaaattcaaatccacgattgaagaatgtcagtaaacctaagcagggacttaattttacttccaaaactgcagaaggacatcctaaaagcttatttattggagaaaaagctgttctccttaaaacgaagaagaaaggacagaagaaaagtggacgccctaagaaacagagaaaacagaaataacaaccaggaactgctttttcttttcctgctgagtactgctaataaaagtgctattatctgctgatagcatcgtctgctattcatgtgttgagttttatacttctttatggatggtgtatgtgaaatgtggagacttccacattctcagtttattcacattgtgatactacctttgaaggtttttttgtttttgttttgttttttgagatggagtttggctgttgtctcccaggctggagtgcagtggcgtgatcttggctcactgcaacctctgccttctgggttcaagcgcttctcctgcctcagcctcccaagtagctgggattacaggcgcctgccaccacgcctggctaattttttgtatttttagtagagacggggtttcaccatgttggccaggctggtctcgaactcctgacctcaggtgatccacctgccttggcctctcaaagtgctgggattacaggcgtgagtcactgcacccaagcctcctttctcttttgcctattaaacctctgctcttaaccttactccgtgtgtgctcaagttcttgatttccttggcatgaagcaatgaaccttgggtattaccccaaacgatgtcgcttcagtatctcactttgttgcccaggctgctctcaaactgct

SEQ ID NO: 59015 - DNA, 2113 bp, Homo sapiens
aggacttctgtttcaggcccagcccacgctgagctctagtgttttagtgagatcatggctggaatctttcctgcttgtctggtgcccagcattttgcccctgtgctcggccatcgtagagccagaagagccagtgcttcctctgtctctcattggaggaagcaggcctgtccttagcttctagctgctggctttccccaagacttcagctctgtgatggctgcaacaaaagttatgatgctgtgggttatctggtttcttcttaactggtaagagcaggagtgatgcactttctggctttttacattctaggtggaagcggaactccagcatttgttcctgggggtgcactaggatgtgttggatttggatgttgtcggcagctgtgtgttgtgtgaagagcagggctctagagtcagctagacttggtttcagtcctaggccagccacttgttgccatttcatcgcagtcacgtacctcttccagtctcagcttccttattcataaaatcagaaaaaaaacaccgtgttggagatgtgagattaaatgaaatacataaaatgtctagctgagtgtctggtatatattaggcattcagtaaatcacagctggtttaatcaatacaaaagcattagtatagtgtattattacagaatgccatcagtcatgtcaggcactattttccagttcccttcttgatgatactcatttgtgtagtagcatttttcttacttcaaaacagtaggttgatgtcttcagggaaagatctgtgttcattactaggtcctttttgctaactcctcacatccaaattatatcaccattttgcaaacctagtgacttaatgagtttaggcatttagtagcagcagctgcagtcattgacaaaagggtaaaaaccagtcataacatgactccctggaaagaacacaacacccaccagcagtcgcgacaaaggggtcatgtctgagtctgatccatccttttgatgcagctgccagtttacaagaaatatagaggacaaaggtttgtgttaaactacttgatgagcttgcagtcacaaaatccaggctgtggggaattctgcaggccaaatagtgagagataaagagatacagagaaaactctgtaaattaaacaagattcaaaagacatatcaggtcaaaagtatagacaagaccaaagtatgatgtctaagaatagacacttggttgataaaaccacaaagatgtgcagggaagtagttcctataaaaatgggaatggtggttgcctttggagggaaggaggggctgcaacgggaaagggccacagagaggcttctgagtgggctacaaggcacgttgagctgttgttaattcactcagctatacgtagtttgtgcactcttctatatgggtgtttcacagtaaagaggaaaactcacgtctttcacaactgtttatatgtgtgttagatacggactgcagctaagatgtcagtttttagttcttgtatggttctcagggattcatatacatggttcatctgttttctcatggttatgattcctaagaaagtatgggttgtgtctccactaatatctttataagttgtgtgttattttttgagttattactaaatatttattcaaagagatgaaatgtccacccaggaattcttgtcatgtgtgttaagagttgaaaacagctagatttttttctagtgactttgaggctaagaaatttaccttgtctctcttttctttctttctttttttttttttggtgtagacgtaaaattcatcctgatcagaaaaatattaatgcctatgttgtgtttaaggaggagagtgctgccacgcaagcattgaaaaggtaattttatcccttaggtttgaacagaataattgtcctataagtatgtatgagtactttttttattctttggtttcactttagcatagatgttttagtaatcgagtgctcatttttaacaaccattttccctttgtatttataatacagaaatggggcccagattgcagatggatttcgtattagagttgatctcgcatctgagacctcatctgtaagtagtacttgatttgtttaaagaacgagagctttgtagaga

SEQ ID NO: 59016 - DNA, 1061 bp, Homo sapiens
gtttcaccatgttatccagactggtctcaaactcgtgacctcaggtgattcgcctgcctcagcctcccaaagtgctgggattacaggtgtgagtcactgcacttagcctttttcatgtttctaattgctctttctcatgtgattctctggaatagagtttctcaacctccatacagttgacattttgggctggataattctttgttgttggaggctgccctttgtattataggatgtttagtaacatccatggtctttacccactagatgctggtagcacctcctgcacctcagttttcacaatggaaaatatcttcaggaattgccaaatgttagaggaggcacaactgcccacttctatagaagtagacgttacccaaagctttgacagtgcccataatttctgtcagggtatttatttcccactcttatcacatatcttttgtctgcccttctgagttccatttccctgtattagacctttggctgatgcattagtgtgggtgtcttgccagaccctgatttcaatatatctgcttacttccatccattctcaccccaaccctatgctgcctactgatttttctgtggtatttagtggcacccaggctgcaggttttgtggttgcctttgactcttcattggctcacccatgctagtgtttgccactcctgtccgtttttcaactgtgatttcttcctaatatgagtcattcctttcttttttccttgtcctacctaagttctcattacctcctgtcagaatagtcgcagaggcctattgtagttccttaccttcagtcttcctctaatttgtccaacaaaacactgtgaactcagtcttcctgaagctcttcttcccggaacccttacctctttccctgccttgcattaatgaaacgcccttccccccatccccccagccgccacacacacacccctcacggggcctgctattgccttctcccctttggggagcctaccttgattctccccagtctctaggctaccagtgtgtccctgctatgcatttgacagcacccatccctcattacagtactt

SEQ ID NO: 59017 - DNA, 1042 bp, Homo sapiens
cacaagtttcagtaaaatttttttgttcatccaactgaatagtcacctactttcctgaaatgttcttaaaaactggcagtaggccgggtgcggtggctcatgcctgtaatcccagcacttgaagaggctgatgtggttgcatcacctgaggtcaggagtttgagaccagactggccaacatggcgaaaccccgtctctactaaaaatacgaaaattagctgagcatggtggcgggcgcctgtaatcccagctacttgggaggctgaggtatgagaatcacttgaagccgtgggggcggaggttgcagtgagctgagatcacaccactgcactccagcctgggcgaaagtgcaagactctgtctcaaaaaaaaaaaaaaaagcctggcagtagaggattatcagacaatttttcttaattcctttttgtagcacttatttgatgttctgaaggtcagctaatgtgtatttttttttttaattttagaagctgaagtcgttttttaaagagtatggacaaatagaatctgtacgatttcgttctctggtatgtttcattcccccgtaaaattacataatattaaaatttattgcatttaaatcagatgaacttattgctgttagtgagatggtgaagcactttaaccttttgaatcaataggttcaaatttaacccaagaaaagagttgctcttactatctactgctgactcttgaactttttaaataatgtattgagtttacttaataaaatgatactcttgctatgaaagcctgcaatgtactttggagggtggatgggtgacttatttactgtgtcagcagaatagactgaaaagttaatactgattatcattgctggaatcctaggcattctcttcctatgtcccatcatacacattagtatgggaggtgggtatgattgctgcaaacagtctttgttctctgagcacagacagataaagaatttatgtcaatttaatattaaaactttatagaagtgagttggattttaccagctcagcactctgaaccagttatagcc

SEQ ID NO: 59018 - DNA, 1045 bp, Homo sapiens
gtgctggcgaagcggtggtgcgtggcgtggctgagtttctgtcgtccatttctagagagaatcctgacgacggcgttcgcgggagtccgccggaagactacaggcttggacaggtcgccagtagcttatttcgcggcgaacaccattccagaggtggcaccggtcggctggcgtccctcttcagttctctggagccccagattcaacccgtgtacgtgcctgtgcctaaagtaagtcactgggctttcttcccgaatagctcgttagaaccacttacatacaaagcaatcttcttacctaccgcgtgaagcgtgatttctaaagggggcagacaggattcattttaagtaacctttcatgactcttacataccagtgagagagaagagattctcatttagaaagactgaattatggcttagggtcagaattctagaagtatggggtctcaaatataacttcaaacttttaaaaagcaaaccatcaaaaaaacgaaacggaatgaggaggaagaaagtacatcccagattgaaagaccactttcgcaagaacctgccaaaaaagtgaaagcgaagaagaaacacactaacgcagaaaaaaagttggcagacaggttggtaaaattctcttatttgatgttaaagaaattagatggtaaattaacattcctatacttggaatattcgtcagttttatttcatatttctactttctttcaaaacttttattatggaaaatccagtacatatagaaaagttgaaaaggctaagaaaccccgtgtactcagcatcagcaattactaatatttggctaacctttttgtatttttaccccactcatataccccctcattatttgtttttgtttgttttgagatggagtcttgatgccacgcccaggctgcagtagagtgcagtgatctcagctcactgcaacctccgcttcccaggttcaagcgattctcctgcctcggccctgagtaggtgggactacaggcctgcgtcaccatgcccagctaatttttgtatttttagtggagacagggt

SEQ ID NO: 59019 - DNA, 1604 bp, Homo sapiens
ctgcactccagcctgggcgacagacagagcgagactttgtctcaaaaaacaaacaaacaaaaaaaaacgaaaaaaggaaacagtgagagacttcctctgatgaaaataactaatgtgttatttgctttgtaaacctagtggcggagaatgcaacagttgagctatgcactgttttgatccaacttgaagaagcaattaagcctcccactcttgtcaccatttacatgtacaagaaaactcctaagtacagaaagatggagggattaggaggggacaaatgatttttggatggattgcagatttttcctgttttgatacttgtttcactgttacaaaaagtgtattctgtattttatttctgtgtcttgtagactaggcacagttctttccctctttgacccacgcaggagccttccctggtctgtccttttcattacttctgtagttgggcactgtctagcttcttgagctacactagcttttcctttcttcacatcgtagaactgtgagaattgaccactgttgttgtaagctaaatgattttggacaatatagcggaattttagttcagaggactagtattttctgtctattgttagacataaatttttattaagctcttggtttggtctcccttttccttaggtgctgctacatcctcatcctcctcttcaccttcatccagttccataacagctgctgttatgttaactttagctgaaccgtcaatgtccagcgcatcacaaaatggaatgtcagttgagtgcaggtgacagcaggacttgctaaagcactttgcacttaatggctgttgagggccactttttttttatactgcacagtggcacaaaaaaatatcagacaagcactattttatatttaaaaattgtttcttgacaagctgacttggcacttaagtgcacttttttatgaagaaaaagtacaatgaactgcttttcctcaagcaataattgtttccaacttgtctgggaattgtgtgtctggtaactggaaggccttccactgtggcaaatggaggcttttcactgcctgtagagacaatacagtaagcatagttaaggggtgggtcagaacatgttaagataacttactgtatatgtattcccttgtattttgttaaagctggaacatttgatatttttccatttatttatgaaaaaatatgaacctattttcatttgtacaaggtaattgttttttaaagcaagtcaccttagggtggctttaattgtataagtcaagcacatgtaataaattcaaaacctgcagttaacaggatattagacatcaatcctggtaaccaaatattaaagattctctttaaaaaagactgaacatgtttacaggtttgaattaggctaaaaggtcttgcagtggcttttcatggcccttcaaattggaatggaactactgtactttgccatttttctataaatcagtatttttttttaattttgatatacattgtgtgaaaaaagaaaatggctaataaactgtattaaatcttaaacaatgtataaagattgtacttagccagttcaaagtgtatatttattcataatgaattataacagttatatttt

SEQ ID NO: 59020 - DNA, 1077 bp, Homo sapiens
gtgtacaatttagcattttggtgtctttccaggttttttgttttgttttgtttttgtgtttttgttatttttagacagagtctcactctgttgcccaggctagcgtgcagtggcacaatctcggctcactccaacctccaccttccagattcaagcgattatcctgccccagcctcccgagtagctgggattgcaggcacccgccaccatgcccagctaatttttgtagttttagtagagacagggtttcaccatcttggccaggctggtatcgaactcctgacctcgtgatccgcccacctcggcctcccaaagtgctaggattacaggtgtgagccaccgtgcccagccccagttttatttttaagtgtgattttttactgtggtaatactgtatatggatgtggatatatgtagatcttaaggtgtttaatgctgtacatattcattcaacaaatactgtgcatttattatgtgccaggcattgttctaggctagataaaaaatttggaaaacaaatatttcagaagccttagttttttagttcatctgcctcaaccttattcagcagccatgctcgatgttctctcctttttgtatgttaaaattttctttaaaaatgtctgttaatgaaagctttaaatttatagcggacctggaaaatatgacaagtgccgaacgcatcacaattcttcaagaaaaacttcaagaaatcagaaaacattatctgtcattaaaatctgaagtagcttccattgatcggaggagaaagcgtttaaagaagaaagagagagaaagtaagtatttttactttatttttatttatttatttattttgagacagagtttcactcttgtcgccaggctggagtgcaatggcgcaatctcggctcactgcaacctccacctcctgggttcaaacagttctcctacctcagcttcctaagtagctggaattacaggcatgcaccaccaagcccggctaattttgtattttttaggtagagacagggtttcgccatgtcaatcaggctggtctctaactcctgacctcaggtgatctacctgtcttggcct

SEQ ID NO: 59021 - DNA, 1694 bp, Homo sapiens
gccattcagatgattactgtatatttgacagtctaccaagcataatgatagattagtgtgagtgattttaaaagtatacatattattggcagttcaggtaagaagaattttttgtttttgcttttcctaagatgctgctgcatttgtatatgattttccaggtttctaggcaggttgttttctgtaggactaaattcaaatggctaattttaaattacctactaaaatctgtgacaaatttattgttacatttttgtttattaaatcttttctttctctttcagcaaatagtagtgatagtgaagaactttcagctggtgaaagtataactaagagtcagccagtcaaatcagtttccactggaatgaagtctcatagtaccaaatctcccgcaaggacgcagtctccaggaaaatgtggaaagaatggtgataaggatcctgatctcaaggaacccagtaatcgattacccaaagtttacaaatggagttttcagatgtgtaagtgacatgttaaattgacaagcatacaaacttcatcctagtaactctttttgttttattttgtttttgtttttagagacagagtctcgctctgtcaccaggctggagtgcggtggtgcgatcttggctcactgtaatcttcagcctcctgggttcaagccatcctcctgcctcagcctcccaagtagctgggattacaggcacgcgccaccacacccagctaatttttttgtgtgtttagtagagacagggtttcaccatgttggccaggatggtctccatctcctgacctcatgatccgcccgcctcggcctcccaaagtgctgggattacaggcatgagccactgcgcctggcctttttttttgagacagagtctctctgtcgcccaggctagagtgcagtgcagtggcatagtctctgctcactgcaacctccatctccctggttcaaatgattctcctgcctcaacctcccgagtagttgggattacagacgcccaccaccacacctggctaatttttttgttgttgttgtatttttagtagacatggggtttcaccatgttggccaggctggccttgaactcctgacctcaggtgatccatccgcctctgcctcgcaaagtgctgggattttgggcatgagccaccatgcccagccccaatcctagtaactcttcatgccaatactctgaaaaagaggctttaccaaacttaatagatgtactaatgtacaatgtatagaccttatttggatcccggtttgaataaataaattggttaaagaaaaattttaaggcagttgaggcaaatgccaacactgactagatatttctgatatggctgggcgcagtggctcatgcctgtaatcccagcactttgggaggctgaggtgggtggatcacgaggtcaggagttcgagaccagcctgaccagcatggtgaaaccctgtctctactaataaaacaaaaaattagctgcgcgtggtggcacgcgcttgtagtcccagctactcaggaggctgaggcaggagaattgcttgcacctggcaggtggaggttgcagtgagccgaggttgcgccactgcactccagcctgggcgacagagtgagaccccatcccagaaaaaaaaaaaaagatacttctgatatgatgtcggtaatttgatttaaaagtatctggtgttaggg

SEQ ID NO: 59022 - DNA, 1778 bp, Homo sapiens
atgctcagggaggaggaagttcatcaaaaaagcagaaaagaagccataaagcaacagtggtaaacaacaaaaagaagggaaaaggcagtaagtgtgaaatctctaatttttaaaatataaaaataatagctgataattttacccccagtaagaaaatggtattcagggtatgggatagtacactattttgattttgtctgtacactcaaaaaaagtcacacaaattctgtaaggctacttgctttaaaaaacaaaatagacaaaaaaaaaacatgcactaggacaaatacctaatgtaaatgatgagttgatgggtgcagcaaaccaacatggcacatgtatacctatgtaacaaacctgcacattgtgcacacgtaccctagaacttaaagtataataataaaaagaaaaaagaatttctgcaaaaacaaacaaaacaaaacaaaaaaaacacaggttttctaatcttaggtaaattctagttttaagcaagttggtgttattcagcggtggtattgattgctgatgaaaaatcaagtaatctgtttttgaaataatagccaatatattataaacatcaacatatttgttacctttgtattccacagttcttttcacttgctataaaatgtatcacacattgtgaaatatttcaactacatgttatttttattacagtgaaattgattgcttagtaattcttcaaggcaaaatcagcatagaagtataacaatcaagataactttagaactataattccaacaactccagtctacaacatttgtctttggtactctatattatgtgacctgagagtaactacaaacaatactttttgctaagtatgctccaactttagcaacgactccgtgcatcaatccacagaaaatatatatactgtatttcttctgagggctgcacattttatctctcttttgtagacaaagtaagaagcagaaaatatgtaaagaattttttttcaggtgccccacactgacctcctgctgctcttccaggagactcctgccacctccactgcctgacctttgctagcagccggcttggctgcacttcagtgcagaaaagggttattcggccagctccccgaggttctgctgagcccatatgacttccaggcggtgaatatggcgtccctggggccccgggcggctgtgctcagcaaggccatgaaagccaggctgagacagtccactgcatagagtggggccaagccttgggtggcttagctaggagttgccaggggttccagagcagcagtgggggagctgggagggaatttgtgtatatgtgtcaaccagtggtggagtttctttattcccaaaatttcacagtgggaggagttgctgctatctacctttactatttggaataatttctggctttgagagtttaactcctttttttttttttttttttttttttttttttggtgatgttgttaagtgaaaaatcagtaaatatatgccaaatcagtcagtcatcaattgtttggtgtaactggtaggatatttaaagtgttttttctttcactgtgatgtttttgtcttcaagagtttactatttaaatgacatttcctaagagagcgcatcttcaatgagttatttagtatattcatataatacagagatatagtgttctcccattttacttattgggattctgccatggtaaatcagaatgagttaaccattcaagagaataatttagtaacatgaattaattctgatggaatctaaactaatactttgtatccaga

SEQ ID NO: 59023 - DNA, 1780 bp, Homo sapiens
agcttggatgacaaagtgagactcaaaaaaaaaaaaagaagaatattaacttggaggtagcacaatctgggattatatcctgactccactattttctcagatatattatgataaaaatattatacttatataaacttggagaagcttttttcttttttatttcagctttattaaggtacagtttacataaaagtgatgacttttatgtttaaaatgtgatgggttttgacaaaagtatacagtgttacaaccatcaccgtgatcgtaatagaacatttccatcattggaagagcctcttagcctctttgaaacccagtttctttgcatgttacatagagataaaagccagcaacctcgggtggctgtatacacaggacctaatatatacagtccctggcacatagaagacattgctagtgttcttatcatactcatcatttttttttctgttattttctagcttctgaaagttctgctgaagacagtgagcaggaagatgagagaggtgctcaagacatggataataatggcaaagaggaatctaagattgatcatttgaccaacaacagaaatgatcttatttcaaaggaggaacagaacagttcatctttgctagaagaaaacaaagttcatgcagatttggtaatatccaaaccagtgtcaaaatctccagaaagattaaggaaagatatagaagtattatccgaagatactgattatgaagaagatgaagtcacaaaaaagagaaaggatgtcaagaaggacacaacagataaatcttcaaaaccacaaataaaacgtggtaaaagaaggtattgcaatacagaagagtgtctaaaaactggatcacctggcaaaaaggaagagaaggccaagaacaaagaatcactttgcatggaaaacagtagcaacagctcttcagatgaagatgaagaagaaacaaaagcaaagatgacaccaactaagaaatacaatggtttggaggaaaaaagaaaatctctacggacaactggtttctattcaggattttcagaagtggcagaaaaaaggattaaacttttaaataactctgatgaaagacttcaaaacagcagggccaaagatcgaaaagatgtctggtcaagtattcagggacagtggcctaaaaaaacgctgaaagagcttttttcagactctgatactgaggctgcagcttccccaccgcatcctgccccagaggagggggtggcagaggagtcactgcagactgtggctgaagaggagagttgttcacccagtgtagaactagaaaaaccacctccagtcaatgtcgatagtaaacccattgaagaaaaaacagtagaggtcaatgacagaaaagcagaatttccaagtagtggcagtaattcagtgctaaatacccctcctactacacctgaatcgccttcatcagtcactgtaacagaaggcagccggcagcagtcttctgtaacagtatcagaaccactggctccaaaccaagaagaggttcgaagtatcaagagtgaaactgatagcacaattgaggtggatagtgttgctggggagctccaagacctccagtctgaagggaatagctcgccagcaggttttgatgccagtgtgagctcaagcagtagtaatcagccagaaccagaacatcctgaaaaaggtgagaaggaaaatgtgtatgttgacttattttagggtttcccctcttaaagtttcaatgatttcacagtatctcttgttataacctgaggcgattaagtgtcatatttg

SEQ ID NO: 59024 - DNA, 1495 bp, Homo sapiens
ctcatttatatataactctgtgtttcacattctaaggaactgtcaaacttttccacagagacgacaccgttttacattctcaccagcaatgtgttagggttccaggttctctgcagccttgtcaacacttgttattctctgtttatctcattgtgcttttttgatttgcattttcctaatgcaacattttttcatgtacttgaaatgtagagttgaacattttttcatgtacttattagccatttgtatatcttctttagaggaacgtcccttcaagtttttgccatttttgaattggtcagttgttttgttgttgttgaattatagttcttcatatattctagatgttattcccttatcagatacatgattgcaaatgtttcttttgttgcctctgcttttgatgttatttccaaagaaacattgccaaatccagtgttctgaaaattttcctttatgttttcttctaagaactttatagttttagctgtaatgtttacattgttgttctaatctgagttcatatttgtatatgatatatgtgacctctttgggttacataaagagctcatctcttagcaaacaaaatggagtcgagactgagagactggaatgaatttgattggaaatattaattttctgttactttttagctattcttagtctccttttgtccttaaaaaatttttaagtcacttttcagcttaatttctttgttctttcctgctctaaaatgttttgtgtccttcattttttttctttcttatttccatgtaatctgatccctgctgtacttgagttgtgtatgccattggatttaggaatattgaaatagagtacaaagttgttctactcattttctttgaaataattgtcctggtaatgatagaaagcaaggtaccctgggaagttgtctgcgttgtttctatagtacagaagtcagaggcctataaaatgaccatttgacagtggtttccattatctgtaagtttgtattaaaagagagtggcttttgagttaaccatagattttgagtacaaatgaacataaacatttccttcatgaaaaaaagatgataattcagttatgtgttgtactcaaatgggctttaatttttctttgtgtattcatcttagaatgtttactaaacttggacctgtttcattcagtagtttcgtagattggcaggtacattgatatttttgtctaagtacgcacaaataactaattccatacatttatcaaatattaacaaagtacacttttggggaatttaaaaaacttagcatctgcattacaatatgcaattaatggcacagttaaccatttgcagttgtctttgtacgctttggtaaaatgctgtattagtgttcttattattacatattacctctgcctaaagacctatacttccgtttcattttatagcgttacattgcttaggaaaacctattgatataattactataccattccgttgagctgtttatgtcaa

SEQ ID NO: 59025 - DNA, 1045 bp, Homo sapiens
atttttgtatttttagtagagatggggtttctccatgtttgttaggctggtctcaaactcctgacctcaggtgatccacctgcctcagcctcccaaagtgctgggactacaggcatgagccaccgtgcccggccaaggcttattttctattaattggctctttaaacaaaaaaggcttagtagatataagaactgagtcattcatgaaactgttttacaattaagatatagctttgttttgttaagaaaagattgactaaaagaaagagaattccaggagtattttgattttagatggtagaaagaatctctagtaatttagtttttaaatagcaggaagggaaaggaaagaatttaaattgaggcattcaagtttttaataatatagggaggaaaatgcgacctagttcaacaagacatgcttgtgttactgtgaacgttgccatctatttctgagaactcaagtgcttgtatgctatgaactttcaaaagaagaaaacttaacatcttgatgaagacctgtaggatggatctctatacactccaacatcatggagaaaacaaatgtacttcagtagattaagcagttaatcttcttagagttaacataactattttatttctttctgcaataatcagtctgtcttattgataaataagcaataatttttatttttgcggctcctccagttctgaagctaatttaataaggactgcaacaaatcctcatcagctgtatgacaatttttcttttatttttagggtcttcagcttgatctctaaatttatacttaacagatgtgaaattggaaatgaagatttatgcgtggaggttcatgaaaatagttttatcttcagtggtagtcattcatgacaagcagtttgggagatttgtgtggacctatttccatggtttttttaatctgaaacaagtatttcagattaaaaaaaaagagagagacagacaggaccttgttctgtcacccaggctggagtgcagtggtgcaatcatggctctccagcctcgacttcttgggctcgagtg

SEQ ID NO: 59026 - DNA, 1828 bp, Homo sapiens
taaaacatgaaaaaattgttagagttgaccatacttgcttcttgctgttcggcacaaattctgttcttctgacttttggaaattttcttttactgcacttatttttgaatcttcattttctctaaatgtgtctttctgtaaccttggttgtcttacagttttagtttttaatagtaaaatgaaactctgagaatttcatacacgtggaacctgcttttcctggaacaatcacagccacaacttttatcaatatatgtggtttggaactgaaaaacttatgaagtgtcttttattaactctgcaattttttaaacctttcaagagatgaaacgaataaagaagaagatgaagatgatgaagaagcagaagaggaggaggaggaggaagaagaagaagaggatgaagatgatgatgacaacaatgaggaagaggagtttgagtgctatccaccaggcatgaaagtccaagtgcggtatggacgagggaaaaatcaaaaaatgtatgaagctagtattaaagattctgatgtcgaaggtggagaggtcctttacttggtgcattactgcggatggaatgtgaggtaacttgagttttagctagtgattattacctaaaaacaattataaaatacttttctatttaaaaacttaagtaatggattacagatttattagtattctaattgaggtcatagtaccttataaaaaatagtttttagcatgtaaatacctcacttagtgacttacaattaatgttttcactacttagaagatatccctaatgtctagaaaaccgaggtctacacacttgatttttatgtactacatgtagatcagcagacaaaacattgttgaaatgatcagaacttctggacatctacaaaccaattatcaggctgcttgctgtcttgcattttaaactacattgccacagtaacctcttttttgtattctgaagtcatttctttccttctgtagtcagggatttaaaatcctaggaaacattagctattttaagaaagccttatctccttattaacagctattgcattacagccttattcagaagtctcagaaatttattagtatctttgaaaaaatctggttgaacatgtaagcagacctgcttcactaaaatagaatgcactttttgactgctcctaacctagggaactgaaaggcaagagtgaaatttggttttaagtcatgttcaatgacttaagcatttttcttagataaattttctttggctttccaaagaaattttgtattttgattttatccaaaattggcaagccagttttgggatctattcattcagttatcttttaagaatcatttattttagaatatttgatagtatatttgaaatgtagcctataagacagatacctggaaagattaaccatagaagtttaagttgtggtttcatggtgtacctagtgtcttcaaggaggaatacagttctcatgctttatacttaaattatattctgtggtttgggaagttaataggaaggcatcatctcaaattctgtgtttgagtgttgcaaatgaaattttgattctctttaatcacttcccacaatgccctttctctaaagaaaatcacttctgagagttttgaggctgtccttactaacttttcattctactttcacatacatataaatgtactcatagaaaatatatagtattcttacatgcatgtgttttaaataaattatactatacaaaattctgtttcttaaattttttgttgtcctgttgtgtaataggaagctcatgatctaatctgattacctttcttattttgagaaaagtaccagt

SEQ ID NO: 59027 - DNA, 3864 bp, Homo sapiens
aacaaaaaaaggatgctgctgtgtgccccagggttactgtagtgactaaatgagatttactaaggagtccagcctcacacataagaaatgtgcaaaaaatagatgctattactaatacttttaatagctgttattgttatgactctgagcacagtgttttaaatgaattttttgacaaaattttttttttgcattgaaaagattagaaagaactagaataaattagaatgttaatatggctcaatatctgagagtttagacaaaagaaatgaatacacattaaaaataactctatagttatattttgaaatgttttcaccaaatgtaatttctcttcatgtttccagatacttatatggttttgaggagtactgtagatcagccaacattgaatttcagatggcattgccagagaaagttgttaacaagcaatgtaaggagtgtgaaaatgtaaaagaaataaaagttaaggaggaaaatgaaacagagatcaaagaaataaagatggaggaggagaggaatataataccaagagaagaaaagcctattgaggatgaaattgaaagaaaagaaaatattaagccctctctggtaaatcagatattgttaattgtcttttgctttctttggtatattttccatatcctctataaagttccaaaatcaatatattgtataatattattctttattatttgtttattttcttcattaagtgctacttttgtataatttttatcataacttcaaaatagctgttagctatttttgtctagagctttaaagtagcaggagtttcttaaaagtaatttataacttttaatattagaattggttgatacctcctgttgctaagagataaaccatggatataggttgaaaatttttacttttgttggtttctttcctctgatctttttctagggaagtaaaaagaatttattagaatctatacctacacattctgatcaggaaaaagaagttaacattaaaaaaccagaagacaatgaaaatctggatgacaaagatgatgacacaactagggtagatgaatccctcaacataaaggtagaagctgaggaagaaaaagcaaaatctgggtaagaaaattgtttttggttacgatgcatttcagcttgatggattcttatcatttgctctttgtatgtgtttatgtatgaatctaaattaattgacaaaatattaaataatagagtgattggcatttattaattaaatagcattcacttctttcagagaccctactgatagaaatttgtagagaaagatcatactttgatccacccttcttgctctcatcatggaaattgataaaatttttagctagagcaaagtactttttaggtctgctgaattacttgataatataaacttggggctatgtccatgttttatatattgtatgttggctatagattctgagagttgtatttatttcttaagcaaaagcaagagtggaaaaatactaaagttttaaaaggccaaaaattgtatgttctattttatgtgatagtagcatttgtttgttttagtcacttggaatgatgaattatttgacaatgtaatttatgcactgctagtggacccctggattttatagataatctttggcattgaatcttttttctgaggcttaaaaaacataaacatatctgttagtgtctcatttaaataagtacaatgaattaaaaaaaaaatcatttagcaggccaggtgcggtggttcacgcctgtaatcccagcacttttgggagaccggggcgggcagatcacttgatgtcgggatttcaagaccagcctggccaacataccgaaaccctgtctcttctaaaaatacaaagaagtcaggcgtggtgacatgtgcccataatcccagctactcaggagggtgaggcaggagaatctcttgaaccctggaggcagaggttgcagtgagctgagatcgtaccactgtaggccagcttgggggatcgagtgagactctgtctcaaaaaaaaaaaaaaaaaaatcatttagcgtactgacatttggccacagtatgcagacgaacagggaaggggaaaataaaaaatggggcttatatgaatatagtaaaaaatgtttattatactttgttgtatttttgtgtataaaaatatatatttgaagtatgccttactgctgttggagactatttcaagtattaagaaacagtaaagatttcagctttttgcctaaaatcttttgattgatcagagttctgaaattttggtggcaccatacaaacatggaagaaaaacatcctgggtttagaagaatgtagtaaaagtgtttgttgattatactttgttatatttctatgtgtagaagtgtatgtttaaagtactgctaaaggagatcattttgataagaatcttaataaagattcagctttttaccaaaaaatctgatttttaaatctgcagatgtttctggaacatctgctgtttgcaaggcactgtgataaatctgtatttttttctttgctaattttttaagttggtgcttctgcttattttatagaataaactgtattttgtaggtttttaacaacccctttaactgtataattatatggatttttatgtactacagatatttattagtatatgcgtacctcaaactaaaattttcctgatgtgactgccctagtttggtagatattttttagaagcattgcagttgggactgtttatatagtactccctgcttttccacagtttcagttacctgtggtcaactgtggtctgaaaacaggtgagtacagtgcaataaaatattttgagagagtgagacaagaccatattcacataactgttattatagcatattataattgctttgttattagtcattgcttatctcatgctgtgccttattaataaattaaactttatcagaggtatgtatgtataggaaaaaacacagtatatataaggtttggtactatccacggtttcaggcatccactggggatcttggactgtatcccttgcagataagaggggcttactgtaattgatttttgagttttattagataattgcagtggaaaattttacagtgataattaatatataggtatttttctggcatataaactttctctaagtaataggctactaccaagaatgttcagtgtccttcttccattgtccagatgtgggagattgaagaagttgatatatgtaaaatgtctagttcagtgccttggccatagcacgtacttaatacactatcttttttaaaatttttgtttcattgtaaagagtgtaatatcaagtagggaagatttgatatttctttgtgaattcagatgaaaatccttgctgatacatttcgtttcccaagatattcttctctaaaatatgactagcttaaatgcatatgtgtgtgtatgtatgtatgtatgtatgtgagtgtatgtatgtatatgagtgcatgtatgtagtgtatgcatcaacttaattttttttaacctgtatgtatgttggttgcattttatactttcagaggctctctttcttggcattctgtgttccatctggtttagcacattagtcttgaatttgccactgaagtcttagagagtagaatagttttctttggttgattgccagtaattatgttgtttttttctttatacttcagtgtattattaaagtgaatttcatttggtttgtgtctgagggtgatattaaatgtatatttttaatttttgattgcttgatttcattaataaaagagtgttgggtttttgttgtagattgaatgaaaatttgcctgggctactacttaaagtatgattgtgcttgctgttggcatt

SEQ ID NO: 59028 - DNA, 1025 bp, Homo sapiens
caggggattgctggagcccaggactttgagacccgcctgggcaacatggtgagactccatctccacaaaaaaaattttttaattagccaggtgtggtggtgtgcatctatagtcccagctacttgggttgttgagtcaggaagatcccttgagcccggaagttcagggctgcagtgagctgtgtttgtgccactgttgctgcactttagcctaggcaatagaataagatcctgtctccaaaaaaaaaaaaaaaaaaaaaaaaaaaaaaaaaatagtcaaatgacttaatatttcaacatttataattttctgatatttgttagagtactaaaacctttatttttaaaccaaatttagaatttatcaagtttttaaaaattcttttgagtctaggaccaataaatataaaaatatactcatatatactgtgtctatcaaaatgttattatattaacaccttttaatttgagagtttttgtttcactttgtccattagattgaaagtggagctgtttggaaacaagtctaccaagatcttggaatccctgtcttaaattcagctgcaggatacaatgttaaatgtgcttataaaaagtaagttagtataattgatatgattatcttcagtatttttacctagaaagcaggatgaaatttaccttataactgaggttaattatttctttaaagaaatcagaacattttactagagtagtcattctatgatagtattttctaaagtgtattctatgatactagatctatgagaaattctgtgaagaaagtttttgtggctaagtacatttgtcaagtacttcatagaggttaaaaagctaatattctgaagtcaagtaaatccacatttgaatcctagttctgccaattattaactgtttatgccctagggccagttatttattctcctaagcctcagtttcttcatttgtaaaatggaatgcttggccaggcacggtggctcatgcctgtaacttcagcactttgggaggccgaggcgggcagatcac

SEQ ID NO: 59029 - DNA, 1050 bp, Homo sapiens
aatatggctcaaagagctcaaattttggattttattttacctggagctttagatctggcagtgacaaggtactctttaatggtttgctgaacagcctcgtaaaagttaatgagtggtgcagatagtgaaggctgctatatttgaccatgaaatgaaatgtatttaatgtgtttagtaaattaattggtcagtatgtaatactttaggtaagttatgaaattctgccttttaactgtagtaaagtattaatgaaatgagattgttttggaggttatattttagggtgtagtgatctgtaatgacaatgtataatgtagaaatttccctgcttcagtcttctccctgactgctttctatttaaattgctaaaatcagcaatcattcccttgctgctaaaaacctcctgagtagctttttgtcactgtaaaagttaagctttcatatagaatctcctttatagtccaattcctgcctcaattttttctcatcatttccctttctgtgtcctcccccttgaactttatgctatagcaatgtcaaattacatatgttgctgctactcacctttgcatatgctagtacctctgtaggcaccaccttttcctcccctccttccttagtcagcatggtacattcctgttcaattttcagaaccctacttaggtgccatctctctaaagagaaacctgtgaaccatcacctccctcacctcaggaaagcaccagttcatttgctagtctaaactactactgctcctggcaggcacggtgggtcatgcctgtaatcccagcactttgggaagctgacgctagcggatcacctgaggtcaggagtttgagaccagtctggccaacatggtgaaaccccgtctgtactaaaaatacaaaaattagctgggtgtggctgggcgcggtggctcacgcctgtaatcccagcactttgggaggccaaggcaggcagatcacctgaggtcaggagatcgagaccatcctggctaacatggtgaaaccctgtctctactaaaaacaccaaaaaattagccgggcatgg

SEQ ID NO: 59030 - DNA, 1087 bp, Homo sapiens
taattgtgtctagctaattttagttgaaggtaattgttaccatagttttaattgaagttcaactgaaaatgtaaaaatcatgtgtggtcagttttcaggtattgtatatttattttaatggctctgtgcctggtattaatactgtttgataattgtttgttgcataagatattacatgatttcctgtattaaaggtttttactagtgaagcttaatctttgtttaaaagaataaaactgctgttcttttatttatttaaacttaagtaatcttccaatggtggcagttttgccatctataaaatgactacctaatgcataggatggataggattaaatatattgctacatttaaaagcacttaacacagtttctggtacatagcaaacaataaatgtcagtggtattagcacagtagtttttatttctttatcgtgtttaatactttttgagaaaacaattgtcttaatttcttcagttcatgtaccttgtggtctgtttccagcctttgaacaggcacttgaatttcacaaaagtagaactattcctgctaactggaagactgaattgaaagaagatagctctagcagtgaagcagaggaagaagaggaggaggaagatgatgaaaaagaaaaggaggataatagcagtgaagaagaagtaagtgaaaacagttgataccttttaaaattataaataacagttgggtttcccttgtgggttaggatttggcattaagtcattactcatataagtatttttagtatgagaaatatttcataatcttgtatttgagatcctcataatcagatagtttacttggttactttagatatatgatcttgtgaaatagaaaatattaagcctgattttcctaataacctcaaaaacatgtcttagtcttcctatgctttttttaatgagatgattaagaaagtatccaccaggctgggcgcagtggctcaggcctgtaatcccagcactttgggaggccaaggcaggcggatcacgaggtcaggagatcgagaccatcctggctaacacagcgaaaccccgtctttactaaaaatacaaaaaattagccgggg

SEQ ID NO: 59031 - DNA, 1597 bp, Homo sapiens
tgacggttactttgtcatacttttggaaaggcatcaaagacaacttcagagtatactagatagtatactaaataggtaaatcatgtttaaagttttttagtagtttaatctgtcagttttccttttttgggcagtgaaactgatcattgcaaactatctgaaaaacacttttatctttgtaggtattcaataatagccattctaaaaaggacatatgttgttgtccatcaaacatttcctagtctttactcattctgggcattttctttggtgctgattctttattagaatcagattcaaattggaatagctttttgttttgttttcctttttactacactttcctcaaacatcaagttgatggtttcagatacttcctttttcttctgacagttatctttctaatttactagtccaatatttaatgttactgaaaggattttctgtttttcttttaattttgaaagtttttagcatcatacaaaagaggcttattggacattttatgaatacctaattggtgtgtatttgttgttatggatagcagtggtgatctcttttcagattgcctcctcttcccaacctaacctcagttaataaaggtctgctctcctaccttttaaaattaactttgtactggagatatagaattactgtctccagaattcctttaatttgagattgggattgtgtatattttagtgtaatactgggatgtttaatatggggccttcacctttttgaggatttgggaaccagttatttgtcctgatcttcctcctcaattttttacagtagcactaaataaaccagaaatatttttgggaaaatgatgtgctttcctctcatgataaactcttgctgttattttttagaaatttagaaaatgatttaagatttaaattagccattttacaggtcttaggaaatgtaataagagtttgggaatacctatattcatcattggcatgcttattctttgtgaggataaatggaaatattttatttttttctctccctagaccagaggaagagtcttcatcatcctccagtgatgaagatgaggatgataggaaacagattgatgagctactaggcaaagttgtatgtgtagattacattagtttggataaaaagaaagcactgtggtttcctgcattggtgagtagcttcagtatacaagagtttaatttcaaactttataagtttatgaagaaaacaattttcttactaatgtttttcataggtacaaaatgaggaaatgtttttagcattatttagttcacactaagcttactttcaacgttgtctttgaatacaaagaactcttgatgtcattcaggaaaggcaaaatcttgataatcttagaggtttagctatgtggaagttgaattctctctctctcggtagaaaattcatgatgcaaacttttaaagctcctaagtccatgtaggtctagattgcaaaagaacaacagaatctttcttggttgacagggataactagaccttttcctcatacttagtgaatcagggtgtttccatccttgatcttaatcttgccttttaggtactccctatataatcatgactgcaat

SEQ ID NO: 59032 - DNA, 1828 bp, Homo sapiens
catttaaatgttttcctcttgaaataccaacttcttatttttatttggtatatcctgttttatacaagatgttttcatttcatatatgttgtttctttttcactagaaattggaaaagttactttaataactctatatttgaagttactcactagaaaacataaaatgtgaattgaattccaaatgtagtcttaaatagtagatctgtttgcactcagaaaattgtaatacatgtcatctctttgatctttgaaaaaatccttcagtagcttccatttttaccccctctcatagtttttgatgacggagatgagaagacactgagacgatcttcactgtgcctgaaaggagagaggcattttgctgaaagtgaagtaagtcatcatttaacaaatgaacatgtcttaatattttttattgggaggaataaatttttgctttctcaactcagtaaacctacttcctaatcaggaaagttcattaatacacaatacccttatgatgtaatctgtgaagcctgtttaaggccctgtgtttgagcaccaggttctgtcttcttttttgtctatgtaaagtgtttcagtatttgtccacagagaaaatacaatgggctttaattattatctttaggcagtttttaaacagacttaaaatttgtaaataactagaaaacagatttctgatttgtaatctacttgatccttgtcgtagttaaaggatgtgtagatacaacagtctttaactactgctactgctattagctgatattattatgccctttcctcttgcctgactgcccttcctaaaattgtcccttccattccttatcatcctttcagattgatttaggtcttattccctaacatcaaaatatgagtacataattatttattgtctgccttcctcactagaatgtgtcacacggtcagagactttgtatatcttcttcatggctttgttcctagttgctgtaacagtgcctgatgcagagtatgaacttcataagtgttagttggatgaatagatgaggtgcttataattgccagggattttgctaagtgctttacatacattattgtatttgcaacattatgaggtagttactattattatccccaactttcagattaggaaatggatagctagagctggttttctaaccagcactttctagcaccaaagccatatccttaaattgaaagatgttactaagagcagagggttcacaaagttttgtaactaactcgcttgcaattcagaatttaaaaggtagatgttgctctaaatggtgttacgttctctaatccagtctacagatattcattgatacacagtgtggccgagctatttcttttctctactcactatttggaatagtgtttctttggggatattttaatattactaattaatattacttatttgttattatttattactttaatattactttaatattacttatttagtagtgttattacttaaacactatttggaatagtgtttctttggggatattttaatattacttattaacctattagactttatgtttttgttttgaaaaatttttgcttctcttaatgattgaattcccacttaaatttagaatttggacaggttctctgtattataattccagcctatccctttagtctcatattcaaccacttccctgtacttctgccttattagactgcttggtattttcagactatggtccatactttcctttattgactcctttcctcttgttggaatctcacttatgttgaaggccattataaatgcttcctcctctatgtctttcgtgagctctctacccaaa

SEQ ID NO: 59033 - DNA, 1055 bp, Homo sapiens
ttcgatgtcatttgctctatatctaatttatctttttctctgtgtgtgtgtatacacagagagagatatatacacagatttgtatgtgtgtgtatatatatgtgtgtatatatacacatatatattgtatacatatatgtgtacatatgtatgtactcattatcattacgttcaaactttttaagagcaagcttaaaacacaatgttctgtcacccattgtactccagtgtgtaattcctgataaatagaacagaataacttcaacttcggtctgtctactttttctcatttccagttactcttggcagatataccacagaaagttgctcttttgatattacagtgcaaaacgttgcacaattacaccactaaaaataattcagtagtattcaaagatgatgtgaatattctgttcatcaaaccacctgtcagcttagcatcttttgatagctctctgaatcagccacctttatgatggttgccaaacgctgattctctgtcagttctgttacagttattaacattttagtataaggaaaagctttatcttttctacattttaaaacattcattcattcattcttgtcaatatggactcacggatttcatttttactgaatgcattgtaatttgttaccaactttttaaagtgagatataattaatttactgtggaatacacagatcttaagttgatcagtttgacatacatatatatccctaaggagataatagcacaaataatatttattttaatgctcaaactttcccccatttgaccagtaagaggaaaaccccttcaagatgcttcctgtgtctgtttgaaatgtccctatcattaatcgcaccatttctttactttctgacacaagatgtttcagattcttcttgtgcttttctctgtccaaccttgaaatcaaccatttttctaaggatcctaattccttataatggagagagttatttagaaatcaagacgtgggccgaggcgggtggatcacgaagtcgggagtttgagaccagcctgaccaacatggtgaaatcccgtctctact

SEQ ID NO: 59034 - DNA, 1004 bp, Homo sapiens
tgtaaaattcccatgtacaggaataccaaatacagtgtgccaaaagtggtaggacaattgaagacttcattgtcaaccctgctgtgttgtgcagctgccacttttccctcagaatgtgtgtgttcacaaggtgtgttgcttttgtagatcaacataagaaatacttactagtaaagtttatttcttatctgtttttaagataagtaaattaacagttcactattttttgtgtgtgctcagttaatcttcctcatatcacctggaatttatcatctcccttgggtaatcacagtctagtagattctctcttcaccattttcttagggaaaatggattggcaagggaaatgctagactattttaagggatttattggcttttctgtcccactgggaatgcttataggaggggatgccatgaaatgtttttcatgatctcagtggggatcagaaaattccagcagaacggaggctaggtgggcatggttaacacatttaggtaggagggcatgtttgataatgaaattctgaaaatgtttgcatgtgcattgagatccctaggtagataagtaacctagtaacttatttgattggtatagttttttaaaactccaggtctgatgataatctaatataaactattctattgaatgctttgaaattgagtctgtttagttctgagaggccattgaaagaaggcaagaccgagtatcctggaaggcctgttacatacccctgtatgtagcatggccctttctacttgcctttgctaatgatactttgtgtgtgtacatttacttaaatagctgtgcagtgggataggggaataatactcaggttttaaaatctgattttggctctgacttaaccattaattactggtgactcaaaagaataccactgtgacctaccagtaagagtaggtgcatatggagagtcaggaaatagcattttgatagagttttgacttaaatatgtttccttacactcatcttgaaattgtttc

SEQ ID NO: 59035 - DNA, 1285 bp, Homo sapiens
aggtggctcactcctgtaacctaagcactctgggaggctgaggtgggcggatcacttgagcccaggagttcgagactagcctgggcaacatggcaaaaccctgtctctacaaaaagctcaaaaaaattagccaggcatggtggtgtgtgcctatagtcccaactacttgggaagatcacccgagcctggaggtcaaggctgcagtgagttgagattgtgccactgcaccctagcctgggtgatagagtgagaccctgtctcaaaaaaaaagagaagaataaattttcaattcatactgatatttccagttttcatgaaaaattacagaggttttgtttaacttattttatgatttatttatttattttatggtgaaaaatatgtctatttagtgttagccagctgggctcactttagatgatcccaattttgttggcaacgtcatcatagtcaggaaccggtagaacatgggccttctttccatcaggcctgatcagggtgttgatattggccatgtcagtgccacagagctttttcttagcctgtttgatctggtatttgttggccttgacatccacagtgaacacaagaatgttgttgactttctgttcttttcatggctgactcagtggtcaggggaaacttgatagcatagtggtcaagctggtttctcctggactggaccagtcttccaaggatatttgggctgcctccagaacagcagcagtgttttgggctgtccttaggtgggtgacgtgaagatcttctcttttttgtgtggctgtggatacggatacctttcagcactgctgttttggcctttagagcctttggtttggctttgacgttgggagagcaggggcttccctctttgcctgtgatgccttcttgatgagtacagccatgtaacttcttttatagttgtgtctttttttttttttgggacgtagtctcgctctgttgtccaggctggagtgcagtggcgtgatcttggctcaccgcaacctccacctcccaggttcaagcgattcccctgcctcagcctcccgagtagctgggattataggcaccctccaccatgcctggctaatttttgtatttttagtagagtcagggtttcactatattggccaggctgatctcgaactcctgacctccggatccgcctgccttggcctcccaaagtgctgggattacaggcgtgagcctccgtgcctggccttttttttttttaaattgagatggagtcttgctttgtccccccgcaggctagagtgcagtggca

SEQ ID NO: 59036 - DNA, 1062 bp, Homo sapiens
ggaggagttttgaacaaatccggaagtcagaggtctgacgtgggtctcactgggcatttcttcttcaggctctaggggagaattggtttccttgcctcttttccagcttctagaggctgtatttcctcctttgcctctggtctctcctattttcaaagccagcagcctggtgtcttcaaatctgtctctgacactatctctcctgcctccctctttcacttataagtatccttgtgtttatattaaatagggctcacccagataatacaagctaatctccccctttcaaggtcaactaattagcaactctgattccatgtcagctttaaatttccccttgatagataacattttcacatgttttggagattcggatgtggtcattttgtggggagggggagtgcattctgcctaccagagtttccttagtgtggcaaaatgatttagcttcttaggcctcgctataaaatgagattagtatttactatttaccacaaaggaattttatgaagatggaaattacgtactaatacagacaggccatgcatagaatacacttaattagcagatgctttctgcttgatcttatctgctaggtatatgcttgtggtgatgggtagtctccaaggtaaccactgggtttgataaactccaatttgagtgcctgactcttctaaaggcagatgtttgttttagaattcagcctttccagacctttgcatgatgaggatggtgatgatttatagcacaatggtggaaaaacagatgagtgccccttaactcttaatttgttttatgatttgaatctgtcttaatctctaagatacagttcactttttaagtaggcagcttttctgtttaacatgattttctaaaggattgctatagaagataatgaaaagggaccttgagtaattgcacttttaaatcacacaagattgttttgtatgtgctcagatggtattttttgaagttaatgttgtcatttcttttctttttttttattttcgggacagggtcttcctctgttgcccaggctggagtgctgtggtgtgatcttgg

SEQ ID NO: 59037 - DNA, 1097 bp, Homo sapiens
agccaggagtggtggcctgtgactgtatttccagctactcaggaagttgaggctgggaggattgcttgaacccaggatgtcaagtctgcagtggagctgtgattgcagccactgtactccagcctaggtgacagagcaagaccccgttttaaaaacaaaatcaaaaacacgttaattttggaatggatctctataggaagtgtccccagcatatgctcaaagtcagaatatatagtttataaggaattctttaaccgtacagttatatggcacattacgtttttaaagttccataatcattagttatatctaataacatccctttgaggcaggtcagcaacatttttccctttttatggtcgaagaagcaggtgtaaagatgttgagtgatttgcccacaggcacacattaaactgatcacagagcctgttcttttgttagtaaactgaaccatgctgcctctctactagttattataaataaataataaagttgttgccatttagtgactttttgatggctttattgaatagtaagtgtagtttacaaaccttttgcctacttactttgttgaaaaagttttaaatttagaatttacttgtatcatggtatgaaacatttttatgtaaatttccctgtttctttttttttatttttttttattgatcattcttgggtgtttctcacagagggggatttggcagggtcataggacaatagtggagggaaggtcagcagataaacaagtgaacaaaggtctctggttttcctaggcagaggaccctgtggccttccgcagtgtttgtgtccctgggtacttgagattagggagtggtgatgactcttaaggagcatgctgccttcaagcatctgtttaacaaagcacatcttgcacctcccttaatccatttaaccctgagtggacacagcacatgtttcagagagcacagggttgggggtaagtaaggtcacagatcaacaggatcccaaggccgaagaatttttcttagtacagaacaaaaggaaaagtctcccatgtctacttctttctacacagacacggcaaccatctgatttctcaatcttttccccacctt

SEQ ID NO: 59038 - DNA, 1013 bp, Homo sapiens
taaaacctttgagcaagtggtatttaaagaaaggatttactttatattgatagccaaaataatgtatataccgaaatatatataaatacgtatttataaacatattttactgatagtaaaatgttatatatattgttatatatcatttaagataatttatatgtaaattaaatataaaccagatttctttattccaggaaccttgctgttgtttctaacctttcttttcctgctacttagtgatgcagaagcttttcttggtaaatctacttgtcccctctcttaatttactgcttgaatatgactgtgaaaactgtctttgtttaaagtgcccagtaaacattgtagcttcatgattaagagcatatggcttggaaagtcagtggtcttatttccagtcctttttatgtcctttacttggctgctgaggtttgggtaaagttactgtttttgaaatgaaagtaaacatcagtttcaatttttgtaaaatgagaataataacagctaccttgtaaagttgtgtaaatatgaaatgaaataccatatttaaaatgctttacactgtgcttggcatagttctgagcagttagtacgtggcagttgtattattagaggaagcctgtcttgtttttttttaaataagctgatagagtgaggattcttttaatcaagactgtttgggattgaattgccactcctgcttaccagagtgtaggcagtttttcttaaactttccaagaagactggtgtcctcatctaaaatacgaaatgcttacagtaattgcctcatggggttgtttggggtgactaaatgtagtaggatttactacatagtaagttctcaatacattgtagctattattattagttcggtagaaagaatgtgcagattcttatgagtttaagtaggctttcggggagatagattgactctggtcttttaaaagttaattttgaagttgcagttttgtgattaagccttaaatctgttattctttccttctgaaatcctt

SEQ ID NO: 59039 - DNA, 1005 bp, Homo sapiens
tttaatgccctgtgtgtgtgtacatgttctctctctctctccccctacctctacctttgtttgtctccctatccactctgtcagttcgttcccccctctctgttcttttccttccccctcttccttctgtctcacccctttcataagtcattcatttaacaacaacccgtttcatatatcaggtaatatagaatgaaggtgggtgaggcatctgacctgctttcagggagcccacagtgtagcagaagatgcagataaataaagcaaaactcctagcatatctatttatgagtattccaacataaaataattgtaggaaatgctatgagaggacagaagaggacagctaaatcagagagctatggaaagttttctggtggagttgacatctaagctgagtgcgaaggcttttgctaggcaaagaagggaagaaaagtttttcagatagaggataacgtactggaaaatgaacgaaacaaggtgaagtatctggaaactgtaagtaatttggtgtgactgaattaacttaaagcatgatatgtttgggtaggaataaaagggcagtggtgggagatgaagctgagtgagggagtcgaaaattttcttggccaggcatggtgtctcacacctgtaatcccagcactttgggaggttgaggcaggtggatcacctgagttctataccagcctggccaacatggtgaaaccctgtttctactaaaaatacaaaattagcagggcatggtggtgtgagcctgtaatgccagctattagggaggctgaggcagaagaatagcttgaacacgggaggtggaggttacagtgagccgagatcatgccattgcactccagcctgggtgacaagagcaatactctgtctcaaaaaaaaaaaaattttttcttgaaaactacatggaaccattgaaagttgttgagaattgcttgaacccaggagctggaggttgcggtgagctgagatcaggccactgcaaaaacaaggggagag

SEQ ID NO: 59040 - DNA, 1145 bp, Homo sapiens
tttgtttctttttctgtgtgttcccaatttctttcgttcttttttatttttctttttgatatagagtctcactatttcaccctggctggcacgatctgtaactgctgcctcctgggctcaaataatcctcccacctcagcctcctgagtagctgggactacaggcacacctggctaatttttgtagtttttgtagagatgaggttttgccgtgttgcccaggctggtgtcgaacttctgggctcaggtgactctcccgccttagcctcccaaagtgctgggattacaggcgagagtcaccgtgcctggtgtaatttctgtattacgatgatcattgagctacagaaggttttatgccatttattggatcttaccaaacatatttgtacttgggagcaagcttttaagtttgaattgtctgttgtattaacgacaacaaatctttaaattttattaagtgacagtttattgaggtgattgaaagttagattatgtagtaatactttttaggtgttgttttaaagttgaagtgttgtatgttttagcagttttcccatgtactacctttaagaatttatgtaaacaaatacattcccattactgtctaatatatgctatgttacttttttcacagtatgtttttgaggaatatgattcgtaatacataaggaatttgtgctgtaacatagatcgtgatgttggtgttatgttgaatttatttttcatgctcttgatagacttttaaaaatcagtggtgccggctgggcatggtggctcacgcctgtaatcacagcactttgggaggccgaggtaggaggatcacctgaggtcaagggagtttgagaccagcctggccagcgtagtaaaaccctgtctcttctaaaaatacaaaattagctgggcatggtggcacacacctgtaatcccagctattcggaaggctgaggcaggagaactgcttgaacccaggaggcggaggttgcagtgagctgaggttgcgccactgaactccagcctcggcgaaaaaagtgaaactctctctctcaaaaaaaaaaaaactaaataaaataaaataaaaatcagcagtaccacattataaggaggtggtagattattaaagtttgtaaataattccaagacttattt

SEQ ID NO: 59041 - DNA, 2092 bp, Homo sapiens
aggggctctgtggcgggccggtcctgcccgcggcccacaggccctcctggcccctcggtggcccccggccggcctctcgctcggacgcggcgcgtgggggcgcggattcgctcggccgggcgccgaggccctaggggagagcggccggccctgcgccggacgccgggcttgttgtgagtttcttctctgacagaaatggcgtcattgtcgtagacgggaaactccgtcgggtctcgacaatggggacgggaagctgccgagctgtgtaggtggttgggtttgcggggatggcggggccggagggagccccgagtcggcgtgtgatggttcgggggctggcgcctggttgcggctctttcttcggggttcggacgtcgctcgcttctttccctccgcctccgccagtgcagaggggctcctgtggtgttgactgggtgtcttttgtttcccctccaggtgcagctgaacctggtgttttagaggataccttggtcccagagtcatcatgaaggtaagattgcctgcggaaaacgaatctctggggttatcgaattcaggaagtaggaggtttcgacgaggtcgtcgtgtggggcttccgagttttgcagaggaaggtgtgtttggtgacttggtgaccgagcccttccccagagagaccggggtcagctggcgggctttgctgtggagttggaggcagttataggatgtctcaactgaagatgattctcccatattgaacatctctttttgtagggaatgagaggaataacggcatgaattaaagtgttttaaaaggtaaaataaaaagcaagtcaggtaatctgaccctagaaactgaactgtattgtggttctatcagttacactgatgaaagagaatcttatttattgtgtgaacagtactgtaaaattttagcagaaaactctttgactcgtcacaaaaataatttaattgaaagatttaaaaagagaatttttgtgattttttacacaattcagagataccagttgtttcttgtatttccagtgacttggggttatatggtttatttttctttattgatctggttggtctgtaaataagtcagaggctctgttgcattatgatgtgtggaaaactgatggccaggttcctcttagatgtcaatatgttaactgagtggagaatagggtcaaaaaatttgcttaattgttggaagaaatgataacgataaaaatacaggtatttttgttacttgagagaatatgtatatgaatgctgtcttttttttttttaaacacatgctagaataaaaccttagatttttgaaaagtctggattcaactggtggaacttagacactagcttgtattttttcatccattacaaattcagaagtgcttgaaaagggtagagtgttcacaagtgtagaaatgcaacagatagcatgttagaatatcaacgttgtctacttttgacagttcctttgaactatttaaaaaaatatttcacttgtcctcagaatcaagactgctttgacaattttgcatccaaattaaaatttgtaatacttgtggttgtagaaggtaaaagctgtggctacttaaatcttggtctactatacagagtaattaagtttagtctaatttttttaaggttttctctttgagtttgggatgctgtaaactacctgaaacagtttattcctatctcatttcatgaagcatagacatgtttcaggaatgaatcccttttgttagtcacaaatcctagctataactctcatcacctgtgtaaaacagtggtgaaagtgcatttattaggtaactcgtatatgtaccttgatgttgggtgagaatttcttaagaaaagttttggtttgagtaagaaataataagttcagaagccgaataaataaaaggtttagtttggagtaaatgtaatgtgtcacatttcccagtgttgtagtgcttgtcacttcttaggtgctctataaatgtttggttaaaagaaatgtagttaagttgaaagtctgagattaaaatgttttttttcttcctttcgtttcctttttttttttaagtagtctgtttaaaaaaatgaaagtatgttg

SEQ ID NO: 59042 - DNA, 1086 bp, Homo sapiens
ctaggttccccccctttctcccctcccctagattttttttccccccctcccctacctctttcccggatggcctcttagacgaccttggattggttaaagttctttagaacccgcctatacactgttcctattggtccctggatacaaacaacgacgccattttcccaccagttctatggaaacagaaagttacgcctcaaggctttctgggaaataaagtccatactctggggccaacgcgcaaatcctcgtccgcgagaactgcaaggcccgcaatgccctgcgcctgcgtggaccggtgcgggggcgggggggaggtgaaaggggcggggcaacaaagcagtagggaggcggcaacgacgcctgcgcagtgtgaccgggatggcgcattttcttgcaccaactaatgcggtgtcgctggcggctgaggagggcggagagttctgtggtgaaatagtgggaaggattcatgtaggcatcgggaagagcctaagtccacattataaaataggaagttgatgcggggtacagttactcccggaccggcggcgtgaaagtcgtgatatcatcgttgaactgtgagcggcagtggcggcggctggggggaacccggatgggaagaagggcgggggaggctgggaggcggggcagaggaaagaaagaaaggagagtgaggacccggatgctgaaccggattgtgtatgaattttccatcccctagctttaagcgaggagggagaggaagggttggccaagtggggcggaagggagcatctgagcgaggaggaagcagaaacctcaccgtttcttcccctccggactctgtgctagcactgtatacgtttgcagttctctgcccagccgctgtggaaaatcggcctcgaagtgattgaaattccctgtttatatcaggcggcttctttcagatccatcgtctttctcccggagtatgaatggaaggattcagtatgcgcttcacatttgtatgtctctggccattctcaaaccaggcccttccctttgaaaagtcttttgcatgggatgttcacttcttagacgcaaggttgtgtgccctggtttcatcgt

SEQ ID NO: 59043 - DNA, 1035 bp, Homo sapiens
accgcagtggcagtgccccagaggagagttccacggtgataggagaatgagggaatttggcttctttagggagggaaaggaagggtttctgagcaagtgaggatcgagctgagagctgaagggctagcaggagttaactaaggaaagagaaaaggaaaagacattccagacaaaaagactaacttgtcagaaagccctgtggcggaagggagcttttccaatatgaagaactgagcctggagagatgggatgagggggagtgtcgaaccttttaggctttgtaaaggagttttggttttctcctaatagcaatgggatatcttccaaggaatctcaatcaaaagggagagatggctccgattggaatgtcatccctggctgaagagtagaggaagcgaaaaaaagaagagttaaagaggcaaatgcagggaacccgacgaggaggctattgccgtagtagttcacatggtgaaaagaatggagcgtttgtattaatgattatggattcactctttgaacaaatttctggcagctttttagttttgaaagtgagaagtttcagactctcactgaggtattctgtagttttttcactctaaaaggaaactagtagagttcatgtaacacacactaatgcctctttacatttaactttagtatgtgatagctgaaatttccagctgtgataaattgggaaatcctttgatttaaaagaaaaacaaaggcgggtgagggtgagagtatatgccacggtgtgtagaatcctttagactcttaagaagacacaaggcggctgggcgtggtggctcacgcttgtaatcccagcactttgggaggccgaggcgggcggatcacgaggtcaggagatcgagaccatcctggctaacacggtgaaagcccgtctctactaaaaatacaaaaaaattagccgggcaaggtggcgggcgcctgtagtcccagctactcgggaggctgaggcaggagaatggcgtgaacccgggaggcggagtttgcagtgagacgagatcacgccac

SEQ ID NO: 59044 - DNA, 1768 bp, Homo sapiens
tagttcttgattgaatttagtcctcatgcaagatattattttatattgaggttgctaaatatttattagttgtgaaaattaacacacctgagactttcataatctgttaattaaactgagtaagttttgaatagttcaaataagtgaaattttcaatttttttattagattattattgaagtgacagaaatgttgcataatgccagtttactcatcgatgatattgaagacaactcaaaactccgacgtggctttccagtggcccacagcatctatggaatcccatctgtcatcaattctgccaattacgtgtatttccttggcttggagaaagtcttaacccttgatcacccagatgcagtgaagctttttacccgccagcttttggaactccatcagggacaaggcctagatatttactggagggataattacacttgtcccactgaagaagaatataaagctatggtgctgcagaaaacaggtggactgtttggattagcagtaggtctcatgcagttgttctctgattacaaagaagatttaaaaccgctacttaatacacttgggctctttttccaaattagggatgattatgctaatctacactccaaagaatatagtgaaaacaaaagtttttgtgaagatctgacagagggaaagttctcatttcctactattcatgctatttggtcaaggcctgaaagcacccaggtgcagaatatcttgcgccagagaacagaaaacatagatataaaaaaatactgtgtacattatcttgaggatgtaggttcttttgaatacactcgtaatacccttaaagagcttgaagctaaagcctataaacagattgatgcacgtggtgggaaccctgagctagtagccttagtaaaacacttaagtaagatgttcaaagaagaaaatgaataatgttaagccattcttgattggacctcatagcttattttagttaatcttttttttgtcttttagccttaccaccttttaaaaaatttgttattctccagaaacagtaaataggtgagtaggggtggtgcaagtgaattcgttttcatttagaagcccctctgtacagataatcaaaattcaaagttgaaagaatcaaaagcagccacagttatgtaggtctgatttgaatgtcataattgcagtgacaggacattgccaccaactctatcctactaccatcaatgttgtgtttattccgtcaataaaaaagacttgcttccaggaatttttatccatacactttctaactgtactatctgggcagttccaagccagtttctattagctagctggaccaaagaccacaaatctctttttttcctaaacgctgctgtaaggaatatctcacttttccccccggaaacaccctcactgaagtcttctatgaaaaggctgataatgggctgggcgcggtggctcacgcctgtaatcccagcactttgggaggccgaggcgggcagatcacgaggtcaggagatcgagaccatcctgacacggtgaaaccctgtctctactaaaaatacaaaaaattagctgggcgtggtggtgggcgcctgtagtcccagctactcgggaggctgaggcaggagaatggtgtgaacccaggaggcggagcttgcagtgagccgagatagtgcctctgcactccagcctgggtgacagagcgagactccgtctcaaaaaaaagggctgataatgataaacagtgagcactccggtcctttttcttaggttttcc

SEQ ID NO: 59045 - DNA, 1035 bp, Homo sapiens
tggactaatttttgtatttttagtagagatgggggtttcgccatgttggccaggctggtcttgaactcctgacctcaggtggtcctcctgccttggcctcccaaagtgctgggattacagtcatgagccaccgtgcctggccacccccatggatttaatacttctgttttttctaatgtgaattgtcagtttcatattacttgttagtttatttaaagggatttaacatgcttgcataagatcataaccctttatggtcaatcatactgattatatattattttagtatgtgatattctcttttatgctaattttgattttttagcatgtagaaatttttgaagaccttcagaaaattgtatttatggcctttcttggtgggtaatattttctgtgtttcatttgctcttctttaccaggcacccgacaggaggatcctttattcgtccgaacaaggtaaattttggaacagactttcttactgcaattaagaaccgctatgtgttagaagatggaccagaggaagatagaaaagagcaaattgttacaattggaaataaacctgtggagactatcggttttgactctattatgaaacagcaaaggtaagtggagtttataacggcagagctgacttttatggttttattaaggttcagaattgaaatacccatgactgtatatggatgctcatgactttgctcctaaactggtttatggttccacagaaacggaatcaaaatctgaggaatccaagaattatttagggaaattaaaattcttatgttagcacaggattggtagatttatccagtttgcaattgaaatatttattggcccattattactattcacatcatattatctcgtgttgactaagtaaccaaggctgacgtttgggttcttttctatttcatggtgatgatggtaagttgggaatggaaacagcagtctgaattgttccctatgccgtggagcgtgctggtgccgtctgttaatagtagggagtagttctcacctcgggctgcacatctt

SEQ ID NO: 59046 - DNA, 2080 bp, Homo sapiens
tttctgtaaatgaccctactacttgagtatcattgcatttaatcattagctagtgtctttcttgattgaaaaggtaaaattttagagattctggagtaatctcatatgttggctggagattagtcaattcagaaattatgagacagcttggtggaatgcagccagtgttggagttaggctgggttcagccgccagctaaggcacttttggctctgacagaagttagagatagctgcttattgtttctaagcctcagtttcctcagttacaacataaaacctaagatataagtgctgttgtgaataacaaatgagatcctacaattaatgatagctgtcagttaggagttgaaacctctactttaagccattgtcttatctcatcaataaaatccagctgaccagctttgagatcgtaccactaagaagagacttactcaataaaggaatcaaaaacaaattaaaaaatccattatgtatggtttctcttggagatggctttggctctggagtgatgcttggactgagatctgagtcctcatgcttagtgccaagttgacctggcaaagaaggctattttaaattttagggggaaggagcgacatctgtcggacacagtgcaaactacagtttgaagtagttgcctgtttcatgagattcctgtagttcttttcaatgatgtcataagcctacaaagctggcttttgggcaattgccgcgataaaacacaagtatttatgtacatctatcatgcatcaatagaaatatttgttttataaaaaagcaagtatctcttaaatcagtgtggaactggaaatggaattggtggcgtccagtctgattccagggtttgggaagttgggcagtgcccagcagacactgagttgacaggacataagtaatgattaagttgtttggccctaactacgtacttaattggaactgtgaggtatttattttggcctaagtaccatgaaaaaaattactgaaaccctaaggaccgtgtggcctgagaaagtttgggaccctctaaccttgaattctgctgctgccttttgtaccctggtttttctttcttttttttgttgttgtttcttgttttttgttttgagacagagtttcactcttgttacccaggctggagcgcaatggtgtgatctcggctcactgcaacctccaccctcccgggttcaagcgattcccctgtctcagcctcctgagtagtcgggattacaggtgccccccactatgccaggctaatttttgttattttttttagtagagacagggtttcaccatgttggccaggctggtctcgaactcctgaccccaggtgatccgcccaccttggcctcccaaagtgctgggattacaggcataagccactgcccccggccatgtatttgttcttctgtgactggcttatttcacctagcataatacactcaaggttcatccacattgcggcatatgtcagaatttccttccttttttttaagttcgcacaatattgcattgtatatgtgtgccacgttttgtttatcctttcatttgttgatggacacttgggttgcttccacctcttgactaccaggaataatgctgctgtgaacttgtgcatataccgtggccttttagagatgtgaagtctgaggcacagaggtgctaattcacttctccaaagccaaaggagatggtggaattgggatttgaacccaggtggtctggttccagattctgtgttcttagacattatgtatgcggattcttttcatgaatagaaagcacaagattctctacacttaacaaatggctgccggaagtatctggtcatgctgaagctgggtgcgctctctaggaagtaccttagggaggcttttacatgtgagtgcgagaagcactccatagcatgtacttctgcgtggttgggaacaatctaaatgtcagcagaagagtatgtacattccttgtggtctgttcatataacaaacgctgtaaggtgtgaagatgaatgtcctggagctccatgtgtcaccgtagtgaaatctcaccactgaacaatagactgttgaggaaaaagt

SEQ ID NO: 59047 - DNA, 1460 bp, Homo sapiens
aggtttcccctttcattcttgaaccatttttgcatagacatgtgagtgtacagtaaagccggtagacaggcctgaatgagttgtgctcccaaatagagcaaacgggggcaattcaacccatggtgtctcatcttctggaaatacgggcttgtgttttttaatagtatcgtctttcaaagtgactgtcaggattgaatactttctgagattagggttttgagaaataatttaaggggcaataatttcatccatcctcatagccaaagggcagactctatgtttagagaagcaaaattctagcccatgattcagtgtatcagtaagactctggagaacgggactttgttttgcagtatccagagccatatcttgtgaagctggaagctcaccttgcaaatgcctgagttttgggtttaggaagcctacagccgcatacaggtgccctaatcctgtgaaagcatctttacacagctgataccaaaaagttgtatgttgtaaatgttaaaaattaggtagtcttgattcacttgaatcattaaaaaagtgatttttaaaatataattccattttaagattgaaacaaatcaaaccccttagattaaaacccagattgttgctttcaacaactatttcagttgggtttactgtatagaaataagtacattgtatcttttttttctacacagtgaaaataaactaaaatttccctccggttcagtattaactggaacgctttctgtactgaaggttttagtcctcaatcaaacaggaataacgtgggctgaggtaatcatatttctttgttttattacacattaataagcaattaaaaatgtttggtttaatagagaattgttagtacagtttaatagtacaactgtggcttcatttaaatcatcccagtatctattaatagataacaagattcattaaagtgccttataaaaacgagttaaaagagcatcatagttgagttttgcatctggaaatccatgtcctatctcagctcattttgacttgttctggtgcctttataaacagtggcgctccgttatggtatgaaccagtatgtgctgagcttcaaaaagccgtagtgttggctattgactagcttcctgagttttcctgttagttttttttagaacagaagccaagcagcagaaaggttctcacatacttttcttgttagaagttcggctcttggaatccactgttcattttatacagccgggctcaaaagtagacttgtgggtccttggcacagcagcatttgggacttatatctggcagtactatttcctgtctgaggtgtactgacttcacacacccagagcattccactttctttttttttttttttgagacggagttttactcttgttgcccaggctagagtgcaatggtgcaaccttggctcactgcaacctttgcctcccaggttcaagcgattctcccacctc

SEQ ID NO: 59048 - DNA, 1040 bp, Homo sapiens
agtgattctcctgcctcagcctctggaatagctgggattacaggtgcatgccacaatgcctggctaatttttttgtatttttagtagagacggggtttcgccgtgttagccaggatggtctcgatctcctgacctcatgatctgccaacctcggcctcccaaagtgctgggattacaggtgtcagccaccgtgcctggcctacacttttaattcatgcgagtacttgcgcataggccagtttcaggactacaccaggtaccctgggtcgcctcccccaggtctgcctggaggcgcctgctctggtggagctgactgactcccagtgaatgcacaaaagtgctggcaaggacaaggcatggacttcccacttttatggggaagagtggctgagaaggggaggagaaagcagctctgtggtctgtgttctttctgcctacattccctgaaaacatggagacggtgcctggtgtgcctcaaatgatactgcactgatctaagtggaggactctctcctgaggagctggaaaagaaccactattatgaaactgcacaaggctaatctttaccattccaaggaaagctacatctcaccccctttacaatattcaaaaataatttttttacttttttttttttttttaaattaagacagggtctcactccattgcccaggctggagtgcagtggcatgttcatggctcactgcagccttggcctcccgggctcaggtgattctcccacttcagcctcctgagtagctgggactacaagcacttacaggcgcgtgccaccatgcagctaatttttgtattttttgtagagatggggtttcacaagattgcccaggctggtctcaaactcctggactgcagcgatcagcctgccccagcctcccaaagtgctgggattacaggtgtgagccacggcgcctggcctaaaatcatttattttctagtctaaaaaatatctagtcatgacgccagtgctcacctcacatttgttcagcgtcttcagctggccaatgctggcgataatgagt

SEQ ID NO: 59049 - DNA, 2489 bp, Homo sapiens
ggaactgtggaaactgaaggaacggtgcggtgatccttgtcgatgtcaagcaagataacagggacttgaattagcagagtctaaaatcagggcaggcaaacgataatctgagtgcaagtctgaggagtcccagggtttagcagtagactgtatggtctttcaagagagttccagactggcactttcacccagaaccaatgcggtgtttcttaatgtttgcacaaatttccttaaaaatcaacttgtactgtagcataagaaaagtttttatttatctattggaagattatcagaaaaataccaagttattttataaaagaaaaaatatttctaaatcctgatgcattgtggctaattagtaattcaccattacctatagtttttggttaaaacttggcctagttcagaaatctgtagtagtaactgagagtttgaatttcaacctggattgcaggatagctctgtagagctaattaggataattatcagacaaaaaggaactcacaggaatgctgtgtgatcatgtgatcacatatttgagcagtggtcacttataccaaagtttggggtttctggaaataatgtcagattttgtggatctctgaagtgggcaacttgaactaacttgaagaggaaccaatatgattctcagttctgaaccttggttttaaagaagttcatttatatggtagactaatacccaaattttctttctgccatctaacataaatcctgaaggtcacagtttagtactcatagtttttaaatgctaaagttgtgtgagtatgaataaaagcaaatacctctcagggttttagtgccatcgggaaggatatttctaaattttgttgacattttgaaagaattagttttgctttcctcctatcattgcctaatgtttacctaatatgagtacatttcaatcaaagctggttatcacagaagaagatatactcagcttaggtataattgtagggaaaagcatgtgattaatttaagtactcttagaaatagtgcaactgagaagacagataatagcatattgttatacatagtagaggatgtctccccaagtttaagggacatttcccaaaatgaccaaccaaatcatttctagtaaccctttaaaatagtagtttcaatagagaattccattaaaactagtcttatgacagatattaactgtgttcagattttattaggctagctagtttctttctatttaatatttaaatcttatcatgaaatgcagtgatgagctgtaaaaataaatatgaaataagatcagaaaatcattagtaggttcaaagcctttattattgctattatgtataagcctagaaatggtcacttcccaacaaaaaatacatcccttgttatacttaggacaagttgtaaaccccctttgttttgacagtagaattgttccagtgaatcatttatttccggtgaaccccagacacgataagcagtgtggtctttaaattttattagttggttgtcaccatcgcactaatagacaatctccattttccacagaataaaactgtaatgactttaggtcattttccagctcgatttctctgcccggcttctaaaattagaacgaaggtggggaaggatgtgattaagacagatccgataaagcatgctacacatactcttcccccaccccgtccccaggcagtagcttacccttaaaatcaaacaaacagacccatggtctccatttagaatcaaactgttgctatctagagacagtttaatgtcataatacgaggactaagcttgactttgactttgtattttgctgggcaacttactttgggactttcataggacaacagaaggtctgacacaggaactttgagaagacgtgacagcaatcccttcaccttttgaattgtcatggagcctatcaaaagacaagaaaagtccattcgttctctcaaatgacagttacctgtaaaactagctcatgtgatgagaccacagtatcattgcaatgatagctgtatctgtcttttttttttttttttttttgagactgacttacttacttacttaagtaagtcttgctctgtcgcccaggctggagtgcaatggtgtaatctcggctcactgcaacctccgcttcccgggttcaaacaattctcctgcctcagcctcctgagtagctggtgcccatcaccacacccagctaacttttgtatttttagtagagacggggtttcaccatgttggccaggctggtcttgaactcctgacctcgtgatccgcccgccctggccccccaaagtgctgggattacaagcatgagcccagcgcctggctgtatctttcattttacccaagtcactttacccaagtaagtaattaggggaaagcctgagtcttgtaccacctgttcatttggggaactgtgggaaacggagccaacggacctaagtgccctttgacagtgagtttcataccatttcagtagtgta

SEQ ID NO: 59050 - DNA, 1042 bp, Homo sapiens
aaaaaaaaaaaaaaaagacagatacagctatcattgcaatgatactgtggtctcatcacatgagctagttttacaggtaactgtcatttgagagaacgaatggacttttcttgtcttttgataggctccatgacaattcaaaaggtgaagggattgctgtcacgtcttctcaaagttcctgtgtcagaccttctgttgtcctatgaaagtcccaaagtaagttgcccagcaaaatacaaagtcaaagtcaagcttagtcctcgtattatgacattaaactgtctctagatagcaacagtttgattctaaatggagaccatgggtctgtttgtttgattttaagggtaagctactgcctggggacggggtgggggaagagtatgtgtagcatgctttatcggatctgtcttaatcacatccttccccaccttcgttctaattttagaagccgggcagagaaatcgagctggaaaatgacctaaagtcattacagttttattctgtggaaaatggagattgtctattagtgcgatggtgacaaccaactaataaaatttaaagaccacactgcttatcgtgtctggggttcaccggaaataaatgattcactggaacaattctactgtcaaaacaaagggggtttacaacttgtcctaagtataacaagggatgtattttttgttgggaagtgaccatttctaggcttatacataatagcaataataaaggctttgaacctactaatgattttctgatcttatttcatatttatttttacagctcatcactgcatttcatgataagatttaaatattaaatagaaagaaactagctagcctaataaaatctgaacacagttaatatctgtcataagactagttttaatggaattctctattgaaactactattttaaagggttactagaaatgatttggttggtcattttgggaaatgtcccttaaacttggggagacatcctctactatgtataacaatatgctattatctgtcttctcagttgcactatttctaagagtact

SEQ ID NO: 59051 - DNA, 1064 bp, Homo sapiens
ttttatctaaaacaacactggataaatgataattcctttccttagattaagaaaatttttttctggaagggcagtggctcacgcctgtaatcccagcactttgggaggctgaggagggtggatcacccaaagtcaggagttcaagaccagcctggacaacatggcaaaaccctgtctctactaaaaatataaaaaattagctggtcatgatggtgtgcgcctgtaatcccagctactcgggaggctgaggcaggagaattgcttgaacccaggaggcagaggttgcagtgagccgagatggcaccactacactccagcctgagcaacaagagcaaaactccatctcaaaaaaaaagaaattttcttattttctttcctcacttctacaagcttattcctttgtagtgatgataaaggagtcaagttttaatagtggcaggatatgtgtcagactaacacaagaggccacattatttttcatctcagtttcagactgaattgggcagttgaccgaaccggaaagtggcaggagttggagtacccgagccccgcttaccctgcctttgcatgtgggtcaggatatgtgatctccaaggacatcgtcaagtggctggcaagcaactcggggaggttaaagacctatcaggtaattaagaatttcttagcttggcgtggtggctcttgccagtaatcacaacactttgggaggctaaggcgggtagatcacttgagcccaggaattcaagaccagcctgggtaacatagcaagaccccatctctataataaaaaataaaataaaaacaaaaaattaaggatttcccacctacgtatacactcatcacaccaagtttcatctcactcggcatcccatcatggaaagcagaacccacttaccttggggaaaagcacgttattctctgtataggaatcacctctcaaaggttaaggatgcacccctacatccctcaaatcttgcctttaaattctattcctaaatcttttttgagcctacttattatgttttcagctagtatttacaggtgtcatccctggaggctgggca

SEQ ID NO: 59052 - DNA, 1049 bp, Homo sapiens
ttaattgctagaagttgtttccaagggaaaatatgtttcaatgtaataagtcaggtttttttaagccataaaatattttgagtgtaatataaatagcatcggatgcatcttgtacaatagcgttctgtgtgagaggcccagatgtaacacctaattcattatgctgggcctttgttattaagaacacacggggcaaggttcaggcgtttaatagatttggcagcaggagttgaatgatgcctaagaagcatttgtttgaacatatgttccatttaagccagatattttccttcaatatgctctttctttgccttttaaaatcaggttagtacttctctgtgttatgccatttagtaaagaccaagtgatggccttagttgatagcagcaaaattttgttagagcaaatgttctcaacatttgaggaataagaaatttagataatgacaggtacagttttgaatgaaagtgttagtgacgccactgcattggtgtttgtttgtttggtcgcactgactttcttatcccttttgtgtcaacaggactgtggaaacaacgagcttcaatttgttgctgaagacagatgatgactgttacatagacctcgaagctgtatttaataggattgtccaaaagaatctggatgggcctaatttttggtggggaaagtaagttaaccattcttagcccattggcattcgtgtacctgatcaaatgtaattaataaagcataaaatatcttttttttttgaaaatgtggttgagatatacaatttcgtactagactcctgggtttatatatatttcattactctaggtcagtcatgctggctcacatctgtcatcccagagttttgggaaggctgaggtgggaggatcctttgaggccaagagttcaaaactagcctgggcaacgttgcaagaccctgtccctacaaaaaattaaaaaggtgatgtgagcctgtagcccttagctacttgagaggctgaggcagggagactgcttgagcccaggagttggaggctgcagtgagctatgattttgcaact

SEQ ID NO: 59053 - DNA, 1054 bp, Homo sapiens
gagtgaaggttgcagtgagccatgatcgcaccattgcactccagcctgggtggcagagcgaggctctgtgtcaaaaactgaaaaataaatccaactaaataaggaatcattttgtaaaaatctagtatattaggttaaacttttgtttactagtatcccataccagggagaatacagtgcagttgtcattctcatacattgctgataaccctataaattagtaaaagttgctttcaaaaagcagttggcggtgtataccaaaatccataaaaatatctctttcttgtcccagtaatttcactctgggaatgtaagtacaaaacaaattgttaggagtaaataaacatgtacaccaaaacatgcctacattattttagtagatacttagtagatattttagtagacatttagtagcaaccaaatgtctaatagtaggggaaaatgagtaaatcagggtgtatctgctcattgggatgttatacacacatgaggaagaatggctgtgacagctgcaacaacataaggaaatgcttttgatacaatgggaaatggcaaacagcagtatgcaaaattgtgtatatactctttgtaattggttttttatatgtgcatggaaaaaacggtcaaggatacacaccaaacgctaacagtggtatgtcagagttatggggtgaaaattttaaatgatacgttttgggaaaaattttctctaaaaatcttgcctgaaagcatacttaaaacctaaatgacagcaataaggaaattgactcactattcatctttctacaaaagagctttgaaggtacaatcgtgtgggagagccaagacctccacggccttgtgtcaagaaatctccacaaagtgacagtgaatgatggagggggagttctcagagtcattacagtaagtcgtttttttttaaggtttaattgcatattttagcttctttttaatatataaaattgttctaaaatttaccttagagcccaggcagcatggagcaatgattcttgtgtgttttacaacatatatagtagcaaatgttgttgtcttc

SEQ ID NO: 59054 - DNA, 1331 bp, Homo sapiens
attcttcacaagtgaagactactgtgtgtttctcttaaaatatttatgttttggctgggcgtggtggctcacatctgtaatcccagcactttgggaggccgaggcgggtggatcatgaggtcaggaaatccagaccatcctggctaacatggtgaaaccccatctctactaaaaatacaaaaaattagccaggtgtggtggcgcatgcctgtagtcccagctaccagaaggctgaggcaggagaatcacttgaacctgggaggcagaggttgtagtgagccaagatcataccactgcactccagcctgagtgacagagacagagcgagactccgtctcaaaaaaaaaaaaaaaaaaaaatatatatatatatatatatatatatatatatatatatatatgtctctaattttatgttgtccttaatggtacagttggaacctgtaactaatttcagtaaaaagcagactatttttgttcacctaagtcactagcgacgttattgttagcattatggacgcttacatccttagacagaatttcactcctgttgcccaggctggagtgcaatggctcaatcttggctcactgcaacctccacctcccaggttcaaatgattctcctgcctcagcctcctgaatagctgggattacgagtgcctgccaccacacctggctaattttttttatttttaatagagacagggtttcaccatgttggccaggctggttttgaactcctgacctcaggtgatccacccacctcggcctcccaaagtgctgggattacaggtgtgagccaccgtgcccagcctatatccttattttttgtgaaggttgaaattctttatatatagtcatttctccaatccacaagaagttgttaatgtttataggcacagaagtactgtatatatttaagctactctgttgtttggatgagaaattagaagctttatggaaaagagttgatgcgtgaaaggagttacagacagcttgcttatgttatgggagagatagatatgatatctcatttttccaacctgtatcatgctattttttcccaacttttattttggtttttatgatcttagtaagggaattgccataaacaagttgttttggatcttaagagatacctggcttcataattgccttacatcagaataaaaagtaggtgtatgagagcagaggtgaggaatagaaattaaactgtgttgtggagcagaaacaggtttaggagacaggtggaagataaagcttcttccttgcttagtaacaaaacagctgatgggttatttaagttccatgagtaagtcaagatgatttggg

SEQ ID NO: 59055 - DNA, 1052 bp, Homo sapiens
cccagctaatttttgtatttttagtagaaatttggagtttcacatgttggccaggctggtctggaactcctgacctcaagtgatctgcctgcctcagcctcccaaagtggtgggattacaagcgtgagccactgcacctggctccagtcctcttttatattcccttttttgttttgtttatattttcttctgaagattctttttgaacggagtttcctgagtgcttttgttcccagtaaaaatctgtgtctttcagtttagttttaaccctttgggggagtgttgacactataatgtgttggcttaatttaacaacactgctcacttccctgaatattttttctttcaaggtgggttttttttttaaggttatgtggattatgtttagcatttgagaatttcgtgacaactttgattaccttaaatatcgttatttaataaccatgactgcactagaaaacccagtgatgccaaaaccacagtagaaccatgttagtgaccgtggttagggccattgtggatttagctgaccaagaagtaaggtgtttgaaaactttttgcatatgcaatgtataacatgaagtattttttcttgtctttttctcccaatttgtaggaggccctcttcattgctcgcttcagtcctccaagctgtggtgtgcaggtgaacaagctgtggtacaagcccgtggaacaattcatcttaccagaggtacaggatggcaggaaaagactgtagtaccaatgcagtccttcataggagtgggcgtgtgctttcaggggcaggcacttgatattttcttgtaccagggcagcactccagagtgatagatgaaggtaccaactgtggatgggctaaaacatagcactctgtattcaaacctcctgaggacttcatgaggcctcagaggttccaaaaccactttttgaaaaacattgcatgtttccgtagtttatttagtggagtagagaactacacaactgttttaatgacaaaggatgatgttgggtgtggattgatggaaagaccagacagagataccatttgggta

SEQ ID NO: 59056 - DNA, 1033 bp, Homo sapiens
agaccaaatttactgattatttatgactacagtcagtactgtttttcttatttctatttatccaacccttccaaatagatgccttccagttgacttaaatttaatatctcctgtggcgtttatacatatatatgcacacatttatgcaaaaagctattaaagcagttctgataattaacttacttagatgtggctgaaaactgtattcttaaatttcaaaaatgtttatatagaagcagccatttttctcaagcattttttaaaaattcctgccatttgtgaattatatagcaaatgattacctaggttttggcattaagcccacttcactacttcttactagtaaaacaaaggattacatttgttcagttatataaacctgttctcattacttagttttgaatcaggaaattgaagcgttcagtctgtccgaagacacttcatcggggctgcctgaggatcgagttgtcagcgtgagtttccgagttctctaccccatcgttattaccagtcttggagtgttctacgatgccaatgatgtgggtttccagaggaacatcactgtcaaactttatcaggcagaacaagaggtatgccctgctctgtacaggttttttctcttttttctttttcaaaaacatcaacttttccttgtgacatacagtaagtagattggaagactatataattctctctggttgagagactttcacctttcttcccctattgactaaatacactgtagtgtgatataagactggtttggggatagattatctgtgaataaatgtgctatatctagaagagaaggagttgactagattagaaatctccaacctaaaattccctaaaacctagggaatttcaaaagttggtaatggatataaaaaaagtttaggattcttaggataagtgagtattattgcctcttacttccaactgtagaagtctgtaatacaaggctaataactgcttcaaatcttttttgtaataaggatatagagggaataaaagttattcttttacagaaaac

SEQ ID NO: 59057 - DNA, 1865 bp, Homo sapiens
gtggtagaatacagagataaatagagtgttaggaggggcttgacatttagtagaaggaaataggtgtaatcgtataataaaatgttgtatgtgctgtgatataaatagatataaaatagcccggggtgtttgagaaactcctaacacttctatataacttgagcacagggcttgtggtggtgggggaagggttgtggcacagtgtgagagaaacagccaggagaggtaggagagtagagaggtgtatataaagaaaagaggggggaagcatatgactgtgagaggcagacagtgagcagatcacatgtaacaggcatgtggagggttgagtggaaggacgagacctgttgtggcaaggactgctgaggggctgatctacagagatcagaggggtgaccttgtgagagaataaggtcattgaatgtagaaaatggaggaggaggctaggaagattgctagtgttctgacttggagaatagtggaatcatcaatcaaaacaaaaatactaaaagagaagagcaggtttcatgggaaagaaactcagttgtgtatatgttgaccttgaggttcctacaggcagtagtgtactgataaaggtttactaactggctctctgggaaaaatgatgcttatatgtacatacatgtttattataaattttattgacataaagtatatacagcctgtaattgacagataataacctatacaatactgtttatcgtaaattccatgaaaccagttgattctcatagaacgcttttgttgtttgtcagactctcctatctatgaccaacttatggttgcagttaacaaaagagtgtagttgtgacaaaagtctttcttttaagttaaacagtgaggtgaggactaaagtgacaactaagatatgtcagctttacacttaataaagtcagtgacttctatgctgtatcaggtaatagttttggaacactggaatcgtatcttccttgactttttttttttttttttaactattcactctgtagtggctatagatagacacatcacattaagcttaatttgcattatcaacattttctctatactttcttaagtctagacagtcaacaaaacaataaaccaaacccttatttgtattatttgccagtttctagggtgtgaatatttccactatggccaattcaagtgactaatgtgacatcactgaacacagagtgggggaaagataagcagtagcatgccatatatactatttccaccatgtagatgtaataaatataaatgatctcaagaacataatagtaaaatgtagtaaaacattaagtgattaatttgagtatttcctttgattttaatatatattataagattatataatttaattttaaataaaggctatgtttaataaccgtctcacaaaatttctgaaaagttgacagttggctcccagaagccagtagtagcaggctttagcacacagctgtctgtgggttatctgggtgaagatgtccagtgaatttacaggtcctttacatgggtctaaactagagttactaattcaggtccggacacagtggctcacacctgtaatcccagcactttgggaggccaaggcaggcagatcacttgacgccaagagttcgagaccagcctggccaacatggtgaaatcccgtctctactaaaaatacaaaaattagccaggcgtggtggcacacgcctgtaatcccagccacttaggaggctgaggcaggagaatcacttgaacctgaaaggtggagactgcaaagagccaagattacactgttgcattccagcctgggtgacagagcgagactctgtctcaaaaaaaaagaaaacaactggagttactaattcagg

SEQ ID NO: 59058 - DNA, 1086 bp, Homo sapiens
tgcctcagcctcccaagtagctgggattacaggcacttgccaccatgcccggctaatttttgtatttttagtaaggacagggtttcaccatgttggccaggctggtctcgaactcctgacctcaggtgatctgcttgcctcggcctcccaaagtgctgggattacaagcgtgagccaccaagcccggcctagttgtgaattttcttgtcactagtagtgcttactcatagtagctttcattccttttcaagacaggtttctttagttcatggttgcaatgataatagagcctattacacagcaaatgaaagacctcagaatcatcactactattagaaccacctccaaaagctgtacttcctgtagtatttccctgttagaaaataatgactcctccaccagttgctcagaccaaaacccttggtgttaccctgatttttcctttcacctgccacatccaatccatcagcataccttccagatgctgcttagaccatacccagaatctgacttctcaccacctttaccactgccatctgatctaggctgccattatgtctcacctggattattgcagaagtccccttctctgaacttactgcttctacctttgaccccctacattttattttccatacagcagccagagtgatccttttaaaattagtcaaattatgtcaattctctattcatacccctccattgacctcctttcttgctcagagtgaaactccaagtctttgttgtggtatttgaccttatctacatctacttcccctacactggctgccttactgtactttcatacactaaaagtgcccctacctcagggcctttgcatttcctacgtcctctctcactaatgtcctcaggactcacttccttcaggtctctgattagatgtcactctagcagacagccccatagtaaatagcagcccacccctatcttgtttgtgtcttcccttagttggctttaatttttttttggtaacacttatcaccagctggcatctgtattgtatttagttgtaaaattgtttgtctttctccacttgaatgtaggtttcatgagcattggggcttc

SEQ ID NO: 59059 - DNA, 1048 bp, Homo sapiens
ctctctggccttgcattctcacctgaggctagctgtagaaactaaaatccctcttccccaaagccagccataaaacctaaacatattactctaactagcccccaccaccacctttctatataaaaattacctaacttaccttcttttattacaggtcataagaacctcataccagagagggtcctatcccatacccagtaggaaagaatgtatactcagagaggacaagaagaatctagacaggccttgctgggttttccaactccatctgttaacattagatcctaccctttctgtccaatcttaattccacatagctatctatactttgttaaacctaagcacagaaatgggcactttctcctgtatctttactgatcaaataaatttatatgccttttctcctgtccatctcttgtcagtgattttcaccgaaccttcagagggaaaactttcccttggcccttacgttgccctcagggagcttgcttgggattgtgatttagtcctgacattatgaagattttgtttactgctgtatctgtgccatctagaacaatgagcataggagatgctctgtcatttgagtgaataaatcaagagaataaaactggcgcagtttgatgtattttcacaaattgaacacacccaactaatcaccacccagatttaaaaaaagaaaactatcagtgcttcagaagttcccttcatgctctgttttgtcactaccagggatagtaaccagtggcagaaatttggctacttttgtactttatataaacagaaccgtctagtatctacatagttcctatcgcctgtttatcttaatatgatgtattaatagaataatgtttaatgatatgattaacatgtaattttaatggctgcatagtattctgtcatatagctacaccataatttatttaatgagtcctttatgtgtttatgtagcttgcagtttttcgctattaataggtgacactatgattaataaagatcttctgagtgtatcactgattatttctttagaatgagttcttagaattgc

SEQ ID NO: 59060 - DNA, 1109 bp, Homo sapiens
ggtatttaagcacacagacttaaagaaatgtgcaattgaagtcatcatgaaaagccaaccacttaacacacagcgggttgtccgtgacccagcagcaagagagaccacactccttgtcttcatggagcttaaaatccgagtcagtgactcagagtctagtggaaaggcatgcttgtagtgtgtctctggaatcatagagactgtattttttcctttcatatttgacaagaccataatggtgattgatagctgcaggggtgcttgacaaaatagataaataatcagttactctttgcttagttaacaaatttgactttaaataattagaaataaagtgattcaaattttactttattaaattaaatgtattttcagtgtactaaatttaaagtttaaggaacctaaattaattactaatgttacatttttttccttttctcttttagggaaataatatatagccataaaatacttatttatctttataaggagaaaatatagtactgttatatttttaaaagttttgtacacccaaatatttgttgtttatgtaataaagcataaacaaggaggcaaaagaagatatgcaaagaatagaatgtactgagctttgtgatcctgattttattctatatcaccgcatttatgagcatctcaacttgtcagcagagtgactatgttagaattacagtcaaaaccaatgagttgtaggcagtcatttagtttatgtctctctgcgccactgaagataacttctttacactaacctcagtatgatgaccaatatgctaatacacttttaagaaatataatgtacaaatgggaatttttttttttttacagccttacattttcttgtgatggccaccatttgtacacagcaaacagtgatgggaccgtgattgcctggtgtcggaaggaccagcagcgcttgaaacagccaatgttctattccttccttagcagctatgcagccgggtgaatgcgaatgaacttcacgttctccaaagcactttaactccaaactagatttgttgacttcaccagttttaggaggttgaacctaaagaaatggatgactggacaaaccatccaaataatgataaagt

SEQ ID NO: 59061 - DNA, 1015 bp, Homo sapiens
tccctactagtgccagtggtaccaccaccacccacaccccatccccccagttgtgagaatcaaaaatgttgctagacattgccaaataacccctggagggcaaaagtgctactggttgagaaccacaggtttaatatatgcatattctagataatgggaatttgtagtagtactgtttaataaaatgtaggaaaatacagagaatcttaaaatctgaacagaacctacccaatgtgctactcttgttccgtatttccttagtcttagctccagatactttgacctcaccatagccttacaaaattaccttaatttttcttttagtttttttgtttgtttttgagaattaccttaatttttctgaattccattttgattgataactttttctactaagttagtaggtatttctttaagtggccctccttactttctgagaaaaagtaaatgtttctaaaccttatttcttcccagattttttttagtggccagccaatgccaattgactcaacagaatagatgagaaagtaatacaagtgacagaagatgttgctcagcagagcaactaaggctgggagaagaaacctgatgctgcgatgtgtttgtggcagtctccaaatgaaaagatgtgttcaaatttcaacaagttcagaggagttttagatgatgcaatatggttcctaagaaacatgtaaactgctactgttttcagaggctagcttttggatatcatttaatattctaggcctttccctatggctagaaagtctgatcattgttggcagaaaagagagtccaaacttaattctttattattaatagtctaccctggaaaaaaaatgaacgaaagagtgactatgcttatttttattttcattcacaggaaattttactcaattctttagctcagagttagaacaccaaaaaacaatgcaccgtaacctacgcacccccccgaaaaaaaagaaagaaagaaaagaaaggagaaaaagtagtcttaacaattcaaagtgaa

SEQ ID NO: 59062 - DNA, 1048 bp, Homo sapiens
acatgtcattatacatttgtcaaaacccatggaatgtacaacacaaagagtgaatataaactctggactttaggtaagaaaaattgtagcaatattggttcatcaattgtaattagtgtcccacaccaaatgcaagatttaataatagagaaactgtgagtgcagggccaagggaggggaggatacgtgagaattctgtattatctgctcaattttctgtaaacctaaaactagtctaaaaaataaagcctattttttttatttctaaattttatcattcattttgaggtgttttgcattgggagagttttcaggtaatcttatctgccatctgccacaaaaagattttctgttttattttgatgctttttaaaatctaaaattaaagtaattatttatatttccggtaaaacaaatatttttgcctatttctttgtcttagagccttcagggagagttggaaccagcatcattttcctggacatatgaagaaattaaagaagttcacaagcgttggtggcaattgagagataatgctgtagaaatctttctaacaaatggcagaacactcctgttggcatttgataacaccaaggtaaattcacccttattaattgatatatattgtttaagtgctcatgggccactgtaactatactcatactgattacatgaaggtttactgaaatcgaataaaattgccatgtttcttagtcctgattaaagtgaagcctttgttatatgaggattgtctttgacctccacagtgaggtaaattctgattccccaaaatgactgaaaggagtaatttaaacttgctcagtgctgtagcagggtccatctttgacaaactctcttgacctctaatcccttcggccaccatttctctgctctcctttatggaaaaactgttggggaaagttgcatatgcttgctgcctccagttttcttttgaaatgcttcagacagacttctcaccactctcgtcagggtcatcggtaacctctatgttgctaaacccgtaatgtcataatctttctttgtcccc

SEQ ID NO: 59063 - DNA, 1044 bp, Homo sapiens
tagtccattaaatatttaatttggaattgtatgacatgcattttcaaatttctgttattttacgtaaattcactttctactacattgtatctattacatctaatacacctgatacacatttaaattgtgataactgaattagtaattaaatacaatattttttaccagtattattactatttataatggcaagatagcagtgatatgactaattttgtattctttttttcaattcaaagaatttaattcagacattattgacattttgagaactccagaaaatgtaactcaaagcaagacctcagttttccagaccgaaatttctgaggaaaatattcatcatgaacagtcttctgttttcaatccatttcagaaagaaatttttacatatctggtagaaggattcaaagtatctattgtaagtaaattaattacatgggaaatgttcattcacacaaaggaaatagaggttttatgttgactgtattatacgttttcaaaatcatatttctttgtgctctttcagagagctttttaaaactcggacaacttgaatttttaattatagaataatatatattgctaattcacctttccaaaatgactcaactcatgaagcattgctttttaagcctgtaaccctagaagacattttctagtgttgtttagtaagatcagcatcagaaaagagtagatcatcatcattgatgactactatgggagtttacatgaactatttctttttaaaggactgtatttatggctacttactctcatttttctaattattatgaattttagatcttggcctaagtttaacacctttaaaattatgtagagaatactgataagtgtcagggttcatttatcatcatctcacttgggtttctgcgggtcacttacagttgacacaacggaacaaatcggtcagtttactctatagatagcaaaagccaatctaattctagcagaactcgtaaatcatgacatgtcaatctctaaatctaaactagattttggtgttttagctctgaacagcaaaac

SEQ ID NO: 59064 - DNA, 1120 bp, Homo sapiens
gtgaactgggtttttctgacatgcctagactcctaataaagctgtttcttccttggtgaaaaaaaaaaaaaaaacatttccaatagcatctcaagtagcaatgtccagtgaaactttctgcaatgatggacatgttttattcatgctgtctaatacagtcagcactagccacatatgcctactgagcacttgaaatgtggctgatgcaactgaggaactgaatttttagtttaaataaatagcataagtgacagtgactactgtattagacatcagagatgtacaattgaatagtgttagtagactatatgcccaaaaaaatcaatgataaaaagtgatggtaaatttgttaatcacagttaaattaggaaacatttcttaagcattatgaacatttgtttcacctgttaaaaaatgctactacttgtcacagttcctaaggtaatcatcaagtacttttcttgtcatgttagtaagacttttttggtctctgttttagtgtaactgaagactgtttggtacctatatgctgtggattatatgaactcctaagtggggttcttcttatcctgcctgatgttttgcttgaagatgtgatggacaagcttattcaagcagatacacttttggtcctcgttaaccacccatcaccagctatacaacaaggtgttattaaagtaagggcaaatactagatatgttattttaattcagaaaaataaatatatatgtaatttaaaattttgagtatatacattaaagtagacctaaatctctcttttatattttagaataatgaactaatatagtttgttacttaatactcatatatttttaaactttttttattttgatagctttagggatacaggggtttttggttacatggtcatatttttgcatcatccagctttaagtccccctccatatgttggttcatatcaatatgtcttttaaatctaccaataaatccccatatctgaacacttagtaaatctcttttgtaaaaattacaaggaatacgtggttcattggaaatctcttcttcagtgtactatcaaattttagacatttacttcagctctcagcttagatgacaccttttcaaaaagaccttccct

SEQ ID NO: 59065 - DNA, 1077 bp, Homo sapiens
tatgtatatagtagttgtcagaaagtgttggttgaagtaaattgacatacaaggcaggacatgtggtttttatagatacatcttatctctttgacaggacagtagaccccattgggaacaagtatcatgtattttacttctttttatctcccttaccacataatgcagagcctgtctattgactaacttatcaaaaacttatgacacttcagatcactagttataaaatgctactggccactaaggttgtgtgtcattgtatactatagtatatataagagactatagaacatggagtttatgccttactctcagttttgtttattcacaagccttacataggtagagtatgagcattaaaaaaatactttgtagaaactaatggattgatgttacagaatggaagattatacatgttaaatttttactctcagcaaattgggagaaaactatatccacccatttttttttttaggttgttgaactcagtagctgtgaagaaactcaagcattagcactgcgagttatactctcattaattaaatacaaccaacaaagagtacatgaattagaaaattgtaatggactttctatgattcatcaggtgttgatcaaacaaaaatgcattgttgggttttacattttgaaggtatgtcttcataaaatttattcttatagtttcatatgcagtgatactcatctcgtcatcaaagtcttccaataatagttttgtatttcagttattcctgaagaaaatggaggaaacttattagtgtatagttaatcaaactaagatactcttctagttcttttcatcatttaaataattacatttttcttttctttaaagcattttttaaaagtaagaaagaaagaaactcattgaattttagacctgggtgggccatagatatctcccatgctgtcccttcattctgtagattgatgagatctttgctttagctcccacccttatggcagagaacccagttctctaggcacctagaggcataccattccattaggcactgctgctacagagttagtttttcaagtcacagatattcgtgctcattt

SEQ ID NO: 59066 - DNA, 1049 bp, Homo sapiens
gcaaaaatttcaaataaattgacctgacccagagttcccaatatttttaagtgcttagaatagtgcctggtatgtaataagtgtggtttaagacttagttgatattagtagtaatagtataacttaatatatattctaaaccgaacaaagctggaatccttctcaaccttgatgtgatctatacaattgatcactgctaaataaatcactgaccatttgctttgtgggaaacagccttgcttctaatgtttatctgtttagtgtagtagctgttgttttttaaacaaagaaaaggatcagttgagtgtgttttcactttgaaatacttacttgctagttcatagcttgcattttaaacttgttgtcattactgaatgaaaatatttgtatttcaggaaagtctttcagttgtttatacaacttactgtcctgctcagtataccatctatgaaccagtgattagacttaaaggtcaaatgaaaacccaactctctcaaagacccttcagctcaaaagaagttcagagcatcttattagaacctcatcatctaaagaatctccaacctactgaatataaaactattcaaggcattctgcacgaaattggtggaactggcatatttgtttttctctttgccagggtaagaatcactgcttatagttttgtctaaagagaaatgacttacttattattgataaattaaaggatttcttttggaccacacgaaaaagctacactcgactatattaaacttttaacataaaaaaattacatattaaaatgttattaagctttctgccatagatgattaaggtttcttctaatttatgaatattttagaagttttctattaaccaaaaatgtaattagtacaattaaatgttaaatgtacaagattttaaattgagaggaggatatttttaaaaataaaatttatgaagtttttattccttaaatgtttccaatgcataggaaaaaactaagggtcaaaaaatactttaaaaaaaaaaaaactttaatttgtttgggtttggagttttttcaaaaa

SEQ ID NO: 59067 - DNA, 1066 bp, Homo sapiens
gaactttgggaggccgaggcaggtggatcacctgaggtcaggagttcgagaccagcctggccaacatggtgaaaccccgtctcttctaaaaatacaaaaattacctgggcatggtgacacgtgcctgtagtcccagctcctcgggaggctgaggcaggagaattgcttgaacctgggaggtggaggttgcagtgagccgagatcatgccattgcactccagcctgggtgacagagcgagcctctgtctaaaataataataataataaaaataataaaaagaaaagtggtttttgttgtttttgttggttggttgatttacatttagttatattgctatttcttcagcaaattttgtgattcctatactagattttttataatccattcaaaaagtgacaatagtattttacctcttttggtgaaattgctcatttattcctctaattgtgtactagctttaattttttccctctttctttaatttagcatgccagagagtattggtggatcttttggtatctttgatgagttcaagaacatgttcagaagagctaacccttcttttgagaatatttctggagaaatctccttgtacagtaaatatgctataatttttacatttttcactgataaattctttcacttacaatttttaatagaatgtatttttaattatttagaaatgttactaagctctttcttttgatgtgacagttggtataggcaatttcatgttattatgtgtgaaatactcaattatttgcatatattttaaccatttcacttcaatttggattaaccagacatatcgctgagattatattttctttacccaccccatccccagtttttgtgcttcagaaaagctgaataattttaattactaaagagaacttaattatgaatagttacaaccatcttagggattatccttttcaaaaggttattatccactatactcttcaattattgtctatgcttcccctttccattggtgtggcttagtgtcttttaaactattatctgctaggaaacccatttttataatgaaaccttgactagaag

SEQ ID NO: 59068 - DNA, 1100 bp, Homo sapiens
tccttatgaaaaaatcttttttattaacaaatgtgcacaaataatatatattagtattaaattgtatgaagtaaaattttaccacattgtggttttttgtcatttccaattgtataactagaatgaaatttcttacatagatttatttattaaactgaaatgacctataacttactttgttagaaaccccctttttgaggtattaagttgtctgaaaggatctgggaaattttgctgagtgaatttcataatttataatgattcatattgtttactaagtttttttcttcaagaaaatattgaaactgtccttaacatgacttttgagtaataagtattctattactaaaaacaagcaaatgttacaacctttgaattacactgatttatagagtcatcaatctgcagaagaattgtcatcccagcctggtgatttttcagaagaagctgaggattctcagtgttgtagttttaaacttttagttgaagaagaaggttacgaagcagatagtgaaagcaatcctgaagatggcgaaacccaggatgatggtaaaatatcattgaagtgcttgtaattagatctgcaagccagatcattaaatagcaaaatggttcataataataccactttagaattttgtattgccttacagtttaacaagtgtgttgcataatctttttattgatcttcccaacagtctggcattcatatatgcaacaatgtgatatagtttgttatcacaaacatcatctgagtggttaagaacatggagtgaaggacagagtccccaatttcatgtatattctagtgtgaaagacaataaataccagaaatagataataaaatagaaatcgataaactgggtgatgtcgtattagtaactgggtggtgagggaagtcctttctgaagaggcaatgtttacattgaggactaaatgaaaacaagctaggcagacaaacactggcaggaagagcattcaggcagtttgttataaagaatacataatacaggaatgcagacacctgtctgtgacagccaagcatagatttcttcttagtttaccacagctcaatttgtctttaggatggaactatattg

SEQ ID NO: 59069 - DNA, 1063 bp, Homo sapiens
cttattggccatttgtatatcttcttttatgaacatctctttaaaagttttgtaccatttttaaggtcaggttatttatttatcatcagttgtagcagttctttatgtattctggaaccaagtctattggattccaaatacggtattttctttgtatatatggtaaatagaatactttctcttttaagtcataagatatattttaagatattaaatgactaaaattatttaggtcataagttaaatatttttttcctgtggtggtattttttaatcccttctttccacctagtcactttttggaatatctgtagcaataatagtaggaacagtagatgtgcctttggagtgaaaataaatagccatttaaaacataggcctttatcaacatttagttctttcaattaggaaatggagaatgaatgtttgagtttttaaggggaattaattgaatgatattttatcatttaagatgaaatcataacactagacacatagttgtatgttttaggaggaaatttagtttttctatctgtgcttctcatgaataggagcacttcttgagtactctggggtgatttaagccctttcccaccaactgtagtccgtttgctttattaatatttatttatttatttttgagacagagtctcactttttcacccaggctggactgcagcggcacaatcatggctcactgtaacctcagcctccagggttctagaggttgtcatgtctcagccacctgagtagctgggattacagacgtgcgccaccacgcccgggctaatttttaaaaatatttttagtagaaacagggttttgccatgttggccaggctggtctcaaacttctggccccaagtgatctgcccgccatggcctcccaaagtgctaggattacaggtgtgagccactgcgcccagcttattaatagacatttaatataaagaagtaaataaactttttattgaggtataatttatatacagtaagtgcacagataatgtgtatgcagttagatgaatagtgacaaatacacctcacatcagtagtcccaatcc

SEQ ID NO: 59070 - DNA, 1045 bp, Homo sapiens
cactatacgagtcacatcttgtgatgagcatggattgtagctgaactggggcccagagcttgactgtgcctcttggcaagaggcatagtcatatgtgcactgccctctcagcagggactgtggggagggcttccccctgaagcgggtgaagggaggtgaggcaatacatgtcttatttaacttaacatctctatgttaaatatcttttaaaggttactggatacctcaaaattacttttagcccagagatgaaactattttgaaactccttggggatttcgttgttcatggtttttcccttctggaaatttgtacattttcctctgtatttatgttcccctattctgtttgctgtagcttatttcccttaatcttaaaatgtcacattaccctttatttgatttaaatatgtcataagaagtgaagtggcgtaactttagctattagaatttttcagtttttattcacctgattggaaatcctttttattaactgaactttggtgtttggggaggatgggtcagtgattgtgggctctatcaagtgaaaaatgggttatatttttaaaataccaatttattataaaatatataaagcaagaacattttataagtaatgggtttatttttattgtatttaagaaagaaagtcttctctcttaaaaagagaaaatgttttccatccaggtgctgttacttacctattctcagctatgctcaggtatttcaagcctgggactcatttcgccatggaaggaattatttaagaagcacctgactaggtcagaactatgcctgaaaatattatagggttaagtaccaatttccagtaattttaagccaatcttcagttagaaacaaacaacaaaaacacatagttttaaaagtaaatttgtatttgttttcctaatcttttttttttgtaatacttattttatagctcggtcatgagcaccgacagtaactcactggcacgtgaatttctgaccgatgtcaaccggctttgcaatgcagtggtccagagggtggaggccagggaggaagaa

SEQ ID NO: 59071 - DNA, 3014 bp, Homo sapiens
aggcagcctggccctggagtctatgctatgctgcctcttgaaggcctctcccctcacccactttccttctcagcttccctcatcttcttctgtcagtgtgaagctaggagtgcaagctacataaaaagaactttgcactttaaaattccaattctatgttataatcagagctggagaacttccccctgagatctgtttaatagccttagtagaaaatctgcataacccccaagttgggaatcagtgtttgtgtctggtttaatgctgataaaacaaacaatggatcagctcagctgactgcctagcacagtgtccccattctcctgaagccttcctagcatggcttcaaggaaactaaaagggggatcacacacaagaaggagcccactatcttaaatggctatggagtcagatcagagagagggctattgaactgatttctgccttttccaggccataactactgctcagtgaacaatggcggctgcacccacctatgcttggccaccccagggagcaggacctgccgttgccctgacaacaccttgggagttgactgtatcgaacagaaatgaagacaagagtgccttatttcctttccaagtatttcacagcaacactctacttgaagcaacttggtccagattgaaaagtgtcctctggctgagtggccactaggcccagacccagcccagcctgagccccaacaacttttccctcactgttccccaaaacatgcaccctggacttctctaatagaaaagtctccacccctacacaaggacagaaccctccacccctacccccaaccctcagacagacttatacacccctgagtgaggattacatgcccatcccagtgtcctaggaccttttcccaatactagccccccagtggtgaacagaacctcccaaatttgagttgcacccttccctgtggccttatgagctcagcctcgctttgaggtacccaccgtcctgtcagctccttgacctatgagccggggcctgactaggaaaagttgggagttaaggaggaaattagcattccttaatgttttgttttggtgctctgaatttcttctttattatagtcctatagttttactcctcagttcctcaccatcatcatcttgtctaagacccccattataatattcatgcgctgctttttcatcaaaacctaccctgtcctagagatctatgggcatttggtggatgataatgagcagcccctcccagatagaatgtcaatatttgagcagtaggatattggcatttgttagttaaaggcttaaatcaaaagaatgtccaatggtaggaatttcaaggtgtaggtcagatatttgagaataggggatttttttgatgtgccttaaattataccaaagattactaattattcctctttgcccaaaatacttgcatccaaggttctagtctctgttgctgtgctggtctttagccccactgcttgcactgatgtccctccttttcacggagacctatctgaggtacaggatggggctggcaccagatgatgtcccaccacagtccctcacctccggcctccacatgacagaaccaatttacactcaaccatgacctcacccctccttggtttctccctcgatctgtggccctttttggatgtattcttatctaacaacacaatccggaaagactgaattgaatatttatactaatggttcatatcctttattgctcaatgatctaattaaagggatcattgccacatttcatgtttatatttctacaatttgtttagaaaacatctcctgaccatatcagtagctcgtgttatctttttatcaactgcttcccagagtcctaaaacaatagaaattttggattgaaaagttcagcataaggagtttgagtcagtaaaggatgggataaaggagtcgagatgattcaatgaaaagtatcacaaaaaagagattgatcaacaagagaaataaaaaagcccaagaggaagtggtaggggaaggaatttaagaacagcaataagtaaaactcttaagtaactccaaaaagaaaatggtacattttgccaaagaccacttatacttgagaacatggaagaatttgcctgatactctctttggggaaaagagtctctcctcttttcctcaaaccccagtacactcagcctctctgccccaccttctcctgactttgtcctcacttgcttctgcagtacattggaacctgaattgaaagaaagtcttccttgaataattggagtttgtcttgagaggcaaatatagccccaagaatcacaagattcgaggaccatgtaggtcttttacgtagcccaaatccataaattagtctcactttttgtatttatcgtttcatattaaaccctctatatcaaatgttcatcatgattttgtatgatttttataactattttattcattttattagatttattctaaaattttttaatggtaaattcttaaactgtggaaaccactgaaggtgcttattaactgttctcccagatttgtacaagtattggatgattccttgagtttacagctgtacaaatagtgtggaaaataaactttttttaaaaaagaaaatcttcctctatcttttctgaatgaagagatttaatgttgggaggctgattcatgatagacagacagacagccacttaataatctgcaaaacctgtggagcccagaaactcttatcccagtattatgagagctagtatgtttctcaaccacaaaaaaccttaggggttgtaatttacctaaaaatgagtgcagtgtctcacacctgtaatcccaacactttaggaggccaaggtgggtggatcacttgaggccaggagtttgagaccagtttgggcaatacagggagactccatctctgcaaaacatcaaaaaaaaaaattagctgggcatggtggcacacacctgtagtcccaactactcaggaggctgaggtgggaggattgtttgaatccgggaggccaa

SEQ ID NO: 59072 - DNA, 1050 bp, Homo sapiens
ttgaaggcaggtactttgaccacagcccctgccaacatctgcttcttgtcctagtctggtcccctgggtctgctgtgctctcctccatgtgggcctcatgcagggaattccatatatttatgccagttatagccctttactttgttttcttttgctaacagcttcattgagatattatatgtcagttatgttaaagggaaccaaatttgttagtaacagaatcaccaaactcaaatgaggaaccaaattcaagtatctttgcaaaagaaaatgtgttttatcacctctcgatcctttcagtcattctgttttcatgtctgccaatcacttcattgtaattcttttcaagtgtttttcataaactttttctcatgcatccttattatttcttttcctctttcccccctttttcctcctccaggaacctttactggacagactggaacagagataaccccaagattgaaacttcctacatggacggcacgaaccggaggatccttgtgcaggatgacctgggcttgcccaatggactgaccttcgatgcgttctcatctcagctctgctgggtggatgcaggtgatggaaagctggacactgtccagggcgggtctcaatctcctaagtcaggggtgggcaaactagggccctggggtcaaatctaaccagccacctgtttttatataacccagaagctatgaatggtttttacggttttatctggtacattaaatatatactggtacaaaattgtatagatacctgcatactgtccttggttttgcctcctggcctgcaaaacctgaaataatttactatctggtgctttaagaaaaagttggccaccctcgtgttgtaagtggcactgcacagagcctggagtcaccctgataccgataagcaattcacaacttacattagtctgccctggctcgtgcctccccagcagaagcaacacgggaggaagagacaacttgccagtttttaagagcaagcctcatgtgttctctgggacttgtcattgtaatgcttaatttctcccactcttgc

SEQ ID NO: 59073 - DNA, 1470 bp, Homo sapiens
aaatcagttgctataacccagtaaagactggggtgttatttgtaatcactgacaccccttctttgtaccccttatacttgtatgaaagtaatagcagctatggtttcttgaaagtattatttcaatgacctttatccccgatagctaatgaacaagatagaactatttttccattccctatcttaagatcttccactgcctcccctctgcctaagttctaagttcattaacatggcctcctaccttcatctctgaccactcccccaccctcatagtctccagccacatacaatgacatcctgttcactttaagccaccatccagccttcctttatacctatgtgccagtctcgctacctaaaaagccctcatccaggatccttgtttgacaaactgctattggtccttcaggtgccagcttcaagcaatgtcacctcccccaggaacccctccctgttctccccaggctggggttcctcctccaggctcccataggacctggaactcagtctcaactgtggttggctgtgggctcatggaaaactgggcctcggcttagtcattgttactgtcctggttcccaacgtgcagcatgatggatacccacagagtgagtaaatggcatttttgaatttgtcactttgagtgttgtttatcttataaacaacaagcatttcacattcccatttggtttcttaaagtgcagggattggacaccatgtgaaataacattgagtattcagaaaaacctcatctcagctgcttagaaaacaaaaaaaattagaggagctctgtgtttacttctagatcttggaagtccagaaggtatcgctgttgatcaccttggccgcaacatcttctggacagactctaacctggatcgaatagaagtggcgaagctggacggcacgcagcgccgggtgctctttgagactgacttggtgaatcccagaggcattgtaacggattccgtgagagggtatctttgtgtaaatatgtgtgtgcatctctttgatttgcatctgcccttttagagattctcagatgtgaggctttaactccagcattggtctcctgaaattaatgagtacgggacgaaagagtctacagttttggtgacttgtagatatccacggtacaatgccagaacatgtattacagtgtggacttgataccatgtcccactttcaaatcttttgccaggagactttacaagttggcatgctcagaaattggatattttccatatggcttcaatgtggatcaacactcaggttatatcaactccagaagagtagcagggcggcataaatggactgctgaggctgctttcaggggcagacccagactgaacaccctggagatcccttcctgtgtgtttcttcggcacatccatgctttctcttccttcttactgcaagctctacctcttacacaacaggctcttagttcctcgacactgattccttc

SEQ ID NO: 59074 - DNA, 1079 bp, Homo sapiens
atgcctgtaatcccagttactcaggaggctgaggcacaagaatctcttgaaccaggcaggcagaggttgcagtgagccaagatcgcaccattgcactctggcctgggtgacagagcaagactccgtctcaaaaaaaagagggaggccaagccattttttttcacgtgacttttaatgctgtgtattaccttcttcatcagtgctctttgattgactgagggctttctaattctggtgctttcagctataaaatgggcattgtgtggctgtggcagtttgtggtgccatgaaggtgatgtgacctgatgtgtgggtgtgtgtatgtgtgtgcatgcgtgcatgtgtgtgggggtgtgtgtgtgtgcatctgtgtgttcctggtgcacacgggcctccctcactgaccccctctgccatgcaggtctgagtacagtggctcccccgattcaccaaggacctgcggtgcctaccgccgtgatccccttgcctcctgggacccatttactctttgcccagactgggaagattgagcgcctgcccctggagggaaataccatgaggaagacagaagcaaaggcgttccttcatgtcccggtgagtgctggctgattatacctggtgacagctcctgcttcagtgacctggaaaaacaagcaggacgatatcagaccagaaccccaggctcaacccctggaaccatgggtgctcattccatgtagtcctgggtgaccatctctagatggggccactgtattgctgagctgctcgtgatctttccattcccctgccaaattcatagtgattcatctttcagcagctgctcaatttaagagcctcatatctgctctgacgtagcaacaagcattggagtttttagaggctttcaaagcttcagagatgcattttgtgatttagggacttcttttcccattagatagaggttgggcaattcagaaaagccattcggttttatctgatcctgacccctgccaagaaaccaaacctgagacctgcaggcttccactacaaggctgagtcagaattgctggagcagtgggaggggctgtgagggtcctatg

SEQ ID NO: 59075 - DNA, 1029 bp, Homo sapiens
ttgatagttaatgtttagtgagttttggattactgttcccagatcagaagcaggttcccatagatttgagtaagtggcttaaattattgggtaaactacgaattccagaagaaatctcattgtccctgggcctggtggctgttttacagatgtagatgaatgccagccaagccgatgtcaccctgacgccttctgctacaacactccaggctctttcacgtgccagtgcaaacctggttatcagggagacggcttccgttgcgtgcccggaggtaaggtggtgggacatctggagtcggtagcccattgccctgtccatgaatgcagagcacatggcccattgccctgtccatgaatccagagcacatggcccgttgccctgtccatgaatccagagcacatggcccgttgccctgtccatgaatccagagcacatggcccattgcctgccctgtccatgaatccagagcacatggccctgggagagaaggtgaggcgggaaagtaggaggctccatggagagttctaagggttgttgaggtgggagatcagagcatggactgcaatgtagagcattctttgaaatggtagaacatcaggtgggaacattgcctataatcccaatactttaggaggccgaggtgggtggatcacttgaggtcaggagttcgagatcagcctggccaacatggcaaaaccccctctctactaaaaatacaaaaattagtcaggcgtagtggcttgtgcctgtaatcccagctactacggaggctgaggcatgagaatcacttgaacctgggaggcagaggttgcagtgagctgcaattgagccactgtagtccatcctgggtgacagagtgggactgcctcaaaaaaaaaaaaaaaagaaaaaaaaagaatatatttgacaccttagactggagttaaccagttgtgttatttatttttaattactgctgctgttgttggtcagatatattcatgccactataaatgttttcaattagagataagtaaacattttcatcc

SEQ ID NO: 59076 - DNA, 1079 bp, Homo sapiens
cacagacaaaaattgtatttaacactacttttgatacatagaaaatttattttaggctaggggcggtggctcacgcctgtaatcccagcactttgggaggccaaggcgggtggatcacgaggtcaggagtttgagaccagcctggccaacatgctgaaacctcatctctactaaaaatacaaaaattggccaggcgtggtggcacacacgtgtaatcccagctactggggaggctgaggcaggagaatcacttgaaccctggaggcagaggttgcagtgaaccgagattgcaccattgcactccagctctgggcgacagagcaagactccatctcggaaaaaaaaaaagaaaattttgttttaaaattgatctattcttaggtgacaatgctattttattatagtcagtaatgtttgaagagctttaaaaaaaagcctgcagtaaaaaaaaatttttgctgcagatattgatgaatgttcagaacaaccctcagtgtgtgggagccacacaatctgcaataatcacccaggaaccttccgctgcgagtgtgtggagggctaccagttttcagatgagggaacgtgtgtgggtaagttctccaggtaacttttcgaaacagtattcacatggtgtgcattagctcttatgcaaaagttctggtcccaggtaaaatgagtctggtcaagttggaaggtgctgggaagagcaatttataaagatgaatcagacttagcctctgccctccaactatctggagagtcacaagtgtaatgagtaagcaacattattgcctacactagtaataccatcgcctcacctgttgccagcttttgcattacatttgcctcttataaacttcttttaatcattttcattatgcttttaataactataagctattagacatgtttcttccagtaattagtagccttggggttcacattgagggagcaccttataggtacttttggatcattacctatcttagattgaattctactttagttacacctaaaattccaactggggtcattctatttatggattttaattttaccaaccacgagcagcagcataa

SEQ ID NO: 59077 - DNA, 1046 bp, Homo sapiens
cgtagctatttcaatattcatcaccgtaactggcattatggagcacttgacaatttgcagaacatagattgtatcctttttttaatcatcagggaaatggaggctcacaggagttaagtagcttactcaagttcacccagacagagcctagcacagctgggagtccaacccctgtcctccgctatttccagcacaacccttgagccaacccaacagatgctgggctgtggctaggaagcctcttctctcctctgcgtgtggctcagttgggccacagggatgtctgagctctgtcttcagtgtcaccagttctatgttctacagccaaaccaaagcacctgcagaagcgttcgcaccaaccccactccacactgtgagcctggggcgggcagaagggcgcgctccccagtcagcaaagtgacagtctcatcttgtttttcagggggtgagttcactcgccaggctgaggtgaccttcgtggggcacccgggcaatctggtcattaagcagcggttcagcggcatcgatgagcatgggcacctgaccatcgacacggagctggagggccgcgtgccgcagattccgttcggctcctccgtgcacattgagccctacacggagctgtaccactactccacctcaggtgagccccagctgtgtcccagggccagccccagaccggccactagcctcgtgctcttgacccaccacggcagccgtgaactggggctgtctctgggatctggagagggaaatacaccgggccttacagtcaccttcccctcaattatagacataggacgcactactccttgtagagaattttgtgcaaaaaagacaatacgcatgagttagagttgtaaaacctggacataattattatgacatttaagtgtatttcttttcagctttttctccagcatctatctatttacatgtatatgaaatatcccaacatataatttcatgataaactaattttattatacatctatttgtacttttttttttttttgagacagggtttcactcctgttgcccaggct

SEQ ID NO: 59078 - DNA, 1024 bp, Homo sapiens
agtcctaaagccactgtcagtcctatgagccaccttagctcataaggtagagcatgtaaccagcaattaggatgagcaagttgaattttaagtcctgatagtgtccctggagcacacttctggaatggctgggactgagcttgtgctagtattgtgcccatttggacacagtctcaccagacagccctagactgcctcagccacatgacgcccagacatgacggccagtgcccttccactctccagtcctagctgcaggtgatggcttgcagaccaacacagatcctcagggctccctctgcttgggtagtggtggctgttggtgggttgctggcctgtttctaagaagcctgtccttcctcctaggagtagtaactctgggcagcagggtgtctgggtgtttgagattgggagtccagccaccaccaatggcgtggtgcctgcagacgtgatcctcggaactgaagatggggcagagtatgatgatgaggatgaagattatgacctggcgaccactcgtctgggcctggaggatgtgggcaccacgcccttctcctacaaggctctgagaaggggaggtgctgacacatacagtgtgcccagcgtcctctccccgcgccgggcagctaccgaaaggccccttggacctcccacagagagaaccaggtctttccagttggcagtggagacttttcaccagcagcaccctcaggtcatagatgtggatgaagttgaggaaacaggagttggtaagaccatttaagttgcagttggtaacgatcttggatgtgtgggcttccagacaggcgtactgctggggagatgtcagttgtgagcattacatggtggtttgtaaagataagagcttgggaaagtagaggctgaactctcacagccgtggagccttggtgttatatgcccagtggcttcagagatgctcagtgatcttttgggattaggaccatggttttggagactgttgagtgtgtcttctttcaagtttcctagtattccgttctgtctg

SEQ ID NO: 59079 - DNA, 1048 bp, Homo sapiens
ctcccaaaatactgggattataggagcaagccacctcgcctagccatctcttagaatttttaaaatctataggtcctcccctaaccccagctcttttttttctttaaaatttatttgttcaagaaactagatatttctccattttagtgctttatattctggattttgctgattgcatcccattgtgtccattagcatgttcttctgtctcctgtatttcctgtaaactggcagttagatctggagacatgactgaattcaagttatgcactttttatttattttattttagtaattggcattttactccagtggcaagaacggcagtaatgcacagttctctgacccttcatatcacttacaactgagctcaccctcaggccttatttctaaaataacctgggtgcacaggtcttatcctgctttgaacctgcctgtcccctatattggaggaagtcaggaagtggggagactcatatgtatcagaccatgtgtaagctctggaactactgtggtgaccaagacaaatggagtccctgaccgtgaagaaatgaccacatagtggggagagaagccagaacctacaaataggcaggaagaagacatatcaggggctgggggtgtgagggaagggaaaaaagagtgagtggaaggagcttccactggaggggatgccaggaagctctctgagaaggcactgtttcagctgaggaataaggataagaagggacagtcatgtgactaacgaggtggtggggttgggcgggggcgtgctgttggtagctgagatggagaaagtgccatatacagtagcttctcacttaacattgtggataggttcttggatactgtggcttcaagctaaacatgcataactaaaccgatttgactgtcgggtaattgacagaaacaacatttaagttcctatggcttatttctggtcagaaacacatcaccaaacttcccatgaagcccaaaacacttctagtattaaacattgaaataaataaatgtgagctctacatacatttaagatgaataaaaacaa

SEQ ID NO: 59080 - DNA, 1052 bp, Homo sapiens
ggcaagttatataaactaaaactcattttttctcaaatgaagaatgaaaatggtattaatctttactaggtttaatgagataactaaagtaaaaatgctttgtaaactgtaaagcaccttgcaaacggattaggctccaggtccacttgtgggctctaggctgaaattaatcagtctccaccttgattgtgtcccggacttgcctattttctggacttcctttttgtgttttacttttttttggactcattttgttttccagctttttgtagctacccagtcactaactttgaagccatcccaaaaaacattgcaacttgcatgacttttgcccccagtgtctctaaactaggcagccaagtgtaacagaaagagcacgggttacggactccagcaaatgtgtgttccgttcttggttctatcacttactggctgtgtgacattaaagctaaattaaaatctctcatcatttccttgtctgtttcaagtatgcgaaaagagggatggttgtactaaatgcctgtcacatgaaattttaaaagataaaaagagccttagtaaaggacctcaacattaggtgacagcccatgtttgctgcatttccactctttatgttaaattattttaagttcctgctgcctctcacccatggagtttgcttttgcaagtctcactgtcttctcagtacagcgatttgtatttgtaaaaggaccctgtttgtttcttatttgtttctacctcaagtattctctaaacacacatgttttggagaaggctccccctagactattgcagaaagcagcctgttactaggctcatctaagcccccggccaagtggctgttgtttcactttttcagggagtatttggacataagaaatctaacataaattttaaatttattgagcatctgcatatagactttctccggtgattcatgctatctgaaagttcacgttaaagatgaaatgagacaggaagtgctttctaagatgggaaacaccctcccattataagttaggtgctctgtccatccccttcttgtcagttgg

SEQ ID NO: 59081 - DNA, 1001 bp, Homo sapiens
gcggggtctgggtggctccgcgcgccccgggccgtgaccccggcacccatggaccccgcggagcttcctccccggcggctgtgggctgcatcgccgcagggaggtcagtccgcgtccctcggctgtccagtcccttcggggctaggacctggccggtcccgggtggagccaggttctcgcgcggagcctccgcagggcaagagccggagctggatcgcagtctgcgcgcgggccccgggactcttgtggctgcgggagagtttcgccggcagcctcctgtatttgtgtgtggactccggatgtgtcttggcagtgatgctgctttccagttgggctcgtttcagagtccagagtccagagcgggaaacacagggctcccagtgatcccatttcctgtggccaggcattgtcaccacggaggccccaaacgaggagcgggaccagatgacctacagctccctggatcctccccgtgactggccgggcctggggtcgctgtcaacttgttgaagtcctttcgtgccgctgccttcctcggccgcccaccatgtggatttcatataaggcttgtgtgcattccagaagtgtggggggttggccgggggaagggggttggaactgcaaacgcagcggctgcagcctgtcctgcccgtgaaatggctgtgctcccggtctggcctgggaacactgcgccttagacaacactcacgtggaacttgtaggctttgcctaaaacgaatgagcccttcaagtctggatccacaaagagccctcccccatgttggttgactgccctggcccctttgcacactggtgaagcctgtggatcccttttcagtataacgcttttattttagtttttagagagacgaggtcttgctctgttgcccaggctgggtgcagcggtgcgatcttgggtcactgcagcctccaactccttggctcaagctgtcctctggcctcagcctcctgagtagctgggaccacaggcgagtgtcacc

SEQ ID NO: 59082 - DNA, 1130 bp, Homo sapiens
aatttactatgtggctgacattgttaatatatgcaattatttgtagatataattcagtatttccatcatccctgcaagatgagtaacaggatgttcactttgcggatgaggaaaatgaaccttaagcaacctaggcgtctggtgaaagggtttccagccagcaaccggaggaggcaggaatcatgccaggtgtgtctggtgccggagcccagaggcttcccagatccgcacacttcatgctcactcatctgccagccacacagaggtcctggatgtctggtgggcgatgagcaagcgacagagagtccgtgtgatgaggttgctcaggctgatgtgacaacagtgagaagaggcgtctcatctcatccctaaccagacggggttagggatggcgtcttggagcagccaaccggagagattgacatcgctgataaagaggtagattcacacgacctcatctttgtcagtgcacaaaatggctccctacagcccactggtgacccggctgcagaaagctctgggtgtgcggcaataccatgtggcctcagtcctgtgccaacgggccaagatggcgatgagccactttgagcccaatgagtacatccactatgacctgctagagaagaacattaacattgtttgcaaacgactgaactggcctctgaccctcttggagaagatcgtgtatggacacctggatgacccggccagccaggaaatcgagcagggcaagacacctgtggctgtggccggaccacgtggccatgctgcagttcatcagcagtgggctgcccaaggtggccatgccgtccaccatccactgtgaccatctgaaagaggcccagctcggaggcgagaaagacctgcgccaggccaaggacatcaaccaggaagtttataatttcctggcaactgcaggtgccaaatatggcgtggactgctggaggcttggatctggaatcattcattagattattctggaaaactatgcataccttagggttcttctgattggcactgactcccacacccccagtggtggcggcctggggggaatctgcattggagttgggggtgccgatgctgtggacatcatggctgagatcccctaggagatgaagtgccccaag

SEQ ID NO: 59083 - DNA, 1655 bp, Homo sapiens
gctggcatggcgacaatctgcaacatgggcgcagaaattggggccaccacttccgtgttcccttacaaccacaggatgaggaggtacctaagcaagacggccggacagacattgccaatctagctgatgaattccaggatcacttggtgcctgaccctggctgccattatgaccaactaattgaaattaacctcagtgagctgaagccgcacatcaatgggcccttcacccccgaccaggctcaccctgtggcagaagtgggcaaggtggcagagaaggaaggatggcctctggacatccgagtaggtctgactggtacctgcaacagttaaagctatgaagatcccgggcgctcagcagctgtggccaagcaggcactggcccatgacttcaagtgcaagtcccacttcaccatcactccaggctccgagcagatccacgccaccattgagcgggacagctacgcacagattttgaggaatgtgggtggcatcgtcctggccaatgcttgtggcccctgcattggccgctgggacacgaaggacatcaagaaggggaagaagtacacaatcgtcacctcctacaacaggaacttcacgggctgcaatgatgcgaaccctgagacccatgtcttcgtcacgtccccagagattgtcacagccctggccattgtgggaatcctcaagttcaacccagagaccaactacctgatgggcaaagataggaagaagttcaagctagaggctctggatgcagacgaccttccccaagaggagtttgacccagggcaggacccctaccagcaccccccacaggacagcagtggccagcacgtggatgtgagccccactagccagcgcctgcagctcctggaggcttttgacaagtgggatagcaaggacctggaggacccgcagatactcatcaaggtcaaagggaagtgtactactgaccacatctcggctgctggcccctggctcaagttttgtgggcacttggacaacatctccaacaacctgctcactggtgccatcaacattgaaaacagccaggccaactccgtgtgcagtgccaacattgaaaacacccaggagtttggccccgtccctgacactgcccgctactacaagaaacatggcatcaggtgggtggtgatcggggacgagaactcgagccgggagcacgcagtgctggagcctccccacctctggggccaggccatcatcaccaagagctttgccaggatccacaagaccaacccgaagaagcagggcctgctgcccctgacttttgctgacccaggcgactacaacaaggttcaccctgtggacaagctgactattcagggcctgaaggacttcgcccctgacaagcccctgaagtgcatcatcaagcaccccaatgggacccaggagaccatcctcctgaaccacaccttcaatgagatgcggatcaagtggttctgtgccggcagtgccctcaacagaatgaaggagctgcagcagtgagggcagtgcctcccaacacacccccaacctcgccccccagagctggcgtcatgttcaagttcagctccacatgcgccatcagcagatccgatccatccagccatgggttctgattccaagatggtgtgaccagacatgcttcctgct

SEQ ID NO: 59084 - DNA, 1291 bp, Homo sapiens
ggaactttgcaagactcaactttggatcctgacaaaccaagccttgggtagcatcagttaacagttttatggacgattcctcagatgaaaagcttcagaaaagcatagtgacagctgaatttttagggcacttttccttaagaaatagaacttgatttttatttgttacaggtttccaatggccccataggaataagcaataatgtagactgataaacccttattttagtactaaagagggagccttgctatttcagtgggtataatttaaactttttaaagaaaatctgtacttttataaagatgtattttgtataacttaaataataatgctaaagtatactagggtttttttttcttgagaatgttactgcaatcatgttgtagtttgcacagacttttatgcataattcactttaaaaatatagaatatatggtctaatagttttttaaagcttttggactaaagtattccacaaatcttacctctttaggtcactgatggtcactccgattctgagtgccacattggtagactcctaaaatacagttgacaacttagccaattgcaactccagtgttgataattaaaatgaaatggtaaagcagcagactgtaaggtctttagagattttttttttaaggttcaggccgtaggttcctcaaggaatctcttaagttttgcccaaagactggtacttcctttcagtagggcgctaatgtatacacattaatgataagttgataacattaaaaatgtagctgacttatcctattaaacctcctctgctatgttcacagattctgcatagttttttttcagcctaatgaaatctaatatgcattacctcagggccacatcaagaatacacccctttccgaactcactgaatgttcattacattcaaggagaaaataagagggtccataaagggcattaataacaaataccccaagccgttgagctaagactatgtggaatcctaatagttttttccgtaatctccaactatatttaaaataatgcccttctaaatagctctgtaaagagcctattggaagctgcacatttaaaaatggcaatagcactgcaatatgctgtagcatgatgcctgtcagccatgttccagacaattccttgtaagtcatctttcatttaagtaaaaaacaggttatgaagtactgcctcccagaccggaagtgccattctaaaaactccactatatatatcctggagccataaaactgcctattgggaggctaaatgctctgcttttctataaaacagaga

SEQ ID NO: 59085 - DNA, 1071 bp, Homo sapiens
acacatcaatcatatttataccaattctctcttgaatgtatcaggcaaattaaaagctttgctggttaaatttagctacttagataaggcacactcactaatgcctcctcaaatttcctctttcaccaaaatccaagtcagctgctctttgttgaccttagtgctgggccaacacctagttgaacacttaaaccttattaagaagaaaggaatacatattagtaaaccctagaacttgagaagcactgtgagaaaaaggttctcatatttacatagtggatattacttgcttttatcttttaacagtaaaggtaaacttatattagaactaaatgggtctaaatatttgaaacttttatcgagatttccaactagacaacctttatctaaaaaataccattctttcactttagattgttgcatgaggaagagactagcatagatctgatcagagacacatctaatatgcattcccagttttcatcttatatgagaattgtattaaaggacatttctaactgtatactatcatgctacttaagacatgggtccagatggaggagctgctgaaaaggatcaggctaaaattggggaatttgtctcatcaaaaagattcaattaataaacggattaaagtgaggaaacatttaacaaggaacagtgaggataagagagtgggattcaatgtctattcagtacctattatatgagagacgctggactaggcactcgtcacgtttctgtggatcctagtctatactcaggaacacccacttattaacgttactctaggcccttagcaaggatacataagaactcttgcaccaagggtcaaaatacattgaagtcttctgaggatgtccctgtgcccataacctagatctgtgtcagagtccctgtacctgttgcccggttcctatgggccagggcactgatactacatgccttccgtgtggagttctgagattggctgcccaggtcattaattatgggttcagggttgtaagatctaaatccagtgactcagcaactcctaatgacatctacctggttcctccaagtctggattct

SEQ ID NO: 59086 - DNA, 1007 bp, Homo sapiens
atgcactagattaaaactaaagcctgggtaattaaaacaatgtggtactagtgcatgactaaatagagcaatgaaatagaaacagatacagagaaacagaagcagatacacagctaaatacatatgacggattctaagataagatcaatgtagcctctcaaactcgtcaggaaaaaacaaacagttcaataaataatattggaacaactgggttaatcacctgcggaaaaaattaggttagatccataacttatatcttatgccagaatatgcttcagaggttcaaaatttagatgtagaatttaggtgaattactctattgctctggattgagaaaaacattctaattatgactcaaaatccagaaaccactaaaaaaactggtaattcagactacataaaaattttttaaaactcatgacaaagccatcataagcaaaagacagatgacaaattggaaagaaaatatttgcaactcattactgtcaaagggttcatatccctaacaaataaacaacatatcaacgatatagtagaaaaatggataggaacaaaacaatatgggaaacaaaaggaaatacaaatggctcctaaacatattaaaaggtggtcaaccttaggcatagtaaaaatttacatactgagcagtcaggtgtgtggcgtgcacctataagccaggctattcgggaggttaaggctggaggatcacttgagcccacgagtttgaggctacggtgaactatgatcataccactgcactccagcctgggtgataacgtgggaccctgtctcttttttaaggaaaataaaagaatgtacacattgatataaattttcatctaccagaatggccagaatccaacattttaataacatctacattggtaatgttgcaggttagcaagtactatcataaattttagatggtatgtgaattgatgactacccctatgaaggacaatatgccaatatctttcaaaattataaatgcacacagtctttgcccc

SEQ ID NO: 59087 - DNA, 1051 bp, Homo sapiens
tctgtgattcataccaacagtcctaaactgtcattttctaaatctgggatttaaaatctttagacaatatttaaaatcttgattttttttaaatgtcagcagatacaatttggaagattgcatctgtgtagaagtaatgcaggtacaagatctagagtttttccttagactctttagtcttttctgaattaaagaataagtgctcttaaatccatattttatcctgtcaaagtctgaaatgtgttcattgatgatttggtgacatctaaaaaattgtatttagttggcttggctcacccctcttaaaaatacttagccatctcttggtgggatgtggtgggggtattaaggtctcagagttatttattttctcacctaatttcaaacctttataaacttggggttttgttgttgatggtggtagtattttttgttaagttgtttaaaaggctgacttgattggagcctcctctactttttcttgagggttgcaagtattgtatggtgggggaggggggccttaaggcaaactgtctaaaaagtgactatccaattaatttaactagtaaattagtaagaattattcttagtattcactcagagtttaagatgtgaaaaatctgcactttgtttatcactctaaatgtaaagaactttttgatagtgttatttcaccactccctcagttaaaggctattatttaaactgtttactggagaaaatcctcgctcatgtccatttattgtttttttctgtactgtgatttgtttcaagcttaggaaaactagtatattagagtatgttctaggaaattaaaagatctggttagagtaaaaagttctttttaaggttcttaactaattttttcacaactaagaaaataaatgaagtattcttaggctgaaattcatcttattttatcataaattagattgtaggggcagcctacatttttgtgtatgtgtttttatttcttaaatgattgtgtgagcctggtgacattttatggttcttgtgatctaaactgtttttccaattcacatcttttgtc

SEQ ID NO: 59088 - DNA, 1361 bp, Homo sapiens
aattagtgtgtttggggaacattgagtaaagagcaatcatttgaagaggaatgtgcaaaataaatttattagaccaattgtaaatgatttgagattctttattaagaattattcatatcactgttcccattattaatctaatgtctgtagatagtatgaagtaacaggcttcctttgccccttctaaaccagtcttaatgagaacactaatttaaacatggaagcttcagtgtttgaggttttttattttaggttttgctttcaaattatagcttatgtaacaatatcaataatttgaaacagtatgcaacatgttagccttactaataagctttttctttcttccataggctttctacaagtataagagacttacagaattttaaagtcttattacaacacagtaggtaataaaggcttttatgtgtctaactagagacataaagtgactgtggaaagccttttaattatggacattcatcagaaagacactaatctgacttcaagaattctgaactattaaatagaaaatttaaatgctcacttgaatatttatgattcttaatagattattatcaactagagatatttataaatgaagtatatacttttaaaacatgtaagttatactaattttgtgtttaatttcatatgttttcatgtaatgaaaattctattttttttagaattggttttgtttttattctattatcctttatttccagttgtcaaactttaaatggctatgtctgcattctaataacactgttcagtctgttatggaaaaggagaactagggaacaaatgttgctcagggctggtgtcagtgagaaaaatttatcaatgctttttaatgtgtttttacccttgcctcactgtgtgtgtgtcactttctataatataaagaaatactataatatttctagaatctggaactgtcaccatgatgaatggccctttcaatgcatagttacagaaattcctgaagattccccaggacttcaatttcattggtttttatttgcagtttttagttgctgtaattgttgctgtttccagtctaaaggacctcctttggtaaaggtgaacaagacctctcccctatgctacccagccagattttgtgtgtgtaatgggctggcccaagagtgttcttttacttagaactccttttgattttgcttttctctgcccctagaaattttagggacaaagacattttggaaattgtcagttacttttagaaagaaaacactgcagaaatatttaacagattacttcttgataaaatttaaatgggattatatgaatttataatgccaattgaaaatattatatacacaaaatttgctattttcact

SEQ ID NO: 59089 - DNA, 1086 bp, Homo sapiens
tatggtcaaatttacttcccaagagggttgttttttcagttgatatcaccaacacatcagtgctaattgttaacttttacttttgaatttttatttatttttttgagacagagtcttgctctgtcatgcaggctggagtgcagtggcgtgatctcagctcacttcaacctctacctcccaggttcaagcaattctcctgcctcagcctctcccgagtagctgggattacaggcgtgtgccaccacacttggataatttttgtatttttagtagagacggggtttcaccatgttgaccaggctggtcttgaactcctgacctcaagtgatccgcccgccttggcctcccaaagtgctgattacagacgtgagccactgcacccagcctaattgttaaattttaatatgttgttgatggaaataatatttagttggtggaaatttctgcctcattttcatttgtatttcttacatatgatagggatttttataatggaatgtatgtatatttagtgtatatcattgttgacagattgattattctgccaatagaaactgaaataaagaataaggtaataatttttactaaacttacgaacttctttgcagtacttgaaaatggcaaacaataccaaagaattagaagattgtgagcaagctaataaactgggagcaattaacagcacattaaggcaagttttattttggtaatattaagaaaatattctcattgatatcaagaatcaattttttatgattttggtaaaacattttcgaacccattaaagttttaactaatatatttttaaaaggaagaaaaagtttttctttatcctaaatttcataatagctttgcctcttcttggctgatttatccttaaatttctagaatgtatcatccatagtaaatcttttaaaaagtagaaatttacaagattgttcagctaacagggtttatggatcaatttttcctgattactatggaagaaggggcttgaactcctaaatctttttaaatagtgattgagtctggatgttacattttgaatgataaaagttattagcctgttaaatttcgtagattttt

SEQ ID NO: 59090 - DNA, 1013 bp, Homo sapiens
ctctggattttctttgtagcactgactacaactcgtactaaacttacaaatatttaatttgtttccttcaatagatttttaagttccagagggataggggagttctttttctgtccattttccccccatagcctacccagtgcctgacacatagtggatgctcagttcttatttgttgaataaatgggtgcatgagagaattctcattaataagataacattaggaggctggaagacattcaagtagttctaaatgctttctctgtcacccagtctggagtgcaatggcatgatctagctcattgctgtcattttaaattctgaaccttataggtgccacgaggataggaagtattccttcttattcaccaccatgtcactggtgcccaacacaatgacactttgagagcaccccataactataatatgagtttactaactttgttctttctttcaaggttaatctgaagcgaccttgtcctttctgggcagaagatggccactgttcaataaaagactgtcatgtggagccctgtccagaggtataataaataaaataacagggcaaagccaattttctcttggacttttagaaaagcataacctctattttatttcaggctaatgtcaatggatttggatgtgtcagcaaattcatatgctctcagctctctcctttagaaccagattattgaagattctatacttgacaccaaaatgggtttgaagacacttgtatccagtgatactggtgatcaaatatggaaatatagtcttattctaaaatggaaggaaaatcagaggcctgttctaggattggatctgcagttgtcttttatttcatgctttattgaatcagcatcttgtttcataggaaaaaaaaaacaaaataaaaacaagctactggaccctatatttcaaatttatagtgatttaattggggaaatttcaggcttagaattagattttcacttggccttgttacatttacatttaaaaaaaaacctatactt

SEQ ID NO: 59091 - DNA, 1818 bp, Homo sapiens
gaaacaaccacaggtcaagaaggaatgtgaatctgttgttttataagagtttaggacaaggacgtggaacagtggacactggttttccccaaagctggcagttttgtggaggggtagcttgtttcggtggtggatctctgtttatttttgcacatctgttataatttaatattcaaatctggaattaagaaaacatattttctagtatcctctaagggccaaagtcctacaatcggaatggattcatgccacgttgaagataaaattatcctctctctgaaatacggtaaagatttaaataggtcctgagactgttgatagccccagacatacccacagcattatatgtaacatctctcctgatcagtgccattcccacggtttcaaagaaaacagctacaaggaatgcttacctgagtgtctgcagcaccctccacttctctcctaggcaatgagacccagtggctagaaattcaccatgtctattctcaagatccatgccagggagctctttgactctcgtgggaatcccactgttgaggttgatctcttcacctcagaaggtctcttcagagctgctgtgcccagtggtgcttcaactggtatctatgaggtcctagagctccaggacaatgataagactcgctatatggggaagggtgtctcaaagcctgttgagcccatcaataaaactattgcacctgtcctggttagcaagaaactgaacgtcacagaacaagagaagattgacaaacttatgatagagatggatggaacagaaaataaatctaaatttggtgcaaatgccattctgggagtgtccctcgctgcctgcaaagctagtgctgttgagaagggggttcccctgtaccaccacatcgccgacttgtctggcaactccaaagtcatcttgccagtcccggtgttcaatgtcatcaatggcagttctcatgctgtcaccaagctggccatgcaggagttcatggtcctcccagtcggtgcagcaaacttcagggaagccatgcccattggagcggaggtttaccacagcctgaagaatgtcatcaaggagaaatatgggaaagatgccaccggtgtgggggatggaggcgcgtttgctcccaacatcctggagaataaagaaggcctggagctgctgaagactgcgattgggaaagctggctacactgataaggtgatcgtcagcatggacgtagaggcctccgagttcttcaggtctggaaagtatgacctggaattcaagtttctcgacgaccccaccaggtacatctcacctgactgtctggctgacctgtacaagtccttcatcaaaaactacccagtggtgtctactgaagatccctttgaccaggatgactggggagcttggcagaagttcacggccagtgcaggaatccaggtagtggaggatgatctcagagtgaccaacccaaagaggacagcctcggccgtgaatgagaagaagtgcaactgcctcctgctcaaagtgaaccagattcgctctgtgactgagtcccttcaggcgtgcaagctggcccaggccaatggttggtgtgtcatggtgcctcatcattctggggagactgaaaataccttcatcactgacctggtggtggggctgtgacctgggcagctcaagactggtgccccttgctgatctgagcgcttggccaagtacaaccagctcctcagaattgaagaggagctgggcagcaaggctaagtttgccggcaggaacttcagaaaccccccagccaagtaagctgtgggcaggcaagcccttcagtcacctggtgg

SEQ ID NO: 59092 - DNA, 1050 bp, Homo sapiens
cagaggctgtgcaggaggccgagctgggtggcgatcagcggcgggtccctgtccaaaacccagcagagccgccagggacgccccagacacagaaggcggggcgcggggagggtggggagaccacagcagtgaggcgcgcgagccgggaagtgaacgaggactgactcctgtcgcttcccgtagccgcccacggacgccagagccgggaaccctgacggcacttagctgctgacaaacaacctgctccgtggagcgcctgaaacaccagtctttgggtgagtcgcgcgacccccggcctcgggtggcggggcagtcgctagaggcgtggctgctctgagggtctcgccagtggaggatggcattcggatgtcacggctcctaaatcaccatttgatgggtgggacagtgtccagtccaccccgacccgccggtcctcaccgcggcagagccggggctgggtggcggggacgctgcctctgcaggcgaggcgctccggggcataagggattatcaggagtcgcggcctttcttggacatccctggctggggtcaggctgtttgccctggggtgtctcctcgctgcaaacccaccccacctgggctgctttctcacctgttccctcctagcctgaggccgagcgccacctccaagtggaggaatctggggaagtttccttcccggaatttgtagtgacagtggagtgacctccattgcgttccctgcctctaacacgctctttaggatgccgagtcatttgactgcagtgttaaacattgcaaagcgcaagtcatgtgacttcctttgaccgtacgtgaaacttaagtgatggctgcttgtgatgcatacgaagtgttcatgctggcgggacctgtccctggggatacttcgggggttgcgtgatttaatgcaagcagatggcttaaattgggtcactggcttgttattatacatgtgtatggcaactcggcatccattctttttgctcttgttcttacttcctgaattgagtcacggagccagagttttgaggttttgactaacgaattaag

SEQ ID NO: 59093 - DNA, 1053 bp, Homo sapiens
cttgaacccgggaggtggaggttgtaatgagccaagattgcacaactgcactgcatcctgggcgacagagtgatacttcatctcaaaaaaaaaaaaagaaaaaaaaagttaggcttccttttctgtttttttttttttttctttcttctctttttttttttttttttaagagatggaggcttgctctattgcccatgctggagtgcagtggtgcaatctcggctcactgccacctttgcctcctgggttctagcaattctcctgcctcagcctcccgagtagctgggactacaggcgcacaccgccacgccccgctaattgttcttttgtattttagtagagacggggtttcaccatgttggccagcctggtctcgaactcctgagctcaggcaatccgcccgcctcggcctcccaaagtgctaggattataggcgtgaaccaccgtggctggccacttacttttctttctattgaatttgaatgaataatttggaagacagtatctttacttcataccaggaatgctgccagtgaaatttcttgtttggcagttcattatctacctatatatttaattttgctattgtttatagagttcttaagatatgattaaatgctagctggttaagaaatcatttagaaatgaaacagaattggttgttactccaagttaataagttgcttgtcaacataaatcctacctggtacccagttttcttaggaaccttgcttccatgtttatccttttctgcttagtattctaagtactccttttttaccttacaatttagtcttaaaacacaacacagtcaagtctttcttttgtaacctgtgagataccttctagcctttgtgctgtttttcttctctttttgctgcctgccttcctgactgagagtggatttcctcactaaggctctgccctctgatttttcactctcttttcttttttggttttactagtgaaattttgtctttaatgtctctttcttttatgtctttaccgatcactcatagatttttttttccatatgtatccagttccaacctt

SEQ ID NO: 59094 - DNA, 1043 bp, Homo sapiens
atgttttttgtttacttggagattgtaatttgcccctttttataacgtgggcaatcagtataaatggcaaagccagtagagtgtcaaattatgcacattggaattgacatttgtcatcatattaaaattcctgtgtagccccatattgataggaatttaaccaggaagcttgtctcaggactggagtcacacatttaatcatataagcagacttgaggacgtggagaccctaaaactgcttgcttgcactggccatcatctcccatcagggtagacggtttcaggtggcagtcctttctcctaaggagttagtcttgtttgtatgtattcaaggaaaaatacatcagtcccttggaactaaaaggcatgcagtcctgagtccccagataggtgaatattgtaacacatacctttcccgaaatatgtttctgggatgctgagcagagaatagtctccttgtgatgcggatgccgggtgtttggccagcctcaatcaccagctcaggtgccactgcctcacacagtcacttagggtcattggtttaggttatcattctacagcattttaaactgacacattgtctggaccatgtgggttcttgaggactcatcaaaactcgttactaaaagcatgaatatcaggcggaatagatagcaatgtgacattcatatttatccctaagttccagtctaatgcagtgccctggtatgtggagtgtagacagatgtgggctaatcatggaaggttccctgaagttgtggatattggtttggaattcagaaagctgggaaggatgtggaaggctgaaggttggcttttctagatttagggcatgatttgaacaagtccttagaggtgggaagggcagcacagggttgttagcttggcaagagtcaaggcgcaaagggtgacttggggttcactggagggaaacagaggtgagtgctctagaaggaagttgagccttgtggtgggtgacaggaaaccaatgatgtaacttgtttttgacctatctgggccccaagtttggatctgctatatta

SEQ ID NO: 59095 - DNA, 1032 bp, Homo sapiens
agatgggagtttatcccaagcgactgtcctggcccctcatacaattatagtggtgaccagtcaggggctgtgggtgaggagacctgccagaggtggctggaggcactttattgccagcctggcgggctggcgagcgccaatgaagtaaaatctggtgacacacttgagtttgcatgcggcattttattttattggttttttttaaaggaagagattataaaaagacatttcacattaaagatttgcagtcctgggacacagtttggaaaacactatttataaggttgcacatattacaaacagctcccaaatggtgaaactggtattctaagatgaaagcttaatgaacataatgaagtgaataaacgcatgtgaactaatgtttaaaaagttagagcttgtctcaagtcagtacagctcttaagataataaatacagtaacactactttttatttctttgctcttttatccctttcaggttcgatttgctgctttgattactgtgttagcactggctgaaaaactaaaggagaattatattgtcttgctaccagaatccattcctttcttagcagagttgatggaaggtaattcccaaactattcccaaccattaaacaattaaggaataattcagtaaaattctgtgaaaatgtgcccaatgataatgcagatttggatataacgtgactagcagttgatccagtcctcatacaggcagctccagtctcaaatacaggcaggctcgagctcctgttttgagttgggtggagggagcaagttgcgaagtgaccacctcctgatcatttgagagtccgtttacagtgtaatcttcacgatcttttcttttgtggtggtttgtgatcatacaagcagattacagtagtgtttttaattaacctcatacatttatatgattgaagttttggtccccagattgtatggaaatgcctagtggcattaaggatgcagtaggatgtccacttttagtagcaaccgatgttcattcactactccatgttaggtgcttta

SEQ ID NO: 59096 - DNA, 1029 bp, Homo sapiens
cagtaagacacaacctagtgcttggaagcaagattttagaggttcttaagtcctaagctaaggagggtgaattttttacttcattgttgtcagacagtgaagtgttgttttagcatcatgagcgaatgttataagtcacctcacttgggagaaagaataaagtaaatggccgttactgtcagttactggaagtaactttaaaacgcaaaaattaagattagtttattctctaatgctaatacgtgacccacttgacagttgagggaatttaacttgccagagtgagtgttagaatcttaactctaaaagaaggaatcattcttcgagagaccatccattgtgttctgccttcgtcctgattatgatttctagatcattttagactcttctgatttagttattttaatagtgatttcaatgtaaacattggagattaaatggttaagttcagtgttttttcatttttactcttcccacgtctacagatgaagcattttttgactctgaaaatgaccctgaaaagtgctgcttgctgttgcagtttattttgaactgtttatacaaaatcttcctttttgatacccagcattttataagtaaagagagagcagaagccttgatgatgcctctggtggatcaggtaaccaaacagaatcatctttcgttgctgaggaagccatcactgttcgagcttggcaggttttagatctgctcaaatgacagcttgctaggatttttctttgtaaggttgttttttctggtctttttaatgaaatgttttatttgaaaattgttttttcaaagatataacttcattgtggaatttgagttttgttttgttgttttgagacagggtcttgctctgtcacccaggctggagtgcagtggtgcaatctcggctcgctgcaacctccacctcccggtttcaagcaattcttgtgcctcagcctcccgaatagctgggatcacaggcgcccgcctccacacctggctaatttttgtatttttagtagggatgaggttttgcca

SEQ ID NO: 59097 - DNA, 1042 bp, Homo sapiens
aacatctgaaggcgaattaacttttctgagaaacagttctggtgccacgcaagtggttctcttttaagcccagcagagtatggctgaagagtaatgaaacagtgtctcttcaaagcggttttgaaggcagtttgtggggaaatagaggagcgtccgtgtccctgaagtcagtaagacacaaacacaggtgattgtttggataaagccctgtttggataagtcgaggaccatttttaaatgacttcttagacatgggatctgggagtagatctcgacccactctaaataaagtagtatactctgttctgctagaaatcctaacgcacattatcctgaaattatgccttcacaattcctaagtacagatttgttacctttttctttttctacacaggatgctattttagaagcagacactgaattttggttttcagtctgttgtgagtttagtgtccagcatcagatacaaagcttgatgaatatcctccagtacttactaaagctgccagaggaaaaagaaggtaagcgtagatcgggtgtcacttactgttcaatctgaaagctaaagagaaacagaagagaatgcaggttatccttagtacatcttcagaaggatttttaaagtaagttaatcattttaatttgattgtgtagtttcttgaatccttatggaaaatagtcggaattccatttgccattcctcacacattgtcttttatacctctgtgctctgcgctgacgtcttggctgtggaatgttgctggtatccaggatgagttaggttcaaatgacagtaaatgatcaggacctcattagctgtctctcagcttctcattaaaatatctgaagacatttacatgaaaagaaaaaaagtaggtaccacaggagtggcagcaaaatattaaaattgtaccatgcagcagagccttgaagaaaatcccacgaaccgcagcaccactgaggctggcttaggaaagggttgatgaagccaggtgtgatggtgttagcctgtggtcccagctacccaggagaatgagacagg

SEQ ID NO: 59098 - DNA, 1091 bp, Homo sapiens
attgaataaatccttcctaggggttaacatttattgctctaattttatcccaatggattatatcatcaactcttcttccttcaatatttcagatttccgttaatgctgaacaagtccgaatagaactggagccaccagataaagctaaacccttgggcacagttcagcaaaaaagaaggcaaaaaatgcagcagaagtaagagctacaaatgcattgagcacatgctgttgttccctgactctgaatgttatgaaaccattggaactttttgatactcatcaatttgctataatcaggcacaatggtttttacttagcacatgatagagtttgcttttccaacgttttgtcttctccattttccagaaaatcacaagatctagaatctgttcaggaagttggaggttcttactggcaaagagtaactctcatcctggaattactgcagcacaaaaagaagctcagaagtcctcagatattggtgccaactctttttaacttgctatcaaggtaatgacacttggctttgatctgtgagagaataggactctaattcttgcccatcttatctaacattctcttttcaacatactcttctcttgtttagatagtctgtaaaataaagcaagtactataggtgaaattaaaagattggttttaggtatccattgctggtgccccaaactgaccttagtgtcctgtgtcatgtagtaaatggccactcactgtacagcctactttcctctgaacttttcagtagcgtgcctgggacgtcattacttgcatttcaagatatagtgttgaatttatatagatatagatatgtgtgtatatagtgtttgctatctaaatatattttcatatatatagatgtatatattctatatacgtagatttgtgtatgtgtgtgtgtaaattgagtatgaattgtagcgtgtgctttcatgtgaaaggcaaagtaattctgaaggttgtcctgtaagattccagataggctaatggaaagtgcaatagagaggacgtggaatttgacatagcgcctgtctatatgagagaaaattagagttagaaatcttatatcttatttctag

SEQ ID NO: 59099 - DNA, 1434 bp, Homo sapiens
taaaagctgtgcacacaacaaaggaactttacgcgggaatgccaaccattcagatcacagcccttgaaaaggtcagtgatttctttcagaaactaaggcatagcatgttcaagcatttaaaggtagaaggcaacaggaacagcgttaaaaaaaaaaagattaatattttatttggagaagatagttacaggtggactagacgttttaaaggaaaatgatgtatttgacccatttttgaaaactgaacgttgtacatgggtcattaaaaagaattgcattttaactgacaaaattaagtgggaaacaattttgtattttgagagaggttgatataaaaattatttctggaatttaaacttgttcactgaactcagttgccttttttctaccccctctagattacaaaaccattttttgcagccatatcagatgaaaaagttcagcagaagcttttaagaatgttgtttgatttattggtgaactgtaaaaactcacattgtgctcagactgtcagcagtgtttttaaaggggtaagctgcaaacttcttgtaattttttttattaatgtttatagtctcttccaagggacaccatgtttaagagtcctgtattttatagtgcttgtaagaggtcagatgttaccattaacaaaaatcatggaaaagtaagtcagagagaggcataaaataaaaattttaaatctttaccattattttattttatgaagtatttgttgataattttaaccagataggatgtgtaggaatatgtgtgtgtgtgatctttctcatattagacggaatctacctattcctttatgcaaggaataggaatgagtcaatggctcagtattgaactgggtaacattattctacttaatttaaatagttgtttaatgacatataatggaattgaaattctgcttgttggttttatacgtatattgaaaccttgttattatcagaatagccacctggttattctcttttttgaatatagaataatacaaagttctagtatctagattcagcagttctcagaattttaacatattaatcttttttccttctttttctttgctgaaatattttaaagtaaatctcataatgtcatgcactttcatccctctgtacttcagtgtgcatcttttgaaaagtggatatgactacaatgccattagaagtaaaaaaaaaaataattccttggtattatctaatacctagttcataatcatatttccatggttatcacaaaagtattttttatagttgttttctttgaatcagaatccaaagatttagttgtgatgttagaaccttataaaaagagatatctggatcccaccccatatctaaagaatctctggggcagtaaatctgtttttgtgcatgtgtgtatatgtcttattccttcctagctgattagaatatacat

SEQ ID NO: 59100 - DNA, 2349 bp, Homo sapiens
ataaacaaaacttttgcatattatgcagaggaattcatataacccatgttcagaacccttagtttgtactagtttttgtttcctttaacatttcaggaaatcccctcagaatggcacattgaactgatgttagacagagggatcccagtggagctgtgggcacattatgtagaagagctcaacagcactcagagggtggccgtggaggactcggtttttcttgtattttccttgaaaaaatttatttatgcactgaaagctcctaaatcttttcctaaaggtaagatacaagctgtgaatcttttaaatgtgatactctgcaaaactgaatgattgactccacaatgactgtcttgaataaaaagctcccagcatgttcatgtaggatctagcatcatttctctttccatgtccttgtaggtgatatatggtggaatcctgaacaactgaaagaagacagcagggactatctgcacttgctcattgggctgtttgagatgatgctcaatggtgccgatgctgttcatttcagagttctgatgaaacttttcataaaggtacaagcctcctccttttcaggcgtactctacccttaaagaagatatggctggcctgcaatcccagcactttgggaggccgaggcaggcggatcacttgaggtcaggagttcaataccagcctggccaacatagtgaaactccatttctactaaaaatacaaaaattagccaggcatggtgatggggcctgtaatcccagccacttgggaggcagaggcaggagaattcgcttgaacccgggaggcagaggttgcagtgagccgagatcacaccaccgtactccagcctgggtgacaagagtgagactctgtctcaaaaaaaaaagatgggctgggcgcagtagctcacgcctataatccgagcactttgggaggccaaggtgggtggatcacgaggtcaggagatcgagaccatcctggctaacatggtgaaacgccgtctctacgaaaaatacaaaaaaaattagccgggtgtggtggcgggctcctgaagtcccagctactcgggaggctgaggcaggagaatggcatgaacctgggaggtggagcttgcagtgagcggagatcgctccactgcactccagcctgggcgacagagcgagactccatctcaaaaaaaataataaataaataaaaagatactgtgggttatttgggttatgacagtttataatgtaaacaaaagtagacttgtaaacagtgaagagtatataatagcacgggccctgtaaaagagtacaatcacaatactaatcggtaggttgaatagaaactaacattgctacactcctactaatatgttaggcccattactatatttaaaaataacaacagcccagtctttttgattggttaataccatttaaaaatgtgaatactggtgttcagagaggttatttagcacacgtgaagttactcaggaaatttcatccccagcaccagtgacctccatgttgccaggcccagtggtcagttcctgttcttgcctgacttgttctctctacagcatttgacatggagttggcattgctcagcacattgttgaagtattttcttaattaggcgtcccagatactgctcttgtcttggttctgtgttttcaagtgcaaggttatagtgaggcttctgaatatcactcttcattgacatcttcccagttcattaaaacatggaatatggaataatttgaaatgattagacaaagcaaaactttgccttaaattatttgtttctttataattgtacactagtgagaagaggatttggaaccagcttatttgagtaagaattaaaagtttgcttttttttttttttaattaggtgcatctagaagatgtttttcagttattcaagttctgttctgttttatggacctatggttctagcctttcaaatccactaaactgcagtgtgaaaacagtgctgcagactcaagctctttatgtgggctgtgcaatgctttcttctcagaagacacagtgtaaacaccaactggcatccatatcttctccaggtattaaaagtagcattgttatgttttgtcatgaccaactgttcatgctttctctatatggtttatgtagtttggaaaattataacttaaaaaaaaatagcagagggcaggcgcggtatctcacgcctgtaatcccagcactttgggaggccgaagcaggcagatcatgaggtcaggagatcaagaccatcctgggcaacatggtgaaaccccgtctctactaaaaatacaaaaattagctgggcgtggtggcatgtgcctgtaatcccagctacttg

SEQ ID NO: 59101 - DNA, 1016 bp, Homo sapiens
ttttaacattttatatattttttcaatgtggatccatatcacacccataagaataatatatcctttttaccaccattttttctcattcccatttaaaatattagtctttttgttgttgttgttgttaaaatagcaaaatataatcccaaagaggagaaaattatctttgccttattaaataaacctttgtaaaggattagatgtgtgatttaaatacattaaccagttggcaagtgcaattatgttcattacagtttctgaaattattcttataattacttagaaatcagtgcttagtactttataaaggctttctgtttgtcatctcactttaaatgtaaaacacataatacctagatagacctgagttgaaaaaattgttttatgaaaatcaagagcaactggtaatagagtgtgtttatttttcaaggtggaggatttaataagcgtgggtgaggaggagtcctttaacctgaagcagaaagtaacgtttcatgtgatcctgtctgtgctcgtctcttgttgttcatctttaaaagaaacccactttccatttgcgataagagtcttcagtttgttgcagaaaaaaataaagaagcttgaaagtgtcattactgcagtggtaaggaaagcagaatctccagaaagtgggatgttgaataaaacaacagcctggcctattagtcacagcaaaactgaaaatcagaggcgagatgttgagtctgtggatagtagctggatgaaatgtgaagcagtcttgggtagcagtgagatagtcaactaggcactcccttgcttttgcggaaagtttagttgaattataaaattttagggttgcaatattttgtatctgatgcctgactctcctctcttttattgtctttattggataattacccaagctacacctaactacctctagcgatgaagaattcacttggtgtgttagtgcttgaacaaaatactatttcattcaattgtttactaaaaatagatcttttaggctttaaataatt

SEQ ID NO: 59102 - DNA, 1051 bp, Homo sapiens
aggactttctaatttgctgctttatgtaatttttactttataattaaaaacaaataccaatgtgttaaacaaattaaaaaataagttcagagacacatgataccatctgtggtaagtttttaatgagctctgtttatttcatttttggcaccaaagctttttgcaagaaaaagtaagcaagctccatagaggatgagagtgtgtcttacgtgtttttgtatctatcgtatgggtagatatctatcatgtaggatgtgcttggttcattttttttgagtgcctgagtgaacctgatttccggtagagttgagacatctagtgtgatatgtcttatgttatagttaacctctagtgatttctctaagaaaaattattattttttttttaagattagacaggatgagcagattaaaagtattgttggccaggcacagtggctcatgcctgtaatcccagcacttgtacaaaaaataaataaataaaaatattgtcacagataactctgttattggcatggattttaagtggtgtcttagtgtatctgaataatagttttggtcaggagaccaggatattgtcagttaagctggagtaatgtaatgatgaatttttgcccaattgaagccttccaatgtgtctttcaaccaagtgtgcttgcatgtcttttaggtacgaggtacttaagatagccgctgacatattaattaaagaagagatactgagtgaaaatgatcagttgtcaaatcaggtggttgtatgtttgctgccatttatggttatcaataatgatgatacggaatctgctgagatgaaaattgctatatatttatcaaaatcaggaatctgctccctgcaccctctattaagaggctgggaagaaggtaaaaaattcagttgtttttttagaaaaagtgaacagataacacaaaagaaaacaaggaaaatttaaaatttattgttggtcatgcttatatgccagtaaggtcttttaaaatttttgccaagataaaaagtatacagtgaaaaggaagccaattcatagacaaattca

SEQ ID NO: 59103 - DNA, 1048 bp, Homo sapiens
caacccttgcaggtaggtattatttattagcaaacctgttttataggtgagaatagtgagatccagaaaggttaagtgacttgactaaagttacacaactagtaagtggtagagctaggatttaaattagacattcttattctttagtctatatcccgtcaatatctgggctctcactttaataagatgaactccttaactacaaaaactatatttggagtataccatatttactatattttcactgaaaacttgaaaaggatttgtaccaaacaattattaatctcaaaaggccctttagcgattatctagttctagtgtgtttcagtcctcatccagagcagagcctgtgttagactgtcattctggagtgtttttcacaaaaccatacttcctttctagtgcaaagccttaagagatttttggcaacagctaaattaatgtttttcttttattgctcaggagggtgttgatgaatctttcataaaagaagctgttttagcccgattaggtgatgataatatagatgttgttttgtcggctataagtgcttttgaggtgagtgaatttgtcatttgttgaggtatacaattttgtaaatttccttgcccttctcacttgattctctgcttgagactagaatatttttggaaattatttttccatgggaaatttgttctctggagagcacagacttaagtctggttaggagaaactcacagaaattcacaatttgatatattaaatatatatggaagttgttcaaacaggaaaaatgttttgtgaatttttatattgcttttaacatatttttatcaatagcaaataccttgggacctgtggaaattgtcttatgaatgccacttttgagaaatagatcttaaaacttttaatttgtactaggattcctgggagaaattccttataattcattctttttaaaattcgcatttaaaaagcgccatacatgtttgaagcaagtacaaatctactctggatatttttttccctttagattttcaaagaacacttcagttcagaagtgacg

SEQ ID NO: 59104 - DNA, 1520 bp, Homo sapiens
tcccaaagtactgggattacaggcgtgagccagcaccatttaaaatagcaatgtagtcttactatgttgttcagacaggtctcgaactcctgaccttaagcagttctcctgccccggcctccgaaagtgctgggattataatgccagtggtgtgaaccactacaccaggcctctagtttctttatctgtaaaataagtattaaactataccttgtataagtatgacaattagagataatatttctaaagcacttagaatatagtaggtactcaataaatagtaactcttatgtatgctgatatttctgtttttttttttacagccttctatttgaagagtatatttcatatagttcacaggaagaaatggattctaataaagtgtctttgcttaatgaacaatttcttccactcattaggcttttagaaagcaagtaagttacgtgtgtatgtttatgctcttctaaagtacttcctgttctataaagatatgattcacaagtcacatcttaatatactgaattgtacagagactgtcctttttaaatttgttcttcaagaaggggcgagtatcggaatcaaaaatatttgaaatataagaggaaatagtggttgtgtgggggctatggagagtataattttttatagagagactattttgttattggagtagtcatagtaacacacttgaccaatgtcatttggttttacctacaacatttgttaaaatttaagtcacagtctcagtaatttttaagattttatgtctttcctttatatgtgtatggtgtatgagattaataaatttattaagaataatgaattcactttttaattgcttcccagataccccagaacattagatgttgtattagaggaacacttaaaggaaattgcagatctgaaaaaacaagagcttttccatcagtttgtttctctttctacaagtggaggaaagtatcaggtatgttgttctccaaaggaattatgacaatttggggtacatttgtatgggtatgtgaagagctccagaaggaaatttgccacttttttcccttgtgtggaaaattttacagagataaccttctacagtttgcctagttgcctgaagtacggctctgaggcaggaatagaataattggagaaaggtacaataatttgtacataactatgaacgtgatacttatttcaggaaaagtattgtttgagaattttgtatgggatattcattaagaatcatcagaggacggcctcatgtaggtttctagcattctctgtctttcatctaggtctatgctttccagtgtaccagccacagatggctatttatattattgattagcaagggggagatgggttctatttcatgatcacattaaaacttgagaaattttctggtgattcaagcctaaagctttatactagaggttagacatttaagcaggagttcttatatttagccttaaaaacagataattatgaagagaaatatgattgttttagtatttctcttccataat

SEQ ID NO: 59105 - DNA, 1037 bp, Homo sapiens
tgaaagcaagggctaagatcagattcatatgtttattataaatctgaaatagatgacagcttttggttcagtaagggggtgggtactgagataaaagtttaacctcttttcagagatagttgattggcaccatcacaactaatttgtaatgtgacctggggaaagactaattttggacttttgttttgttattgttataagcatgatagtacttgttaaaaatagagaattttagataaaagaaaaatgaaggtgatctatacaaaagagctttaaaaaatataaatgactaaataagtggaatgcacttgtgcaaatagataaaaagctggatatcagtgtgtgtgttttattctgagaacgattttctgctataagtgaatttaataatgttagcttgcaaaataaatttttcccaacacaattttaatttttacatattaaggagaagaaactgaaggaatggatggtcaaatctacaagagacacttagaagctatacttacaaaaatatcactgaagaacaacttagaccatttgttggctaggtaagctattatttttgacatgcttttgatttacatttttgtgactcagtataattttcaagattggttagaaatttcccagcattcctttttaatgtatatcttgttttgtctgtatcatttcattaactataagtacttaatccagtaactggcagcattaaaagcaaaagtaatttttcttgcatgtctttagtgcttatagatgaaaatggaaagttagtggttaagacaaatttgggtaataactaaatgcagtttgtggccgtttgaagttttctcttagtaaatggaccataatatctgaaataacacatcacaattaaaacgcagtaaatgtcatttagaaacaatattgaaggtaagcatagagtaaggattatttctttaaagataattcagtctttttttttttttttttttttttctcttaatgggcaactcgatacagtgaaaagatgtaggcgttgtggtcagacataggtgtaa

SEQ ID NO: 59106 - DNA, 1056 bp, Homo sapiens
tgtaaagcaatgacagaagcgtatcatagtggctcagaaaccaaatcgaaccagtaaagttactaagaatctagagaatccagattttgataaatacctttcaaaatgtgacatacgataagcaaacatctttcactaaatacctctgccctcattgctgaccttctcttttgaatttctaagtttacatgattttatgtgttaatttcatcaccaccaccagttataaggagagattatattttttatttatgaattgtagcagtatgaagacattactagggtaaatgctttaaaataaggatcagttgatgaatgttgctagtagtttgttctttccatcaataacagcaatctggagtgccgttagctaaaggaactttgattacccactgctacaaagatcttggattcatggatttcatttgcagtttggtgacaaaatctgtgaaggtgagcagtctgtttcatgagtatataattttatgaaaagattgcttgctttgaatgaagaaaacatactaaaacattccctaataacaatgatactttggataaatttattttgttaaatggtctggtgttttgaagcaggagcagtttgagagtccgtatctttttttttttttttaagaatcagtcttttatcaccaaaggtgtttttctacaaaaataaatgtctattccttgccagattctagttacagtgactattcaaagagagtgtctagaaatgtcgggaatattcaacctgggaaagctgtttaaaaaattttaaggccaggtgcggtggctcacgcctgtaatcccaacactttgggaggccaaggcaggcggatcacttgaagtcaggagtttgagaccagcctggccaacatggtgaaacaccgtctctactaaaaatacgaaaataaactgggcatggtggggcatgcctgtaattccagctgctcgggaggctgaggcaggaaaatcgcttgaacctgggaggcggaggttgcagtgacccaagatcatgccactgtactgcaacctgggcgacagagactccatctc

SEQ ID NO: 59107 - DNA, 1051 bp, Homo sapiens
tcaagatagcctcattgcttgtgttctgccataccacgagacaagaatatttgtgcgagtcatacagcttctaaaaattaataattcaaagcacagatggttctggttgttgccagttaaggtataattgctgaatgacatatgtctgtaatcattacagatcttgattaagggatttaattaggaaaaaataagtcattgctcctggggatagtccagataactacctccatcatttttatttcctgacttccaattgaaactattattaatgttaataatatttagcttttatttagtatctgacatcaggctaggcaatgtacattatattatcttggattatcacaaaacttcatttttacagatgaggacaggctacttgccaaagttcacataactataaagtggcagagttgagatttgaacccaaatctgattccagagtctgtgcctttgtatcgtaccatgccgtttggcattttaaatttggaactgagaacttaaaaaaaagttgaaggtgaagaaaggcagaaaatacttacaaaaattaaaaggataaggataacttcaggggtttcaagaatttactaaagttgtgaggaagatgctaggagttaatttacagactaagaaaaggatgcttgtataacaggaagggtctgggtaagaaaagacagcatgctattgtaggaaaaccaactgactaaccgttagcactttgtttgcaacatatggtggaggaaagtagatgtatgttgttagcaggaacttgactgcatgttgggcatggtgatccagggtagggggggaggcaaatggggatgaaggtaagctaacagatcacgaggctgtgcacattaggctgatgatggtagtggggtcagtgttcagaattagtaagataggagtaatgaggactttttaattagaaggagaatttaagaatctgaacgtaaagcacttgaactaaagaatgttggagaaggccagcctttgataaagctcattaactgctcttcccaacattcactctgcccatagcatcaaa

SEQ ID NO: 59108 - DNA, 1464 bp, Homo sapiens
ctaggagcagaagctcctttcacgacaatctcggcctcttcccactttgtagagtgagtaacaagctcggagagatgaaataatttggtggcgttaacccggccgacaggcgccagcgccaggatttgaacccaaaccacgtgacttcacaacccatagctttcaacactacgcggtgctgctggcacctagtaaaggctggatcactactgaatgaatgattctggctacggatccttaaagcccacagaaggcccatccagagaccgaaagcttcagacacaagccgcagagcagaccgctaaaccggagctacagaggcgaagctcagacttgagcctgagtccggcgggctgaggggcgggctttcgtctcgggaggcggagctgtctcgtcgcattcccggcaagcttgaacctcttcacttgccgtagcgcctgcagcaggaagttgctctacagcatgccttaggtttccgggtgagggttgggctccttggtaccatgtgggaagcgctgtgaagagttgttgccttccaagatatacccaaattcccagttccaggtaagcggcacagagccgcttgatgtggctgcggatgggggcggcatatcgagggagggtaagagttttccggatatctgcggaatcagggttgaaggaaagccttggcgcggtcgccgctactgtaattagttgttaacgctgctgccatcgtctttgcatctccggggtccacaaatctcaggacacccgcgttgtgtgtccatgacggtgctgagtgcagaagagaattgtttgtttacgaggcgccttataatttcgtagaaacttatcaaagtgcttacgtttttttagcccgtgtcattaaaactccgctggcgtgaaagatgacgtccttagcccagcagctgcaacgactcgccctccctcaaagtgatgccagcctcttatctagagatgaagttgcttctttgttatttgaccctaaggaagcggccacaatcgacagggacaccgccttcgccattggtgagccatcttttaacttagaaaagctcttggaagcgtttgttttctggatgttactgttttttttttttccccttgttttctcttctgtcccgtcctcttccttagcagtttctagcatgttgatgtatatttttaagggaaagagaacataacagtcaggtgcttggtgcttgaaatgtttatgagtagaggtatctggatttcacagatgaagaaacaaaattagagaggtcaactaatatgtcaaagagaagaacagctaaaagggggatggaggcagtgactggggtgacggagaagtcctctcagaggactggcctagttattgtaggggatatccaaaaaaaaaaaaaaaaaagtgttccctgccacgaagtactttctgttctagtagatgagataggatttactctaaaagttgaaaactag

SEQ ID NO: 59109 - DNA, 1071 bp, Homo sapiens
ttggaaaacttggctgtgttggggtggtcagggacccagcctcttaggtgtccctcccctggctcgcgatcacccacccgggacaccgacggaccccgcgccgctaaccagccgctctcagagcgtgggtggcaggcgtggctctgctcggggccggccgctcccctcacgttcccggaggcctcggcggaaggcgtgcaggcggcctctgggcggcggctgcaggggagacagtggaggggcccggcgcccttgtccgcccgcacgtgctcggggcggggcggctggggcccgacgggcggggccgggggcggtggcggcgggggcgtggccgggcggccacgtgacgggcggcgcggctattaagccgcgcggcagctgctcgcagccggagctggtgcttcgcccgagacccagcgcccaggcgtgtcgccccgagaggagccgcgcgaaggtcaccccgcgcccgccgcccgccgcccgccgcctccgtgggtccgtttgccagtcagcccgtgcgtccgagcccctcgcgccccgccgcagccccggccaaccgagcgccatgaaccagatagagcccggcgtgcagtacaactacgtgtacgacgaggatgagtacatgatccaggaggaggagtgggaccgcgacctgctcctggacccagcctgggagaagcagcagaggaaggtcagcaggggcccgcgggccgcccgcgcgtggtggggccgggtcccccgcggggctcccgtgcgcgtggccgcgtggcctggcgactggcgagagggcgctttgtggaggtgctgtgctgtcctgtgccctcgcagccccgggggccccttaggaaagaggacacgtccggggacaggcaggacactgggcgtcgtgtgtgtgcgcgcgcgctagcagcatcggaggtacagatgtggttctgttcctcacaccaacccgcgttagaccagatctgaaggggtctctggtctgctcctgaccccttgagtctgtgaccttggcccccgagttatactctcctggcccgcttgtgtccatttaccccagcctctctcttc

SEQ ID NO: 59110 - DNA, 1009 bp, Homo sapiens
atagctaaggaattggacaggtagtctgcccatcatttttgaaagtgatggtctaatcacagtgctttctgttgccttttttttttttaagtacagtacagtagcaggatagaggtaatgacagtttccagaggccacattgacatcccttctgccatatttaatcttttaacttatttgcagtatttttggatatatggcttcgaattcttttaggtttgggattcctatgttgactgtattattataattgcatagcacttgaagtaaagttgattatttaaaaataacatacttcctgatcccagtccaaaataatgttagaaagtttaaggtgagaattttttttaagatagtttgaatgttgtacatgcttggggggcaaaaactacattaggagagatctagaagattctctatttctacttttggtatagaccctgctcaagtcagtaaaataatattgaactgtgagctcagtgtggccagagcagtggcctctatttatgtcccatgagacaaactgctggaaccggacaagggtaaaataccattgtttctattgtgggctgccttctccacacttgccatttcagtgatatgctgggtatgagatctgtcaacagatgctggtagcacatgatgacgtccgtggcgttataatggatgtgatgcctaattatatctacagttcagagagtctcatgggctatggtaatccttgctctgtggtgtggaaggaaagccttgctgtagaaggactttataaaagtgtaatgagttttataagagaagggaatgcagaagatagtgggtttagcatgagtgcgaataggcgtttcaacgtgtctaccttctctttcaagagtgtgttaggaagagtgtgttacacagaagagtgtgttaatagggttaggaatatttatattttctataaagaagtattttaattcatacaactcaagggtagaagaaaaatgcctgcagtattacagatgtgatatatata

SEQ ID NO: 59111 - DNA, 1044 bp, Homo sapiens
cctcaactgaagcctaattgggaggtgacttgtcagagcagcaatgctgaatatgtttgctatcttcacaagctcaggacgctgtccttaactgtactgggaggctagagcagaccttttaaggacacgaaatatgtgtcgatacgtaaagggtccttatgtccataatcagtccgtggcttgatgatagataaacttttctaagtgttctgattgtttttaatagtccctaaagaaattcagattcttctgtactcttcacagttgagatggctggattcaccttggagcacctcctgtcagtctggcatttaggcaaatgtgttgccatgttgggtcaggcagcctggcaggatgcgtgtacagaggcagccgcccacagggttcggattaaatagagagcctgggagccttcgagttgcccctgcccttgttctgtgggcagcagctgctgatttagagcacaaggtgaaggctcttcctgcctaatgacacatactcttgcataaatttttcctaggagaaaaggcactaattgtttgttccaatgattaacagaaagcttgtgacatttctcagattcatgagacccagatgagtcgaagctctgcctggtacccgactacagttgaatcactaaatgtttcaagtctcaatttcttcacctagaaaatgaagataaatacctgtctttcttaactcacagggttttttgtctggatcaaatggttaaactgttttatggtgaagcggctttatacattgtaaagtgatctgtaaatgttcaaatattattatccttgtgcgccgaatatttgttaatcagcactgcgcttagacttgtgagggacttgtgagcatgagatttggcccttggtgaccttgatgtactttgaaaattgtggggaaatacacataacagaaaatgtatcattttaatcataagtgtacaattcagtggtggtacgtctattcacattgttgtacaaccatcaccactctgtgtctccagaacttttctatcatctcacattgaaactctgt

SEQ ID NO: 59112 - DNA, 1043 bp, Homo sapiens
ccctttcatcaagagatgggagaagttcaaaggtaagagtatagaaggagaaagtaaccaaggtggctagaccaggactcaggtctcccaaagcctagctctgtatcggatatgtctgtggctcatggtgtgtttgtgcacgtgtgatagggagataatacccgatgctaaagatgcatattcaaacttagaaagttggatccacgaaaaagggccaggttatagagggcctgggatgctaaggtgagtgcagacttcattctccaagacatgcagagctccagaggttttttgagctgggaagacccatgcttacagaactagtattgttggtgagataaatctgagtggacaagggcctgaggctgggggacccaggcaaaagcctgttatgggaccatccagataaagtggtgaggattagaacaagggggctgttagaagcagtggtgaggaaggcatcaatttgagagtgatcaggagggattatacgaagtattaaataaccacatgttgttccacagtaggctgtggtataaatccaattaagtagatatgatcctccccattagagctcctgggctttaatgtcaagacagtggtattgacaagcaacaaccaaactaatgaggagagtctgtttatccactgggagattgtgtctggataagaagttaagtatttacaggatgtgtcattattctgtgcagggaaaggagccaccgtgctgaggtggcaaatccggtgtccatgtggccattgctgggagggagaggtggaattgtagatagtctttgagagccagagaaagttcttaatgggcagaagtgtcaaagaagaggttaaaggcagggtcttgtgtgggcactaagaaacctctgcacccagagggactgtaataaatatacatgtggtttgctacggagaatcacaggtgcaggagttctgaggcacaaaaaacactctttgcttttacatcctatttgggacaccgtgatgtgtcccggggttgccctaggccttcagccacattcaccaggtaa

SEQ ID NO: 59113 - DNA, 1500 bp, Homo sapiens
ttttagaattgaaaaaataattatacagatttatgtatatcataataaaatttgtcaccatatttatgagaaaaagttctggtaacctgaatttgatttgaaatgagttccccccccctgcccagattgaaaaccttcacccacttaataaagaaaattccaagttcatttatgattcagagacgtataaatttaaatttgtttttgtatagaaaacatggggaaatttttttgaagatgcagtgtgcttcacagtgctggaattggaaaatggagacaagattgcaggtgattctgtggtcctgggaaagaactggcatatgcagtcttcatacatgccaagccctagaccaagaagttggcataactttgatttgtcttatttgtttttgctagggggtaaatgtgttggtcatagtctttagaaattattatacactgaaaacagattcttattagtatccattacaaccttttcataaaaagccatgctatcttagaaaagacctatattttattagtgaatgtgagaaccaaatgtacaaataggtgaatatgagattgttttggggccaggcgcagaggcttaagcctgtaatcccagcactttgggaggccgaggcaggcagatcacatcaggtcaggagttcgagaccagcctggccaacatggtgaaaccccatctctattaaaaatccaaaaattagccaggtgtggtggtatgcgcctgtaatcccagctactcgggaggctgaggcaggagactcattggaattggagtgagtgagctgcactcacagctggagcgcagtgagatcgtgtcactgcactccagcttcggtgacagaagaagactctgtctcaaaaaaaaaaaaaaaagattgttttgggggaatgggagcagtatttaatatgaagctatgattgagttttgcaaaggtagttataattgagattgcaaagacaaatcaagaaatcctatcttctaaagtcatgtggagtctttaagttattttgttatagtcaaacaagatgtgaagatgacaattaacttttagaaggtaggtaatctcattgctgtttatgaggattttaagataatttatatgtaagatagaacgatatgaaatacttgatgctgaccattttgacctccaaaaattacagtctctttatttcaacccaaacaactttactgctgttgtcccactattttttttttttttttttgagatggagtcttgctctgtcgccaggctggagtgcagtggcgcaatctcggctcactgcaacctccgcctcccgggttcaagcgattctcctacctcagcctcctgagtagctgagactacaggcgtgcgccaccacgcccagctaatttttgtatttctagtagagatggggtttcaccatgttagccaggatggtctcgatctcgacctcgtgatccgtccaccttggcctcccaaagtgctgggattacaggcatgagccaccgtg

SEQ ID NO: 59114 - DNA, 1025 bp, Homo sapiens
atttttgaggggaggcaggtattcaggtggtcagattagaaaaatacaaaccatgcgttttgtgttttatagactgtaatatttccattctgttattgtaattttatgaaatataaggtggctgattattttattgcatatttggcctttcatgttagaatttggagcagaggatgttgtaatttttttcagtctaacactaaagccaaaaaatattccgatcagacagtaaaagtgataatatgtggatttttaccagtgaattgaaaaatgagagattttcacatattattcctagtatcccaaatgatttgctgaagaagacagagaaacaactattattgagaaattccaggcactgttttaaccttatgtatgattttactggatcttcacaaccatcttgaaaggtgaatattatcttcattattttagctaggctcaagttaagtgagttgcccagcagtggttgagggtggggaagtggtagccggaaaatgcacacagaattttgtctaatgtatgtagaaatagttctctcctataattgaaattttataaatatggagatactaattattttattgcatatttttggtctgaaagtggtagagctggatttcagatccaggctgcttaactgtaagggtcttgatttttatcactaaactttatctgtttttgttgctttctgctcggatttgtaaccaacccagagcagaagcctgggattcagtatttctgattttccacttacaaacctcctacctttgtggaagggcatatgtgtgtgtgtgaattttttaatttctaaactggtgcaactgggaatgtctgataacagtgagaaaacggaattttgaggcatggtccatattgtcattccaagattttcccccagtcaagctttaggagttgcattgtccaacagaaataccaaagtgggagggaaggggccacaggagaagtcagctaaacttcttgagagttttaggggccgtcccatgaagggcacattatcggag

SEQ ID NO: 59115 - DNA, 1036 bp, Homo sapiens
gggtgaccctatctccaggtttgtccgggacaatcccagtttgtggcttttgtcccagaggaattataaatagcacctcctttgactctcagaagtggcccagtttagactacaaactttggtctccctgttctgaggacatacacaggcagcctcatggaaggttaaactcatattgacacccaagtgactttttttttcccccaagtaatttgtacatagggtagtaatgccttttctgaaagtgctggcctgtttctggaactttaaaaatggaaacattggtgaagtgagatttttaatactttgagatatatgtatatatatctcatatatagtctagtaattctgaatcttttaattcataaatcttttagaagaccaagctttgtagaacaccgtgaaagtgagccctgtgactggagggctgtggggccaccagcccggctgagtcctcctgcgggccaggttgccctctgaaacggggttgactgttatacttttggttttgtattatatgctatgtatatggttttataaatgtcatttatacttacactttagacaatttgatgttaatatgggccaggcattaatgacacttattttacacatctgcaaaatgaagagttaaaccttatttaaagatctggaccagttaccaaagtcctgtctgtagatttgctcttttgacagtatgtcttttctgaaaattataagaatttatttctatgttcaggcacttgaaaatctagcagtgaaatggtgacaaatgtatttactgtgtgataaatcatgttgaatagaacaagttccctcatttctataatgagacacaggtagggctgtcaccatggaggcctttaagaacttggtagggaagcaggaaaaatcatgtcagaaatgcctgatgtgtgacggtgagttctattgctgtaactggtatctgcgtaactggatattaaggactctaaaggatttctattctgcagtcctaggatagggcagtctgtaccctttccagtaggattttaaa

SEQ ID NO: 59116 - DNA, 1025 bp, Homo sapiens
ggttcatttcactcagaaagccctacgtctgggatgagtttccattttaggaaatgtgatctgaaatgattattttatgtaattattattaaagaaaaagctagttaaagaagtataaaggaaatgtatagatatgttgccaaattttttttttggagaaaatggaatgatgaaggttgaacagatagttttacagaagccagcccaggcttagaaccgtattgctaaaagaattaataattcactgataagtgaaatggactgatattcagggaaccatgtcagactcatgattgatttttcgggtccccgtctgtgtacctaggtaataatctcttctaggtaaaattgtgcacatgcgtagtcaaagaggatgatgtaaataatcacatttttcactcattttgattaaaagacttttcctacccttaccttagggaatgtaggttgatatgatgtaggcttcattaacttaaaaagaaatcaaatacaaatgcatagcgattgaataacactggtttgtctcaacaattcagtaaggacatgcacattttctttttgccgttaagcacattgtgctgattgtcctgttacataatttcactttgagaaaagcaatactcttgtagttcccatggattagggactttgctagcaagtcctccaagccattgaatgagactgacaattgtagccagcaaatgcttctggaaaaccccttcaactgatatttcctcaaccaccatgttttggaggttgaggaacatcctccgggtctccagatcaggggctcacaacgcccagactgttgactggtactggtccgtgacctgttaggaaccgggctgcacagcaggaggtgagcagcggatgaccaagtgagcagaagctgctccccattgcccgaattaccacctgaactccgcctcctgtcagatcagcggcagcatcagattctcataggagtgcaaaccctactgtgaactgtgtgccagaaatctacattgtgcgctctttatgagaat

SEQ ID NO: 59117 - DNA, 1058 bp, Homo sapiens
cttctctgccgcgccctctgcgcaaggaggagactcgacaacatgtcacccgcgctccaagacctgtcgcaacccggtaacgctgcgaccccgtctgcgtggttgggttgtgtttcttaactcgtgctgtggcctcctaatccctggggcgattcccttctgcggcgggagacgcccggcggtgtttccccgcgtgtgggcggcacctttagaacttagcgcaggagcccggagggctacgtgttttgctccactctttgtccgaccttcacctctttctccccaggcaagccatcaaaacctgcaaaaagcgtcctcccctcgcccccgaaacacattcttaacgtcacagtaactaaactttccagttccacgcagcataaaccagctgggccctctggaagtttttttttttgcatggtgtgacgcttattcgtaaatatgtattgcgcacctactgcgaaagaaagttcaggcgcggagagacagacgaggaaactcagagaactatttaaaactactacatggaactttttattttctgcttctacgcacgctgctgcaaaactgcaatatgcatagactcactatgttaaaatagatgagcagaccccacctccagataccgaaatgggaggtagtaatttcaagcgattctgatgttggtggccctgggatcaacagtgagaaaaagctagtttagcacgagaactgaacgtaatgttagctttataacgagctctagatctctaaggtcatgcctgattataatttgaggacaaatacacccgtaaaaacgggtgaggagatgtagaaacgagaattagtgataagtacaaaacagtaaatatcctatcacatagtggggatgtttagcttcaggaagagggggaatactaaattcgtaacgcacaaggaaatttatcagaggttaaccggtgactctcttgattcttgggttctgataacgggactgatataattgttcttgaaactagtggaactgtggctgagaaacacatcactgctgttattaaataagatataaacctccctat

SEQ ID NO: 59118 - DNA, 1038 bp, Homo sapiens
ggagatcatatttatttggaaaacatcttttactcatgatttctggcctcccccttcccatttaatttaaacaagtaaagttatttccctttcatctgaatttaggtgtcattatcaggagcaaaatgccactgaagacttaaaatactgtgaatagtgagtgatttaaaaaaaaaaaataaactgaaaggaaaattgttgaatgtttgaatcttgcctagtcccctcacccccaaggctggcttctagagttgagcactgagtggagtttaaccaagtctagggcctctgaagttctgaatcaggccattgtgcctagaaaagaccttagatgtagtccagcttctgtctatgtgagcaacttttattgggattagaatcaggttttaacttcctaataacccttagtaatttactggcgtacaatcttaatgaaattttaatggagagctgggaattcctgattctcaaggttgggccttaaaactaaatgtgacttcagaccatggttgtgtgccctggggaaggaggatggtgggctagcaaatacatcttgggagaaaattttaactacagcttctaaaagtttcttggtttcatccttgcttaggactgtgagtgttatttggaactcaattgatgagtgattaatgaaggaatgaataatccagtgaattggtatcaattgatgagtgattaatgaaggaatgaataatccagtgaattggtatcagcctaattcttctccggcttattaaaatcaaagggggaaataatatatattaaaaatggaatactgcacaagcaaagagatgcccccaaagaagctgggcgcggtggctcatatctgtaatcccagcactttgggaggccgaggcgtgcgggtcacctgaggtcaggagttcgagaccagcctggccaacatggtgaaaccccatctgtactaaaaatacaaaaattagctgggtttatagtgagcgcctataaccccagctactcaggaggctgaggcaggagaatcgcttgaaccctggaggc

SEQ ID NO: 59119 - DNA, 1001 bp, Homo sapiens
gtcttgaactcctggcctcaagcagtcctctcaccttggcttcccaaagtgctatgattacaagcgtgagccaccatgcctggctgatgtgttaccttatgttagcatatagctaccctgtgaagtagggttataatatatttgaatgaagagactgagactcagagagtttaagggacttgattaagttcttataaccttagcatgttaacattgtctgaattcaagtttcgtgtttatttattcataccacgtgcctttctgtgaaatccttacacctttttgcatctctaccttctaatgcagtgccttactcttagtaaatggtcaaaaggtagctgctgataatggtggtaatgaaagggcatgtttattctgggggcacaagaaactctaaagctcataattgacattataatctcttgttgcaggaatacttgctggctggggcagatatcattgaaacaaatacttttagcagcactagtattgcccaagctgactatggccttgaacacttggtaagaattccattgttccatgtgtctaagatgcttacgagcgtttgctgcattggtagttgctagtgagtaaagcactggaagctgcagagtcaagctaatgcctagttatctgttgtttatgatgagacagggaaaatggtgtgaatccttccagcttgtgaacacagtggcccattcattttccaactggcttcttttatgggcaagtaataatcaaatataaatgatacttaattatgcagtagctgttgataaaggcataatcattggccgtatgcacacagtattgtgaggcctttttaagtattagatggcagccttggtttctttcttttttaaaaattgtgattaaataacactaaaatttatcataattatttttaagtgtacacttgagtggcattaagtacattcacagtattgtgctatcatcaccactgtccatttccagaactttctcattttccaaaactgaaa

SEQ ID NO: 59120 - DNA, 1178 bp, Homo sapiens
ccaactgttgtacatgaatcaaggcctggaaaagttgctgtgggaactgcctggccaggcagtgacagactagtgcttgaacctgcgtgttttgcctcttaagcctatgctctttccattgctttatttttttcttaattctcagaatatttaactacgtaagttattctctgacatgctagatgtctagggattgccctttttactggctagctcatggtttgggaggagaacctaaaagcagttcccaaggactcttgtctttccttgctgcctttcaagtctggagctgatatgcctgcttggctaagatttcactcagacctcagattaattcactctacattttgttactgaagaaaactgagtattagatggtcatgaatccattatttattgtgcggaggaaaagaaggacaagctaacgtttgtggttgatacgttaggcctaccggatgaacatgtgctctgcaggagtggccagaaaagctgccgaggaggtaactctccagacaggtagggaatgttcttctctttttttgcacacgtggttcctttgatactgtcagctataatgtgctgtccttattgcagtttttccttatgtggcctttggcttacgagtaacactgcagagactgtattttacatgtttgtagattacttctctgcagtttcataatcaagcactcaacatctttgaattgatgccaactctgtggtccttgggctcggaatttgctctttcaccctgggttagcctgactttgtagctaggcccctgacttccttgtgtatttagagctgaaataatttatgtctctttggaagcacatcatcatgtcattaaaagtaacagctggctgttttgatgatcttggctgttattaggataattgatctcatttttttaaagccaccctcattcccatgattggctgatataggtaaagatattgcctttcaagcattttccctttatactattgatgtccttgaaggctctgtgaagcacacaaaaaagtgtggcattagattcagtcttgcttggacttgaaaagtggctcctgaaataactagcctcctggctggatgccatcagaacacttgggcaccagctggtaggaggctttgagggagggaaaggaatataagaaatatatgtagccccttaagac

SEQ ID NO: 59121 - DNA, 1052 bp, Homo sapiens
catttcaagttaaatgctactgtaaggtgattttgcagaacttacgttaagttcaaaaccttcagggcttcataaaaataggaagagagggaatttgtccaaacacagctgtggtgatagaaaaggattacttactgaaatgttttagttagttgtgtgagaattgagagttgtggggactggtttcgtgatgatatgtgtatatctcctatatggcataatttccttagtgggatctggggcagccccatgatcaaatatatgtaagcagaatctatgaatcatctaagttggataaagactataaatagtctctcgttagtttaggagaggtcaagttttattgtcaaactgagaaaaaagtttgggcttttagagctttttggatttcagagttgtggacaaaagattatagacctgtgttccagaaaaaaatcttattggctattcattcacgacaaaaaatgttcagccacttagagatctcacacttgtttttcttttcccaaaggaattaagaggtttgtggcaggggctctgggtccgactaataagacactctctgtgtccccatctgtggaaaggccggattataggaacatcagtgagtatttaccacatataatcattgatcttggggaagtactccccaagcttcagtaagctataaatctgtaaaatggaatcaataacaggatctaccttagagttactgtgatttaatccatgtaaaacgtgtacagcagtgcctggaatatagtagacatctaaatagaaagttagctatgatgattattattatttgaacttgctttcaaatatatatggtggtgtgttaatgctgctttgtcagctgtggaaataaaaccaactaaaataaagctgtaaactcagaagttgaacaaatttggatactaggtttgtggtctattataaaatagcacacaatatcctcatttatcagaaggcagtccaaactatctagacatctgtattagtccattttcacactgctgataaaggcgtacaagactggacaatttacagaagaa

SEQ ID NO: 59122 - DNA, 1015 bp, Homo sapiens
ctattgctaaattgctttaaacaatcaccttccatcagattttaaaagagtgacatcaaatgtgctgtttaaaattgttcttttataaatcacaaacttgagagaagtgtgatctttgtatcaagtacttcacattcataatagatcataagtactttgtgtgagatgcttttggcggaggagtcacacagaaatgtcagcattgaaatgttggctccctgcttgcctgtcctgggaacctcagggtcagactaggatcgggcgtaccctgcgactagcttggaaggctggggccatgaggatcattgccagatggaagagaaatcataagccagtaccgtgcatggaaagcgataatctctatcagtgcaccaaggggcctggaatgcttttgtcatgacccagtttatagtcattatttttctctgcctcatatctgtttcttcctcagctcatgctttggcaaaggtctcaaaagccattttcttttattaacaatgaaagcagtgattatgggtgctaattctgtgcctgtcaatgttattcagtttcatttttacaataacagtataaagcagacactttactgtctttgtaaactcagaggcatatgggaagttgccccaaggttgttcattcaggtaagtgatttgaacccaaggccgtctgtacccagaacctgcctataaccatctaatgagactgcctctcctaatactttaaatgtaatgaatagaacaaaaacagttcagagccttttctgtagtgatactttacactgtatgtttttacttcagtgtgatatatccacatgtattatctgatatttgcccctaaattggccagtggcaggggagatgttattatgttggtggataaggaaacaggcaccagaagtccacctggcttacctagagtcagctcattagtgatagacctgccacagtgactcctgtctctcaggtctcaacctggatccctgattcagccttgttgattatgggttctaggcctc

SEQ ID NO: 59123 - DNA, 1049 bp, Homo sapiens
ccctttacagagaaaagtttgctgatcgctgacttaaggtatcactgtaaattctcatttttatttgtattgcccttagtctggcatggacatggggatagtgaatgctggaaacctccctgtgtatgatgatatccataaggaacttctgcagctctgtgaagatctcatctggaataaagaccctgaggccactgagaagctcttacgttatgcccaggtagagagacaagtgttctaatagatggatttttcctatctttgaatgtattactcacctacagttagtagaccttcatggtggaatagaagcaaatatcgaatcatatatttggatcactgaagatttctacagagagttgcagagatggtggtgtagctagggcaaggaagggtaaacagaccatgcctagggtgcttccgtattctgaacttaggtttctttaaatttattgtaaaatgtaaaattaatttttcttgtaccaagtaacatattagttctagaaaatttacaaaattctggtaagcaaaggaagaaaataaaaatcacttgtaatcctaccacccaaagttaaacacttgagattttgttataacctttaagtgatgggagtttttatttctttttgcaaaatgaatatgcatgcataggtacatatacatacattttttacaaaaatagaactatactctagatgcttttatggtaatatttttttcttagcagtgtactgggaacatatttccattttacttgatatttttctacctcattatttaaaatagctgttctggattttcttgtgtggctatgttagtgttacatggtccccactgttccatgttttggtttgtatacctgtttatgttaggatctggtccatctgtggcaaagttctgcagttcaaggcttaggtctgtgcacatttgatgtgtaaaaaatgagtataattatagctaattcaaacaccagcttgtttctcatttatatgttgggcgcagtcctaggcacatgaagtatctatcgtagatggttcttcttagaattc

SEQ ID NO: 59124 - DNA, 1055 bp, Homo sapiens
tgtgtcataacatggcagagggcatctcatgtcaagagggcaagagcaagagagccagagagatagcaaacctgcttccatggtagcaacattaatccagccgtcataaattcgttaatccattcatgggggcagagggattaggtttccaacacaacttttggaggacaccttcaaaccataacaatggcagagtccttgagagcatagtctgtgtcgtacacctcctagtgtgcccacctttgatgtctgacttagcttcattatggcctccctgcatctgtttttgggtactggtgatccttgttgagagctttgaaggctcattgggtttggagtatagcttctcttactgtcctggaaattttgtgttgagttgttatttttagaaaagagggaaaggaaagaatggaattttactctgtctctacactaacagttcaaaccctaaaagatttctcatttttccctctccttccctcaaacattcattgagatcttattttatgctggacagtctactaggggctggaaaagtaaaagaagaataagacacaggtttttttgtttgtttgtttgttttgccatcaaacagtttggttagtgatgagttgtatccatttcttggtttcaatttcaattcagactcaaggcacaggagggaagaaagtcattcagactgatgagtggagaaatggccctgtcgaagaacgccttgagtatgcccttgtgaaggtaagttacaggggcctgaactggagggctggaggctcatcatggctgactgatcctgttgtgggcggtgtgacagtagctggagaaggagatgcctagaccactgattctcaacctggggaggtccctcttgctgtcccccagctgcccccccccccccccccccccaccatagcacatttgacagtgttcagagacatttttgattgtcgtaactgtgcctgggaggtattactggcatcctatggccaggggtgctgctaaacatcctgcagtgcccaggacagccccaaaccacaaagaatattccttcccaagtg

SEQ ID NO: 59125 - DNA, 1099 bp, Homo sapiens
aatctggtaaaacacgaagatacaaaatggattttatgcatttgaacttattagtccttctctgttagcacattttactgaggtatattttaaagcattttttaattggcatataaaattgtatgtatttactgcatacaacattctgttttggaagtgtatgaggtatttactttgtttgtatcaataaagccagctaagcactttatctcaatcctcaaaataaacatatgagatactattgtaatattctaattgaggaaactgaggcttattgaattgcctaaattagtgataggaagccagattgagtccatgcactctgcttctggaacctgtgctgttaggcattttcatgatggctctgtggaggtaaggcagttttttaggtgattttttttttctttctttctttttcttttttttttttttttgtcttttttagggcattgaaaaacatattattgaggatactgaggaagccaggttaaaccaaaaaaaatatccccgacctctcaatataattgaaggacccctgatgaatggaatgaaaattgttggtgatctttttggagctggaaaaatgtttctacctcaggttagcaaaatatggggagaaattttcacagttgcatcttttctttgtcatttaataaatggcgatttgggatatatttctcaggttttaatttggacaagagttcaatggtattggctagtcattccttctctaaatatgtttaggagtcatgtctgcaagaatccgtcttcagagtggtgtggatgttggaaatccgaaaattcttagcatcataatctatcataatccttatgttctaatttttgtatcacctcttacccccagtgcctatctctcccctccaaaagtaaagtaaaacccaagataaatgtagagttactaacattaagacttgatttgaccaggcactgttcatctgtaaggatgcatattttgagacaaatgttactgttttaaatgacggtacattaagtggtttgtttaaagtaaaaccagaactcttactttgatttacagcagctgctaaccacatcagttaacacatacttgttgagcatg

SEQ ID NO: 59126 - DNA, 1045 bp, Homo sapiens
tgatcctcctgccttggcctcttaaagcactgggtttacaggcatgagcctccatacccaacctctcttctgagcactttaaaacaaatactgtaaaatcaacaacttccgtaacattcatttttattctctttagcctcccatgtggcgaaatacaggaatgtgtatagggagaggcttacagacatagggtatggctcaaaatgacaaagggaaactgagggagagtcaaggaagatggggttatgtgtaggggtaaaacaggaggttgtggtagaggtgagagggatggtgggaagaatggtagcaggcacagagggcaggctggatctgacctgtgccctcttctccgacttcacataccctgggattcctagctagttcaggactctgggccctcatagtgctggtctctgcctagacttccctgtttccttcagctaatacccacttaatttttcaaaatccatttcagactttcccctaggatgcttctggttgtcacccattttgggccttccatacatagtacactgtaaatgctttcattgtagtacttgccacaccatattctaattcagagcttgccaacagtttctcaactcagatgtgccaggaaacccattctctttcctgctggagagtggaactgggcctctgtcctacatgggttgaccagggctgtgagcaacttcctttgtgcatcccagtaccataagtgtcatttcagtgtgtggaaatagtgagaattgccctctaatcaatagtacatttgactatttccccagcaagacgactttgaaggcaggctaattagctggaaattgaacttgtcacccaggcctctggctcagtgttcttggtcgttttcttacctcactgatctgtggttatgattctctcctgctgatctctccttctgggagtggtctttaaacacagaaatgttctggggctcagcccttggacctcttctctgtcttcactgtctagatgtgtgtttctcaaactgtaatgtaccttcttgtcacctggggattttgtt

SEQ ID NO: 59127 - DNA, 1096 bp, Homo sapiens
ttactgaagattccatatgtcatagttttttttttaactttttttaaaaaagtaatatgagtacaagctaaaaatccagtggtatgaaagggcatatagtgagaagccagtccccttcctgccccagcgttcagcacccattgttaccagccagtatgtcatgttgtagtcttaagcattcttttttgttcttgttatttaaacgtttttgcctatttaattttaagaattgttgatgtaatgaaataagtaaaaatgcatgctgtaagtttttcaacatcttttaacaaatagaagaaggttaaattatcaaaatgacattaaggtactctgtaaatttaaaatagaagtaattcctagaacattttccagggcagacattcctgtttcctctgagttccaggaagctctctcctccatgaattgaaatttgtctggcactgttccgttctctgagagtgtgctccaggcttcctctgccccagcgcctgttctcctgtgtgcccatctagagtctgcctttcctttcagtcttgccctcttgccctcggtgacctgcaccctgaatcactctccctctttttcttgcgttaagtaatcagagttccctgacagctcttcgtgtgcaggacctgacctctttttcatgatcttccctgttggcttccaagttcaacaggtgtttattgaggaacttccctagccctttttattggcctaaatagataagataatggattttggagtgagatactgattcagatcccaactctgcctctaattagttgtgtgactagacagattgcttaatttctctgggccccttctcattaaaatgagacccatagtagtgctttcatgatagagttactatgagggtttaaatgagatcatttatgcaggccgggcactgtggctcaagcctataatcctagctcaagcctgtaatcccaaaggaagccgaggtgggaggatcacttgagcccaggagtttgagaccagtctgggcaacatagggaaaccctatctacaaaaactgtaaaaattagctgggtttagtggggcatgcctgtggtcccagctactctggaggctg

SEQ ID NO: 59128 - DNA, 2083 bp, Homo sapiens
attctttgctttttcttggatttctttggcttgcaataatctttttcttaacactctcacttgcgattcagttcctgagaattataatgaactcttctcgtgaaattaaaccgagtggagaagctgtgttttttggcacaaaatcattacttgaacttttgcccactctgtcttgaagcaggtgtctgactgaatgattacaggttcctttgaaggaactctaaccttgtagtagtttggagacagaaagcccatctagcaagaatgaactaaatggtcactttggggagttcctgaaaggggagctttgtgggaacctttgggttaacaacataaagaggtataaaatgtaaagatgagaaagttcaaatttgttcacatgataattattcagtttaccagatttttcctgggatcatgatcatagtgatatgtggtaagtgctacgttaactgtgggtactagactttttatgccatgtacagttcactttctcagcattatcatactggaacattgaacacagtggtcccatagcatctagtttatttttctgatgcagaaatacaataaaggtctggttataggtatgccagaaatacaataaagatctgggtataggtatacaataaaggtctggttccataggtatgccacaataaaggtctggttataggtatgcaaaagaaaagtgttccttttgcactacaaacaactgtacttttagccaatttgtatagggttgttcagaggaacagaatcaataggatatgtttatatatagagagaaagagatttattttaaataattaactcctgtgattgtggaggctggcaagactgaaatctgcaggctggagacacaggtaagttgattttttgagtctaaaggcagtctagaggtggaatttcttcttccttgtagggctggggagtgaataagggactccttgtcttgtctcttaaaggtcttcagctgactggatgaggcccaccaacatagtggaggataatgtgctttacttaggtctactgataaatgttaatcacatcaaaaaaaatactttcacagtaacatttaggttgtggttaaccaaaaagtagataccatggcctagccaagtttatacgtgaaattaaccatcataccatttaaaatttgaatgagtcatcttcataagtagaaacagtattatgtgtcttttatccattagctgttcttcatacttgaaggattcgatagtttgactatcgttgcttaacgttagaaaacagggtttgcgtttccacaaaggacttatgtaccaggaaatgtggcagacttggtctcaagggatatggccacccattaataatgggttttgatgagcatgggcttgggtaattgatgacaggcttagtgaagagaatggtaagaggacctatggactgttgtcagaatgaaagactttaatatcaactgtgaagtagaataaataaatatttaaaggaacataattaaaatacattatgtgttatgtaaatatgatgctggcttcaaaaaaagaatctttttatatggtgggacactacactcagaaatttgcttcttgtgcaaattggaactttaccaaatagtccattctatcatttactatgtaaaagctaccagattaaagaaaaaaaaacattgagaagcaacgtgactagcctctcaagatacattattggcaaaattagcttgctaatgattcttagcagttgcaacctgatatatcagattagaattaacaagataggaaatcaccaacatctcttcagttactgcgaaatatctattctcattgtctgggaaactgtaaatgtgtttggcctgaaggtagaaagctgagtccactgaccacctaaggtttctttcaactctccagagcattgtttctgtatgagccctgcctcttctggttctcttctcttccatgcctgttgcagtttctgggaaattacttggaaaataagagctagtaggtagcactgcttcccgggaaccattcccttctacactgtggtgctggaacagcctttggaaaacagatttccacgcaac

SEQ ID NO: 59129 - DNA, 2398 bp, Homo sapiens
actctcttatcaggcaggctgtcccaagggtttagagtttgtctcccagaaaccagtcaaaggccagtcccttctttggcttgtgcagggtttgaacatcccaagcccactgagtttaccttttcctgcacgccaggcaggaattagcacagttggtgaagggagaagaaatgaagttaaggaagccttcctgaaggaggtgttatcagcattgaccattactacaccagttttatcatcttttgctcatctatggctatcttgcattttcagtgttcccagctgttagatgaaaatctaaaggatgaatactttgaggaaatcatggaagaatatgaagatattagacaggaccattatgagtctctcaaggtaagtggtagaaacagatttttgcttgtttttaatgtgactgttttttatgatcctagtttttaatgtgactttttaaaatggttttgaggagtgtaaaaggctttggatcattttagagaatttctgtcttctagttcaaatcagaggtcttcagtgtcttaagttcccaaataatttttggttgtattgaaatgaattttatttattcagccaaacatttactgggtacccagtaggtgttaggggctgtgctagatatcagaactatggtaatgaataaaacatgagttcatactcagcagggaaacaggtgctgaaacagtgtactgaaatgactcccacagacccccattcttcaggagctaatggaagaaaatggagacatgaggcaggaccagtataagccttttgcctgactgcccaacactgactgtgcagaatgatgttttaagaactgtccgtctcttgatcagcttcagggaatccatggagaacaggcataattaggctttggaagtcactgaaatatttctttccggttatctgccttctgggctttggtgggagcattttgggagttgctaggcaagtgaaatgagatcaacagcatgaggaaaacacgctgttttgcttctgaggtggtaggtaggccaagacgcagtggttggcttttttctctctccttaggttcgcccacagtggacagtttctttaattctaccttctggtcctcagggtgggccatggaagaccagttaacagctgacctcaggtgttctaaaagtacaggtcagacacccctagtacctcaggttcaggccgcagaactaggctcgtatttatatatcagcagttaatggatgcttattaagtctttactatctattgttctggtgccaatgtgaaaccgactgggtagaaaaggaagagctttttagaataaacattctcatgaataagagcatttgctttcttgcaaagcttacatactggccttcttggacatgttttcacagtagttgtagaaaagctaagagtgtctaactaatttttctttgttttttaacaggagaggagatacttacccttaagtcaagccagaaaaagtggtttccaaatggattggctgtctgaacctcacccaggtctgtttggctatggactagagaaagactgggtgtggtaactgacagtgtgctgaggaaatacatgcatttacttggctgcaaaatcaaaccagcagctaacgactctcaactgtgtctaatgctgatgagtgactgatgactggaaagaaagggaataggtaccatttatggagcaggtgttgtgtgccagataccatcctgagatggactcatagcagctctctgagtccttcagacaactccataatggacatgggaattatctgcattttaatttgaagaaactgagttttgggtggaaacttgaaaggttactaggaatctctctctggtctgtcttctaaagccatgctctttcctctgtgctgtgcttgcgtgggtccccgtctccttgaaggaagttctgtggaaacctgcctgggtggtactgtcacctgaggtggcctgggtctttcgcaggcccaggggcagatgtgaaatgtctaaaatgggaaacgcctttgcattcacacatctttaaaacactgcagcaaagcaggatcctctatttcttgctttctctctgtcctctctctggatgtttccctctctttttatttcttttatttggtttcttcctttttttaaatttctagccacctttcttgcctcatataggtgttcacaagggaataaaacgtgtaagatgttttgacaggcgcagagaggcgtgagacacaaatgcaaaaccaagatagagtgaacaggggttatattaattgaatccatatttccaaggtaatgtatcaaatcagctttcattgctcacgacatctgtgttctacacatgcttggcagagttgagcggattaaattggaaatgtaggtgtgcttgg

SEQ ID NO: 59130 - DNA, 1086 bp, Homo sapiens
tatagttcaagctccgattatttgctctgtatctttccctgtgaaattggaataataacacaagggcaagtctgtttggattaattcaaacatccaaaacgtattttgctggaaataccctccaaaggcccacagcacctggcagcggttgggatgcttttttagtggccgctttaacctctggcatgggctactgcagggtccgccctgctgccccagggccatgggccactgagggctggccctctgaaatatgtcttgaggacagccagtcctagggtagttgcaggaagtcggtagggaataaaagagggttttcttttacggccctgatggtaacacctcaaacatttcttaaattctgggagacgagagagtccatcagtggctctgcagcagcatgttctctctgccttcccaggcgggaggacgcttgaatcaagggtctatctgtagattccttttagtttctctactaaggggactataaaggctttgttaccaacaaaccaacataataggatatttccaaagaagggattgtcccgtgtagtagaaggatgatgaggaacaaatgggaaagggctaccgtgaacaagtatgaaaaggtagagatttccaggcaggagtaagaagtcaaatgagagaaaaatactctagaagcttctgtgttctcccagagcccctgagattggtagaataggaagttccctgatccctggttacaaatcaggaagtagagagacaggaaggctcggatacggcaatggagccaacaccttagactccagcctaatcctgccatgtcagaccagagtctgaggtgcagaccacactacagtctggagggcagatggcagtgctgctctacctgccccagaaagcccagcagcaccatctgtctctgaagtcttcaccattatttaaattatgatgtattttagactcaccaggaggtataaagaacaatatattaaacatccacgtatacccactagccagcttaagacataacctaccatctgatttttaaaaaacgaaacaatgcagagtgaacagaggttatattaattgaatccatatttc

SEQ ID NO: 59131 - DNA, 1623 bp, Homo sapiens
attgagctgcagagcagcagctgatgaaagtacaaaccaatcaagaatccagcctgtttcctcttgtcaaatttcccctggctgtggtccagatgagggagggtgtcctcatggttctaattcagggggtggaggctgcactgatgctgtgagcccctgcgtctgcctaagcatgcctgctgctttgggtcccaaggcctttgcagaagagctccatgaaagagttcgccgagaactgtgggcctactgtggcagtgagcagctggacgtcgcagacctgcgcaggctgcggtacaagggcatccgcccggctcctggctaccccagccagcccgaccacaccgagaagctcaccatgtggagactcgcagacatcgagcagtctacaggtaggagccaggaggctgcgggttcctgtcttccttcttcagtagatactcttatcagcatactggcacttagggttaaacatgtttttaaaatggaagggcttctaatcacattgtcccttatgctgtcctttttcactcgtagctattctgcattttacttcagtattactgattagtattcttacatcattatttttagatgtatcaatttaaattatttcctcttggcctacgccagatgggagtttagcttatgtataccatcctgtgcctctcctgccccagtttcctgtcacaggcatggtgatgtctttaatccctcccttagagaccgacctttgtccctcagtaatgtcactttgcttcatgctcttgtctcattgcttgtggatggtgtccctgggtgctggtcttgcagagcgcccagccttcccttcagccctcttttctctttacttttacactgttagtaacatttatattcttctgtaatcataattctctgttatgttttgcctgtggattgattctaaaagctgaaaatgacaagctggcatgtgcctttctgagacaaaggcccagacacccggcctcagcgtcctgtgcccagagctgacttggctcgtggttctgtggctgcacattgtcatgtcaatgtcctggttctgtcattactgcagagttcatgtagttgagatggcccaggctaagctcacagttttcagcggaattaataaaaagcatgccatcaaagctgataaaggcatccagatttaagtgagaaaccatgagctgtgctgaatctgcttcagcaggaacaacactaactctaggagtcatgagatctgggtttgagtcctgtttctgccataagctagctgggcgacctctggcaaagcactcacccttcatgttgctctgtttccttgttcatagaatgagtggcttcgaatagatatccttgagggtctgtttgagctctcagatcccaaggaaaactgtctcttctttctcacaatgttgtgggttccttcttcactggagctctcagtcgtccctagtatcagtggccgcacagagccggtggaggctgttcagttgttgttctcatctccaggggtagagctcctgcctgagaaggtctaggcttaggagcaaattagggcacctgtaactgatctgggatggctggaggtgggagtgtagagtctttcccaggcctgtccccctg

SEQ ID NO: 59132 - DNA, 2154 bp, Homo sapiens
tgtggtcaagcagccatgctttctgggcattttcgtcctcccataatttcatatttccgtacccctgaggaaacaaaaaggaaatgaggagagaaagttactgttaagggtggttaacattttttttgttttgttttgttttggtttttttttttttgagacagagtctggctctgtcgcccaggctggagtgcaggggcgcaatctcggctcatagcaagctccgcctcctgggttcatgccattctcctgcctcagcctccagagtagctgggactacaggtgcccgccaccacacccggctaattttttgtgtttttacaaaatacaaaaaagtagagacaggatttcactgtgttagccaggatggtcttgatctcccgacctcgtgatctgcccacctcagcctcccaaaatgctgggattacaggcgtgagccaccgagcctggccggttaacatcttttaattgtttccaggattgagcaggttctcagctgggctctgatatcccgtgcggagttggacaagtgggcagcataaagtcactcatttcttaccattttattcccctcaattctcaatatattcagtaatgaagaatggtgccaccactcaagcaacaagcctcaaactcaaccatgtcatctttttcttggatgattgcagttatttcaaaaatttgcatgcaaaatatacactcatcctacttcaagatggtggtggcaatagtcaggagaaggtaacattggagtcctggtttgattcgaaggatgaagacgaagaagcaagggaggaacaaatgaagaaccatctttgttcatgaataggaatattcaagattataaaggtatcaggtctcctaaaattgatctatggatttaataccattttcaatggaaattccaacagattttattgaatgaaacaagcaggtgtttatatggagtagcaaaggacttaaaattaccaaatgcttctaaatatgaaggagaggttggggacacgcaccctatgtgataccaagttttattgtcaagacagtgtcatggtgcagaggtaggcattctgagcaggggaacaaaataagggcctagaaactcacccgtgcatatgttgacctttgcaaaatgacctggtgacatggcaagtcagtggggacaggaaggaccactccctaagtaatcccagaacaatggctattcatgtgggaaaaaaagaaattttactttctctcaccttacctggtgataagttccaaatatgttaagggctttaatacaaaaagcaaaaattgtcagtgtttggatgaaaaaagccttagggcaggaaagaatctcttgagacataaagtagtaatcataaaggacaagatggttaagtcaattctgttaaaactcaaggcttatattaagcaaacacttgaagtgagaagatgatccacaacttgagaagacatttataatacaaataactgatgaaggattcataatcacaaatatagagaattcctatttaaaaaaatagaaaaatagtgaagactacacaagaggaaatagggcttttaaataaatagatgttctgtagcattggtcagggaaatatgaattaggaccacaatgagattccattttatatccataagatttgcaaaggttgggtctgacagtaccagttgttagatctgtagggacttgtacaacattgtggatgtgtaaacaggcaccactgctttaaaaaacaattatcccttacagacttgaacatttgcagacgttatgatcttgcttccaactcccacctgtatgtccagcaaactcttgcatgtggccactaggaggaatgtgtaagaatgttcatagttacatatttataatagttaataactggaaaaagtgaaatgtatgtctgtctacaggaaaataggtgaataattagatatatatattcattctacgggatattattcagtagtggaaatgagtgaactacagctatacctcacaataagaatgaatctcagaaaatattaaggaaaaaagcaagtttgaagagaccacatggggcgtactatttttattgagcccaaaaacaagcaaaaccaaagaatatgtagtctaagcatacgtatacaataaaactatgctattaaaaa

SEQ ID NO: 59133 - DNA, 1051 bp, Homo sapiens
gtactgttggcccaagaccgggcttggaagagcctcttcactaataccttggtcacggtgtataaacctgctagtaatacagttgtctttttcatagaaaatagactataagggtttttttttttttaagtaattaacaccacattagatttttctcaaaactaaggactattttattcaggtggacaaatacggttgctgtataatttttcaatcaattcgtatcaaactctgtggggttaaaactagctgggacattttggtaggcttcatgcactcaagggcttcctgcgggcttaactgttaagccgagctcatggaggtggtgttatcagaatgcttaatggggaccgagggaacgtgctggctgatgaggttctgcacatatcaagtaatgtcaactctgtgccactcagcagctgcctgtcagctagagcagcacctttgataagtgggtcctgggtagagatctggcagtcccaggctgggatttttcttttaataaaacatccgtaggttgctgtgctgacgacaaatgaccttgaaggaggtgacacagtggagcagggggatttttttttttttggtatagcattaacatctaaaaggaaaacatgcctttcctcacaattttccaattttcatatggaaattctcaaatcctttaccggcttctccacccattaccctccatccttccctcccccaccccccttttttttctcttaacctgagaatgttggtggttcagaaatgctgatggggtgaataatggggagactgtagtatagttcccacattgaagtcgcttcttttttttctgagggcatttatttctctgtcatgtgcaagcttgtcaatatgagttatttcttcttcttcttctttttttttttttttaaagcaaatagcccaaggagtattaggaatctgtacatcttgataaaacagttgtagatggaagaattcttgatagtgatggatgaagctgttttgcatagaaaaacaaaaacagtcattaagacaccgtaattgtgaatttgatgggaca

SEQ ID NO: 59134 - DNA, 1087 bp, Homo sapiens
tcatatccaaacatatccatgatttggaatgtgtgttttattttaaagattttattaacttaccaatgtagcatcaaactgtcatttggcatttaaaaacacgcatctttttcgttatggtcctctttttttttttttttccaacaatcatacagaatgttatagaagatattcctctgactttaggaaaaccatggtataaaatgaccttggtcaaggttttttttttttttttttttttttttgagtactttgtctttctttcatttgtctaagcacagttgagttacccttgtggtgtactgtgtcatgtagttttgtatttacccatagattgagacttaaagcttagtcctggctgtaagaatgatcctgataggaatgcttacggtcttcctcctgtcttcttttgcagaatgaagtatttcattatagatttcttctcagtgttcatacatcttgttccacaatgacaagaagcatctttaaatatactcatctacaaatggtgacaattatgcagtatagatgctggtgtacaacactgcatagtagtttggatgggaatacttagccctagtttgtagaggtccaggaaggttaatggtatgaagtcagtactcagcagtgcagaacgaggactaaaattcaaatcttaggctaatagtgttctttccaggagagaaaggcttctttatctgctgttcaagtatgttttaggtttatagcaaaagaataccaagtcagttttctcagctgtaggaatgtcacagagtacaaaggaaaagatggaatgagcagtggaaattcgcactttttgctcccttcataatgaagctacgaggagctttagatagatatgcactatggtattttcccaaggaactgatggaaagcccacccaggcttacatcatcagacttattttattttaacttagaaattagcatgtacacattggcaggaagggcaagatctaaaacgcttagggcactaatttatttgacattcaattgtatttgtactttggcttcagataagtgtttttatcacggctgaattacccaagaaaggactccagcagcac

SEQ ID NO: 59135 - DNA, 1816 bp, Homo sapiens
aatgttacagtccctcacatggcctgaatcttggtcctggaagccaagattggaatccatcctttctagcctttttttttttttttttgcctccctatccacttactccttctggtttatcttgaagcctgttaatttctcccatcttaaaatgtctgtctttgacccggataccttatttggttgctcccctcctgcagaagtggtcttctcccactgcttgtacccctctccatgtaattatctagcttctcttccttcttcaatttactttccaggatgttgccagtaactccctccttgccacgtctaaatgtccctctctgtccctattcccttagattccttctcaagctctactaccctgactttcctttttgaagctactcttttgactttggggacatggtaccttctgggtaattttttacatttctgatcatgctttttccaggtgcttttcattccttttactccaagtgtgtggttatcccaaaagattctgtcctatttcctgttctggctcttctgccttcatgagcttatctatgtcacaaaatctgggatctcttgaataacagagtctgaaaagacttaacaatgacttcatccagctctgagagccagagagatgaaaggaatgttcccaaagcgactcttttttgtaggagaaacccaccgtagattcgacagccctgggccttcacttcaagcctctgtttagacttccctcttgcctctcggaccccagaaacaccagcttgacatcattgcctgttcggttccctaagcgactttccttcctagtgtctctgctgatcagtggcactgccgtttgtggctgtggctccagtgtgatcctaaccttcagaagacctgagtctgaggccggaatccaccagcacctagctttacggacttagaacaacagtgcctggctcatgggagtggctcaatgcatttgtctagttctctttcttctcttctgcatctaatttgtcatcatagcccatcgtgtttctctttgcaatccaactcagatttcgatgtgtttcatactccgttagcttcttgttctgatcccagtactcatttcaaccttcgtcatccttcctcctgcaacaaatcggcaacccacctagaatccgcctgccattttagtcctcctgaaaccctcgtgtccatctcccagcctcagctcacatccttgcatatcctgtctaatttctctacttggccttttatgatctgccccttgataccttgcttatgcttttcatcctacacagagttttcttggatcactctaaccaattccgattttacctttctccgaccatttatcactaataattaataaaatgtatggaactgattgggaaactcaagcaatggtcagagaatgctctgaccctgatgctctgtgggtgagttgggaccgtgttgggcatcggtttcccatgatgcttggtgcactgttaactacaaggacagacttgagagaaatcttgtggcaaggagaagatcgggacaagagaaaggatcctcctgcccacaagtttaatgtgaacatcacttgaatgcgtccaaatgcagaaagaaggaacctgctatgaaggaagtaggcaaagatagtgggggtggaagaatagaggtaagatctcttctggaagcagaagagtaggagtgttggtgggtgaaattctgagatgaggacaccggaggtgtgtagggtgagagaggccaggtgatgattgctgctttgggaggccgcagtggctcccaggtccagtgggaggggacacccggagaaggc

SEQ ID NO: 59136 - DNA, 1064 bp, Homo sapiens
agagaggaggtgggagcttgaaaggggaggaagggtaaaagttagggatgcttttcttttctcatgaaagagaccataatctaaggttgtagaggagaagtggtgattgatgttgcaagttcctaagtacaagatgggatagagatgccccccagccccaccaacacacatcaccattgttgggcacacgcctaagctgatgcatcgcctctctttgcagatacctaattactgcttttcttaattcgagagcacatacgattttcatttgcctttggtttagctttgcatcatttcattttctgctagggaccttttgatcattaaaattagagctctataaagctttgttggttcaaagctgggcgtgttttgtttgcaatttgcagtggtttggtgatgaaataatccagctaggcttgaagcaagcatgtctcattaagacaaatgggagaagctgatattgctggcgggttttttctcatagctgttaactcaaaaagaaggtagggcttatataggtaattatgtatactattaagcaaatagtcagtctagggatatattggagggattttctgaaagctcaggtcaggggaaaatgttgaaatatcttaggaaacagaatgattctgctggtagtgactgccctcagctctcctactatgataggatctggctaagaaaattccagtaatttttcagaaaattagcaatttatattttgagagttttttcctccacatttttgtgtaattggcactatgctgtacatataatttgttgcttgcaaagcactgtctttcaaaaaaatctaaccagtaaatctatacagtatttacatgtgtaaattccacatttgttccatacttcacactgttgatttaaaggtaaaagctttcaacaaatgtctgcacttaacaacagagcatatatcttcatctcttttgtgttctgaatgagcacctataacactttctcaaaaggaatcttccttggaggcggggcgtggtggctcacacctgtaatcccagcacttttggagccagggcgggccggattac

SEQ ID NO: 59137 - DNA, 1076 bp, Homo sapiens
gtgagccatggtgcctgaccagaattgtcttttttaaacattaacttttggggagtattttatatgatgtgaataggaatcttttgttagatacgtctattgcaaatatcttttccaacactcttgcttttcccccctctgttactgatgttgttagtgtcgaagagcagtttttcactttaatgaagtccagattatcagtttttttaaatcatggtttgtggttttttttttgtatcttctttgcctacccaaaggctgttctcccatgttatcttctacagcctttactattttaaggctgatatttaggtctgtgctcttagaattgatattttgtttatagtttgaggtagagatcagtccctccacctatggatgtccaattgatccaggactagttatttaaaaggctaccttttcatcactgcattgcagtggtacctgggtagtaagtcaggtggctgtaagcagggatatctattacttgactctcttttatttcattggtctatttgtcttttcttgttccaaatttataacttttaaattaactccagatttctgctgttttgttatatgttggtgttcatcttctaactttgctctaagtcttcaaaattatctttgctattcttggctcctttcatttcagtttaaattttagaattagcttataaatctccacaagatgagctgctggaatttttaatgaaatagcatcaaatctgtagacccgtttgagaagaattaacatcttttcgatattaagactcccaatctatgaacatggtatatctttcttttatatatttagatattttaaaatttctctcagtatttgcacttagttttccatgaaagactttgcacattttgggggtcagatttatttctaggtatttgatgtttattgatgtcaatgcaaatgtatctttaaaaaattgtttcttagactgtaaaaatataattgactttacatttgaccttgtatctagtaaccttgccaagttcacttattaattctaatagtttatagattcttttggattttctatatgcccagtcatgtcatc

SEQ ID NO: 59138 - DNA, 1099 bp, Homo sapiens
ccatccatttccacagagtggtcccagctggggagattatatgcaaaggagacctctcagaaagcaaggtggcatgtagtgggcatgtgataagctactcactgcatggctcaacatggctcaggcaacaactcaggcaagaggattctgcagaaagagagatggatgtcatcagaataggcggggaagtggacttgtggttgaccttgaagtctgggcattccaggctggagggacagcctgggccctgagaaaaccaccttccactggagccattctactagaatagttttcatttctcatgcagaggtctggtcttcaaataaatgattctgaaaaattggacttagagactatcacgggaaaatgatgaaggtcatagcctctgggatcctgaaaattgtttgggacttttatagactttcacagtcctggatttctgggtgggaggaataaaaaccggattggacagtgtcgtccttcaacagaagaggcctgacgttaagcaatgccctatttcaaatactttccactgcagaaagagtgctgtccaattgccagtctgggaaatctcttcctgggcttgttttgttttgggattaaatcacatggaactcttttcttcagctcatgttgtcatacttgagacactgctatttcttcccttttatttctaaattgtgaaccttctccttttgtttcaacctagaaatgtacacttctcgttaattgttcttatgagaatggtttctttacagcaataggtggcggataacaagactggaaactttgagtacacaggaccacactggtttcagttctaattttcctaagtggctttgctgagggaggcaatatacattggtatatattggtatatatttggcaagggaatatacgttggtatcttatttttctaaccatagtaatggtatctggaattgttgttggcttttaggctaagccattcattatttttaaccttcagaaaaaaatttgaagatacttaattataaaataaaggctgctcagattttaccacttggacaagagatgaaagttccagaagagtacaaactgagctgctctggcatgttcg

SEQ ID NO: 59139 - DNA, 1058 bp, Homo sapiens
ctcattcttgtgtattaatttttaataaggaagtgaaccccagatgacagaactgattttcttttattgggtgacggttgagatctcctattgcttaaatcaggttaaataagagagaatgctgctctgtaagtctggcctctgggtctctggtatatttacaaagatttaaacgtaatacctattcctgtttctcaggcatcctcatgacaccatcttccagtataggagaccaaaatggataagatgaaagcaaaacatcttgtgtaatgcaatcaaagcaactttaattttttggtttctggcaaggaggatatgggcttaagtaaaatactccattgcaccgtttctggggatttatgtttttaaaccaagtataataatattccatgtacatccactaccagtgatattagctattcccagtccgtgtcacccccagggatggagtgggctggagacctggggagggagaaatcaagcctcatatgctgtgatgtcttgacaagtgagtgcccccaatcctgttggcatttgtgctgcaggagtttggttgatcagatttgtattttagataaatatattaggtcacagtttgaatttcaaattgcatgtcctttgccatttttctttattaaaatgtatgcattaaaattgttatgcatgaagacaaatatcaagattgactgatgttttcctccctattaatttcccgtaggaatggtaaaaatgcaattattcatctatgaaaatggtgtttaagaccttgaaaatgaagagaatttggaaagccacttgtgccataaaatttctgaacacagaaacgggccagtgattcagtcgatattgattgattggttgattgattttaatttcttctccagctttattgaggtataattgacaattaaaaattgcatatactcaaaatgtacatatgatgttttgatttcattgtgaaatctttactataatcaagccagctaatatatccatcacctcacatagttgccattgtgtgtatgtgtgtgtgtgtgtgtgtgtgtgtgtgtgtgtgt

SEQ ID NO: 59140 - DNA, 1064 bp, Homo sapiens
ccacccaaacctttatttgtacaaaagcaaaagcaagcaacctcatcgttaggagaggagttactgccccataacccaggaaagtcttaaaaagaaattataccaagtgtacttttcatctctatttctgtttttcactttttcagtcaatcagccacttactatttattaagtatttcttccatctaagcaaggtgggggagggagagaaagagattattcctacgtttatgattccaatcttgtttaaagtgtattcgtaaaacgtgagttaataatgtggcatcaaatgagtgccttgtgggcctcttgatggtgagtgttataggaatgtagaggtcaaaggaattgctgtggactgtggtgtgtgtgaaagcttcatggtagacttttgacttcaaggtcaaagacattgctgtggactttggtggtgtgtgaaggcttcgtggtagactggggctgagatgagcccctaggaaggaccaggatttagacgggagcttgaggaacaggacagacaggtggggggagtgctccaagggagcaagggatagagagggagtagatcagtctgcctggagttgaggctttgtttacaggcgaggtgctggtgagggtggtggagaggcatccaggaaggttgaaaatatatttctgtagccacctgccatcctgcatgcaggcacacacacatacacagcagccgtcctcttgttgaatgcctcttctcactaaatacagatacatccatgaggcttacacttactgctcatttagtaaagtagtaaagtcacagtgggagcccgggaatcaggaaataaacactcagatgttttccttctagttttgatcagctgccctgagagaatgagattttaaaataatttgacaggccggcatggtggctaacgcctgtaatcccagcacttcgggaggctgaggagtgtggatcacttgaggtcaggagttcgagaccagcctggccaacattgtgaaaccccttctctactaaaaatacaaaaattagctgggcatggtggtgtgcacttgtaatcccgctactc

SEQ ID NO: 59141 - DNA, 1068 bp, Homo sapiens
tttttgcaaggattacaagagttaatgtgttttaagtacatggcatagaaagtaccaaataagtgctagtttctttctcttcccatagaaagttaattaccataaaatagttatagatggagtgagttgggtgtttagagtgagaagactttcagctgtggggatcagggaaggtttgtggtcttatgagctaaaggattggaagaattaagacttacagaaataaagggaaaggacattgaagagagagaacaagataagcgtctggaagaaagagattagagttcagatgctcttaaaaaatatcgtgttcactttcatattttatccttttcatatatgccttctcccgggctttgaaggaggaaattggtgatgttttcctcattagacatttatctataaggatcacaaatcagacaattttcccttattttcctttttctctcctgttttcttctgctattcttaaaaatgattggatcccacccttcccatcttcagctgtagcattttgagacattgtgcctttttgtctaaaatattctatttgatgaacggttaaactaatagtctgtgagctcctttagggcaagaatcacgtccaggtttcgtctcctcagtgctgagggttgtgctcaaaacagagtaggtagggaaggaatgattgccgaatgaatgaatgaatggagaaagagtggatctagttccatgggcctaagactgaggcccatagtctctaatgtgtttatgcaaaatgctgcatggtagctgctaatagaaagcaagttctttcctccagttctgatgtgatgtgatctggcagagggcagcatgcccataaatcaacacacggtagtgtaagtcatccactggtgttagaaagttatgagtaaggccaggcgcagtggctcacgcctattacataatcccagcactttgggaggccgaggcgggcggatcacctgaggtcaggagttggagactagcctgaccaacatgaagaaacctgtctctactaaaaatacaaaattagctgcgcgtggtggtgcatgcctgtaatcccag

SEQ ID NO: 59142 - DNA, 1126 bp, Homo sapiens
attttcttttgctgtaggttgtttctggcaaaaccggagttttattgatggacttcctttatgtactcactctgcgttagcatgttggagacataggatttgctggcatcatctggttatgaatgtgactgtggggccccagggaggttcccaaggttctggttggtggttcgagtcaggactcaggttttcctgtctctggaacagtcgtttgtgttataccaggccataggcacagaatggtgagtggatttctatcctaggagaggtcctttgctgtgttcaagtacttgggatatcgaatgacagaacttgtttttagagagatgacagcaataagcctgctagtatgagctgttggcaatcatatagcccatttaacccttatgataactgttaaggttgttattattattactaatactacaaaagcatgttgacttaaatttgcagatgaggaaaaagaggttcagaaagatgaatctgcaacccaggtgccttgatatagatgctgtagatacgacaaactactctttttttttttttatcagcttattgcatccagacagggtttgaaatggctctgaaaacaaaaaaggaagcaagaacccagtagttgtgtgttttcctgcttctactggggtttgaaattgaagacaattggtttgagtcctagcactgttcctcattagctgtatgccttgggcaaattacttaatctctccaaacctttatttcctcctttgtaaactgaggacagtaatagaatagaatccatctcactgggttgtggagagaattacaggactcctacacttgaaaagtggtcggaagggcacctgcacaaggtcagctgtttgtgattgttagtaatattgagattgctttgagaatacacactctgacaataaactgaggatgcttgttggaaagagtagctgggtcaggtgagtctttcaccttggagtgactgatctctttctctgcatgttaagttttctacacaccgcaaatacctgtctatacacgcacacagtttatatgtgtgattcttaattgcttggtaggcattataaaaggggacaagagcattaaaagagagtttgactttcatgataaaagatta

SEQ ID NO: 59143 - DNA, 1053 bp, Homo sapiens
caagtgattctcctgcctcagcctcctgagtagctgggattacaggtgtgtatcaccatgcctggctaattttgtatgtttagtagagacggggtttctccatgtttgtcaggctggtctcaaactcctgacctcaggtgatccacccaccttggcctcccaaagtgctgggattacaggtgtgagccaccacgcctgagccaccacaccaggcctccttcaatcttttctatacattcattaggaagtgttctctatttgcctttagcacatatgtatgcatatattgaaggagtgtggattagtggttaacaagtatcatatttggcatcaaattggcataggctctagtctggtcattgtatacccttgggttagctatttgtccccttttgacctgtttcctcatcagtaaaaggaggtaatactgcccacttcattgtgcagaaatgaggaataaatgagaatatatgtatagggcttaagaaattacccgggaagtaatgagcactcaaccgacgttaacattgcttattattgttgaattgtgaatattaatgacaaaaacaattatatgagaaaggtgctttataatttcagtgttaaaatagccaatgatcttagcatgtcttgtccggcatgttgtaaaacatttgggtattgaagagttcctgaaagaaattcatgcgaccttttaaggacatcgtagcagtgctttgctttttataagaaatcattaattacaaatgtcaagttaatggcagcttaagaaacaactgagtatattgtggtctaggaagtgtccttttggtaggcttttcatgttctagtaacaaattatcttcagaagcatttttaactacaataaatatattgagacaaaatttaaaaaaattttggagtcggataacttgggtagaacatggaaacatacttgtctggctctataataataaaattgccttctatgttttatggtataccttgtgcttttcaaagtgttttcatttgcattatcttattcacttctccacaaaattctaatagctagct

SEQ ID NO: 59144 - DNA, 1194 bp, Homo sapiens
aattaatatagcaatccctggccaattttggatgtctcatttcttgtatctctcatgcatggctctggggtggatgttggactgagtcagggttttctcttgcttctcttgtgaggggatgctcctgttttttctgtctctgccattccattatatgctggtcctataacccaaggcccatagactccctggtctttgttttttctcatagtttgcatcactgggtgccgtgtgttggtcttgtgacaatctctgcaaagaagctctgatgctggctgggtgctgtgtgttgtgggggtgggaacttatcccactatcttggaaagcaggcaccggggaccacaggtaggcttagattcctagggaaggcagcactaggaccatccaggccaaagttcagggtgattcctcagggattgatacctacttaattggtattttacatcttcagctggtttacctttgaagcttttatgtgttgtcatggatatttctgttggaaaatgtgggatggcaaatggagcttagcgagttagctgtcactgccgcagagacgtctcacacagatttgtcagggacgatgtttgggctgctgggatagtggcctaattcagtaccatgttcaatctcagcctgtgccctggataccgcttaggttattggatggcattactatatggtgacacggacgcggatgcattttatctttggtgagatagggcacagaaactttaaaccttacatgtttgacagcatcacagagtacaaagctcaccgtggctcttttcaagtacagccccattccatggcactgactcaggaagcttgtcatagactgtgccagtatttagatttgactatatgtgtacaagttatcaatgtgctctgcagtgatggtacagaggctaagatgtgtaggcatttgttatgctctttacaagatatctttgttagcatgataattttgcatttgtactctgaacaatcttctgatttttttcagagttaatattctttcaggtgaggaaatgaaggtttagatagacaggcttgctggagttttcccagctagtacgtggtacagctgggatgagaacagagcttttcctctatttagtctaggacatttcctaccattgcaccaatttttaaaacaaaccactgaatcatctactttccagaaggaaatttcat

SEQ ID NO: 59145 - DNA, 1034 bp, Homo sapiens
actaacttcttatttgatcttttcaggattatttccatcagcatgtaaacatgtgatcatatcttcttaccgtccctcaagtgtatcaaaaacactgttgttggaactttctcctagctagcctatgattttctctctcacaaattcagattatgttagcagagggatcttccctgtatagcccatttaaaatatcaactcccattattgctctgtcctaccctactttattttctttataccaattccccaacagatgtgtgtgtgtgtgtgtgtgtgtgtgtgtgtgtgtatgcatatagatacattgtctctccctattttatttctacaaagacaggagttttgtctgtttcgatctttcctttccatagtgcccaaaatagtgcctgaaatgtcacagacagccccagatatttacttttttgactccatatcgtcttcagctactataccatttctttgctcacctttgtaaaacaagtcaagagttgtctgtacctgctgctctgctgcttctcttctcattcattcttaagtcccctccattctggatctcttccccacagctccactgaaatggcccttgaccagaccaccagtgaacaccacgttgccaaatgtaatggcaattctaaactgccttctcactcaacttccaggtagcattctacctggttgactattttttctctttgtaatctgtttagatcggttggcccctgactttctttctaccttagaggtcattctttataattagcctttgttgaattcctcccctctttccaacctcataatgttggtgtgcaccagggttcacttttagatcgtcctgtctttagttacctattcattcccttagtgatctcagctggtatcatgtctttatatatgttcttcacagggatgagtcctaaatatttatcttcagccatgacatttttcttgaattccagatttgcatatccaactgccaacttgatatctcacttggaagaacatcatcacaaacctaactcatctgaagttgg

SEQ ID NO: 59146 - DNA, 1091 bp, Homo sapiens
gttctcacaaatacaatgctgagggcttattgcaaacaggaacagcactggtggaagtacagaatagggattgtggttttgatgatggtgtatccattgtaataacagagaacagaactaagggtaggggaaggagaagctgttaattcagatggtcagagctgaattaagtgaatgtttgtgaaaaactgaaaactacacttggagtatatactgcagagggcccgctgccaccgttagaaccctggtaacagagtatatactacagagtgcctgctgccactgttagaaccctggttatagagtatatactgcagagtgcccgctgccactgttagaagcctggctataaagtatatactgcagaaagtatatactttctgaatctaagagtatgatttagccatcactggagtgaacacactgcagcaaatgaagctctaacacagaagttggcgcatttttttttttttctgtatagagccagatgggaaatattttagttttgtgggtcagatgttttctattcagcttggacattgcagtgtgaaagtggccgtggaccatatgtaaacagatgaacatggctgtgttccaaaaaacctgtacttacgggcactgaaaattcaatttcatattttcatgtgccataaaatatttttttctttttcttgcaattttttttcaactgttgaaaaatgtgcaagccattcttaactcttgggctgtgatttggtccatggccatgatgtgcttagcccagctctaacatatggaaagtattatattgctaaagggaaagctagacaaataaaatgggagcaactgtcagagatatgatagaggcaaagtttgctgccaataggttagatgcacttgccctcctaaagctgggaaggagaatacttatgtcaggagctactggtgaagttttatgaaagtatagggatggcatttgagtgggactccttgacagatggtacttaagttaatgaatgtttttgatgtttgaaaggatgagagaataaatgggtaaaatacgaatatagctcaatagagtgtgatatagaaggaagcatttcataaggaga

SEQ ID NO: 59147 - DNA, 1038 bp, Homo sapiens
ttgagaatcttagcaatctaataataaagagagaagataaatataatgtggtatgaatctgctttcatagtaaatagttcaatcagagagcagagaagagatctaattacctacccaacactctccccttgtacgtcctcataactgtgaaatgctgaatggattagtgtgtgtttatattgtagacaatacgatgctactagctatttatatctgaaacttctattctcaaatatctagtctaacttaaccttattttaagaggctgtgttctgttacctacctattgaagaacatccttggtaaagcataaatagtacttcaataattagattataatgccaataaattcacaaatttactaattaatgtaatatttagccagcatcttgtccaaagcctctgtatataaatatttacctacctgtcatctgcaaaattgatgcagtgatgtaatggtgaatgtgattataatctcttgaagggttcatagctaaaaatattcactgagcaacaattatccatctgtcacttaggtgaatgtggaaatttgtctgtggttgaaagatgcatctttcagttttactgcctttctgtttctagaaagacaactttctactcagaagccaaggatattccatatttctaagtatttgaatgacgtggtttccagactctgtcatcaaactcaataaagacgtcaatttaagcaggatgtaatttaatcacagtggcgtagttaggcactgttttagattatgaatcttaaatgtatagattattttatttgattagtctcattcaatttggacatcttcctcagctatttgtgtgtgtttataatagaaaaaattttcatttgtaaacatatgatagcaaataaatgacatggcatatttctgattcaatcttaataaactattctgcaatttatgagtgacttaaagatatgtggaacctattgagtcagccattctcaaacatttttcttttttgagatagagtctcattctgtcacccaggctggagtgcaatggt

SEQ ID NO: 59148 - DNA, 1121 bp, Homo sapiens
taacaaatgatggtaatctacttatcataatattacatgagctttcacttggacacagatatgagcacgggtattttgaattattttcagagtttggttaaaatcggtgtcattcacatggatttgtatgtgtgtgtgcctgtgcacgtgcttttttttacactaggttattgaaatacgagtatttatggaacagcttaaaatgtgtgtttttatgtttatgatactttgattttatgatttttgttagcttctccacatacgtgtttactggataacattgccagatgctaggaacacagctgtgaacctgtgtcaggtagcttctaaaagggaaaaagaaaataagcccaagaatttcactgtgtgataattgctttgaagggaaatatattctgcttgtttgttaaagcagatgggatatgatttatttgtaaacaattaaacagttttaacatactggagaagaaattgagtcaataaaggaatcttagctgggattacagctaagactgtaagaatgacagattgaagtaaagaagaaattgtacaaaagcaggcagctagttgaggttgaggagaggaataagagcaaattattgccaagtcttatgtatcaactggtaaactttcaatcttattcattggaaaaatgactgataaacactgtgtacatatcacaatgtttaaagtttctttggttttatttttaagagaaagagagtgaacgacctcttcttgatggtgacttgagaatagtatctttatgttaaagagacccgtaggatgtttaaaaggcctgtggagtacacctaaggtgactactttaggcgtgactgatcatctaaataagatggtcaagatttctgggaaatttctggtctgattaaagtctgtgaaaacttaggctgtcatcagcattggcaaagcattgcagaaacattgcagggatattggcgatgtttactgagaagactccacgaaaacaggtggttgctctatgtatgtttgaaattctagaggcagccaagttatgatgagtaaaataagcaagtaattttgtttttcttagttaacatttgataattcagtcttatggctctaaaagatattaagtatgt

SEQ ID NO: 59149 - DNA, 1075 bp, Homo sapiens
atagccattctgactgtgtgagatggtagctctttgtggttttgatttgcatttctctgatgattagcaatgggaacattttttcatgtttgttggctgcttgtatgtcttcttttgaaaagtatctgttcatgtttttttgcccattttttaaatgggggtgatttgttttttacttgttgggttatttaagtcccttatagattctggatattaggacctttgtcagaaacatagtttgcaaatactttctcccattttgtagattgtccttctcagcattcttgattcaaattctagcatccatttaactacctatagaaacttagacaaatgacttaacatcttagttgtttcctcatctgaaaaaatgggattaatattaaataatataggcaaaagtacttatgtattatatggcacatagtaggccacaagcagctagctgttaccttttcttctgatcaaaaaatgtgaatttacatcttcatataatattggtcatttttatctgctttttggccatttggtttgggttatatatttaatacatggattcttaactgtatttcagaaatgttaaaatttgaaataatttattcttaggaaaagctggtacgcttgtgatctgctttatcttccttttattgtagccccaaacagagatttcaagcctgtattttgcccctacatctttgggactgctagctccttggctggatttgcatgctcatcaccctcccctctgctctggagcagggaggctcatcagcacagaaagttaaaatttgctgaagccatctgtcttttgttggaggaagcagcttagccataagttgtagctactgttttaacagatttgcaaatagttagggtgggtctggctcaggcccaagtaactgattgggctcatatgcactaatttaagatccactgccagaatgaaaacttcccttatatatcatcaggctctgttatttgcagggtgtcaattaaggtaactggatagaagatcaagaacacaaaggacaggaaggtgggacccatattttacatgtgctgggggagaggcatg

SEQ ID NO: 59150 - DNA, 1049 bp, Homo sapiens
ttaaaatcaactttttgttttgaggaatatctgccctgcagaaaagtgcaaaaaaatgctttggtaacacctgtatattcttcaatcgtcaattatttttatttgccatattaattttatctctctctacagtttattttgttgagccctaaagatgacttttaatggctgcacgtatttactcctgtgtatgtatcacagttaattattctcaggaatagattatttctctttttacctttttgtaccatttaaaattcagttcactgagcattcgtgctaagcattatacatacaagatctaactttaaaactataaccctaaggggcaggagttacagaagataggattaaagcttagagaatttaagtaacttgccaaagatcaaatagctaacaagtggaggggctaagacatgaatcctggtttactggacttagaactctgtgtttttaatcacttcatagtaatatctgtctgccatcttcttagatgttaactcttctacaaaaccttcctgactcccatctctccatacttcctttgctcctagaaccctggctgcttagatggatggtacgctatttcagtataacaacttcttttttttttcttttttttgagacggagtcttgctctgtcgcccaggctggtgtgtggtggtgcaatctaggctcactgcaatgtccacttcccaggttcaagagattctcctgcctcagcctcccaagtaactgggactacaggtgcccaccaccatgcccggctaatttttatatttttagtaaagaagggtttcaccatattggccaggctggtcttgaacttgtggcctcaagtgatccacctgcctcagcctcccaaagtgctgggattacaaatgtcactgggcccagccagtataacttctttacttttctttgtatgttattagaccacgagcacgttttgccctggatctgtgttagtcatcttttactcctactttctgacacatggtagttgcttagtgagtaattatcgaataagtaaatgaatggttgaaagc

SEQ ID NO: 59151 - DNA, 1125 bp, Homo sapiens
ttagctagaagaaagatcaaggcaaagggaaccacatccattctcatattagttacgttacaagtagcttgttagaatgatgaaaaatactttcctttttatgtgtgggcaatgtcaggctgaatctgaatatatagaattataagataaatttccgaaaccgtctttagaaacagaagcagaactctatgactatatccatagcacagtaatctgtttaatcatctcttacaaaatgatgccatgtgtggaccgcatttgggattctgaaaacgtgatgtgccttagtcatctttagaatcaggaaattgacaatggtgattggaatgtgaactatcgcttcttcgtttgctaggtgaccagaatagacggcaccatagacagttccccatgtttaaaggtcactcagaagtcttttggttctcagaacagcaacactgatatcatgttttatcgcctgagcatgccgatcgagtgcgcggaggtcttctccaagacggtggctggagggctccctggggctggcctttttgggcccaagaatgacttggaagattatgatgctgattctgactttgaggttctgatgaagacagctcatggccatctagtgcccgatcgtgttgacaaagacaaagaagctactaaaccagagtttaacaaccacaaagattatgcccaggaaaagccctctcgtctgaaacaaaggttactaatttatacgctgtgattttaaatttgtagttatgtgaggaaggttacagtccagagtaaagggtctcctagtgtaaattttttcctccttctcctcctcctcctcctcctcctcttcccccttctcctcctccccctcctcctcctccccctcctcctcttcccccttctcctcctcccccttctcctcctcccccttctcctcctcccccttctcctcctcccccttctcctcctcctctttgtgcaaaggatgctgtagggaaaaattaagcaacctgttagtcatctaatttgttagcgtaggtgcaatctatctcaagagttactttttaagatgtctgtgtttacattcttgcctgaaacttgcagagcattttctccaaatagtattttttatgataaaggcgg

SEQ ID NO: 59152 - DNA, 1041 bp, Homo sapiens
gcatttttgcttttgtggtagttgtgcctttctttgtttctttctttctttctttctttctttttttttttttttttttttttttgagacaaagtctcactgtgtcgccgcccaggctggagtgtagtggcacaatctcggctcactgcaacctccacctcccaggttcaaacaattctactgcctcagcctcctgagtagctgggactacaggcatgcaccaccacacccaactaatttttgtatctttagtagagatgggttttcaccatgttggccaggctggtctcaaaatcctgacctcgtgatctgcccacctcagcctcccagagtgctgggattacaggcatgagccactccgcccggccctgctgtgccattcttgaattcacctttcttttcttcctccttcttcctctttcttgtttttcaaactttcagatcaatatgcttctcaattttaaggatgacaaaagtgaatgtccatgtccagaagaaattcgtgaccaactattggatttccatgaagatttgatgacacattgtggtaaggtctttttgattaaaagcttttattaattgtatgtttttaatccatatatcctgagacgaaattaagtgtatatgcgaatattttcacgaatacacacgatacctgttagaaagttatataaaaacatttattattatggcaaaatggcaaaataactgtccctatgtggggagtcctgagggatagagaaatcagagaggcagttaaactgagcagaagatgaccaaaattctttctctctttttcctctttccattagtggcaggaaatgggaagggggacatgtggccaggtgcctctggcagggaggttaaggttggtttagtcaatgggtacaaagtttcggttatacaagatgaatgaattctggagatccatggcacaacagggtgcttctagttcacaatactgtattgtgcacttaaaattctgttaagagggtagatgtcatgttaagtattcttaaaacaacaacaaacaaacaaaac

SEQ ID NO: 59153 - DNA, 1107 bp, Homo sapiens
attgatctttgcccctaagagagtctttttggtctctactcagtgttatattttgttctgggtgacagccctgagcccacaggaatagaacaaaaagagagaggaagaaaagaggctgaccagtgaatgttatttatgagggctggtaagcaacattgcttaacttaatgttagatgtttttgacattgttctaagttgtgcatgaaagaaattacaaggcctcagaattatttgcccaagtgtattctttaaatatttttttctgcctctctgtttttttatactaggaattgagctggatgaagatgggtctctggatggaaacagtgatttaacaattagagggcgtctgctatccctggtagaaaaggtgacatatctgaagaagaagcaagcagaaaaaccagttgagagtgactccaaaaagtcctgtaagcagtatgagagtgcactggcagaatgacccaactgctgacacttaactcatcctttgaacgaatgttttactggatgagccagtgagataattgagtttgcaacttccaagaatcagactcttaagtagatgcctgtagctcccagaaataaacagcagcatcagtctatgtgtatagcaacagactgagaggtagcagcatgataaagatggatggtctccatagagaactagaaatttaggtattttatcagagaccataaagagaaagttaaaaggaagtatagtaatttagccttcatatctaaatatgaggtcgattttcaaatattattgcatcaaattaaacttttttcttaaaatttaaacagatattgtctttatattttggttctgaaatatttcctcaactgttgtatacttctggttgatccatatcctatttcagaataataagcacccttgggctgtgagtgccttgggcacagcactctgagtaggtctgagggatccagcctactttttacttcacttctaagactgtattgattttaagatgcagcaatggtttgttaatagctttccctgaaataaaaaaaaataaacttacgaaaacttttacagcacttttttttgacttacaacagaaaacctttattcatacagttac

SEQ ID NO: 59154 - DNA, 1050 bp, Homo sapiens
acaaatgagctggaaaattcgtgaaaaaagatacagtctcatgctgttacccttatgcaataaaactcttttacattagagatatgtcagtgttaagccaagcaaattagaactcaatatttcatcatttgtgactcctaaattgtgtggatgtatgtatgtgtccattttttttaactgaaagggaaagtaaatgagttgtaatattttaacagtaagacatgcagtccactttaataacagtaattcttataatttattttcttcgttagatataggaaagggtcaaaatatgtatagtcataagatcattttattaatttgacaaatatagatcaagaataaattatccaaagaactaccaaataattgaaagattctgtgcttgtccttgaccttccagtttagttctaaacaagcaatatgcataggtgaaaatgtaaggagcaacgtagacaatcagtaaagtaataaattgcatccataaccaccaaagaaatgtagacaaataagtgatcagagtagagcaattttggaacttcacttggagaagtaagttttgtggcaagccatagagaggcagagagggagcaaaaagaatcacagatgtatagttcctttattgtgcttctgggtcatcctgacatcagtcccttcattttacacacagattccaagatattaataacaattcattaaattattagtaaatgattaacgtagaactcagggatacatagacatccaaacaacctcataaagaatcctgttcaagatatagttacttgtaaaattgggcgtctggtcttcatattgcaatcagtgttaaatttgaaagagacatagtgtcttagccggggttctctagagggacagaactaataggatagatgtatatatgaaggggagtttattaaggagtattgactcacacgatcaccgggtgaagtcccacaataggccgtctgcaagctgaggggcaaggaagccagttcaagtcccaaaacctcaaaagtagggaagccaacagtgcagccttcagtctgtggc

SEQ ID NO: 59155 - DNA, 1027 bp, Homo sapiens
tgttgagtttctttatattttgctgctaagtgtaatggtggatagaaggataaaatatcactcatttcacaatctacacatagaggccggatatgcatcaccctattagtatttgtgataaatggtacttttgacattagtttctttaatgtttccacaaatctgatatttttgccagcatttattgttcagaagaaaaccccacatatacaaatttaatttaaaaataatgaccaatgttggaagaaaatgaagtaaagatacctataaaatttctgaagctttcccctcttaacaatgctttctcatttctgtttaaaccaaagggttctttatggactcagttgtgattctgctggggatatcaggtccttttactcaaacttctgctagaatttaatatacatgagaatcaattacagagcaagtttacttctctaatattacattgcccaaaagtccataccaagcttttagattgtatcggaacaaaatttctataaaagtgaatacacagtataaagcagaacactggagaaaatacagactttccttggacttgacgtcgatgctgtgctgaaaggcagtacggtctccacctattagacagagtgagatgagattgcatacagcctccgtgagagggtggagaagtggaaagattcctgcactacgtaacactggggaatgcagctggagtggaattgtcagttcatctctttcacttattgtctattttaccaagtagcaagtggccagtcatgtgatatgggattgcaacagtataaaacatgtcctcaaacttcttcaaatgataattttcctataaaattgattatagttaaaataacagcaggaatccatcccagcggcgtgctttgtttccacaaattgctgccacatggagagaggcaatgcagttactttccaagatgtgaatttccaccccttcccacttgaacatggccttccttcccaccttcactgggagggagagcagctcctccctcatcatttcataagcacc

SEQ ID NO: 59156 - DNA, 1020 bp, Homo sapiens
ttccctgtactgtcttgtatttcctgtactatcttggtttaaagattttttcatgacctaaacctaagagtaaattaagacagaattgaaagttgaggttgacaagaaaatacttgagttttgtgatgatcagagaaggtaaggatgtagaaagatacatgttaaccttaaatatgtcagaaagtggagacaggacaggagcattaaaaaaaaatgaagagacaaaatacatgttctggtggtagtaattgtggtgagcagagtttgatgggtaatggaatatttattctaggttggctgccacattgtaattatatctccaaacctcgcctgtggttgaaatatttttctgacatatgaaatgaggattctcaaaactttggcttttatattttttgttatctactttaaaatatttcttctgcattgatggacactatacaggaattaagataatagtgtttttatgcctaatctattatttttgagacatttaaaccattttatgttatgtttaaaaagctaaggtttttaaaaaggaagacaagcggtattacccatagaattctgatgaatcaattagaataatttatggaatgaaaaagaaagaaaatagcttcttgtctaaatataggcttccctgtttgaattctgaaatgcttgctagtgattataagttggtgcacataacgaattttggaaatccaggtaggacataaataggacgtaggcaggttgacaagtgatatccttatcatttgccattttcaaggaccagtgttgactaaagaaacagtgctttgattcccagagttacccctgacttttgctgcctagaaattctgattactattttcaaggcagttagaggatacattagcccttctattacagtctgttagaatctttcaatcatttttagaggaagcagcatctgataactaagagtccaacagtaataatgatggtggcacaggtggtgcttatcagagtgccttaaaggctttctttttacatgtg

SEQ ID NO: 59157 - DNA, 1025 bp, Homo sapiens
tataatgacctaggaatctgagggtaggacttgaaatcagcaaaagatactaagaagggaagagaaaaattattctcaaaacaggaggattttcaaaactagggagcagcagaaaatgaggaagatgaagtgacaagttagggaagagtcatagtggttctacatgtgagaaaagcaggttcagatcccagcacttctctttgttccataggcagctgtttctgatcaggaaaggaagaaaatgaagcgcaaaggagatcggtattccatgcagacctctctgattgtagcagctctgaagcggttactgcccattgggttgaacatctgtgcccctggggaccaggagctcattgctctggccaaaaatcgatttagcctggtaagtctccttttcatcccagcggtaatgatcatctgacctccagactctcagtgtttgattcctttgtctcactgccctatgtcaatatttcatttgcattacatgttttattaagcaggttttctagacaggcccaagactcaaacataaagactgctctttttttgaggctgtttttatttgtaagttatgttaatcacctccgggacacattcaagaaccaaacaggaaagacacaaaccaatctctggtagtgaaaaaaatggatttcatataaacttctatataaagtttgtgatgagaagcatactcaaatttatgaagggtgatttttcaatgttaaaagcataatatattgtgccaactgtgggtagataaggtgttgacttttaaatcagctgctgttctcctctgcaagatttaagttcctctgcaagatttaagttctcaagattttacaatgtcctctgagtttctgttcttcatagctatgcaaatgaggatgcaatattttgtacattggaatttctattttatatttatgtaaattggaggacatattctccattccacattgaatcactgaagctcgtcactgaacatgcatcgtttgacattctaaaatgagtgaattgagggg

SEQ ID NO: 59158 - DNA, 1077 bp, Homo sapiens
aaatataaaaacaatctaatttgaggaacccatgactattgctggctgagaaaaatgccataagattaatttctgtatgatttctataatcttttctaatgtatatgttttctattctcaaagtcatctttattgataagaaagtgaggtcagtttagaatgagctgtgagcagcagataatattgtttttctgaagtgcacagcatttatagtctatccgttgtcttcagagcaattgtttattgctattttgcttcttgtcctcatccttccttaaggtcacaggatcccaacgcagcaaggtaaaactatatatatgtgtgtatttgtctgggtctgagtttcggtttcttgtgacatttacctttgttagacccaacatcttggattcttttgtgaaaaggaggtcttgaaaatctttctacaagtttgtagctccaatgcatttggtctcttcaggatcccttcctttgacacaagtttattcttcttgcaatttaaatgactcataatttgaaattttatcctccagctaactttgagctgcatactgtgctgggataaaggagtccagccctttggatgacaaactttttaagccagggacttctcattttcggtgcaatgttctgaccttatccctcttgatgtttttcaacaccagttttattacttgaaaacagacatgataaatggtattgctggtgagattggaaagaagcctgcttttccattgtgctagtaatcacttcaattagtaactggagattatattccatgatttcaatattgatttcattgttgcattaaagggaagaactagatgactatttctctcttaatattttgaatactgggaacatttgctaaaagaaaacattttgatatagaattacaaaattacttacattaatatgaaccttgttaagcttatgttttattttcataaggctatatggtaggaaaatcaatcataaacattctgtgaagatgatacctataaagactttagttttgtttgtttgtttaaaaaaaaaaaaagctttttaggtggccaggtgcagaggcttacgctt

SEQ ID NO: 59159 - DNA, 1043 bp, Homo sapiens
caatctgccaactacatttttatacaataaaattatgcatctcaagtgattatctcgtgtcttagctcagatttcctggaaaacacaggcaaaagcttacgtgctaacactttattgggggaaggggtgttaaaatcccagggaatgaagagttagggaaatagagaaacgatatggggaatgagggagggcaagtagaagatagagtgttcttgagctgatcacagctgttcagcagtacagtgtgttgctcagttgtgtgggatgcctcctgagagaccatatgcattacagaacagaacagtgcctccccggggaaggaggataggcactttatatgcaggttccttacatctcctgtcacttactggtcacagagtgttaatttcatcatacttcctgttgatattaaccagttcttccaggcaacccctggggaagccagagctgccttgaatacagcctgttgagtgtccaggcaccacagtctctccttatccattaacatggggtctccttggtgagtggtaatgatggtagcagctggctttcataagtacactgtgtgggggcagtcatttctagggccattctggctcagaagcaaggcaagtagccaaggcttagaaagaagggcataggttgggctggggggtcctggccttgacacaaggaagattcccagaaagcacaaccctctatattgtatatggtaattcatgcatatgagtatgtggaccaaaatagcagtctgtatagaagacatgcagctggccctctttatctgtggcttccacatccttggattcagccaactacagatttaaatattcgaaaaaatatttgcttctgtagccaacaagtacagacttttttcccttgtcactgttccctaaacaatacagcagaacaactacttacataacatttacattgtgtattaagtatttattataagggatctagagattatttaaagtagacaggaggatgtacgtaggttaagtgcaaacactataacattttatataagggacagatgt

SEQ ID NO: 59160 - DNA, 1001 bp, Homo sapiens
agcctttctacttgtttccccaagtgttaaaagcttgacacactcttagacaaaatgaaataatattagcaatgttattacaaacttcagttataaccaaaagcaaatcatgatgtaaaatacttctgttcattaccagtgatttgaacatgggtctgaaatatgaccatattcgaccttggaaaaacctcctaacaagcttattaggatatgcactgataattcttggttgctcttggcaatcagaatgttttgcctaagggaaaatttaaattctggagctgctctttttttcctcaccttactgtgtaaccttgaaataaccttgaaataacacaaagactaaactgcaggtggtgtttatttaagagccttaggcagtttaagcagaagctgctgtgtcagagaactctattcttgaaaaggtgccttcaaggtgttattttcctgagtaagatgcttataaaagatctatctacaatttgtttagaaaagctaatctgcagtttaaaaaattgtttttacataattcatcttagtatctgaaaattttctggtttagctttcagagttttttttttttttttaatttataataaactttccctatgacagattaaattacatgcccagaagctgttctcaaagggcaaagtactggaaagaaataatattaaagaatcctgaagggagagcttccaatttcagttcaacaaagaataaattcaacagagaggttgacttgatctctatgaaatacagtatttttctgcgtctagatcagtatgtctttttggctcaatgtttttttttttttcaaatgactttcatcatcttcctcaaaacattgattattaaaatttagatgcgatgttaaaaaaaatgagtgacctgtccagggagtttatttttaagcaaggtagtctgagatcctgtctatttcttggtccttgtaaggttcatacatcatgtgttgatttcagttaggttaccgggacctt

SEQ ID NO: 59161 - DNA, 1074 bp, Homo sapiens
cattttttatttgaccaaaagttatcacaccccccgtaaatggctatatggttttgtgtctatgtgcgtatatatgtgtgtctgtgtatctgtgtatcatacctacactacgtgtatatttgctatttgtgcatttgtgcgtatatatatatatgcatatgtgcatatactttgtgcatatgtatcctttacatatttagtttgtattgccttcgctatctgaaaaagattactactaaaatttagtctgcttaactgagccctttttagaacagcattgataacaggaattgttctgctcttccagatttgtagagaagcagtattcttatttccttaaacctttgagcatgctttctatcatcttgtatgtgcttttacatttgaaatctctaataaattttaaccatgtcagaaatagctgtttcgttatgctatgtaacagtaagctaacaagacaaagcattgctttagcgtttttttacatgtatgtttaaccaaaattttgaccatagattctggacgtcattctgagaacaaaggagaacattttaatagccaaatgattcctattgttttttcaatttacagactatggtaatggaaactgaatttccgtctatagcattagcatatggcagtcacaactctcagattgtaatgctgttcggggttttttgttttgttttgttttgttttttgagatgtcacccaggctggagtgcagtggcaccatctctgctcactgcaacctccgcctcctgggttcaagcaattctcctgcctcagcctcccgagtagctgggactacaggcacatgctaccacgcccagctgatttttgtattttttagtagagacggggtttcactatgttggtcaggctggtctcaaactcctgacctcatgatttgcccacctcagcctcccaaagtgctgggattacgggtgtgaaccaccacgcccagcctgtaatgctgtttaatgacatcaccttggtatggaaacctgtgaataacatctataggaattttcttcccagttaacttgcactagagtatctgaatcaccaaat

SEQ ID NO: 59162 - DNA, 1057 bp, Homo sapiens
tgcacaaaagcagagatacacgtgatcttagaatttttctctctctaaatagatgctggtataaactagaaagtttagcatacaatgcatttaaagcagaaataacctttgctgccctttcattttagcagtatttattaagaaaaaaatcttcagtagtttttggtttgatttgtttttattcttttgtgtttgatttttaaactagttttactcagggccccgtatgtttatctgtttttgtttgttttgtgtggtttggatatgtcttcttgtcaattattagttttggaacattgggtcttttattggactaatcttatttcaaaaaataattttttctcccatctgccatttgtagtctatgtttatttctctgaaatattttaggattaactaatttatctatgtatttttttcttctcacaaataggaaaaacaacatttcttattgtattttaaagtttattattaatacccattctgacattgctaccactatgtggctcccgtgtttattttattttctgcttgacatttggatgtacaagtgcagtcaacaaaaataagtcatatggttactaaactgagttagctaccttcaagaacaatcactgacaccattctataacttcttaggttttctggcctaaggttctggcctgaggttcagaaggccagacctttgagaaaagtcaccagtgccactctaaaccgacttaggttttctggacccatctgcagaacttggagccactgcagatctcagggcctatcacctgcctacctccagcatctctccaaagtcctaagcaattttcagctataaaatttctaaaaatgaatgaagtctctgtccaaagcctgacttccctgtcttggaattagaaatcaatttcattttcccctgtagttattacctaatgttccaggggctcctaccgcaaatccatagtcattcttagtcgctgttcatatcagctcccaaaaggaatagcagccacttaggttattttcctcagcctcctttccttcgtcaggcggatatgggttggaa

SEQ ID NO: 59163 - DNA, 1053 bp, Homo sapiens
ccatggaatactatgcagccataaaaaaaggatgatttcatgtcctttgcagggacgtggatgaagctggaaaccatcattctcagcaaactaacacaagaacagaaaaccaaacgccacatgttctcactcataagtgggagttaaacaatggtaacacattggggggcatcacacaccagagcctgttgaggggttgggatagcattaggaaaaatacctaatgtagatgacaagttgatgggtacagcaaaaaccaccatagcacgtgtatacctgtgtaacaaacctgcacgttctgcacgtgtaccccagaacttaaagtataataaaaaaaggacatacattcaagtacccagtctaatacctgatgcatagtcagtgctttataaataattataaagctattaatagtatcattgttgaatacctactatctgcccagcacatgtattaactaattttaccatttcaccaaccttatgagaatggtgctcttattttatgcatgaagtaactgagccacaataagtctaaggaacttggccaaagtgcacagctaaacagggctggaatccatctatacccaggcaatctgcatccagaccccttcaaccacggtgctgtattgacccactagctcttccttttacttccgggcaacttggagtgtggtgtttttctctctcagaaaagtcatgttatcttttccgcttaacacatgtatcctggcttgaattaaatgtctgtaaatgtgacaatctcttttaagttccacagacatcaaatgacactattttttagtcaaataccatggacaagcttaagggactcataattcattcattgtgctcttattgagtgtaaaaataacgtgttttctaagagggcaaagttataacttcgaagaaagtgtgaagccagcaggtctcaggagggaaaaggagcttaaaacagctcaacacagtgtttctgattgtcacagtcaatgaaattatggaagcttacttataagggacttgtgaaaaaagtgatttggggcctggcaccatg

SEQ ID NO: 59164 - DNA, 1050 bp, Homo sapiens
gtcttattcatggtcttcttgccaaagaaatgactaggaacaagaaaacacagcatcctaagtgtttttctcctgaaactacaagtgagaaaagagtatataaaaggaagaagaaatactaatcactagcattggtatgataaacaaataataaatgctacccagaaaacagagcctgtgaagaggataaagagttctaaatgtcttgtctttcatgcctacaaaatcacatccagcatgaaacatgggctgtctgtcactattatttccagagaagaaatacacttacaaaagttttaccaatctgttcattctaaattgctatggctattaggaatttcagaaatatcttcctatgtgaaaatatggaaaatgtactttcagagctagcatgtttccatcattcttttaaagcttaatactgaaaaaattcaaaagaattcagataagtggaaggcattttaaagttaattgcttcgttttaaaaattgcattgctcagactcaagagtaaaagccatttcctagtttttgtcatgtctttctttcactgtgtatcagatgtcacttcattcataaagtttgcagtgatttaacagccttattatgcagttgtttctggcaatgcccttcactcttgactttgcaaattgaaataggttttattgatctacatgcattaagtgtttccgacactctttaccatattccaccttgctagccgttacttaataatgctgacttcaacagaaatgatgagtgtccctgtaataaatcatggccttccaacaatggctttgtaatggtcaggataatcacaaagtcatcatgcattcccaaaagcatttcttagcttttgagcaaaaaattatagagagggtttcaggtttctagttgactctttttgagaaatggcttcattgtgaaatccattcagaatttacctaactcagtgttgacacatattttcatttaaactttagatgaattgcaatttccaaatccactttctctcaattagacaagaatttcctttgctatgtatagacaa

SEQ ID NO: 59165 - DNA, 1034 bp, Homo sapiens
atagaatgggaatttcagactcattttggagataagctgtaaagaactaatggtggatgatgttctcctcagggtaaggtggaagacggggcaattagaccccgtggtgaatgcagattaatgaatctaagtgagtctatttggttttttcagtttagttggccggagtggaggagcaagtcatagaaaattggggcttttttttcttgtttcttcatgccatgccattcagtactgactgagggtcaagcactgtgctaagtacttaacatgatctcttcaattagttggtcttaacttaaataactcagttaatctgacttccattttctgatgtgaaaactgagacttagggtaatttgcccagagtcagttgttttgtaagcggcagaagatggaattccaacccacgaaggctgactctacatcttgtgccctttctccaccctccatagccaatctgttggccttttttctctttctgttgccatcactctggtctaagccgccttagtgttgaggctggtctcaagtggtagtcccctaattagtctccatgggtccactctgctctctttagttccttctccacaaaagagtgattttttttttctttttaaaagataggatttctctctgtcacccaggctggagtgcaatggaacaatcatagctcactgcagcctggaatccctgcactcaagtgatcctcccacctgggccccccaaagtgctaggaatacaggtgtgagccattgcacctggccttgatttttaaaaaccaagtccaatcttgttacacttggagatgctttaccctagggtcatactgtagctcttatttatgacctacagggacctcccttagctacctgctggctaggtcggcagcttcatcttatgctattctgtgttactgtgctgcctgggaatatttataaaatgcaaattcttgggctctgcttctggaaagtctgattgactagatctgagactgggctctgggaatatgaatttttgataagccagattcg

SEQ ID NO: 59166 - DNA, 1043 bp, Homo sapiens
ttttgaaacactgtttgatattcactaggtgggctgtactccctgaaatgaacaacaaatgagagagagggtgtaggaagtgttgttccaggaagtgttgttccaggttactgagtttatcgtaacacttacagagagcagtttctcaaaggccaaggcagacttcctttaagcaaagatcttcagagatcagagacctctaacatgatagcacctgaaaatcaagcaagtaaaaggacttttcgttttcaaaggaaaacacacaattaaaagtattgatcccattttctacactactctatttatgataacatttattgatacaaaatacttaggggtagatatagttgaattaatcagttgcatggagagcccttttatcccatgttttgcatcattgattgggtgatattttcatgttttctgttccctactgtatcattctcaacttttctaactgaaacatttatatgatattcttaaattttagggaactttataaaacattatgaaacattttatgttgctggtatatatactggtggagcacttgactcgaagttaattgaatgtgataacctgaattttagtttggtaaaagatgatagttggaattgataccaggaagtttgtcacctggtttttgcttcatgatttgatgtagcttgcaaaatgctagagcaagtgatttttaatgaaataacttgtctcctttttaaaaatgcattcttgaagaggatgatggaggtaagaagtaatttaacttagtgacttatttttctcttgttgatctataaaccccagcagtcatatagcattttttcatcagagtgatctaatgggtctttctaaacttcttctgttgtgactccctgacgtaaatttggagagacacttccatgagacagcctcgttcccagaaccataccacactctcttctaatcagtcagttgtaagagtgggcatgtcagtatcataggtaacctttgcctacagtctcatgttttacatcaatcacaaagtttgataatataattattaa

SEQ ID NO: 59167 - DNA, 1019 bp, Homo sapiens
aatggcatgatctctgctcactgcaaccaccgtctcccgggttcaagtgattttccctcctcagcctcccaaagggatgggattacaggcacccaccatcatgcccagctaatttttgtatttttgtagaaacggggtttcaccatgttggcccagctggtcttgaactcctgacctcaggtgatccactcccctcggcctcccaaagtgctgggattacaggcgtgagccactgcactgggccttttttccagctcttaaaattggttacccaattcacatgtccagctagttcagatttgtggtactctgtcttctgcctttttcatgtatctcactttaactgcatagggagcatctcactttaactttttcacgatctgttctgtgaaagatggtgttttcctcctttatggattggtgaaggaactgacccttctttgtatgaattggaagggctgaggccatggtgaggtcttggtgcctcttctcaccagtgagttgcagattcctggcagtcctttgttctcatcctggctccctctgcagttggcattgtctccacagatgggcctaaagtgttaacattgaccttttgaagtctgcagaacacccctgaaggataagactggctgggaaaaaaggaagtaatgtgcttcccatgttggtggcattaaacaaataaaaaacccaaaccagttggtggcaaaaacattgatacaaagaaaccctttctatttatcattttctctttatcttctccctcagtttcccttggctatacacagcagtctcccacccatccatggctgtttcccactcatggacccttttctggagtcccatgacatcctattcatctctctgtcatctgaatgctttacgtattgaatttttctgtttatacatatacatgtcttccccatcagctttcagaatttcaagactttctggcacatagtatgtacttaaatatttgagtgaatgatgaaattcttttgctggaaaagatctaaata

SEQ ID NO: 59168 - DNA, 1051 bp, Homo sapiens
tagtattatgacctctgttaccactaacttgggtgccatgtggaactagctggcctgtgatgtggggcagaaatccatgtagaaagaggtgtaataattgttactatgctaggccattattaggatcattttctttttattactattgttgttttttatatttttagaggcagagtctcactctgtctcccaggctggactcctgggctcaagtgctcctccagtctcagcctctcaagtagctaggactacaggcacacaccaccacacctggctatttattttccatttttgttgagatgaagtcttgttatgttgcccatgctggtctcgaactcctggcttcaagtgatcctcccacttcagcctcggaaagtgctgggattacaggcatgaccactgtgcctcatcagaatcactttttcctctgtgtgtgtatgtgtttatataataatatcctttaattttatgctattttcattatattcaaatttatgatgaaacagagctggcataggcaataacatttacaaactgagttttggaaaactcctccagaatctacttcttacatgctatttatcaactaacctttttatataatcatagttcatgaaaaaagaaaaccctagttatgtaccagcataactcaagaaataccttttaatgattaaaggtcacctttaagagtatgctggaaaaacgaaaatgatctgtgcattttactaatccagtcagaaatactaattgtactccttattaagataaatttgggtgctggttttttggcttctggtttcttcttgtactcactatcatcatacaattggagaatggaattatgtatagtggccatacaggatgttaaaaatggttatgttccattgtgaaagacagtgtggcaattcctagacctaggaacagaaatagcatttgacccagcaaccccattactggatatgtacccaaaggagtatacatcattctgttacaaagatacattcacacatatgttcattgcagcactagtcataatagcaaagacgtggag

SEQ ID NO: 59169 - DNA, 1016 bp, Homo sapiens
cataccccctcctccccctctacccggagcgggcataccccctcctccccctcttcccggagcgggcatacctcctccaccccctctacccagagtgggcataccccctccgcccccacttcccggagcgggcatacccccacctccccctctacccggagcgggcataccccctccgccccctctacctggagtgggaatacctcctccgccccctctacctggagtgggaatacctcctccgccccctctacctggtgctgggattcccccacctcctcccttgccaggtatggggattccacctgctccagctcccccactccctccacctgggacaggaatcccaccgccccctctgcttcctgtatcaggccctccactcctcccacaagttgggagtagcactttaccaaccccacaggtgtgtggatttcttcctcctccattgccaagtggcttgtttggattagggatgaatcaggacaaagggagtaggaagcagcccatagagccttgtcgaccaatgaagcctctttactggaccaggattcaactacatagtaaaaggtaacatgaaagtgagctcgtctttgcacagtgtgtgtcagtattagggaagtgtttaccttcaaactcgggaaaattactgttgaatgtatttttaagcacaactctaaaactcgtctagatttttacatcaatatatagtgcagcagtttgctatttaaagctttaagcttttctccagaagtaccaaagatgtaaaataaatacatatacgtatcaatgtataagatgtaggtatacccatctatgtagttattgatatatctcttaaagattgagggatatatttttcttaaaatacatgctctgttatctagttgtaagactgctacttatttatgcctaaattccagtgaaagtatgcttatatgccctttggaaaatgaatgagggcaggtaagcagagacatttgtagcgaaattattttccatgtaagaatctactc

SEQ ID NO: 59170 - DNA, 1056 bp, Homo sapiens
ctttgaagcattacacaaaagattagctgagaaggtacatagaagtttatcagaatatagtttgacatagtttttcataaccaaatgagtgtgacactttgacattagaattgtctgatgtagaaccccgtctcttaaggaataaagaggaaaatagaaaaagtgatcttggccgggtgtggtggctcacgcctgtaatcccagcactttcagaggccgaggcgggcggatcacgaggtcaggagatggagaccatcctggctaacatgtagaaaccccgtctctactaaaaatacaaaaaattagccgggcgtggcagcaggtgcccgtagtctcagctactcgggaggctgaggcaggagaatggcgtgaacccgggaagcagaggttgcagtgagccgagatcgcaccactgcactccagcctgggcaatagagtgagactccatctcaaaaaaaaaaaaaaaagaaaaagaaaaagaaaaagtgatctcttatgatgttcatgctttagcattcacacacattcacacttgcccaattttaaggaaggctttagagccagtaagtgtttagtccaatctcctccctaattccagggtagttcagtgatttttaatgtttgtaatgaccctaagtcacctcaggatctttggtgatcaaataaggattaaaaagtttaacccactgggtatggtggctcacacctgtaatcctagcactttgggaggccaaggcaggtggatggcttgagcccaggatttcgagaccagcctggggaacatggggaaattctgaatctataaaaaatataaaaattagctgggtgcagtggtgcatgtctgtcatcccagctacttgggaagctgagatgggaagatcatctgagcccagggaggttgaggctgcagtgagttgtgagagtaccactgcactccagccagggtgacagattaagaccctctctcagggaaaaaaaaattcatccgcactcattagcaggaaagtgagagaatttacttgggagtgattttgataataagggttgcatagtttt

SEQ ID NO: 59171 - DNA, 1038 bp, Homo sapiens
tcgtgggaactaatagagtgataactcactcattcccatgaggagggcacaaagccattcatgagcgatcctctcccatgacccagtcacctctcgctaggactcacctttaacagtggagaatcacatttcagtgtgagatttggaggggacaaacatccaaactatatcagccatataaaaattaaactcttccagggatttctttcagggattttgttttcctttttgctactttgggtttaactttttatggaagtgcctttacaaagttaagtgacttattctttatgtcttcagcaaagtcaatattgcttccactaatggtagctaaggacaggaaggatgtgagtttttgttgttgtttttcacatagctgggaatagtcatggagtaggctaggatttggatcttagtttcttaagccacatttctacctcttatctcatgaaacaaaacaatgatttaaagactgggctaacagttctgtctttctaagagtttgtttgattgctgactgtccctgttgatggttcttgtgcggataattaacaggtatagtcggataagttgccaccaacttagaaaacagtcagggatctttttttaagagctgcttacagttgttcaagtcagccttgactcagctctgcataccagctgctggtgaccccagcttgcccctttgcacagaccatgtgattttaagtgtcaaggtcttgtccgttatcagtttcctaccctgtagaactgctgttatgcattttgtttactgatatgcattttcagtatctttcccttctctggatttttcgaaatagactaattaaataccgcagctggtctttttatcttgggatggaatcacttacagaatgggacacgtcttcctctcagattgagtcatggtgtggtgacagaagggaatttcattggagcattaagataatcagagactccatgtggcattaattcactccattactgtttattgaagaataactgtgtgccaagcactgggcttagtactttatcttg

SEQ ID NO: 59172 - DNA, 1018 bp, Homo sapiens
attgtctacagattctaggcattaagcagaatgaactagctggaaaaatccaacccagaaataaacattcacctgtagtcatttccagcaaatgcttgtatacttatcgaaaattcaaatttacttttaactaaatacctttatgcagctgactgtagtgctttggggaagataatggtgttaaaataaggtaatgatgattgagaagaaaggactgattcgaggaacatttaggagttagaatgacatcatttagctatctattagatattcaatagagatatttatgaaaacttgaaatatgtttaacattgtgtatccttataaccactgcttctgaatgttcagccagtgatcttgggtaaagacattaaaacttatttggtgaatacctaacagtgtatctcttcatcatgtgtatgtatctgtagatgtggtattagaaaccactgacacatataatgacttttcaagatatttaactagtttataggctcctgcgtgacttatttaatcttgtgattttgttctgaggtagctaataattttatcataacaagataaatttttaagaaaattattggaaagtatgaagtttttatttgttcatttcattagttgctctgctagagttacaaacaagtacaattacgttggaaatctacttcatagtaaatactcaggttcaaatacatttaccctaggacccagtagtcataggagtagcattacttgaaaaaccctaaactgcaaaccttctaaatatctatcaatattagatacacggtggaatagtaacaatgaaaaatagcaatctgttatactcaacaacaatatggattttacaggcaaaagccattataaacaaagtgtttccatttatgatgctcaagaacaggcagaagttatctgtgacgatagaagttagaaggagacttttgtgtgggggagtattgaaggaggtataaatggagccttcaggagtgctgataatgtcctatacaatgatctgagtgat

SEQ ID NO: 59173 - DNA, 1036 bp, Homo sapiens
tcctattacgtcttatgggagccgctgcaggagctctaatccagacacttatggtaatgaagataggagcttccactctcccaagctcctacgctgaggttatggcttctcactgagtcagcaggctgccagaattactcattccaccacctccagcttattgcagacgttctgttccagactaacaatgcagataagagggggctccctttctcaacacttccttacttaaagggcagatgctccagctcaggtgtagccaaccgagaatgctgggccccagtgcttccactctagctgattttagggcagagattctacaccaggagggagaatacatgaagactaggggccccccacctcagctccttcttacacagcaggagtgttgctttggaagaagtggaccactgtcctaatcctagctttaaccattgtgcaggtgcacagaagtcctgcccagagctctacagatctgcttgagaaggcagattttgtttggaacagaacatgaagaatttcatacctaagagcttcgtctgaaagaatagaggtctagatggagagcagttgagagggcgttcgcagctccatgatacagcagcaacaagcaaaatggctaagcaatcagaagtttaacagagagatcaagggaagaagatagccaagaaggatccttttgggatcataatcaatcccagaggttggaaggctgtgcataagcttactaggctgcacccactaatgagcatcagatcaggaggtcaggctgacgtggaaacaatccccaagctgtgtagggatccatgaatatatgctgtaagcctcactggcagcagggaactcagcgcaaccgctggccaccactggcagaacaataagatatgtaacccaggggcaactcatgggaagccaggctaaaaaataaaatcacctatattccttcatatagtctgtctaatagccacaaaataagcacaccagcatcagccgagttaactgcttctaggaccttgtatgtaagcaggcagaaaca

SEQ ID NO: 59174 - DNA, 1052 bp, Homo sapiens
gaaaatatgttttaatccctctagtaatactgtggcatggaaagttgcatctatactgatttttgacagagaaagggtattactggcacatgaaaccctagatgagcatgaataaatgtagatttcgcatcctacttccagaaaattgccaaactctattgtatattatttaacccactaaaacagctcccaaagttgactaggggttatttttaaatggtatgaaaatatattcttacaaaataatttacaaaatcttttttgttgtttttgtttgtagtcttgacattgttagcaatgaatcatgagtttttcggggaaaaattgatgaattgatcaaaattatctgatttgaggatattgcacgtaagttaaagagaatagggatatttgacatagttttcaaaattggtctaagaaatatttgagcaactaggccaaacattcttgatttattctaagtcttaagtagattcttaagtctaagactctaccagaaagaaaaggtagaatgaaaaaggcaataagaacaacagagattagaaaataatttcaataaacgggaaaaaaagaggaaattagaaagaggacataataaagacattgtgatagctacttgttcaccttgttttattctaggtttttgcagctgaatatccaaagtatcatatcccatgttttttttctgaactgcaagttagactttaccattttaaagttgatttttatttcaagcattcaatgatggttgaaagtatagtttaatattggtaatataggtactttgtagtcatttatttagagaaattaaagtatggatgcattaaaataaccataaaattatttttttaatattcaatctatgaatcgaggtgctgattgattcatagtttatgaatcaataaactatgattagtttacacgaaaaaaacttagattcttgagtttctcctgaagcctctcagattctccagtggtgtcttaggcaaaacaaaacaaaacaaaacaccagtgccttataggttgacaagcgtattttcaaaatctatatt

SEQ ID NO: 59175 - DNA, 1007 bp, Homo sapiens
ctcagcttctgcatcttgacctctgagatatgttggccttaattggcttaggaaaggctaatagagatcctgacttacatttacactgagagaagggcttgtttcctttgggtgagagagaatatgagtacacacagttaaagaaatagaggggcattgtcaggctggaccagagaacatagaaactcagtcaaagtgccccagtagcttacaatggtgtcttcttggtgacattgtcttttcatgtttggacatcataggagatgggccctgtagattcggactagaagccaaagaatttttctttatgttataaactgcattcgtgccttcaaaaatgttaggatgccaaagaatctaattagcttgcaaatacttctatggtagtgcttgttctctgccttaacaactgccgtgaggctccttgctcactcttataagaaagatattccactcagtgtggcaatgctatgcggttttcaacatgccaggaatatcttacaaatatcgttgggctagtgaaacagagatttatccaagcactgaaggaacatttttaaaatgccaaatagtatgtgatgattattattttctttttttagcttcacaatctctgaatttaccccagggtgaaatttaggtttgtgtggacttggttgtggtgagtgcctcctacgtgagaaagggagttctgtcatagttctgattgtcaatgtcaccgaagctaaggttggatcgtctgtgccttttgtatctatatctaagatgaggaggggctgcagggctttggaggccttagccagctggctctccccatgttctggtgatgaatgggtagggtcattcttagtacccattttgcaggtgaggaaatgaagagagagaacttcacgtctgttaaatgacttcaccagtattgtggagtgcggtagcacagagccgagaatggaattcaggccttcgtgaaagctgaatgctttgtgagtaatagtctgctctgcaatcct

SEQ ID NO: 59176 - DNA, 1065 bp, Homo sapiens
ctcctgatttcaacttctcccttctagccattaatacatttactttattatcataaaataacgacttaagaaagaaacaaaaagcaattccttgcctgtacattccctttccactcttttttttttttttttgagacggagtcttgctctgtcacccagactgcagtgcagtggtgcaatcttagctcactgcaacctccacctcctgggttcaagcgattctcgtgcctcagcctcccaagtaactgggactacagacgtgccaccaccaaaaattagacactggctaatttttatatttttagtagagacggggtttcgccatgttggcccggctagtctcaaactcctggcttcaagtgatcctcccacctcagcctcccaaagtgctgggattacaggcgtgagccaccatgcgcccagcctccctttccattctttgtagccaatcttctcctcctcattccatctgtacttatgtcccttgttgatatttatgttatttaatcttgcctcattttctgattttgtagccagtcttttaggatgtttctctattttattggtctttgaaagaaccagaaattttgatttgttgattatctctctcttctttttttttttaagttgtttttttaattggctttctatttcacaaatttctgctctttaatattctcttatttctgcatcctgtctctcctggctttgtccgttgtatgaatagttcatttatttttaatttttctttttttaaaatcatatactcagagctctagctttgccattaagttcactttaacaatatcccactagtttttaaatgtagaatagattttattgttgttcagttataactttgttattttctctttagctgatgagttacttatgtgtatattcgttgtgtctgtttcaaatgcatgggttttgtgtgtttgctttgctggtaattattttcctattgatttacagtaaattgtattacacttagtttgggatctagtatggaacctgtcttagtaaatatttgtatgtccttgagaagaatcagtttgccctgtg

SEQ ID NO: 59177 - DNA, 1022 bp, Homo sapiens
tttttaccctgtgtattttcaaatgctttcgttttatgcctacatatctagagtttttcatcttcctggttaacctaatcttgttttcagtgctatctcttttctggtaatgctttttgcctaaatttgtactttgccttatgttaatattggtacatatcagctctttttggttcgcatttgtcatagcacctccacaattttactttcaacctttctgtgtccttatgggcaaaaaaaaaagtgtgagggttattcctcaaacacctgagggcatcaatcccagttgtgtacccagagtgggtgattgaccactacaagctgtacttttgccaggattccattacttctgaccgtgtaagctcccgcagtaatggaagtggccatgtggaagctgtgggtctctggaaatcagtgtctcctcagaccctgtgtcctgtggccctcgagacatctgagtatttcccttttgcactatacagtctactgagtgatggctgcaggtttctttgtagaaggactaggggaaacattacagtgtatccttgctaccatgtttcagggtccttcctcacagggatgcaattcctttggtcagggggtcctggatctgaaattggctcagttctgggaactgatcaaggaatcatgattttctatagagcagccacctgtagcctcctgttttcccactcttgcccttttctgtggtcatagaggttgagcagcacacttgtcatttgcccctaaggatgctatgctccactaaccatctccacaatccgctgagagtcaggcctccttggctgccccttggctttttggttattatggtaattgtggtacccgggcttctggtcattgagctttaccacttggaccctattatttaggatcctatcatcccagtggattttaatgagcccagctctgcaacctcttcctacagagaagagctccaactgcactgttcagtgatgctgatacccctcttcctgatgcattctttatggcctctgggt

SEQ ID NO: 59178 - DNA, 1094 bp, Homo sapiens
agtatctctttatttagttcttctttccaaaaattgatttctttcatctgagttttgtggttttcctcatatagatcttgtacacattttgttaggtttataccttagtattttattttttggtgatactgtaagttatataatttttatttcaagttttaattattcagtgctggtatatgggaaagcagttgagttttgtatattgacttgtgtcctgcaaccttgctatatttgtgtattagctccgggagttattttgtagattccttggcattttctacatagacgtattagtcttcaaatagggacagttgtatttctttctttccaatgtgtatatcttttatttccttttttgtcttattgcaataaatataagacaaatatacgctgactataatggtctgattcctaattttaggaacttttcttagttacttgatctttgggatcagcatgggtctcagcttacattgtccctcaaggccagtcagtacctgaaaatgtgtcacttagattttcaaacttctcttccaccttttgtatgaactaatacttgttcttgggttgaattacctttttttctaagagcagttggctgctctgaggtcacaattaccctgaaggtgtaagtaccacagttcttcatttcaagataaaagaaatgccagtttatcctcttaccattctgaattcctctgattttttcattgcctgcaacaaactgagtgttggcataaaaatatctttgtgctttttagaagacatggaggatccctcaaaggcttttttaataataagtgaaaggggatttattcttccttattggagtaataaaatttgttacactttatgtaagttcctatggagggtgggggaaggaggtggaaatgaagacgatgatttaggattccaaaaattaaagttacttgtggaaggctttaactgaaaatagatcttcctcttgagattttagtttgttctgaagaataatattacaaaatccaacactgcacaataaaaaacgcaaaagcaatggaagatttatgatgatgttcctttgcagttcgtttaaactggtatgctctctt

SEQ ID NO: 59179 - DNA, 1028 bp, Homo sapiens
cttttttaggctactctaaattctttccatttttaaaagttctttctaactaaaacttttatctggtgtatttgttttcagaaagcaaagataagcatgaaaacttgaacaatgaaaagcagaatgaaaatgagtcattgcaacgactttcacaaaattcagctgacctgagagtgggagggaaactaccgtcattctgctcatgtttcttcttgacctcttgcataatctttttgttttctagacagttcactaattgttgaattttactgtatattcatataaaaatgcaaacgtactagaccagtggagaatttgacaccttttctttttgtaaaagtttatggtattataccgatagaccaaaacagcatgtgtaagaggcagtatctgcactaattctcaacatgctaaacattaactacaattcactgttgtgagaatattcctcgtcacagcaaaaacactttcctttctactgacaaccagtcctccacatcacagcatttagacatatgggtaaaatgttatttctagtgaattgtttgtatcagtttcatgtctaagtataaattttctattttaaaatttaagaaccgtttataatcagtgctttcccaactcttgggttgctctccataactatgtatttgtgaaagaaaatggtcattttttttactgaagtcatataatgacttgggtcagctcgtaatgcattgtgatggttttgtatgagctgggtgtttttttccattacttttaatgatcttcgttgcaagttatagttgtggataaaggggagaatttattgctcttgcaaaccaattatggaaagcaacttaagaaaaccaatgttctaaatcataattgtttgtatttatgtaaagtatggtctcttactttttagtttgtagtttaagtgcaaagaaacagtagtggttttttttctattgttttgtagtcttcctgtccccttcagtccctccagtgtgtatattaccattctccaatgaaataatagggcattt

SEQ ID NO: 59180 - DNA, 1015 bp, Homo sapiens
tttatctaaattgcatccatctataagcatggatatattatgtgtatatctacagacaccttggtaaatttttcgtatgtttttggctgatactgtacacaagcccagattgggcaaaatctcctgccctcttcattgtgcaccatattttgatggctgttgtcattgtttttgtcaatggccagtacctaataataataggaacacacattggacaatcctaaatacaccacttattcctgtaatttcaaccagcagaagccattactaaaataggctgtggcagttgttggaaatttaaagcacattctctagaatgctctattattcctgggggaaaaaaagttcatcatcagttttttgcctctttgagtcatgcagattttattttggtattaaagaagtttttcatctatttcatcagccaaattacccaatagacatgggctcagttactacaaaggagaaaaacaagtccctattatcaacactgttcacctgaaataggcatattaatatctaacaagaatatattcctaacatgagatagaaaagattattgggagagctttctcttttctgattataaaatgtaaatcttcaaggtactttcaggagatctggggaatgataaaatttttgcagtttcagaattgaaaggaacttagaggtccctatttccctgggtccaatccccagcccattgcaagaatcttttctgtaggctcagtgacaaatgggtattcagcatttggcagctcctgagtatctgagatgtggtacccgtagacagcagaccattccatctcttagaaatcccttccctaatccacttttctgtaacttccagctattaatcctagttctatttcctgaagccactgcagagtaatacaagcacttcctctagatgacaactagtgaattgcttgaaggtgtgatttacatcacctccctcaagttttctttttctttcccttagttaaaatctctacattggctgggcacagtggct

SEQ ID NO: 59181 - DNA, 1052 bp, Homo sapiens
agcctcctgagtagctaggaccacaggtgcaagccattgcacctggctcctccatgctattaagctattacaataattacagtaatggtgagaataagaaaggcaatgatgctgttagaaagaccgtgtgagggagtggttgtgagcatgtcatctgctgcagatcttctgggagcaaacctcagctgtgacagtaatagtgagcaaccttaaataagcaacttaatcttcatatgcttagtttcctcttctctaaaatgagggaaataatagaacttgcctaatagaattactgtgggaattaaatgagttaatataggtgaatcacttagagcagtgcctgcacttacataacagtgtaggtgtggttattaacttctcaacccctttatattttatgcttatttccaggcccatttcagatgtcactggatttagaatagctttgtctagatcccccttttccaatccagcacttgccccagcagaggggctctttcctgcttgcctttcccagaccgtctagttcgttctcttcctagagagccattcatgtacttcctggtgttacggccaattaaatggtttatctttttctctactcattctttgaggacagagactgttttgattgatgtgttcagagtgtgctggcatgaacttgcctgagcatatgttaatttcaacacttctgctccctcggattatgcgtagtattccctttttttttttttttttttgagatgaagttttgctcttgttgcccaggctagagtgcaatggcatgatctctgctcactgcaacctccactttccgggttcaagcgattctcgtgcctcagcctcccgagtagctgggattatgggcattcgccaccacacccagctaatttttgtattattagtagagatggggtttcaccatgttggccaggctgatctcaaactcccgacctcaggttatctgcccgcctcagcctcccaaagtgctgggattacagacgtgagccaccatgcccagcctcgcatagtattcctattagagtgcacag

SEQ ID NO: 59182 - DNA, 1073 bp, Homo sapiens
gtcaaggtcagtgttaaaccttgactttctttagtcatggaatgtcagagctggagggaatctagcatcccattcaacagtttcaggtaaaggtgaggcagccaaagtccggagatctacaggaatcaccaagccaagatcacacctctccttcctggccaagtttagaatacactaaaaagttagataagtaggaagatgcctgaatccttccctagagtatttaacaaagattttctataacttattcttaagcagctgtaccttttctcaggctcttaggtataccaaatttattacaccattgtatttctagctttgttatgggacagattttgtgaagctgtgttttatgtgattgacctgagctatgcttttttgctaggtttgaggtgttgggttcttgttaaagaggctcctctttgagccaagaaatgtttttctaaggcagcccagtgccctgctgttgctttctggtttctttgcaaagctttggccagctgccagctgttataataaaagcaacagtgataacacattgtactcctagtagatcactgtgctatttgtccaggtccagtgctataccacaggttggattccccagagggaggtagaaatggtaaggcttgcaaagactgcttatacttatttctgttttaggcatgtttttctagcttggaaaagaaaaatgtctttgcttaggttatacggaggacctagaatccctctgcccaagtgactgttccaattcttggttcataccacgagatgaaacactctagagttcagtgtgtcaagagggacgtctgggaatggagtcaccagcacactactttgcaattgctgagtgcactctgaaggttaaatcctgctcaaaggctggtgcagtaccctgggagggcatttaatgatgtacctgtgtgggctatccaaagcacagatacgcagacacaggaggagtcatcaaagagaatcgtttcaccacctctttccagagtgatcaacacagccttgttgtgaactttatagatatttgcttagagttcctagtctccatctagtattactat

SEQ ID NO: 59183 - DNA, 1036 bp, Homo sapiens
ctcagggaagccaaaatactggacacccctgatctagggcctgtatatggaaaattctgagatgactgaaccctgaattgcacatagaagggtctcctttctctctctttttctcctcgtcaaaagggggttagggttagggttaataaaaggttaattcccaagtataaaatcttttggttttcaagtttttgttgctcgacctatttcttcttatgttagtcttaagccttagacaacccaaaagtgagttaaaaatagaactaacattttctttaaaagtttaaagaatcttccacttttggatgtgagtgagattttctttaatattcgacttttcccccttctttttttggcagcctttaaatgtacaaatctcattgaagtcattccaggctgaaaagcatttaagaacaaatatcataaagctaaaaataaatattctactctttctgtagaggctattggatatttctcttaacattctggtcaggtggccttttagcaagagatggatgctaagagttgtggggggcaaatgcagtgggaagctcagtaaataattcaaaaatagctacactccaaaccagccttctgtgctaagcaatttggcttaattcaaaacttaaatttttttttaagtggtgatgcagccaaaactccagggccagtattatcttacactaattgtagctaccgcatatactggcttaaaagccttctccccttttcctggcaacatttccttggatttcctttgtgtaacaacctgacctgactctcggttcatatggtttgagcagggcaacccagtcctctggagtgagggtgaggaggaggaatgtgactcaggtttggcaagtcagagacttgtggccagtactttcgctagaactgttggggaaagagaatatttctgcactgattgctaagctgttaggtgtaaacacgagaatgaaatctgtctgaacgtgaagccagtacagaagagggaagaacctaacaattgcgtttgaatacctggctccagctgtac

SEQ ID NO: 59184 - DNA, 1068 bp, Homo sapiens
ggataatgggaggtattacaggttagagttgggagcatgggctctactccttagctgtgtgactttgagcaagttaccttaatctctgtttgagctttgcttctctcatttaaaatgtgagaatcataatatttatggaagagttttattgtgagaatttagcaaggtagtaagataatgcatgtatcctcttggtactattaataataacgataattatatagctcaagagctctgctttgaggccagaaaatcataccattcatccagatgaagcctttcaccaacagaaccctcttggtttctcttatccatgaacttttaactctggtctcagtcatcctgtataacagtagttcttcaaattattgacatattagaatcacctggagagaatttagaaattccagtgcctgggctatacctcagaaaccaaagaaatcgtaatttcggggtaaagaccaagtatgagtactttctcaaagctttaagatttttttatgcacagctgagtttgagaaccactgctttagaatgtcagcgataaagggaaattaacaaccatctcattcaccatctgctatattagttagatcaagtaatgctggcagctataacaatcacaaccacaaatttcagtagcttaacacaatgaaagtttatttcccattcatgctaagtccatgtggatgtccctggttggcaagaggacttccaacaaagaaacccaaattctttcttcattcttaagagttcttcctagaaattcattgtattagtcagggttctccagaaaaacagaaccaatagaatacgggtatgtctatgtgtgtgtgtataaagtgtatatgtgtgagtataaaatgtatgtgtgtgtgtataaagagagagagagagagaaaggaaagaaagatttattttaaggaattggcttatgtttatggaggctagcaagtctataatttatagaataggccagaactttggaaacccagagaagagtagatgtttccattcaagttcgaaggccatctcctacagaattcttttttcagttgggggtggtca

SEQ ID NO: 59185 - DNA, 1009 bp, Homo sapiens
cctttgagtcctctctttttattttgcactaagctgctagttgaataaaagtgtagcacatacaattacatacagtacataatacttaataatgataatgactatgttactggtttatgtatttactatactatagtttttatcattatttagagtgtatttttacttatgtaagtagaagtatgtaataagttagttataaaacagcgtcaggaaggtccttcaggaggtattccagaagaaggtattgttgtcacaggagacgacagctccatgcatattaccgcctctgaagaccttccagtaggacaagacatggaggtggaaacagtgatatggatgatctggaccctgtgtaggccgaggctaaggctgcatctgtctcttagtttttaagggaattagtctctgtagaaggaatagtatggattaaagaggccatgacacagtttctggcttgttcggtgattgtactacagatggaaagctcctagtgctttggttaaaatgttgggaattctggctgggcatggtggctcacgcctgtaatcccagcactttgaggctgaggcgggtggatcacctgaggtcaggagttcgagaccagcctgcccaacatggcaaaaccctgtctctacaaaaaatacaaaaagccgggcgtggtggcaggcacctgtagtctcagctactcgggaggctgaggcaggagaatcacttgaacctgggacacagaggtttcagtgagccgagatcatgccactgcactccagcctgggcaacaagagcaaaactccatctcaaaaaagcaaaaaaaaaaaaaaaaagctgggaattctctgagccagaaagggaaagataaggcttgcccctaccttcccttcagtaggcaacattgccccattttatattaatagtatatctggacaatatactgttttccaccctagttgtcatcctcaatgtagctctaaaagttggtgaccagtgaaaattcctctaaggattttta

SEQ ID NO: 59186 - DNA, 1144 bp, Homo sapiens
aaagtttcctctttagtattaaggaagagtcagtttgataaaggagctgcgaaaattgtgacttaaaaaaaaaaaacccagctaattaaaacaaattcaattggacttgataaccatttatttttaattcaggaagctaggaatgaatttgtgtctcctgcctgctaccttactgcatgacagatttcatcattccagtaattatagaaaatatctcaaatcagacagtgcttgcaggcacctgcagccagactgagtcccacacagcagtgtctgaaagaacaacttcatttccatgcaggccacagactagaatgtagttagtgctgggcagagttaaagtacaacagttgctctgttggttgctgtggtggtggcctcaaaccattagcactcaagagatgaacgtcttccgtccatgtggacaaaggaggaatgacttgacacttaggatattggactccagatgtgtttttaaaatggtagttcccacaggaaagtgtctattgcaatgacattggacatgttgattttatttcttattttttacttaaaatttttttatgtcacttgagcgcctaatcactatttccagtagcgacttgtcagtgtgcagcctctttgaactttgcataacatttcacatcaagggtgactctcttgttggtgtttgtttcctactctgcagtgttgaaatatgcactcctctttctgtttgctgcttctggctgtgtcagcggctacttcttttctgtagtgtggtcctctggtatcttctcctatcttctctttctgtcttatgtgcatcccttcttccccttcttcctcctcctccctctcctgctcttcctttcctggtctcctcctttattatctgaccacctctcctgtctatacagataattcccaaatccacaccaccagcccaggcttctctcttaagttgcaacttctcagaatcttctcaagatactccatggacactttaagctcaacatgttcgaaataagctgcacatattcttcctccaacttttgtgactaatattgatctctgattcatcacccagaatctagccttcaaagccttcttcagtcctgtcttctcccaggcggtttatacccaaccattggctgagtcttgt

SEQ ID NO: 59187 - DNA, 1050 bp, Homo sapiens
cccctccccaggccctgcctgcgcctgcctcactgcgaggacttctcccctctcagagccactcaccacagttgccagacgtgcagtgctttattttctgctggactggagcatttagcttgttaatgtttctttagaaagataattgtttctagttaaacatgttgtttgaaaaatatacccagatgtatatttttatgtcgtggtgctataatttctacttttttccccttcaaaatatctaagttactggaaaatttcaacttaggaacaaatctgttggagaaagtgaggtatgtttaagtgtttatttcttaaggaaagtaaatgttctacataaaaaatgattattgagataatcactgttaactaatttaaaaacaaaaaatgtcatttaagaggcccatatagcatcaatatcaagtaaacaattatgtcaccttttgctttaggaaaccaaatatcactgctaacccatatgtcgtctttttattttttcttcagggtatgacaaggcagcaaagattgctaagacagcacacaaaaatggatcaaccttaaaggaaactgctatcgaacttggctatctcacagcagagcagtttgacgaatgggtaaaacctaaggacatgctgggtccaaagtgatttacataaatttataatgaaaataaacatgtataaaatttaaaaaaacagactcccatttcttaaaaacggataagtttgaaaggaaactgctattgaacttaagcatctctagcagagcaatttgatcagtatataaaaccctaggatgtgctaggtctaagatggattaaacaagtataaaataaaatacatttataaaataaaaaggaaaacagacttaaattttctcctatgttaattgacttgtattatagttgaatctatgatatttgtgcatgttgtctttgtgacttcataagttaccaatttctaaagggttttaattttggaggttattggtggtttaaaaaattgcccgattatatcttattatctcattcccaaactatgtccttagcca

SEQ ID NO: 59188 - DNA, 1061 bp, Homo sapiens
aattttataagaatatgcaaatgacaaatatggagtatatttaatatattcactaaatatttattgagtaccattttctatcaggcactgtactggatgcataatagagatagagcaatgaaaagacagatttcttgctctcatggaatgtatatcctagtggtaaataaaaacacaggccagagcagaactcagactgttaaaattttgctctcaggtcagattccaaacagttaacacgagatacccagcatttataggtgcataacaataaatgccttgttaatctttttaaaattttatttttaatgtaaaataaagataatcaatatttgccttattacaaggtcattagtagcaaattaaaacttagattatatgtcttagagtccattgttggaagtctagttttcagaccggagttttagaccagaggatattaggatttggatatatcttaataaatattggaaatgttgccaacaaagccaaaacaaactaattgattttatactgttttttaatattatatgaaaagttattttacagtgactggagtattcgttaaagcatagaaaacctagaaatttggtgatcattagattttgccctgactttactaattgcctcacactcatactgaactttcgaacctctgcatctttgctcctcttccttctgcgtggaagattctttttccttctctggccaagtcctctccataaaataggatttcaccagttccgacaactggagttaatttctctttctctatggtctctaacacttcagacctctgttttaaatacttgctatgggctattttgtgttttagtcatttgtatttatgtctttttcaccttttttagatttctgtgccttcaaatgttcatgctttctttcacatttgtttccttggttatagtgccttaaaatttgtagaagatctatatgtttattgaattgtatatttactgtcaaccagaaaataatatgttattggacaaaaaacatgttgccttagtaatgtctctctctctctctctctctctctctctctc

SEQ ID NO: 59189 - DNA, 1079 bp, Homo sapiens
tacactcctgtaattccagcacttcaggagaccaaggtgggtggatcgctagagcctaggagtttgagaccagcctgggcaacatggcgaaaccccatctctactaaaaattaaagaattagctgggcgtggtggtgtgcacctgtagtcttagctactctggaggctgaggtgggaggattgcctgagccatggaggttgaggctacagtgagctgtgattgagccacactgcactccagcctgggcagcagagtgagaccctgtctgaaaaaacttaaaaaatgtaataccagattctttctactcctttaggacttcttttaaaaatgtagacaaaatttgagtcttaagtaaacatttttttctgaagtaaaatttttattttttcgtatattggaactttctgtttcacttgctaatggtagaaaaatgtttagtttaacttgttcacccatctaggatatttttcttttctttaggcttgccttttgtcactgctccgaataaatttgaagctctggctgctcatgacgctctggttgagctcagtggagccatgaacactactgcctgcagtctgatgaagatagcaaatgatattcgatttttgggttctggtcctcggtcaggtctgggagaattgatcttgcctgaaaatgaaccaggaagcagtatcatgccaggtaatcacatagctagtaaatgttggagctaaaacttgactaggtcctaggcattcttagctatggaccatgtctctctttgtttaaagttatcccgcagctggatgcgcaaggcgcactgttccagcatgtctgtggtcctctggtcaggactgctgggcacgtcacctgacaagataggaagaaagaatctgacttagcagcaagtatttcgaatcccacattagaaaatgtagagcaggctgttaaagtgatcagcgcgggttgaataaaaagaagtcataccaaacttcacttatttcattttttgcattccgttatatgcctgttagatatagcaagtgacacaacagtgtatgtctggatttcagcaagtcatttgatagattcgcat

SEQ ID NO: 59190 - DNA, 1061 bp, Homo sapiens
ctcactgcagcctggaaatgctgagctccagggatcctcatgccttagcttcctgagcaagtgggaccataggcatgcaccgccatgcctggctaactttaaaaatgttttcagagacagggtattgctctgtgttgcccaggctggtcttaaactcctggcctcaattgatcctcctgcctcagcctctgaaagtgctgaggttataggcatgagccactgcacccagcttgatattatgttttaaaagtacagggtcaacagttgaggaaagagcactgagtatatactacctggctaggtctcaggtttgccagttgctaaatattttggcatttatacagtctctttgagggcttggctttcctatttttaaagtggtaatctacctcacagaatttttctaaacttaataaagagctgtttatgaaagactgtatgcactgtataattgtaagatattcaattataagattttataagaatatataattcaataattgatgtaatttgatataattataagatattcaactacattgaagatactactgctgtcttcaagtgcagttgttaactatacttctctgtattttgctgtcatttattagcaggcagatataatacgtaatacataatataatacataatatattatataatacataatataatataatacgtaatacatatataatacataatacattcagtatacttaatgtgtataatacagttctgagtatgtgttagaaaccaggatgctgcttatttgattctataataactcacctatgacatgccacacatacatgtaactgagctgggttttgagtagttagttggagagttttttaattgagaagtttaattcagaagtttgtttttgttgcctctgatttaacattttatatttcttttgaaaaatttccaacagagctcaaatgatacttttcccacagcaatgcacattgctgctgcaatagaagttcatgaagtactgttaccaggactacagaagttacatgatgctcttgatgcaaaatccaaagagtttgcac

SEQ ID NO: 59191 - DNA, 1098 bp, Homo sapiens
gtgcaatgaagtagctattagtgaactcacattttcaagttactagctcattagcatgctgactctggcaataacatctgttggatattcctgctgagcaccagcaacaaatatatctagagactaaacgtatttgccagccttaacaggtggtcctctgttagaggaggctgtgggagagagataagaaagatacctttgattcccttttcatttgaaaccagtgaattgtcataccattcactatagataatatttcactttttaaagtatctgtggttggagcaagtgatgcttcagaagcttagatatgtgggtcaactgtattcaaactctgtggcataatcagcattattatttccttttttaaaatacatttttaacattttttctgcaggtagctgaaggtaaattaaatgatcattttcctctcgtggtatggcagactggatcaggaactcagacaaatatgaatgtaaatgaagtcattagcaatagagcaattgaaatgttaggaggtgaacttggcagcaagatacctgtgcatcccaacgatcatgttaataaaagccaggtcagtatgtgagctttgctgttttttggttataaattgaaaagcatacctgagattgttcttgtaaaacaagcattcactttttgacaagaagtgttcattatttaatggataaggcttcttatggttcttatttcttgaaggaatcttggttttatgtttcaatccttataaaaattatttttaggacacctgaatttagtgtatgtatttttttattgtttaaaactctattttgaaataattttagatttataagagaattgcaaagatagttcaaatagtttctatatcccttcactcagcttcccttattgttaacatcttatgtaaccatggtacatttatcaaaactaagaaattaacatagatacagtactcttagctaaacaacagactttaaaaaaaaaacaaaaaactgaggctttcctcagtttttccactcatgttctttttcaggatccaatcaatgctatacattacatttagtcacatgtccccttggtttcttctaatctgtgaca

SEQ ID NO: 59192 - DNA, 1056 bp, Homo sapiens
agtagctgggaccacaggcgtatggcaccacatctggctaatttttgtatcttttgtaaagacagggcttgccatgttgtccaggctggtcttgaactcctaggctcaagcaatcctcccacctcagcctcccaaagtgttaggattacaggcgtgagccactgactgcccttctgtggttccttttatggataactattttcagtataatttccttgggactatagacactattactcttggctttgagagcactctatcgatctcagatactctgtaaggtatttccagtggagaatgtatcacgtctcttatgcccggtttccccctgcaccatgctatacttttccactttctcttcttgcagggattgtttccattgccaccctaaccgtgctggcctatgaacgttacattcgcgtggtccatgccagagtgatcaatttttcctgggcctggagggccattacctacatctggctctactcactggcgtgggcaggagcacctctcctgggatggaacaggtacatcctggacgtacacggactaggctgcactgtggactggaaatccaaggatgccaacgattcctcctttgtgcttttcttatttcttggctgcctggtggtgcccctgggtgtcatagcccattgctatggccatattctatattccattcgaatggtgagttgaagactacagatgcccccctcccaaaccacatccagggtagaaaattttgtctggaaaataatgaaagtcttcctatgtcatcagtagttgcccagaggtagagcagttctaggggacttcccatctggttgaattttatgctatgagtcactctctggaaagatcaatgcggaatagcatttactctctctacatccctctctcaaccaaaagaaggaaagaaaaatcttctgactgacaaaatcagcaaccaaaaaaccctacattatccaacactcttaaaatttaagaatttaaaagagggaactccacacttcccataactttgtttattcagaggtcatatgaatttgactagag

SEQ ID NO: 59193 - DNA, 1040 bp, Homo sapiens
aaaagccgaatcgtttaacactctccgaagtctatttcggatgacattcagtgagttaagtttttcacattaatcagaaactttttcttttgcctggggaaggagccaagaggagctctaggggattgggtctagaagcccaggacatcaagggcttagggagaggaagtataaagaaattcgatcataaagtttcaataccaagaaattctgattaagattaattttatttgccttcatcttgatggatcaagtgaaagtcatgctcctgttgcgtaaaggtggctgcttcctctgaaaattttcagatttttattttagtatttttaccttcattataaagaggtatttgtagtgtagttcatttccttttaaccagcaaccaaatgtattcacatttcaacagcagggggcacagtacttccagctttctgtaaggcacgaacagtacaaaagctgagtgattcacctgaaagaatttggctataacaaaaatatatgacaacagttctgctccagcacttgtaggaatacttttctcttgacaactacattttcttatgtgatcctcaggacaactgtgtaaggtaagaaagggcaggtatttataccagtttctttgtagataaaacctggaggagttaagtgacttgcctggactctcctactttgtattgagacccattaatgagaaatgaaatgctactgtttcgctttgcttgcatctcaagagtgatttattacatgtaagaatatgtaacacataaagcactatttaaaaagtggtggcttctggaactttagattggcttttcaacaaatagcgaaataatcctataaattacagtttttataattataataaaatgggccaactccgattgaaagagaagggagttaagttcactcctgaaatcagaaaaacgatctctttattctgatatgtcgagcttaaaatctttatatataataccttcattggtccctgctgatgtcctatgattcttggcatttgcttgttgctaaatatatatttaatt

SEQ ID NO: 59194 - DNA, 1207 bp, Homo sapiens
tggtattcaaatttcctaatattaaaaatgcaactttgacttagttcatgctattgtattagcaaaactgttttaattgcatgtgtccttatagcagcagcattgtgtattagtagccttttaagagaactgtgtagaagactataaaaagggctttataactgatcttttgacatactcactttgagtggcatatgcccaggaaaatatttaaaagaaagaaaagctatttgtacaaagttttctagcagttccactcagataactttaagggggaaaaaagcccaacgattggaaatggttaagtaaattttggtgtattgctagtgctatcacagaatgttatatagccattcaataatattgatatatgtcaaattgtatgcaaaaaagtgagattcaaaaatgttaataagaacataaattgtgtttactgatacatgtgaaaatttaggtctacattgaaaagaatcagaagataacatgtaattcagtttaacattaggggttctttatttttcttctgttaaatattgatgtatgcaataaaaaataaaagattaattggtaaagtggtttactgaactggtgagaaaattactgatttcttagaagtttctaaaattctattttaaattaaaatatacatttctaggtgttaaagtcaaaaaagatcatcttcagatatgtgtggcagaaagttttacaaatcttggtggggaggaattcttggtcaagatggacttcataatttattttttcttagttgatcaccattaaggaatagtaatagaaatattagtaatacattctaggacatcagcatgaagacgtcatatactaattaaagtatgcccctaaatgcaaacatgtcacttgggaatcttaaaaaccgtggagatgaaagttggattcatagatgtgaccgaacctggtttgcagagagacctgtgcgaaggccagatcttgggggactgaggatgcgacagaccctttcttccagtcagcgtgagagatccaaatcaaggtgatttaatttaataagcatccattgaacacctactgtgggttatgaattggcattattctgggaaattagagatacaaaaataagtgctctgtacctgacaaacattctgttggaatgttttccttaaggtaaggtaccttttaccttaatgagcatttaaaacattttttacccgtc

SEQ ID NO: 59195 - DNA, 1054 bp, Homo sapiens
ttgcaataaaagccagcattcacaaaatgaggaagataaggaaagtagcataaatattttctattaacatggctttacaactgctaaaacttatagtataaaaatgtactaacaaagactaattcaagaagttgcaggatacacaatttttaaaaatctcatttctacatcttagcagtgacaaactgcaatttaaaaagtgtgtttggttattaatatatatgagacttttaaagaaagttatataactacatagagataaattaagaaagatgcctaaatagaagcaagtttaaagagctatatttttaaacatgaacaaactcccatgggagccatgccagtgtagtggaaaagtagtacatggggagatggggagtttttttgaaaaccagaattacagttctcatttcactacttaccagttgtatactcttgggaaagtcactcctagtatctatttcaccatctacagaagagaaatacttcacagaattattgtggggattaagttagataatgtgttttaaaatataaagctacatccaaagaaatgccaatatgtgacattagtatgaaatttactacagttccatttaacattccaactggttgctgtgtggaatatggcataattgtaataaattatttaggaaagcaagcaaagatgtaagtttttttaatttagggggaaaaaatgggagccttgctctccaaatccttaaaacatgctattaagcaacctttctgaatattctgtggtgccaagtagaaagtttaactgaaattaataagccaatggaaagaaagaaatattaataactgctggtggaaagactagctagatgtcagtgtggaaagattagatccactttacatgtgatattccaaatgaattaaaatgttaagtataaaaagaaaaatactacaagtctcacaccaatagtggtataaaggaacttcatggcaattggcaaggtagatcaactaagagaaaaagttttaaatgtgtagtaaataggaaaaagacaaaacaagatggaatttaaaagaa

SEQ ID NO: 59196 - DNA, 1041 bp, Homo sapiens
aatgttcttcagtaacacatctcatgatctgaagattgtgttacaaaaaatattatcaggccaaaatttgttcggaatacactaatttttgctcctctatatgtgaggaaaatgagactagacagatttaagtaattgacaacttacttaaagtagcaaagtcatggattgtattgacttttaaaaatatagtaaaagtcatatttaaactttatcctaaagtttaaatctaacagaacaactgaaatacttgaaatagacctataaaatagtaattaaaatgagaaatacataagatgataaataaaatgaaggtgaaggtattccagatctaccgaaaagattttcagtatcacagattattcataagaaattgagaaaaggaacaatcagaagttgcaaaagatggtatagccgaatataatggaaataggaaaaattagtcgaaaataaaggttgatttagaaatgaagaaaatgaatatatttcttaatacaaaataagtgggaaatgagaagttataccaataaaaagcatttaaaaatttaggggatattgtaacccagtataattttctgacaggttggactttgaccctaatggacttactggtgaactttttcaaatgtttaaataatgtctatccatgtatcatgaaggacagtatgcttcaaattgtcttttgaggcagacatgttctcagtactaaaagacatttttagaaggattttattctcaacagatgcaaaatgcaaaataaaatattggcaaacaatacagcaacaaataatttactatcactcaggattataaggctggtgttaagcagaacagccattaaatcagcatcaaaagaacaaatagtaaaatccaaagtattaattacagataacttttcaaaaattcatcattcacccttgatttaattatttctctggcaatgatttaatagacttctcggagtctgttaagtacttaaaccaagaactaccattattcctactgggaaaacataaacatttctcaagtggaaagtaaaca

SEQ ID NO: 59197 - DNA, 2982 bp, Homo sapiens
aacttcagtgcttctgggataactggaacatcagaaggacagattttattacagcataatcacacctcatttctttcatcagcagttgtcaccagacgctgttacttcctaaaatggcggacaatcttcccacagagtttgatgtggttataatagggacaggtttgcccgaatccatccttgcagctgcatgttcaagaagtggtcagagggttctgcatattgattcaagaagctactatggaggaaactgggctagtttcagcttttcaggattgctatcctggttgaaggagtatcagcaaaacaatgacattggggaagaaagtactgttgtatggcaggacctgatccatgaaacagaagaagccatcactcttcgcaagaaggatgaaactattcaacacacagaagctttttgctacgccagtcaggatatggaggacaacgttgaagagattggtgctctgcagaaaaatccttctttgggggtgtctaataccttcactgaagttctggattctgcattacctgaagaaagccagttatcgtattttaatagcgacgaaatgcctgcaaaacacactcagaaaagtgatacagagatttcactagaagtaactgatgtagaggaatcagtggagaaggaaaagtattgtggagataaaacttgtatgcacacagtttcagataaagatggagataaagatgaaagcaaatctacagtagaagataaggccgatgaaccaattagaaataggattacttactctcaaatagttaaagaaggcaggaggtttaatattgatttggtgtcaaaactgctgtattctcaaggattgctaattgatcttttaatcaaatcagatgttagtcgttatgtagaatttaaaaatgtcactaggattcttgcatttcgggaaggaaaggtagaacaagttccttgttccagagcagatgtctttaatagcaaggaactcaccatggttgaaaagaggatgctaatgaaatttctcacattttgtttagagtatgaacaacatcctgatgaataccaagctttcaggcagtgttcattttcagaatacttaaaaactaaaaaactaactcccaaccttcaacattttgtactgcactcaattgcaatgacatcagaatcatcttgcactacaatagatggtcttaacgcaactaaaaacttccttcagtgtctcggacggtttggcaacaccccctttttatttcccttgtatggccaaggagaaattccccagggtttctgtaggatgtgtgcagtttttggtggaatctattgtcttcgtcataaagtacaatgctttgtagtcgacaaagaatctggacgatgtaaagcaattatagatcactttggtcaaagaataaatgctaaatattttattgtggaagacagttacctttctgaggaaacatgctcaaatgtgcagtataagcagatctctagggcagtactcattacagatcagtctatactaaagacagatttagatcagcagacttccattctgatagttcctccagcagagccaggagcttgtgctgtacgggtcacagaattatgttcttcaaccatgacatgcatgaaggacacctatctggtacatttgacatgttcatcttctaaaacagcaagagaagacttagaatcagtggtgaagaaattattcactccgtatactgaaacagaaataaacgaggaagaacttacaaagccaagactcttgtgggctctttattttaatatgagagattcctcgggaatcagcagaagctcgtataatggcttgccttccaatgtttatgtctgctctgggcctgactgtggcctgggaaatgagcatgctgtcaagcaagctgaaacacttttccaggagatctttccaactgaagaattctgccctccacctccaaatccagaagacattatctttgatggtgatgataagcagccagaggctcctggaaccaataatgtagtaatggccaaactagaatcctctgaggaaagcaaaaacctagaaagcccagagaagcaccttcaaaattagaaaagagcaatctcgaaatgctgttttggacctccttcatggcatcagaattttctcatttaaaggacagtttcccatatgagtaattagaagtggttatatatgatgaatgctatgcagatgttgtctttaactctcagacattcagcattgaatatctttgttaacctatcaatgagtgatttattgattattgaacattttgtttagaatgggctatatgacccagaatcttaaaacagagttagctttattttagtattgggtatatatgtaagggttccatattagcaactcagcttaaaggtaatgtatttgctaatgatcttcagattttatctttgtctacagaacaattagtaatacccaagtaatattttaattacttttgcagctgttacagttgctgcggcctgttcgaatagtgaaacatacacaaatggtaaattatgtggatcttttgcatataatataaatgtatagacatggtggtaggaatagcaactaatacaaatgccaatatgataataaaatacatttgtctataatcgtttaaagattagctttgcatgatcctttatgcactgtgaaggtctgaagtttataatactcacttgacccttgtaactgatgaggcaatgatgccaccacagtattctaatttacaaaaagaattggagttcaattagtggttgtaaagctcattttggggaggttgattgcaaaggaaatttgaaagataagatttattcttatttaatacttcagaaaatttctgcagagccctgccctggcacttaaaatagcttccaataagtaacttagaccaaaaggaaaaatgaagtgccccaggagaagatacttcagaagggctgttctgaaattcctaaggaggaat

SEQ ID NO: 59198 - DNA, 1065 bp, Homo sapiens
gtgttctgcgttgccggccgtgggtgctctggccacagtgagttaggggcgtcggagcgggtttctccaaccgcaatcggctccgctcaaggggaggaggagagtcccttctcggaaggtgagaggagcgggctgtgcggaggctaatgggtgggttcccttgggggtcgacctgcgcgtcacctccgaccctcctctcgggattcgggtcttccaggaagggaaggagagggtctggcgtgatcttcccaacccaacagcggagcccttagcctgagtggagtatgtgttttgttccgaggggacgtctggcaaccagaggtctgcagttcagtgaacggagggagataagagagcagacgattccgggctggagcaggcgccagggttgccagacttacctcatttttccgcagaagctggcagtccaggttttacatgcaatctctccacctttaaatgttgacaagtacattttcccataatattttgcaggcctaaggaaacgtgtcgtctggaatgggcttgggggccacgcctgcacatctccgcgagacagagggataaagtgaagatggtgctgttattgttacctcgagtgccacatgcgacctctgagatatgtacacagtcattcttactatcgcactcagccattcttactacgctaaagaagaaataattattcgaggatatttgcctggcccagaagaaacttatgtaaatttcatgaactattatatccgttttcctcggagtgagagaaaactctttttagatatcatctgagaggtaagagactgtttttctgaaactgtggcttgaggaccacctgcatccagattaactgctttgtttaaaattcattcacagcagaactagtgaatcccagtcactgagtggagttgagagtctaagaacctctgaaatttgagaactgctggaccagagcctttagagctctgataaggtgtcaacagggtaaagctgcctcctgatcctgtactttctttcttcctttccttccaaacttaacgtttgataggagagatttgtattatgaaa

SEQ ID NO: 59199 - DNA, 1023 bp, Homo sapiens
tctgaacaatttctggccgggcgcggtggctcacgcctgtaatcccagcactttgggaggccgaggcgggcggatcacgagttcaggagatcgagaccatcctggctaacatggtgaaaccccgtctctactaaaaatacaaaaaattagccgggcgcggtggcgggcgcctgtagtcccagctactgggaaggctgaggcaggagaatggcgtgaacccgggaggcggagcttgcagtgagccgatataggccactgcagtccctcctgggcgaaagagcgagactccgtctcaaaaaaaaaaaaaaacaacaaaccaatttctgcattggactccaagctttctcttcatttgtctaagatgttttaataaatgtatttttctttaaatattactgttctccctgtctcttttcatatcaggtagttaatttggcaccatggggatacagggattgctacaatttatcaaagaagcttcagaacccatccatgtgaggaagtataaagggcaggtagtagctgtggatacatattgctggcttcacaaaggagctattgcttgtgctgaaaaactagccaaaggtgaacctactgataggtaagtctggaccttatgttaattctttgacaattaagaatgagacctacagtgcctttttttctcccccagaaacggattgttttcactcaatgccagaacttatcaggaagtaaaagttgtatgttttagaatattcccaaatcagggatgacttccttctgtgataataggcctagttttctttctttataataagccagagtatcaagacactgatggacaaagactattaatatctcctttattctttttttttttttttttttttttagatggaatctctagctcaggctggagtgcagtggcacaatcttggctcactgcaacctccgcctcccaggttcaagcaattctcctgtctcagcctcccaagtagctgggattacaggtgcacaccaccatacccggctaatttttgt

SEQ ID NO: 59200 - DNA, 1012 bp, Homo sapiens
agccaataatccagatatagtaaaggtaagagtgatttgctaagtgtcatattcaatttctgaagcatttccttaataaaataataaatcataatatggatttaaatattctgttatgcgaataacctatattatattattaaaaggagcaaatgactgaggcactagaactttgccttagcaactaacatatattgggaaaatcatgttttctgcaattggcaaaaaagtagtgatttttaaaacaaagactagtataaagaggctcaaggagaaaatattctagggtaaaattaaactcggagtcttttgacttctgtgctataactctatagtagtggttctcaaactgtttggtcgcaggatccctttacactcctcaagctcctttatggtaatattttttgtttatgtaggcgatagctattgatatttactgaattaaaaattaaaacaaaaatttaaatgtttatcaattcacttaaactttataataaactcattacatgttagcataaatagcatgcttttatgaaaaataatcattttttaaaacaaaaattatgagagagaggaatcatacatttatgcaaatctctttaatgtggcctaatagaagacagctgtgttcgtatacaagttgaacatccctaatccaaaaatctgaaatgttcaaaaatccaaaactttttgagtcccggcaggcaagtgaaaaattccacacctgatctcatgtgaagagtacacaaaataattaaaaatactgtataaaattaccttcagtctatgtgtgtaaggcttatatgaaacataaattgagttttttttcttcttcaccctcttgctgtcagtgtgtggaaacgtaaatggattttatgtttagacttgggccccatccctaagttatctcataacgtgtatatgcaaatattccaaaatctgaaaaaattcaaaatctgaaacacttctggtgccaagcattttggataatgtgtacccaacctgtatctgc

SEQ ID NO: 59201 - DNA, 1978 bp, Homo sapiens
tgtgaggcatttagtaaaaagcttgcacattattttttgctctcttttttatagtgaaatctgtatattgttcatttaaattaccatgctagtgaaaattgagaacaactttttgtttataaacccgaggctcatccactatgcatcctgattacttagattgactgacagtagcatgcacagggtccgtcacttacggtacacattccaaaggtggctcttgagaggacctcctcgtggcaagcaagctcgacttatcaggaagagcattctgggcatttgagtgcatcaggagaggatgcccttcccatagccactggccatgtacatgcaggctgatgcagagccctgagtcacttaggtggtggctaggactttcccctctgtttcccttaaaggcagggagtcagtgatggcctgggccctcgtcagaagacaccaactcctgcagagacagatagagactagcaaactgtgtctgctttcagtaatgctgatgtataaagtaaggagactccatttaagtcataaacctatggattttcgtgacaatagaaaacatttttccatcttagtataatatcatttggttggttgttaataaatacatttttccttaatcttgctaatctagatatgttgatgattccatagctcttcaaatagcacttggaaataaagatataaatacttttgaacagatcgatgactacaatccagacactgctatggtaacgttttgatgaccaccctatgaaaacacgttttagttatgtcccgagctgtgattaaaggcaaatcttcatacactaagcttcttttaagcgtttctatatccaggctctgtgcagaatgtacattaaaaacaacttgatcctagagaaattacatgtattagagcataggtatattggttaattttttaaaattaagaagtgactgttatttattatcaaacccttatccttgagcatttcatttgaatataccaagcatttgatgcctttttttctcatctcactccgttcggcttctgtggcatttggcatcattgaagacccaagcctaggaatgctacgggagttaaagctgttttttcactcatgcacaatttaacaaatatttaatgcacgcccctgctgtttctttaaacaatttgctgttttcttttatttttcttttttgagacagagtttcattcttgttgcccaggctggagtgcaatggtgcgatctcagctcaccacaacctccgcctcccaggttcgagcaattctcctgcctcagcctcctgggtagctaggattacaggcatgcaccaccacgcccggctaattttgtatttttagtagagacaggatttctgcatgttggccaggctggtctggaactcccaacctcgggtgatctgcccacctcggcctcccaaagcgctgggattacaggcgtgagccaccactcctagccgcgatttgctgttttcttctgcttcttcagtattgtatgtattccttaagatactgtctcccatcattgtctttctctttgtatttctgtttatcctctgttctcttttctgtttacatttcttccttaggtaagtccttagggctttaatcccatttacgtaaagaactcacatctccatctttactccagtctctcgcctgtgcaccaaccacagaattctcactgtctcttgcgtctctgatttcctgtagcctccaagtctatttataggcaaaactaaactcttcatgtttttaatcaacttttaatcacatttctcttttatttcctacttagcacttattactgtataacatgcttctattcttttctgattctttccaatagaatgtggtcttcataaaggcagaacttggtgatcctcactgctgtatgatatttactatgtttatatgttgagtgaatgagtgttagccacaggtctcttttgttctcacactggaaaactt

SEQ ID NO: 59202 - DNA, 1083 bp, Homo sapiens
ctcacaacaatattatgagatacataggattgctgctatcttctctatttgaggttaagagattgaggctctgagaggttaagcattctcaaagttgtacagttagtactggtgataggaagattcctagtcacagttgatataatggattggaagcggcatacaatccaataggcctggatttgaattctcactctgtcatctttttagttgagtcgtctttcacacactgttcacctccctgagcctatttgtttataaaaaatggatgattatatacataaggctgttgtgaaggtaaatagaaactgcgtgtcaagcacctgccataatgcctagtcattaatatatgtgcaagcattcattaccactcctctccttttaattgaatgcaactaaaaggagatactaaacatgtaaaacgttgtcaccaatttgcctgcattttggaagcctgttttaagtcttaattatttttattatgtaggtagttatcacagaaacgtgccagttttatctttcgagatctggaaatacaagtcaattaagtaacagtatgggccagttgggaggaagtagccatgaactgggaagggttctgagttttacttctgtttgttgctagccaagtaattttataaccctgggcattgtcactatctcttctcttgcctgtgaaatgatatgtaggagaatacttgggcatcataggaattgccgttgatttaaaaatgaatttgccgtcctatctaggagctcatgttttctgcttactgaaaagcctagtaagagcttttcttccacgtactgcttcctgccccctccccatacaactaatctagggatttggtgaaaggatagaaaggatttttactctctagcatttagtaaatattctgttcattatcttggatttgaactaatgcctattaaggaggtaaattctctttaagttttttatttatctgatcatgtataataggatatttgttaaacctaaaaactctctttgcctcctcaataatgatactgatctttcattttcattggaatttttttttaaagctgctatactgaataagt

SEQ ID NO: 59203 - DNA, 1053 bp, Homo sapiens
tttgcagttcagattctactgactgtgtatcaaacaaagtgagcatccagcctctggatgaaactgctgtcacagataaagagaacaatctgcatgaatcagagtatggagaccaagaaggcaagagactggttgacacagatgtagcacgtaattcaagtgatgacattccgaataatcatattccaggtgatcatattccagacaaggcaacagtgtttacagatgaagagtcctactcttttgagagcagcaaatttacaaggaccatttcaccacccactttgggaacactaagaagttgttttagttggtctggaggtcttggagatttttcaagaacgccgagcccctctccaagcacagcattgcagcagttccgaagaaagagcgattcccccacctctttgcctgagaataatatgtctgatgtgtcgcagttaaagagcgaggagtccagtgacgatgagtctcatcccttacgagaagaggcatgttcttcacagtcccaggaaagtggagaattctcactgcagagttcaaatgcatcaaagctttctcagtgctctagtaaggactctgattcagaggtaagtcaaatcctgaaggctttgttttcaaatttatatgtaagaaaaaatagattgttgctcaaactgaggaaatttttcctacatgtgaatgacgagctatattattttttcattctaaactctactgtgcagaaagttcacattttattcatttgaaggacttctctgtatctttcacattttaaactgcaatacatttaaattaactctgtatatttcctgaatcactgtatgttcgattggtgagtatctcaaggggtgccacagttaaaaccgaggcagagtgataatctgtgaaatgaaaaattattatcaatttactgtttaaatccttaatatgctcttgaattcagataacatttaagaccttgtaaggggccaggtgcgatggctcatgcctgtaatcccagcactttgggaggccgaggcgagcggatcacttgaggtcaggagtttgaga

SEQ ID NO: 59204 - DNA, 1643 bp, Homo sapiens
agagtcaccaatactgttagctatgagcaaagaatgttagagtttctgtaaggtataatacaagttaatggagtgcttttcactattgggttttttattgctcttttgttttgttttgtttttttgttttttaagtctgctctgttgcctaggctggattgcagtggtacaatctcggctcactgcaacctccacctcccgggttcaagcgattctcccacctcagcctcccaagtagctgggacaacaggcatgtgccaccatgcccggctaatttttgtatttttagtagagacaggatttcaccatgttggccaggctggtcttgaactcctgacctcaagtgatctacccacccaccttggcctcccaaagtgctgggattacaggcatgagccaccgcccctggccttactgtcctcttttatttgactttcatgggaatgcagattataagggaactctccatctatagagaagtcttatctgatagaattgggggcagaaaggtctgaaagtcattgctaaaggtgaagtgcatttaatacaatgctactccacttgaaagtggatgcgtttttttctttttaaagttgaacgtgttacatgattaaaagaagggatggagctgcaccagttcaacttattttagctagtaagatgaaaacttaaccacacgtgcgtaacgcagcgtttttacattaggagactcttgttttatctgactcagcattttaacatcctcttctaacagttcagaaaagactttaattttaaatagatattttatataatttacctctccagctgaaacatcttgttagcttcttcaatgaaattggcaaatatcatcctttccatattattcattttcttttattaattctatcccatgttcttatttatcttccattttgttgaatattagtttgttgtcataaaaattctacagtaaaaatctaattttattttattttttgatctggggactctaggaatctgattgcaatattaagttacttgacagtcaaagtgaccagacctccaagctacgtttatctcatttctcaaaaaaagacacacctctaaggaacaaggtaaaacatttatttaattttttttttaatttcagaagcggtgtatgcttacaactagaaaatgagaaatacaagcagaattaaaaatcaaaatacctgtagtctcatttatataaaaatgtctactttaaaactttatgcttgactgtaggtgtttaagttgtgaaacttattttctcttgcagtgtatatgaaagatcactttccaagtacttttagtcattaatgtaatgactttataatatgcagttgtataggtttggtcaatccccttatttttgtcatttaccctaaatttttttgctctagcaaataatactgcaaccaagatcttgtggataaatatttgaggacatgttcttgattagtttgtaaggatgaattgcatggagtggtattactggtcccaaggcatgtatgatttaacattgatacatactgccaaaaggccttctagaaactgtgtacccatgataaactaggtttgttgaatcaaaatatataaatatttgtgttactacatagtaaagcatattttatatatta

SEQ ID NO: 59205 - DNA, 1032 bp, Homo sapiens
ggctgaggcgagcagatcacaaggtcaggagatcgagaccatcctggctaaaacggtgaaacgccgtctctactaaaaatataaaaaattagcgaggcgtggtggcgggtgcctgtagtcccagctactcgggaggctgaggcaggagaatggcgtcaacccgggaggtggagcttgcagtgagccgagatcgcaccactgcactccagactgggcgacagagtgagagtccatctcaaaaagtaaataaataaataaataaataagtaaagaataaagaatagcttgaaattaaagttagttgctttaacagaatggtcttaaaatgggtgtttaatcttcaggttcctgggctatataagtccagttctgcagactctctttctacaaccaagatcaaacctctaggacctgccagagccagtgggctgagcaagaagccggcaagcatccagaagagaaagcatcataatgccgagaacaagccggggttacagatcaaactcaatgagctctggaaaaactttggatttaaaaagtgagttgccttgtttcttattctgaaacaagataaactgttattttctgtaatttccatccctttctcccaactcttcctagtttcgtatgagtttttgtttctctcactataaaataattatttttctctcttccctttagctaactctttatacttaatatcaatttctataccttcttttcataaaaagatggcaaactaaaaaccagttttcagtctggttttggagtctctctgatgtgaagcaaattgctttcctaggccttaagtctcctgccttccttttcttatctctcaggattgtaaagagaataaaattttatttggttttttgttttttgttttttgttttttgtttttttgagagagttttgctcttgttacccaggctggaatgcaatggtgcgatctccactcaccgcaacctccgccacctgggctcaagcaattcttctgcctcagcctcccgagtagctgggattacaggcatg

SEQ ID NO: 59206 - DNA, 1034 bp, Homo sapiens
ataaaaagttattggttcaaagtctggacccttaattctagtagcttcagcttccttttgtttctcagttggaggtgataataatagttatctcacaggaggattgttggcaggattaaatgagataatctatgtaaagtgctcagtatactgtttggtacacagtaggttctccaatttcctttctcctatttgtccagaccagcccctgaacctgtgccaagaccacaagacctcttttgacaaaaattccattcggtagcttaggaaggtctcagtgagcctctgacagaaacttgggcctcagcatgtgctagcaatggacgattgtacaaaagatttcattccaatctttgaggccagataaccccatatgcttaacattctcgattacatgtaaacattgcaaccttctctttctgtataggcctcccaaatagcttggccattcctgatccctgactcatcctttcacccttgtcttgcctagcaacaattttctccattcttctggccctgccattactcatgtgaatgtgggtattggaactaaacgacttatcagatatctttgcagatagtgaacctcttcagcctcaagatcccccatctctggtgtgtatcggagatgaaggatcttgaggctgaaggggttaactgaggactccctgtattctatcattgtccaaagctttctcatcactgaaaatctgaactgcaacatcacgttttctgatgacaacctcacaattatccaactctttcaatctcatttcccactgtctgttcttcaacctcatgcaaattttaattccgtggtacctctttttttcttcccagttagttaaaacttttaaatcttcgcttgtttttctagatctgatggtttatcagttcaaccactctcatctctttgatcttccaccatccttggcttaactcccaattctgaggaccagtcccaccagtttgtcatctctgcttctgtatccatgttgctaaggatttctgaggaaaactgcaaaattgttcaa

SEQ ID NO: 59207 - DNA, 1126 bp, Homo sapiens
caatgattgtatattttatttcttttaccatcttgcttgctaatacttcatcaacttatcaaatgattataaaccatttcccaaggcttagcaaaagaaagaatcctccagttctattaatatgtggttactgtgaaatctcttattagtttgactatttaaagaaaaaaattttcttagcagattctgatcaatataattcacttagcttcatgtcctaaagtaatgtgcatgtacaaggtctttatttttaaccagctttagatcatcagaaagctttatgacagtgatgtatttggggaataaagtagaaatttaaaatacttttgtcatcttaaattcaataactgtcaatttatactgttttttttttatcctatcaagctcaagaatcttgaatgtctcattattattattcaaaattataagtttcacagcttaaccttttgagactttgtgtgttctggcccttttcttacgtgcgtatctatgtgtcccattatagtatctaccaccatttacaagtttcttgaccaccatgagcttttcatccttctgtaccctgcgtcttcctccccttccttcctgcttcaaggtcccaccaacctcttcataaagcttcctccacttgaccgcaccacaaagggctgtgccacatgcgtgcattttctcttcccttcccccatgacatatacacgtttcttccctggtaactaaagtaatcttcatttcctggatagtccctttgctttgaaacatctgtgccgttttgtctccttcatctctccttggatttgcttgccacatctctgcctgaaaggattctaacttggaaaggaaaccaaacttggaagtttgagatccagacccgctccctcctagctatcagtgtgttccgtcctcccatctgcaaacttaggacactagtgtcattatccaagtcccttttagtctaagttgtctatgactttatgaaatgttctccttcaaaaagctttttctgattctttgtcatttcaaatcttccttttcattgtgtttgcataacccctttgtgtttgcataatacagaaagttcttagaaaccaaaataaaaatgtatttaattgaatcagcatcaattgag

SEQ ID NO: 59208 - DNA, 1060 bp, Homo sapiens
actaatgctagagaactgaacccttctgttttgttccttcagcactattttcttatccatattttgtaataaaatggaattaaatgtgaaaatatctattaggttttcaaatcaacaatatatgttgtatatacgttaagaattgctcattttaatacatattttactatatcacatgtggagattgctgttgtccatgttttttctaattaatttatactgttttccacaaatattagaaacttcattgtacagatcgtctgcataaaaaatccttaatgaaaaatagagttttggatacaatgatgcttatctgtattttatctcattaagcttggttattctgtttcttattctagttcatttattttggggaattgcaaggatttgctatattatataagggaacactttaaacacatttcaaaagaatcacatcaacagttaatatgttttaaaaaattatatatggagcaatcatgtgagatgtagcatgacatagtgaaaagatctagttatggcacttaactatgtgtgaccttggccaaaaaaatggtcgcatgtcttctcctgtgcctcattttcctcatctgtagaacaagatgattaatacttctcttacagagtggttgtgggaattaaatgagttgaggactatgaagctgctttataatgtactcatcatattataatggtgccttctgtgtattctaagcttcatggggacaaggaccctgtctgcttcttcattgctgtagtctttaggacttagcacagtgcctggcacatcataagcaatcagtaaatatttgttggtgtttttcctgcctctttgtgttgataaataaatgaggaattaactgacgtttttacaaagtttatatattgaccataaattggttctgttggtccataaacttcaacttagttccctttttaaatctaaatttttatgtaattactaatgtgcttgaaagtctttcaaactcacattttgcataagtttaaaaaatgttactttaagccaggcatgtgtctgtaatcttagctatttgggagg

SEQ ID NO: 59209 - DNA, 1115 bp, Homo sapiens
ttaagcctcatgaaccaacctctgcaaacttttcttctgcagtttcctcacctctgtcagcattcacagaattgaagagagttcagattttgctctggattagtttggcttaagggaatgttgtggctggtttgatcttctatccagaccactcagaccttgtccatatcagcattaggctgttttgctttcttatcattcctgtgttcactagagtagcacttttaatttacttcaagaacttttcctttgcattcacaacttggctgtatggcacaagaggcctagcttttgatgattgccagaatagtaagacagaatttaaaatggttccatggttgatcagatgggagattagtgggagtagggaacacaaaaggcatgggaaaagaagataggttgtattttggtcatactgacaccaacatgcctaaaggatagccctgtgaaaaaagctagcagacagttgaactgcggctgtgaaacaggaagccgtgagggctagactcatcgttgtagtcattcgtaaagagtaaatacttggagctattgtagtagatggtatcaccacggaatggtgagggagctgcaaatgcggctgaactctgagataacctcagtgacagggatgtggtgtagctgaatggtgaagaatatggactctggactcagaccatattcttggtctgagattcaaacccaactcgaccacaaggtctgtgtgacctaggatgagttaattaaatgtgttctagtgatctcatcggtaaaatggacgtaatggtgccaacctgagagagtcgacaagttgatgcacatacttaacctagtgcttgacatatagtcagtagtcaataaatgttatatttaagagggatacagagaaaaccgtggtttatgattatagttagaactttatttggagcttttaattttgtgtagatctcacacgtttaaatttatgagaatccagatataattggaatttcagaatcagcattacattctacagtttataaaatgctgggcttaccttatttgtgcttaagaatcccagccaatgctttgttcaaatttccgtccaaacttatttattaaaaaattttttgtcctcc

SEQ ID NO: 59210 - DNA, 1057 bp, Homo sapiens
attcttggagagaacatgcctttctaatctcatcgtgctgcttaaaacatttttgctttatcatacaaatagctttttaggagagtaattaatgaagcattttaagccagttgttctagttagaggaaaggcatatatgtactttgggatccatggatcattatgggccaacaaaatgcttgtagtgagagcatcttgacacatttttttgtacttccaggcgctgctagcaacaacaggtcttactcttgtctcatcatttttccccttcccttgaaaaagatgtccagctacacaagatccagtggtgcctgtatgtctagatgcctcctggcaggaggcctcctctctcaagctccctctaccccaaactagaaagactaaaaaccttcttctgagccaaatacacttccctacccccaaataaaaaaacagttgtaatacaaagagaagagggaataagggctatacactgtattttcacttggttccattttgctatgtgcatagtgttactattatcaatgtgtactttttattatctatggcaggactttaagaacaggctatttaacctacagtgatgttcatgccttatccctctagtttgtcagtagcactatgctaataaaacttgcctttgggattttaatttttcaagttatactttctagctatatatctcaaagccagagaagtggtttttttgtttgttttatgtggagaaaaaaggagggtggtggaaggaaggaaagatacaaaatatggaaggaaatgtggatatttaatgtttctatagagcagtgataagtttgcttagggtgagaaaatgtattttcaaatggctatgaatcacaaactaagtagaatatgagaaataattttatttatttaaatgaactactgtcacctaaaagactcctgtgctgagagcaatatttgaagagtaatagataaagacacttttatttgaaaaagataatagtgatttttaatttattacaaaaatgttttatgctttagcatactctttctgtttagaatttaggactatttc

SEQ ID NO: 59211 - DNA, 1145 bp, Homo sapiens
agtgagaagtactggctctgcaacttccttggctagccagggagagagaaggagacgaactcttccccagcttccaaatgaagaaaagtctcttgagagccacagagcaaaggttgtaacacagaggtcagagataggagaaaaacaagacacagaacttcaggagaaagaaacacctacacaggtataccagaaagataaacaagatgctgacagacccttgagtaaaatgaacagggcagtaaatggagagactctcaaaactggtggagataataaaaccctacttcacttaggcagctctgctcctggaaaagagaaaagtgaaactgataaggaaacttctttggtaaagcaaacattagcaaaacttcaacaacaagaacaaagggaggaggctcagtggacacctactaaattgtcttccaaaaatgtttcaggtcagacagataaatgtagggaggaaacttttaaacaagaatcacaacctccagaaaaaaattcaggacattctacaagcaaaggagacagagtggcacaaagtgagagcaagagaagaaaagctgaggaaattctgaaaagtcagactccaaagggaggagacaagaaggaatcctccaagtcattagtgcgacaagggagcttcactatagaaaaacccagcccaaacatacccatagaacttattccccatataaataaacagacttcctctactccttcttctttagcattaacatctgcaagtagaatacgagaaagaagtgagtctttggatcctgattctagtatggacacaacccttattctaaaagacacagaagcagtaatggcttttctagaagctaaactacgtgaagataataaaactgatgaaggaccagatactcccagttataatagagacaattctatttcaccagaatctgatgtagatacagctagtacaatcagtctggttactggagaaactgaaagaaagtcaacccaaaagcgaaagagtttcactagcctctataaagataggtgttccacaggttctccttccaaagatgttacaaaatcatcatcttcaggtgctagggaaaaaatggaaaagaaaacaaaaagtcgttccacagatgtgggttcaagagcagatggtc

SEQ ID NO: 59212 - DNA, 1014 bp, Homo sapiens
atataaagcatccagcatagtacttgcctgagatttatgcacttaacaaatgttttttacctttatcagaaatgatattagaatttcataccacattgatgtgtcaaaaagaaatgtaaaaaagtatctaaggcataagtattaattattatttattcagataataagagctaaccttcaatggaagctttcgttctctgactcatgctatattgtctctcaggaaatgagctaatttgtaatatacaaatataaattaatagaaaataggaaataaaagaagaaaaaatataaaagaagaaaatcaaggtataaataaagaaaatataaataaaatgttacatttgtatgaagtataaataagatttgtttcttacatacaggtaaatagacctatatgtttgtttgtttattaatgttaaaattgtttctttatatggcctatttcctgaaaactgtcaaagcaattactgtattttagtgctcattatttccctgtgattgggagaatttttattctggtttctgttttatgagatacttaatttacttattgaaagcaggtgataattatttgaggcaatatgatgccattctgagtaacccaggaatggttttggtaaatgtgaatttaaatagactctcttctttcttctctattccttcaacccctgccaagcaaaagctatagccctggtaggttcctttgtaggaattacctaacattacctaacaggacatttagaacactcttcacagaatggttttacatacgcgtgtgtcagtgacgctcatactgttggtattcttagcatggtccacatggctctggtaccaccttcactgctcagaaatgtgggcaggtaacagaaaaccttggatgggattaaggatgcagcaggctttggtatccttaggaggcttcactgtatgtgtgtcattctctatacttactattctgtttttttgagacggagtctccctctgtcacccaggctggagtgcagtggtgcc

SEQ ID NO: 59213 - DNA, 1117 bp, Homo sapiens
atgttagaattaaatattaagtaataagaccatctagtggtaaaattttcaagttttagtgaatgagaaagtctgatacctgtttcactaaatatgaactttagagcttatcagatagctgtactataagaccattaaaactttatgtctagaaaatagtttagcctgaggtagcttctccttatagaaaatgaaggctctctggttatatcctaaagatcctgtctgcaaattgctcattcaaatgcatgatatttttctagattgtaataatcagagccacaaacaataactataaagaataaaaattgggaacacagtggagatttaatagcagaatagaatgttaatatttatatgcctaaaatttttccaatctattctgtgacatccagggcctattatgtgccaggaaatgagtaagactcaggtcctgcccataaaagaaaagcacgccattgtttgtctttgtatttagaacttttcagaagtgttggacattgacaacttgctttttgaaacaattaatcttaaataggcctggaatctgcatttcaaacaaaggtctttaagggattgttaggcaaatacagtttgagaattatgctatctactatgtcgcaattatacaataaaatggcatcttagaaaatttcatgcctaaatgtaactcagatgtgtaaatggtaaacatttgctagggaaggaacagataaaatcagccacatgtttatggtttttcaacaagtgtcacaaaaataatagagcaaagaagctgaaaagaaactgaagagatacttttttctaactctttgcattgttgtactgtttaacaacattattaaatctttttttttttttttttgaaacagggtctcactttttcgcccaggctggaatgcagtggcgtgatctcagctcactgtaacctccgcctcctgggttcaagctattttcttgcctcagcctcccaagtagctgggactataggcacatggcaccatgcccagctaatttttgtatttttagtagaaacggggtttcaccatgttggccaggctggtccggaactcctgacctcaagtgatctgctcgcctcggcctcccaaagtgctgg

SEQ ID NO: 59214 - DNA, 1037 bp, Homo sapiens
atccacagatggataattgtgttctttcttcctttggctgttgtaacactgctgtgaatgtgcatgcacatatatttatttgtggaccaggataaattataaaatgtctctcctgactccctttctgtgctcttctaataattttgtctgaattttaaatttaaaagttgattacaaatatgtgataaaaatcacagtgttaaatattcacaataacttattccatggaattttaagggatttttctttttaaaagtaaaattagattttcatagacaattacaaaaataaattcccctcttaaatcatcctgatttagttccttgacactagtggctagaattctgcataattcttaattcttaaagtgtcaaattattttcatgggccatgggaacctctactattgatttgatccaacagagaccctgctctccttacccaagaagtctttgctcattgaggaggaagatgttctggttatctgaggttgaaacttgagtacatttttacttggacaccttgatgtgattgatatactaatgcaatactgtttttcagttgttactttaaaataagattgtagaagttagatgtttaatctgccattatatttttcatttctgtgggaatatgaattctgaattcctactgatttggatattttttaaactaataaattagcactattgctattgaattatcattttgctctacattgtattactatagttttatgcctacatcttaccccacggcgcttctcttctttcacaatggtctctattttctgtcacaatcagcaagcttcccgtatctgatgttactaaatgtaaattttgacctctctgcaaatattcaataggtaggatatttatctgcatgaaagttgaccctgtatcccccatcctcaccattctgatttcagaattggacactgtgcatctttgcacagactgagcttttcaataataatgactatgatcataatatgctagtgaaaaaaatcagtcaaacttttcataggtttggtttgt

SEQ ID NO: 59215 - DNA, 1044 bp, Homo sapiens
ccttagcctcccaaagtgctggggttacaggcgtgagccaccgcgcctggcctgtatcgactattatttttaagccattattttaaaacgttctgtcctcacaagcccatttgtgggcctaattccaaatagagggattaatgtccacatgtatactatatctgtattttaatgattagatcttttaagcccttactagaaattatgtaatcatattactgttgtccttcaaagttgatttataggtagacatacattccagtatggtgccagtgtgagaactcttcttttggatttgccttcagaccattttacaagccattgaagataatgtttttgtgaatataactcattttttgatccaagatagactcattttacttttctggacatgtgtataaatgacatgtgactttctccaaaagtcagagcttccatcattagataacaattttccatgatttaggatataaaaagtatatagccagactctaaataaatgtaattatagcaaataataaaaattttacaaaaattaggttttcagcaactgtttagatcaaagaattgaaagtaggcaaaacaaaactaaaacaaaaaactttgctcctacaagagtaaaatgcaggtgctttgcgacagtttggaaaataaagcccatacactttaaccctttaggagagttgccactgttttaggccacaccactgacttgttacagctaacctaccctaaaaatattaaaaggacttcaacatatttaggcatggttaatgatgagcaaaggaaagaaaagaacttggtgaggactgtttcctagtgacttttttaatgagtagaaacagaaaattgcagctgtgatgagatgttgacttgtataaccctgacaaaatacaagagggaatggtaattttccaaaaaagaaaatgactaatttataagaaaagttttgaactacaagttataggaaagatatttgaaagggcctgacaccactaagtgccaaattttatctattggaatcaattaaattctgtgaagatg

SEQ ID NO: 59216 - DNA, 1030 bp, Homo sapiens
tgcttcatagctgagccacatcagttttatttagctctctgtatagtggatcagttttatttggctctctgtgtagtggtattagaaactaccatcttgacgttgttctgtcacctgaaggatgagcaaagcaaaaacaaactatatgtatatatctatatggggggagggagagaggacaggtttatgaaccagttgtactgtatggacttgatcaagtacagtacattgtgcatagtaaaaaaaaatcaatgtctgaaaaaatagaaaaataacattaatgaactattaatatatgagaagcagttaatacattttattctaatggaaattttaactaacatgacttcagagtaaacactcacaagtccagctgaacattttatttttaagaaaaagacaaattaactctttaatcaaacatttttttaaacttaggtcatgtcatataaatgtatgattatttctctgataatgtagagtttttccaatacttttctttcatgttcagtgataggaaagctgagtagattttaaaagggataatttttcacagtgaaaattacaatatattctttcatattatatgttctctttgccttgtgtttagatttttttgacaatttattattattatatttattgtggaaatggagcttgttgtcttccgtgccctatcccacacatttgattatgaaagagagatgttactatatcattcttctgtaacctaaaagcagtcaggttttatattatttcatattcagactgctgtcaagaaaccaattatagtacctgacagatcccactaaaatttaatttttgaaaagatgtttcaaaagaccaaacgcttcacttaattagaaaatgtttggaaacaacctagtctccctgtattgccttgttttcctaataaattgtctgtaagtgatttttctattaatctgtttaaaagcagaatttatttttgagctttagggaaatatgtctcatttcaacttgctcttcattttgataatggacatgcttt

SEQ ID NO: 59217 - DNA, 2117 bp, Homo sapiens
tagtcttgaactcctggactcaagccatcttcccacttcagcctcccgaggagctgagattatggcacacaccatctcatgtccagcttaatcatatttttaaatgaacatttcccactttgttcagaaatgtgatatgaaattacaaattcttcaaaacctcagtgtgctcattgtaatgagaaatggcagcaacaagattagttgagtttggcagccagaatgaaaaaatagttctgggtcagattctcagattaatagtcaaggaacacatttttgatatttctgatattgttaatggagtggttcagtccgtaaaccagaaaatcaagacttccaggaaatgaatggaggtgtcagttgccacataaggaccttgcaaagacatgagaacagaaagatggagcagccagtttttgagataacagcagacaaggatccagaactggaggaattaagtacaggcacctgggctcagtatggaagactaagtctggctctgaaccaaggataaattccatgagaactcttctcacttttctacttttcaccctaattctacaagataaataggacatttttcttagctggacaataagaacattggttctttaggtatgctctaatggatacaagtctagaaaagcgagcgttatcaacttcatcttacagtgcccaaggctgaacttgtcaactttgcaaataaattcccatcccagctttattgtttctgtcaccagcagttttcttcatgcccatgcacagaaacagtattacttagcacgctttcagatgtaaataacaaatgctgcctgagactaaacagggaagaaatttactggctcacataactgaaccccatgagggttgtttacttcagcatctcaacaatgtcgtcatcagctagctagcttctctccgtctctcagtcttgctcttcatagtggttgcagactgaggagtttaccctcactctcataggctgcctgccagtagcaggaaggggtacatgctactttgatcacatccaacaggaaagcgaaaacgttacttccggaagaccttccagaatttggaagaactttgccaaaagttcttaacatctctcatctcattggcctctcacaggttcaggagagggtcacctgcttatttctgaaccaatccctggcaaggcaagttagattatccttaaaccagtcttgctcaccttgaagctgtgtgtgatgttagttttcccctaagccacatgatctatgtcaggaaagagtggatgccagagatttttggagtcctttgaggaggaaagaacagggaaaggatattgaaagaaaaccaaggatgtctgctttatttgtaaattttgagtgttcccttcccttcaccttgtctgtctaatccttaggtctgttgcctttccccacgctgcccgccgtcctgagtcatgattgggctaccaacctggtttcaaccctcctgcagtttattttgtataacacatctaaactgatctttattttctttgttcaagaaactacaatgactgtcttttgcctgccaaatagatttttaaactaagttgttcatgtcagagttttctaattttgtcccagtttccatggtcagccttacgtcccattaccagttgtttgagtggtctctcccaatgcatcccccataaattatgctaattcctgcctgctcttttcccacagacataaatacacacatacattaaatgacaaagagatacattctaaatgatgtctgtatatttatcgtcagtacgttacagtttcattcattatgttgtgtgtgtgcctcctccccacagctaaactatacatgtcttattcaagtaccgcataatatactatcactgtgccctagagccacctagtactgagagggggaaagatttaccaattaggtgattaagaaaacatagctgaatataattatcaccaaactctgaaaatcagtatgatagtaatttttatcttgccgttaaaattttagccctcccctgtcacacacaaaacagcttttgaaatctgaagcgcgtaacttctaacatacagtgaagtgtatatgtaatttttgtacagaaggcacaa

SEQ ID NO: 59218 - DNA, 1245 bp, Homo sapiens
attaacagttaaatattttaccctttgcggtttgccagctttagattaggagcttttcttggcaccatttttaggaactattctaagtgcctaaattcatcttggcagcactgggttctttgtgtgttaccagtaagagagataaaaggcttagtataaaatcatttatcagcctacaggctgcatggcacatcttatgatactcaggctgtattagccaccgtatgatatgtgcttttaactctcagatttgagaatttgcttatctgaaatgtaagaattaatacctcatacgtaacctaacatctttttttgtttccttgtagacttttgtgaatgatgtaaggattccggaacagacttatatcaccttgaaacttgaagataagctgagatttggatatgatatccttaaatggttttatgtacttattaaatttattcaaatatgtttactctggtttaagttaacatttttaaaacacaattcacaatatagatatgccagaatttctatttattgggtgcattcctatactaaaatacatatatatttttagttattatgcctgttcctaaaagtaatcatggaaaagttggtggactcagctttttttttccctctctctctctatttatgtagtttcagcatcagtctcactgaagtgctattgcatatataatttgagcatcaaagaatgtaactggggagaggacaggggaatgtttaattttagtccagcctagggattgctttcaggtggaacatgatgcatgaatcagcctcctgggatgaatgtaagaatttaaacctacttttccttccatccctcccgttaactgttttatgcatcacagctatattgcctattaaattcaaacttttcaatatcctgtgtcttctaagacctacgctctctgattaatccacattatgcatttagtgtgtatttaaaattcttatgtttaaaattaggaatctaataattgaacaaggacatgactgtattaaactgcatggggcagcgtgaagaatctctagtgaagggaaggagcatgattgcagaagaagaaagacatttccattcatagtaggcaagaagctttgtaaaaaggatttatgtacatttaattaaaatacagctattccacataatgctgaaggttgttttttttttttttgagttttagtttttttgaattactacttttattgggactttggtaataaagaatgtattaagc

SEQ ID NO: 59219 - DNA, 1300 bp, Homo sapiens
agagcccatattttaaatgaagataattttgttctgaaacatgtcatattgtgtcccttttcctctaaatctttggactctttgaatagtttatgctcattttttgttttgaaagaagaaaatcctacaaggtaaatgttttttacaataagatatgtaaaacatggtaaaattataattcacatgatttctctataacagttttaaatttaaaaaaattaagttaatacattcagcgaagtcagctgatgtaaattcttaatagaacatgtgaatttagtagaaaagaatatctttaaaattttatgttttcctctttgggcagtgatgctaaaaagattttgttgtatagtggcaccgttttaatctcatttaatccacacttactttgatatttccctatatttactgtcctattaatattaggtatctagccaaaatgtgactggtatttattctagtattttcttatatttattaactgacaacattcctttcagtctcgtagtgtggataagcaacacgctgtcatcaactatgatgcgtctacggatgagcatttagtgaaggatttgggcagcctcaatggggtaagtcaatggtttattttttgtcttgtttgaacatttgtttaatattgtaagaataaaaatcagattacatttcctagctacattttctttttctttactttgtatgttattttcaaatgcttatcaggtacatagcactttggggaccatccaatagaatatgaaactagcccatattccaaagaaactataagcagatgaatccagaaggtggttgtcattgtctgtgatggctaaagaagacttctttaaggagttggaacctaagcttgacttcactatatggctgtaatttatatgagggaaaacggtaaaaagtcatggcagtgagaatgcaaaaaagtactctcagggacagagaagtaatggttaagtttagaaaataaagatggagctggggccgggcgcggtggctcacgcctgtcatcccagccctttgggaggccgaggcgggcggatcacgaggtcaggagatccagaccatcctggctaacacggtgaaccccctctctactaaacatgcaaaaaattagccgggtgtggtggcgggctcctgtagtcccagctactcggtagtctgaggcaggagaatggcgtgaacccgggaggcggagcttgttgtgagccgagacagcgccactgcactccagcctgggcgacagaacaagcaagactgcgtctcaaaaaaaagaaaagaaaagaaagat

SEQ ID NO: 59220 - DNA, 1035 bp, Homo sapiens
agatagatatatatacgtgtgtatatatatctagatatatatacgtgtatatatatagatagatagatagatatgtattgcccatgtaaacaaatgctctttggagttcattttttaaagagtataaaagggtcccaagaacagaatgtttcagaattgctgttctaggaaaacgtattaagacaataaagtacatgtgaggaaaaagaaattgaaattgcattctgtggtttacacctgatagacaaaagagcaatttatttggtcaacatagttcttaatcaggtatcatatatacttactgaattcattgtgtctttctcaaaccatttgtacctaagacatttattggtacagtattgctatttttctaatactaacatgatgctaacatgagcatttacttgaggattatagacctttataaactgtgctaaaaggctttcagaagtatgaaaactataaaagtttgctagttgagcacccacttactgccttagtctcttcctttttaactggactcttagtggattccgtgggcttacttcactgatgagaatttagtatatatgtcatttcctgggacctgtggacagttcatttaattaagtataaatgttgatgaacgcagttctattcttaggccttccagtgtttggtgaatagccactaaagctaaaaatatctgaacgtatatttttcttcatgtttctcttcaggatgacgtagctttgccaaagacttagaagctaagcagaaaatgagcttaacatcctggtttttggtgagcagtggaggcactcgccacaggctgccacgagaaatgatttttgttggaagagatgactgtgagctcatgttgcaggtaattgtgtcaagcttctctatatgtgtttattcaaaacttgaaattagtgtaaaatctttttctactcctttagaaaacagtgctatttagatttgaactttctctccttttagctccagctatcattctaattaattttttgcccccttgaatcatctaaaaaaagt

SEQ ID NO: 59221 - DNA, 1055 bp, Homo sapiens
tgagtattaatgtgttttgtttgtatttttcagaaactatgtattcttttaagtcttattaaagtcaagatgaaatatgtaaaaagccattgtttttattttattttatccaactgtataattattgtatgtttatattgtacatattagagcatatgaataatgcttattaactctgggactttgctatattaagaaactgtttctgttatccgtatttggctgtcatgttttagtttactgtatgtaggctggatttattttcttttaacatgtcttaatattgggttttgtttcagttcccttgagtaaacgtgtaactgttgacctgtttattcatgttgtgttttaaaatcgtcccctgaaaatacagtatgcaaattatatactatatttagatcggagggcttttttctccagtaaaatttggattcacctttatagacttggccaggaagtatatattctgaaccagggaaagaaatgctaaaaaccaaattgacaaagtagacagatggaagaccaacaacatctgcattaagaagttgagtaaatgggagatttaataatccacataaatcaactatatcaaataagctgaggagggagtacgagttgattgttgtagctttacagaaaattatttacttgctttgatgaaacccattgttttttcatgtgtgtatagataacatatgatattcaagattttaccttaacataaagttctgcattttacaggattttggtttaatatatagagatatatttcttattgcagaatatttcattttactgtagtatagtttgcctctaattcaagtgtagtagaatatacagttgaatgggaaaatatttacaagtattattcttttgattcataagaaagaacttgagtgcaaactgacattattcttattttactgaagaagaaactaagggacatgggataaatagctagcctaaggtcatgcagaataaaaagtggtggaaccaggattcagactcacatctgtctatatgactccagggcttattcccttaatgaccaagcc

SEQ ID NO: 59222 - DNA, 1036 bp, Homo sapiens
tcaatagctgcagagtttttctttgtttcatgtttatttagaatgtaaaacttagatatttacattttagtccattaaatcatgaaaagaactctgatttagcaggaaagtcagtttttaaagttaatgatagctttaaatgtaaatgtaatgatagttccatgtaaatggaactgtgatgctgggccagtgttcacatccatctgacacccaagtgtctgagctttcaacttttctcagattgctagtgaaaacagctttatgtgacaaaaagataaagaataagaaagagacaaccgaagaggactataactaggattttttaatggctagattgaattgctgtcaaaggttagatgattaatttcacctcctgcccctggaaatttctaggttatcctcacttcaagacttgtagcagctccaaagctactcattcattgaaaaatagcttgtcaaatgctcactgtagatgaaacattggggtaggctcaagggatacaaagatgaaaaagtgtctctgtatttcagctctgtgctggtttagaatgataccatccctaccgtcaccatccatgtctggagtaatgacaacctcctgttgttctagtaacaccctaggtttatctctgtcatggcatctactaccattccctgcagtagtgagttccttgaggcaagatatttttgtttgttttatctttatgtgtccttgatcctcagagtgtctggattccgcaggcttctcaatagctgttgaaagaagggaggaatggaggaagacagttttgctgccttcaaagagctcatcaacttgaggtgtaatcatatcgttacagtatagaattattaatactaaaaatgatactttaaattgtagcataatgtttgaacaaaatattgtgggactacagagaaaagtatggctaactctgccctgggggaatgggaataaacttaccaaaaagcaaatctgttagttttgtactttctcatactctttgagatttcctaaatgctgaaattgataagcaca

SEQ ID NO: 59223 - DNA, 1075 bp, Homo sapiens
gtgagagataaaaaacatctgtctggtagtgtggttgattaaactggatatattgtccagtttagcagaaatgttttagccaaagccagtgacatagccaatgtgtgttgctgttaaagcccacttttatatcaaataaaggtggaaaaacaaaacagcaaaagcaaagttaaagaaaacctcataaaatctacttacatacaaacaggaattgcagaaagtatagaagtggaaaagaatcccaagcatgcattgttgaggtctgaaaaacaaatgacacatagcagagaacaagtcattttttaagtatatccataagtaataaatgatatagaaaatattaccctttgaaacacaatatttattgaatcgttgaataatacctaccaaattttgaacatttcctaggtgccaggaagtttatgtgtgtgtggtgtgtgtgtatttaatttctgcaacaaacttctaaattaaggtattatttttacacattgaaaaaatttgaagcatagagttagtgaataactttgcctctgcgttacacattcctaagtgatagggcctataattgaacctttgtctttttggctaaagccaaaattctttctactcatcttttttagtaagttaaagggtaccacttatttccttactctggttcataaaattttagaattcaagggaactttagaagtcagctcatacaatgtatcacccactactaatatctctgagatgttattgggtccaacttctccacaaacccttccctgggcataggaaagcctgtttagcttccaaaaagtgtaataggaagatctcacttaaattgagctagtagctgcttttactatataacttcttcccactggttgcaattcagtctttaggagtaagatgaagtaaggtttttctcaatatattagctagattttctcttgtctaaatgttaggacacctccaacttcatatggtttcctttgccatccctcacatctctcagctggattcaatcagttttgtcagtgctattctttgtgttctgatcttgtttccatatttaattctgcagtta

SEQ ID NO: 59224 - DNA, 1009 bp, Homo sapiens
aggctagacacttcctgttggaggccacaggccagcctgagccccaccaccaggggcagcggggctcaggacccaggacagggagggaaggaaaggggtggactttgctttggaaccattgcccgacccattctcttctgggtattaagtggacagagatgtttagagtttgacatgcaaaattaagttaagcttaactcatccaggctgagaaaacggaagcctttagttaaaccatctctaacccggacatgaggacagctctaaccctcagctgcccaagatctggacccacaggccactccaggaaaacagagagggtggctgagcactccggagccctcaggcggcaccgcatccaaaatacctgctcgaacctacagcagcctcgcccacatcatggctcagcagaagcctaactcacaactcaagctgattccatgacaagaaggcatcgcagaggctgaagcccactgacagcccctacctagaggtgaaggccaggcttagccagaaaaagcaggctctgggtttagatattcagcagagagcttgcaaacctggatccctgcctcctctctgaccactagtatttgcaactgaaagccaacattccctctaccaaatttcttttgtcatgttcatattaaaataactccaagtgtaatatttgaatctgaaaggccgctttagagatgagccagatgggccagtatcagatagcacaggaatgggcaaatcattgctgttgcttcaggcaaaagaagaaagaaagacctgctagtttttctgaggattttttgaggtttggggtttttttaatgcgttttgtgaaaattttgcaactcatttggcaatagccagatttttaaagccctggaagaagcttctaagcatcggtgatccatgttaagatctaagtgtgctgtaaagcaggcagatggggagttaaaaggcaaagcccacgttctcctgatctagtccagagcccaaaggaagctgccgtgtg

SEQ ID NO: 59225 - DNA, 2045 bp, Homo sapiens
tcttgaccttgctagttctttcattagatctgcgcaagatctagtcatctggttaaggattttaagcagatgcaactataaacccaagaaactgtattactattactgttggtcatactaaacctgtctatttcctgaagtatatgacccacaaggatgtggaataactaggagaaactgtttttgtacactgtacatccttagtatttttacacgtatatgatagggatgaacatgattttccttcgtacagacagcttaaataaagcactatgtcaatctgctacttctctgtttattgttgttggatgtggttctataatccccccaaattaaatcttctttaatgaaaacatgatttttaatagccccagctggtattaacctaccttgtataaaatgtgacaggaaaatatagaaataattccttgtagctcacacacacacacataggggatcatttttacttcagtgaaatggcagtagtgcggttgtgcaaactttgatgaacggctgcttctgaggggaaacgctgacctctcagcactggatttaggatggatgtactgtgaagccagggatgaaggaggtctcagaccctggggacattcagacccgaatcatctatacaacacacggtttggacccagaatctgaaggaatgtagcttttcattaacgtcttcctgataatgtactgctctgcatatttcctttcttagagtgtatttctaacaacatgtcatggcaaattaacaaacttagacgtgggtgatgtagatgggtaggatggctggactgcagtctgacttcacgttgaatcattctggatggggcctttttctgattttacctcataaagctactattgtagaaacttggctttgctcctgtgacgaagccagacagaggaatggcttttgggaccagagtgagtcaagcatgtatgtgtatgtcacacggccaaatttgagggcattctcacatgtgctcttctctcaaaaccactggggttgacagatccaggaggctaaaaaaaagtgacctctataattctttaaaggtgctatttttagaatattgtataatttattcacagtatatctaaaacagaattaaggacaattaaaatatcttatgtgacagcctttatgtctagcacatttgatgaaataaaaaacttctgaatctgaatagaagttctactgtttcaggcttgaaccttttacatgctcaagagattcaaatggtctctgtgtgtagatcatgccaccgcctccaaagcctaatccacatcacttctgagaggcaaggctgagcatatggtgacatcagctctgtgttgagatggtgatgaggatgatggctcgctggccaggcagggcagccgaaggtcagggacctgtcctaactaactgcagccttgcctttagtgtttgtcattctcagatacaacacggtatgtccagtgtccgtttttattactttaaagcatttgagggcttaattgtgtatagtagaaatactattttagacaaataattatctgtgtacagatatttgatatactctaagtaaattttctaatttcactaagtacgtttttaggctcctctcaaatactgcgtattgaagaaaaaaatctgacaccaccgagccaaagatgcttttttgtctgttttcgttgtttaacagaatggaaagagtaatgcatagtgcttcctggtgtctcctgattgattgattgtgcacaaagtaggacgataaataaataaaatggagtctgatgggacattgattaaaggtgaaggatgattgatatatagatcatgaaaagaaaaatgaatggcaggaaaaaaagtttggtccttaatatactttggcctagttaaaatatgtgcctttttggtgtgttttgttcatcactacaagataaaaaggaaacattacaactcaagtctttaaaaagttcatttattgaaaatcatatgtataacctagcatacgaatgagcagatttaaacacataacttcaagccatttctg

SEQ ID NO: 59226 - DNA, 1077 bp, Homo sapiens
ttggtactgaaaatgagaaaatccccaactatgcatgccaaggggttaatgaaacaaatagctgttgacgtttgctcatttaagaatttgaaacgttatgatgacctggcaacaaaaagtaatgaagaaaattgagacctgagtgaagataagaaatgatctttacgtggcaaaatgaacacatcttgagtatttaggaaatgggcagtgaaggctaagaacctggtgtgtttcttgggatcatggtacatttatcactgaattaagccatcagggaaaaaacaacaaaaaaagagaacacctccagcttttctttttctgtatatactcatgtcccccagattccaacatttctcactgaaagggggcatgtatgcaaacctcatctttctccttcattaatgatgatcttcagattaaaccctttggtgctaggagctgacaatttccaaagcagcctgtgaagtcctaggggctgggggccactcttgcggcaagcagaaggccatcctactccgcggagtgatcatggaaatgtattttagttaaactctgacagctcccaaacggaagactacagcatgacgtagtattatgattgcattgtatgaaagagcaagtgactttctaagtaggatgaatcatattcatatgcagatgtcttagcctcttgacgctggaagtgtggatttatagctatgaaaccactgctggcagtgggtgggccactgggactgacgggggttaaagggcattttactaaggcagctaagacatattcagacatcaacgttatccttctttttcatatttctacctgagtgaagttcatccttagtattgagtaggaagttacagtaaatggtagttcattcttacttacacacatagctaatcttttttttttcacttggaattatgttgaatgtttcattttgacaaaaaagtagactagaaggtatgttctttaagttgtcttgcatccattatataagaaagaaacaggtgagaggaagagcagaaagctgagactggctgatgttcagagcacttactcctctagagggaaagcatgac

SEQ ID NO: 59227 - DNA, 1080 bp, Homo sapiens
aggtgagttaagccagatgctagatgttgaatgaaatttcataagaagctttattttgcagttgcacttaaagcatcacaaagaaaaaatataagcacttgaagacattcgatgatgaattctatacagactttggatgctgtggatttcactgacttgcagttttgatatatgtggttacatgaaatgaaaggttactgaagactgctccttcttaaaaacttctgttttcttcaataccatttttttcactgtttcattgagtcttgaaattttgatgtcttagagatgattctatagtattatttcttcatagactatgtatttatgaaaatcagatgatttttgaagtataattactctacagcttattgatgaacacaagtttatgggagctattgcctctgttcatctttcctatgttcagagtttaaaaaacatagactagagataatgttgcaaaaaatgaatgtgtaaaattaaaatagatgtttcctgcccacagatgatgaggatggtatggactgcatggacaatgagaggcggccgcatttccctcaattttcctactctgcaagtggacgagaataagtctctttcattctgctacttcactgtcatcttcaatttattactgaaaatgattcctggacatcaccagtcctagctcttacacatagcaggggcaccttccgacatcccagaccagccaagggtcctcacccctcgccacctttcaccctcatgaaaacacacatacacgcaaatacactccagtttttgtttttgcatgaaattgtatctcagtctaaggtctcatgctgttgctgctactgtcttactattatagcaactttaagaagtaattttccaacctttggaagtcatgagcccaccattgttcatttgtgcaccaattatcatcttttgatcttttagtttttccctcagtgaaggctaaatgagatacactgattctaggtacattttttaactttctagaagagaaaaactaactagactaagaagatttagtttataaattcagaacaagcaattgtggaagggtggtggcgtgca

SEQ ID NO: 59228 - DNA, 1006 bp, Homo sapiens
ccttttctttttgattccttccctatatgtcttctcctctcattccttttttggaggcagatttatccatagtgctgatgtggactcagtgtccgggagaggggcgattggaggctaatgctgtgccagagatggtcacaggcagcagattctactgtcgagaggcaaacaaggggtcatgtgggccaagaggtcttaatcttgggaccatggtctggccacaaggggattgtgaacaccctgaaagtgaagatatgatgacgtgtgtgtgcttttctttctttagattcacaaaaagttaaggtgctccaggtcctgaagttgggtcagccatagccagaagcagggcttaccaacttgaccgatgtccaggctaagttgtgaaataccaatccattgaagtgagctactcatggtcagtcctgtggtgaggcagagtttccactcaatcttgtgccattgctagaattttagaatcactaagagtcacagacaatgttggaaagcctgtggagtcatgggcaagtagctcagcgctgagtagaaatcatgggcataggccttggcctctgtccccagcatagactgtggcattagaattgtccaaaatgctgggtaacaccagtgagttttcggatcggcccatgggcagttcctgccatacagcctttgctaggccctttcatttggatataatcctaactgtaatcagaccacatcattcctctgcttaaaaccttccggtgccatcccattgcactctaaatccaaacttgctcacactggtttgcacagcactgactgatctgggccctgtccacctctctgacctcttcctgttccatcttcccccactgtccctgggttccagccacacctcgaacatgccacacgtcaccatgcctcgggctctggggacagtatttatggtgtccaggcctggaatgctcttcttccctgatcttacttggatggctccttcttgtccttcagctctaagcttaca

SEQ ID NO: 59229 - DNA, 1004 bp, Homo sapiens
attaagttgtatttttattactaccctcttcagctagcactagaaagaggttgcccgaggaagagcccacatcctggcacactgctccccatcaatatggttttgcatgtatgtttgttattggggaaaaaaaccagcacagatttttcaatatccctctcccgtcctattcaatggttttcttttgttgtttttcgtgatccattagattttatacagaaccaccaattacccaccggttggtttagactgttgactgggaagccaaatatcatgtctcccttacccagcgactcagcattgtagacttttgttctgttcatttaactacgtgctctctgcttttttcctagaaaggaattttcctgaattgaaatcagttaataaaactctttttctttctttttacagcttgtacctccttttaaacctcaagtaacatctgagacagatactagatattttgatgaagaatttacagctcagactattacaataacaccacctgaaaaatgtaagtaaatttagaaggcaattgataaatttctaatataatttctcctaatgtaattgaagaaaacagtcttttaaaaactcatctgatattttcaagatcaaattccacagtgacttactccattctatttaagaatattgaatattgaattgaatttaagaatattgagttcccagtggtaatatcaaaagactgcaagaaatgcttttctgggtaggacaaattatatagagagaaattgtagatgaaattacagactagctcttccttactgttcaccaatagattgttttgacaccaactgaaaggattgtgaaatagagactcccctctttcctagacttcgttcattcccacataaccttcagaattttgccagttttggtctcctacttacttaatagttttaaaattcatgtagagtcactcctttttacttagctctctcttaaatagtattatctgtgaagacataatttagtttgct

SEQ ID NO: 59230 - DNA, 1050 bp, Homo sapiens
tgacacgcagcaactggattttttcaagttttgttggaatagactcttatggagaagagcctggaaaagggaatctcattaagagactactgcagtaatacagtgttaagtgacagagctcttactaaagcagaacataggcaacaaagggaaaggaagtgtgaattccatagaaattatcaagaaattgaggactcctattttagtctgataatactggggaaaatactgggagaaagtttaaggaagaggattatagctggtttttggtaattaatttcagatagaattgtctaatggctagaaatatagcacttctgggagttaaaatggaaataaatatgtctggaaattcagagtttaattagagctgtggaaatgattaaggaggagagggctaaggaaatggataggagagagggaagagaaaatttgaaagggaagtcaggagggagggaagcagtgagaatgtggaaggttgggattgagtgctggaaaatattcatggtcaataatggaagttggtttgaggacacatttttgcaaggtgtatcaagatcatttgtgaagcatcgtgccagagttgaagtggaactttcctgagttgtgactttctactttctggttgagatattcagcctgaagagttcggtgattgatggcagttacgcagaggttaatgattgtaagctactgctttacaagtgaagcaaggccagaggagtagaacagatgcaccagcggaagagagatgaaaggctgaaaataggtttctatttgatacttcccttatcacactcaaataatggcccacttttaaacttggggtcaaagaaagatgtgttccaaatacctgctagacattctgatggctaagccttacaattagtgtcttcttttggtcatgaggcattgtacttaggatataaaaacacaaacagctgtcaaaaccagtgttatttctggcataaaatgtatacagttaaagctttaaaagccttcaaattgggttaggaaatataactagatgttccttacaaaaaatctcac

SEQ ID NO: 59231 - DNA, 1054 bp, Homo sapiens
ctggatttgaactcctgggctcaagcaatcctcttgcctcaggcttttgagtagctgggattgcaagcatacatcactgcgctcatctttacctccttatcattaggaaatgttcttctgtatagatggcagcaatatttgttttgacatctacttcatctgatattaatataagtactccacctttcttttgcttttgtgtaatatatcttttcccatcattatacctttaacctatgccaattatatttaagtggatattcttttagacagcatatagtcaattcttgtttttctgttattcattagaaaatacgacttaatgtaatgggtagcccgttttcatttaatgtacttaatgacatacttgggtttaaatatacaatcttgctgtttgttttttttttctttgttcctttttttctctttgtctgccttcttttggatttgttgaatattttatggttccattttatcactgctattgtcttcttgtatgtctgttttattgtttggaggttgtttctagagtttgcagtacacatgtttaacttagtctaccttgagtcataaccaattctcatacaacagcatatttctgtttcctccatctattctttaggctattattttcttacagtttactttcacatatgttaataaacaccacaatacatggtaatggtaattagattttgctttagataattatattttaaagtggttgaaaatgctacacattaaccattattagcactctccattcctttacatagactatgcttctacctgccgtcattgttttcttgattataaggctcctttaactccacttccacctccctgggtttggaaaaattcatggaaaaatgtgtttgaaggaatacaggattgggaaatgaaggaaatgggacatttcagaatgggaaaacaatgtgagaaaaaaaagtagtaacaagagaagtgaatgaagatatgctgactggaggaactgggaatctgtggtggatagaatctggatgtaaacagcggacaggtggcctgtgaatacact

SEQ ID NO: 59232 - DNA, 1197 bp, Homo sapiens
aatatcttacttcaaagcatattttgttattatttttgaagtcttaaattgtatattagagagtcattgacactgaaatttttgacagtttcacacattgaagaagtgtgttaaagaatttctcctagcttctaaaatggaagtctgattgtattctcagactttgcatagtattcatagctgatattttagttttatatgtatttgataaatatagaataaatgctggctatgttcaaaaccaaagtattgctagaaaacttgaggagttacaaaaatggataactaaagctggattaaaacattttatttacaaaatgattatgattctccactccaactcccatctcaagtacaattcaaatgaaaacagtattgaaataaactacaacataagtgtaagaaaatgccatggagctttgatgtttctcatgcagactatgttgacgcatgcttgaaaatattaaatgcttttcagaaacgtgttttggtgcttttgcttctctggttccccaagcacaagcttagaatgccttttggataatccagcactgatcttgccttcaaaggagtttgcagtctcctgggaaagaaacctacacaactgaaatagaatgaaaaagagggcagggtctgaaatgctgagctctcactgaacacagaactaccagtctgaaaattccaaatgcaaacatcgaacagcactattatgatcaaacctaaaagtgccatctctggggtatagttcatttagagaattctataaggatctgggagttggagacccagctggtgggaattatttatcatcactaaagatattcaggtatcagttgactgttttccattttaattgtgtgtcaaaggatactaggtccttcccagtcatgtgtttcttagatctaataaccagaattcattagaattatataattataaatgatttctgacctacgatggcttgacaattttttgactttatgatggtgcgaaactgatgcgtatttagtatgctcctcaactaatgatggaattgcatccagataaaaccatcttaagttgaaatgtgggcttatctagacataacccatcattaagtttaggagcatctgtatttgttttctatgacgtatttggttttcttccaacccagtggtgttttggagttagcatataccagctctcaagaaccaactg

SEQ ID NO: 59233 - DNA, 1053 bp, Homo sapiens
gggatagtataatcagatttgtgtcatgaaaaggtaactctggcagctttgtcatggacagattagatgagtgaggatccaggggcaggcagagcagttaaaagtgtttatggggccaggcacagtggctcacacctgtaatccccgcactttgggaggccgaggcaagaaggtcacttgaggtcgggagttcaagaccaacctgggcacatagcaagattcatctctactaaaaaaaaataaaatgctgggtatggtggcacatgctgtagtcccagctacttgggaggctgaggtgggagaatcgctggagcccaggaggtcgagactgcagtgacccaaggtgacaccattgcactccagcctgggcaatagagtgagtccctgtcttttttttaaaaagaatatttatggaattgttcagataatagatggattccttcctgaagcagtagtacacaagtgatagaggttatgattaactagaaactatgaggaagtaggaggagttaggaatccctctgaggtttccagctagggtgattaacagacagggtatgcaaaccaaggaggcttgatggggctagatgttgataataactttgggtacactgagtctgaagtttctatataaaaccaagatggaaatgtcaagtgagcagctggaaataatagaatgaatgcttaaaagaaacacagtaactgactacatggattgggaaccataactatatctaggaggtagctagagccaaggcagtagtggcaagggtagtggataaggagaagagggcctaggacagaatcttagggaacctcagtttcagggggagaaagaaaagaaagctaacaaggaccttgaaaagcctttggaaacataagtaatgatagcattataatacacctcttcattttttctacgcagctattttaaatactactggaatttttctggtatttcttattgaattgctgttagttctatccaagggtcaactatcattttgcttttatttcttagtctccatcctttctgttcattctgttagcccc

SEQ ID NO: 59234 - DNA, 1180 bp, Homo sapiens
gtgcccagcagtgactttaaaataattgatactcactaaatgaatgctgaattgaaaagttggttcagagccaaagtagaaactgagaaggattagccagagagttaggaggcaaatcaggagagagtcatattaccaaagcccagaaatgtgtttcaagaaagagggcagtaggtgatgtcctaagcttcagatttggaagaagcagtgcagactgtaaatagattattggatttggcgattaagaggttgttggttatcttaacaagttccataaagtagtaagggtacacatcagatagcagactgagaagtaaattcttacccttaaatataatttttagctgatatatttatagaaattggctggcagacacattgaagatacatagtctaaataaagatctagaatcttgcatatattatatcgatttagggaggatccatattttttgtaaagttaaatgagtgggtaagtaggcttgacattcttttaagaaaatttagaaacctaatcactattttcatctcattagaagactactgcaactccacatagagatcacacgatcttttcatcaaagttagtgatattttgcatggcagaaattattttaacctggaaaacatggctccttctactttctatccttgttaggctggtaatacattgataatatatatctaactatatgaaatgaatgaattttttaaaatatccctgagtaattgtataaatgacttgatttttcacatactgtatttgattatttggaagacatacttaacatttctgtaatcagaatgccttttagaatagatcatgtgttatagttttaactgacaaccttttttaccttggtgttttataaaatgatgatgcagtcccaattcgtagcatatgagatttgataaaatacagtaatatagtaggaagcattaaagtttagagactgcaaaatattttagttttaatataattattgttgtgctacactttttggggctataggtgatattttctctctctctctgtttactatgccaatgggtcatgcataaagcttatcttataatatgctgttaagtgaaggtgggggtgggaatggggaagaatgaatttatagggaacctgttttatgttacttgaaataatgactttggtgtatgcagaacaaat

SEQ ID NO: 59235 - DNA, 1679 bp, Homo sapiens
gtaacattttttcttttttttatttcaagtccttgaaatattccttccagacaaaagaccgtttgtgttttgtgatggaatatgttaatgggggcgaggtgagtcaagaagtaaatccagtatttgcatggtagtattttcattattttaaaaacattacttaaaatacaagttacaatatagcagttctccatttcttgataggaatttatgtagctcttaatactattgaacaaatgggagcgaaattatttctgatgagatgtaatgattgtttttatataactacatttatatgttggaaagcataatcatattcttctttttcctgtgtttttaaatgtaaaaagttttaacagaagtatgatttttgaaatcatgttattaaattttgaaaaccagaaatacaagatttattgtttcacaaagtttcttttcaagtaggctgtgaacatggtcaaaagttattttacccattctaaactcagtggaacaatagtccatgggcacattatggctgagttttctcttctttatagtagagtactatgactatatatatatatatgtgtgtgtgtgtatgtatatatgagggtgtatatatatgtgtatatgtgtatatatatgtatgtatatatgtatatgtatatatatgggtgggtatatatgtgtgtgtgtgtgtgtgtgtgtgtatatatatatatatatataatttttttttttttttttttgagatggagtttcgctctgtcgtcaggctggagtgcagcagcacaatctaagcttactaccacctctgcctcccgggttcaagcgattctcctgcctcagccccccgagtagttgagactacaggcgcgcaccgccacacccagctaatttttgtatttttagtagagatggggtttcaccatgttggccaggatggtctcgatctcctgaccttgtgatccatctgcctcagcctcccaaagtgctgggattacaggcgtgagccaccacgccgggcctaccatgactatatttaagagactgacaatattttggagataaatttaatatttttattagcacatttcactcattcctttattccttctcctttctcttccttggttttgatcacagtcaatgtgagggaaaagtaaatttactggaaaagctaactggaaatatttttattgtgggctttctgaaataaatttaattattaaatagggtcttgtttgtgtctcatgaacttaaaatattcttattttccaaaataaataattaaatatcctttatggaatttttttcctgtagaattatctgatttgcaggaattcgtttgttgcaaaacttcattcattcagggcttgcatggtggctcagacttgtaatcccagcagttggggaggctgaggcgggtggatcacttgagctcaggagtttgagaccggcctgggcaacatagtggaagcttgtctctacaaaaaataaaaaaattacctggacatggtggcacacacccagctcctgtactcccagctactgaggagctgaggcgggaggatcacttgagcctgggaggtcaaggctgcagtgagccatggtcatgccactgcacttcagcctgggtgacagagcattacctggtctcaaataaaaaaaaaaaaatcaaaacccaaaacttaatt

SEQ ID NO: 59236 - DNA, 1055 bp, Homo sapiens
gatatttattgggaaatatatcctttcatccccctgaataaaatgtattacaaacatggagatattaaattacctcatgcagaaatattagttgataaattgttcccttcaaggaggaaagctcaatatttaattttctgtgtccctgataattttctgactgatttttgtatcattattgatatactttgattaagtatgagtgaatttatatgaacttatacaatcatctgaattaaatcattaatttgagtttttttgtattttggtggagagaatgctgagtggtaaaggaagcatgccactgtgttttaaaatccttttcaatctctgggcttaacctcttccaattttagagaaatagtgaaattattattatcagtgctcaaaacatatattgaaggtttgctttttttcttttgtaggatgaagtggcacacactctaactgaaagcagagtattaaagaacactagacatccctttttaacagtaagtgactagaggacagatgttataatcgtaacatttgaaatttaaggaattttatgttagaaattaaattgtgaaaaatactattcatttagatatctcattttctttgtggaaagaacgtaagtcaaatttcttataacttattagaatgtatggatttttacagtgtgtatgcattgataattcctcccattatgcatttattacttttttgagaattttttttctcccatgaatctcttgccattaaaaacaaaaacaaaccatagagttaatacattacctctggcattttaaggagactattgaggaaatggctgatttttaaaaatttcttaaatgtaaagattttatgtttgttttattggcttctgataaatatcttaatgatcagaagcatttcttcaaatatggaaggcagaaatgtttatcgaatatattttatagaaatgagacttctttgagggatagagtactttaagaaatatgggaatgctaaatacattagaggtgggataagccatgctacgtttttttcactagacaaagtataaactgatt

SEQ ID NO: 59237 - DNA, 1010 bp, Homo sapiens
tgatccttcttagaagaacgtgagtagactttcacaaacatgtcacccccaccccatcactttctctatgtcccacaccatcacaatacccaacttacactctaccaatagcattggttctcccttacagccccgttgacaatagtggataacctccactttttccttaatatcacttatcagaaagagtaattatttaagttggataatttacttgtttgtgttttccactagcctatgaactctgtgagcaatgggatcttattttttttattaagttaccttataccagcactgttcttaccaattagtgagtgcacatcagcagttttttttttaagtgaatggacttggttcagtatatcacaaaatagccacttgtataatgcttaattatgtatttcatattccctctgtgatgctcattaactgtagtatccccttctctggtttttcccattaacactgatcaccatgtaagtagaactaaagctccatgagagcagagaattttgtctatttgttcagtgtcctgtctctgatgtgcagacgaatacccagaagatacttgttgcatatgtgttgaagaagtcggtgggtgggtgggtgggtggatggatgaatgaactcttgcacacttgacatcttggaattctttcctatgatacacaattcagttcaatagacatttattaggtatctgctgtatgcttaccattatgttaggcacagtgtatatggaaatcagtaagttctggtgtcatttctgcttctgatttattttgttttacaatgtttgctattctaattaacttaggaactatagtacgatatgacattggctttcaaattgagcacttaaaactgactcctataaaacaaataagactgagatgatttcatgtttatgctttccttcactcgttgttaattatactttctgttcagacacaattgatcttaccttctttgaatggttgtgggatcttagcttctttgattaatctagt

SEQ ID NO: 59238 - DNA, 1235 bp, Homo sapiens
aggggactgtagagaacaagtggcacgtgtgactggcaaaatcctcaggattacctgacttaagaaagagaagtgaaactgaaaacaggcacattaattaaagatattcttcttagagctcccttccttgctgttctgaattgcataaagtactctctcaggaataacaactgctttctttgatttattttaactgaagtatacgaggttctcgacatttcttataaatatatcctatatctctctctttcttggattttatctttattttgctagagtaaattctcagatagctccttccaaagcactgcttttttaggcatatttggaaatgtttgtgtggaacatttttgattatcacattttctgggggtagcagcactactaaatccttgaaaacttgagtccttaaaaatgagtgaaaataatttttttcctcctttgcccttttacacaactgataatttcgctgaggaattctaggttcaaaatcattttctccaacatctgagaactgcttaaattattttcagcatccatggttgctaatgagacagccaatgccagtctgattctttttcatttaaatgtgcttataaattggtaaaatttggttttgagtggatattgcaaacacatatatatatgctaacaaataaattgcatcaaatacttcatattatattttttaatttgtatttttcagacaatgaatgattttgactatttgaaactactaggtaaaggcacttttgggaaagttattttggttcgagagaaggcaagtggaaaatactatgctatgaagattctgaagaaagaagtcattattgcaaaggtaactgatttattaaagttgattactaaatttttgtttgcagtgtgcatgtgtttgtgggctcatgaatttacatgctaatgtatgcaaattccattaaacaaccaaaatatggttgtagactactgctacagtaatttttgtgtattaatatttgtaatttttaaagttttcagacattcataatatttgtatattatatactaaagctattctcttaaggaaatagaaatgtttatgtttgcatgtttgggagaatgttttgtgatctatatcataattatactaggattgctttttaataatttctcctatcgttctgaatttcttattaagattgactagtgtagatgatttttactcataaattctaaagcttatataacattgaatggaa

SEQ ID NO: 59239 - DNA, 1049 bp, Homo sapiens
ggctgagacaggagaatcacttgaacccacgaggtggaggttgcagtgagctgagatcatgctattgaactccagcttgggcaacagagtgagaccgtttccaaaaaaaaaaaagtaggatatatatatgtacagacaaataaaatttaacttttcatgtaaatgattttaactcgagttttcaacaatttttttcttctctttttttctttaacatacttccaaaaaatgctactacagactttaggcatgtggtgaatgaaatgctcttaggattattttcactttggggtgatggtgagagtgtatgcttatctgtgttgagtgtgtttgatctctgaatagattttatttgtattgatttcatagtttataaaaggaaaatatttaaatcatttaccatcttctattaatgggaaattttactcatttttatagggaagaatggacagaagctatccaggctgtagcagacagactgcagaggcaagaagaggagagaatgaattgtagtccaacttcacaaattgataatataggagaggaagagatggatgcctctacaacccatcataaaagaaaggtagaaaataataacttattcccagcacagcattcatttgtctggaagaaacatattaaaagctaccatttgcagaaagatgtcagccagttttcttacgatatgtaaatatattggtgggtcttattcacatgaatctgaaatacctgttgttgtttaaaaccaaataggtgaacattgtttcagtgatccagcactttagcactgaatgctgatagggctcatgtgtgactgatgtgccatcacactactttataatttgcattttttccttattatttttaatacaattttagaaactttgtaataaaatgttttccctgatgatttgttcttttccatttcgcatttcgtattctcccgaaaagcacgagcagtaatggctcggatgtacttcctgattggtgccctcagtcatagtaaagtcagcaggaaagtgaacaatcttggaaacaataactcttat

SEQ ID NO: 59240 - DNA, 1017 bp, Homo sapiens
ttcagtacatgatataagggtggactctatttttttctcaatggcgagcccatcatctcatctccatttattagataatccatttttttctcactgattgtggataacacatatacatatttgcgcttttaggatttagtctttttttcccctttgacctttctgtactctagcattaacaccacatggccttaattagagaaactataaaatttttaactgttaatatagcaacatatcccttattttttttaacaaaaatgttcttagctacattagtgcattcttttaaaaaattatggtaaaaattacataatgtgaaatcctctttcatttttaagggtataatagagtattgttaactatgtgcatattattgtacagcagatctctagaacgttttcatctggcatgactgaacctctgttcccattgaacagtagctctccattcccatacccccagcccctggaaaccaccgttctactttctgcttctgtgaattcgactactttagacacatcacataagtggaatcatacagtgtttgtcctgttactgtcttacttcccttagtataatgtcttcaaagttaatccatgttacagcatattagaggattttcttcttttttaaggctgaataatattccattgtatgtatataacacaattgccttctttcttttttttttgagacaaggtcttgctctgtcagccaggctgtagtgcagtggtgtgatcatggcttactgcagcctggaactcaggcccaagggatcctcccagcttagcctccccagtagctgggactacagccacacacgcaactaagttaatttttttttttttttttttttgtagagacaaggtttctctgtgttgccagggcttgtctggaactcctggcctcaagcaatactcctccctcggctggaattacaggcatgagccacactgccggccaatacattttctttattcattcatctgctgatggatatttagattgtttcca

SEQ ID NO: 59241 - DNA, 1022 bp, Homo sapiens
tctcttgggcggacacgttgacttttggggtttcagttgcaaccttgtgtgcagcttactcccacacttaaatctctaggctaggcctctctcctgagcattaggttactctgttcaattggctgctggacatctctacctagatattttttgaccaggtacgtcctaagataaactcaagataattttgtctatttcttcctttgtactcagtatctgagttctgtctctgcctgatcaaaaacatggatcctttccatgccttttttttctccttcacatctttaccccactcccaatccatttctagtcctgctgattctgcatatttcttgaacctatgatccttttctataatcaccccagaatgaggcctcatcatatctgctgtagattcttaactagcttctctgtttctagtttgtaccactcatactctttcttcacgcgggtatcaaagtggtctttctaaaattatatcataactatgccattcccctgtgaaagccctgccttggatcatcattgcctactggataaagttcagctttcttaatacatcatagatctcttcaatctggcctctactttcaactcttgcaggatctctcttctgctctacaattatgtatcagcaatactgaactgtttataattccctgtacaacctatgctgcttttccactctgaggctttgtttatgctgttcccttcgattggaatgtcctttggtcctctatttgcctggatacttttctaagacttaattcagattttaattcccatccctattccttgctaaattagtcctctctgcccttcttaaatctattatcttctgctgttaacacattgtttcttggttatcttgttcctgtgcatgtctcattcactgatcagtaagttattttaggggaaagagcttagtcttatttatcttatatctcctagtgcttgtattttatgacttaactttttaagtgaacatctgaaacatctagtcgagatttctctttttttag

SEQ ID NO: 59242 - DNA, 1118 bp, Homo sapiens
atatatatatatagtggaagaggttgggttggaagtcttaaccagttgtgactgcagtgcttgctgaaggtttatcttgacgatacatttactatttggatgtatattggtgggtgtccattgaacaatctctttgggatacttggtacatcataaatgcttcttttttgacaagactttccattttaaccaggttgtgttttaaattggttaaaacctatgggccataaacataaaagtatgatgcaatttgggtttgatgcatcatgtgtaaacttagatgcaaattctgtgtttaaaataaaagattgacttttagcagtccgtcttaaaaggattggtggcagggagtgtactttgttctgggtacttagcctcataaaagctaggactttctgtccatattttagaacaacctgacaacacgtgccttatctgaactcacactgcctcaacttctgagctagagatgaaagtgttcagttccttttcgaacagctaggcacctgaaatctggtataatactggaattaagctctattaagttgtctttttttttttttttggtccagcctctgtaacaaattaataatgaatgcattctaagcatcttctcagaaagttaattcatattataggtgaaaaatgacaagaaaatagatttagtagtctttattggaagtttgagatctacttctggcttagtatcacagtataattgttgattaaccaaatcaatttaaaattatttaaaaagtttgtgagaaataatacttttttaaggaagaagggaaattctttaaaatttttcttctatgtgagtgagtacatcactatcttggtatactgtattacgtttgaaggatgcataatacatttatttttaaatagctttttggcaaccagaagtcctgctatagatcatagaaaatattttaaaagtttaaaaatctgcttaataaaaaagatacaagatttatataatgatgtttttgtgtttttcatctgaggatgtacatagagggaaattatgcttagaaatgaaaatttgatttcttttaattttacatttcttgaataagtgtattcagtactattttaaaagaagaagaaatggt

SEQ ID NO: 59243 - DNA, 1066 bp, Homo sapiens
attgcccacctctgtggtagtttcttgcgttatggactcactgcttccatatttggtattcattaaggttatttactgcagtgtatatgccatgtatgatattatatttagataatataaggtggtaaaatgggaaatatttacaataaggaagttttaaagtttctgatgaaattatatttttaaattggtctatatttataatagtttaaaattctatgactactttttgaaaatggtgcaagaatgactttgtgttaaatccggtgtgtggaactggaaactctgctctaatgcagtaaacagatttttaaaaagaaagctctgctttcacagcctacaagggtgcagatgtaagcaaaataataacttagctcacacttaacccagcaggaggctgcgtacagattgagtaattctccacaacatacctactgctatgtaaactaaagtcaccgtttattcttcattaaattgccaggatgctttctgttggctagtccgtgtggatgctttgttctctgtgtctccacccaatgcccctgtgccttccttactcaccttgcttttctcttagagtaaaactgggtactgtaactctattaagatgttattgtgtttaagagaataatttaaaagcatcactttggttaaaaatgtaatgtttcctaaaaacaagtggaacaaggatttgattagtcaatttaccgaatatcatgaaacaaataccagaatacttaagggtagatgataattatgcagttttctggaaaacaaaagaaaattgtaaagcagataaaagtactaacaaaccaaccatactgagatcttagagaagttgccattctaacatcttgtggttggtattcaatgcataggtatttttctcatcatctcatcagcttcaaagcaaaacatggaccccagctttctttaggaagccgatatgaaaactatacttcataatattgcttctcggacttttggctaagatgaagtgaaaactgtacttaatgtaaaaatgacaagttcatgcattatgcattagaatgagagtttcttgact

SEQ ID NO: 59244 - DNA, 1541 bp, Homo sapiens
tattaatgatatgttacttctgattctttcagagccatttgctaaatcttagtagtacaggcaagtatacatattaaggtgattgaaatattaaaggcagaatgtctttgaagttacaaagaccagatttaaatatcacttaacttagatgagtgaatttactcatagtcacttaaactatttaaatgtgaatttcttcatcttttgaaagaaggaaacaatacttgctattcaaggatcttgtgaaaacaaaatgagataatatatttagaatgtcttgaatgaattcagtagtagctgttagtatttttattaggtgttatgtgcaagtctagagctctgtagctattacaattggagtatttatataatgctctgactatcatagaataagaataccaagctgtagaggctgtttgagagaatggtcacagatagaaggttgtttcttggaaccttatgtttatttagggatatatgattgttttataaatgtggagggaaataaattatttaaagaaaatataaagaaaacagttggataaaagtatttcggatgtatggtattagtggttatttagtgatgatgatttcaaattttgttcttttgtttgtttgtttttgagatggagtctcactccgtcacccaggctggagtgcaatggcatggtctgagctccctgcaacctccacctcctgggttcaagggtttcaagcgattctcctgcctcagcctcccgagtagctgggactacaggcacgtgccaccacacctggctaatttttgtatttttagtagagacggggtttcactttgttggccaggcttgtctgtaactcctgaccttgtgaaccacccgccttggcctcccaaagtgctgggattacaggcgtgagccactgtgcctggccagctgatttcacattttgttctacaaaattatttttcatacttaaaaaagtaacctcagtttattttggagctgaacttttctctgctacggccagtacttaagctgtatttgggttattatctttaaaatgagactttggaacacctagctaaaaataatatttcttctcctcatggaggtttaaagcattatttgattgtcacaactctttattttgcagatgaagaaactaattaagctcacatagggatgaaagtgctgagataagcagaagtgttttcttagagaagtaaagaggatatggctttggtcgacatgaggaagtcagtaaacctaaaagtatgattaattcccatacagatgtaggtggtggttctttacatttttcttttcaaattgttttcatccggcattccacgctagtaaatattactgaataattttggatgatgagtcaagggttgttgtacctgggagagccacctaatttagtatttaagagtctttcataggacggggtatagtgactaagaacttctattttggtttaaaagaataaattggttacactagaaaaataacgctcacttttgaatggagtgctagtagcttcatataaggatattt

SEQ ID NO: 59245 - DNA, 1541 bp, Homo sapiens
agtatgtcagttttagaacatagtttatattgagtaaacacagaatattttacctaaaagggtcacacagatgtcattacagtgaatttacttctgattaaactaatcttgttccctatatattttgatatatattgtgccatgataaccagtgtactattagtgttattaaagtctttcttcaaatagtagatttttatagaattttgaagtagacaaaataagtcaatttatgtttagatttaaaaaaaatgtgaaagcttttctatattctcctccccgtgccagataggtgcttggcacagagtacttaataactatttaataaatgacagaatttcttttcctaaaatttttaggacatatgcaaggaaatttctcttgcatctaggtttactgatgtatatgaggaagagttacatctgcttcagtgaaatacaaaattaaaccaggtgatctttctgaaaaattattcttatggtgacatatcagaaatcttatcaacagctatagtttattctgttggaattttcaaaatacactgtgccttaacttagaaacactccaatgaacttgtattcattagtgttttgttgagttaaagaaaaaatatctgtacaaagtggacacattgtttaattttgttttgcattttactagattgcagtgcaaggccaataaattaaacctaggcagttctcttgctaattacacacaacttatcttgagtatcagatattcaaatccattttatgaatatggtagagagaataacaactgtaaaacaaagcagtgtgcatgtaagtgactgttagcgtgcatttcagaaaggataaatgctcaccatatggtacaattactgtgtccaagttttcaaattagcttctctcatcctccttattactgtctttaaaaagagaggaaaaaacccaacatgatttatctactctgcagcagaactcttgacgcaaaacagcagcccagttctgtccagtttttttttcccttagcataatagaggctgtcggacttttttatactaattactgtgtgagcctcagatgaacccccttcaattcacagggctttgttaagggaggagctgtcaatgtgtctgcccgtttgcagctgtgctgtggctttagcttgcttaacattatgctgctttttagacttgacagaagggattttttttttttttttttttttttttttattaaggcaaagcagccttgtagcgaaatggtttaagcagctgcattgtagggaagcacaaagaagttattattgtgtctgtttaggggggtaggatggagggggagatattcggctgctgttgatgccgattgttgacttgccatctgccagatagggagaagaaaaaaatgacagctccagcagggtgttcaagaggttgtttggagagacgcataaacatgtgcagatgtcgaactgaataatggctagaacttgagacggtttatgatgctgctgatgtttgtgcatatacagaatgaatgtatgtgtggatttggttaacc

SEQ ID NO: 59246 - DNA, 1013 bp, Homo sapiens
caatctagactgttttttgcagctgtcttggagttaggtgtggccatacgactgagttctggccactcacatgtgagcagaattaacgcatgcctcctctaggcttgggtcatgaacatctgtgttcagtgttctttctctcttcccttctgatggcagtcatgaaaccaaggagatggaagagcctctaaaagggaggattctaggtccttcagtcactgccattgaaaggaaacattgttttgaccttacatgagccagaaacaaaactttcattgtagtaaagcactaagttgtcatgatttacctctctcagcagccagcattaccttcactgatacactcaacagtgatttgagtatgtaatttagtttactcaaaatatacttctcatttcttagcaattggaattggtagtcaggaaaactaaagttgaactgaggagtgagaaattggggtgtgactccagttggaggaagacttggtgtggaactcgatgagatgaataaaagatagaacaatttggaatgttttgttagggaattgatacaaaaaacttaaagttagcagagagttatgtgaataaattagagtaattttgggagttgtaggagtaggggggcattatgaaataagaaaagtctctgagagttgggataggatttaaacactatcggtttttttaaaaaggaattttgccacattccacatgcagcttgcaaatgtttttgcaatgactgtcttgacatatgtgatactcagaaaaaggtggaatgtttaaatgaatagaactgcataccttatatatcttgtttgctgggagttagattcattacttgaataatttccctaatgagtcattcccttaggggaattatccctaagggaattatccccttagggaatgacttatcccatgaaaataattggattatggcttgttttgtgcatatatgaaatccagtttgttggacttctacaacacctaaatataggtgaaatttaccttgtgt

SEQ ID NO: 59247 - DNA, 1394 bp, Homo sapiens
aaatgaagtttcttgagagagacagctttaacttgaattttgcagcagcatctaaaacgaagccaatgaaaacacctttttttccccagacagatattactctgtctctcaggctggagtgcactggtgcattatggctcactgtatcctccacttcctgtgctcaagtgatcttccacctcagactcccaagtagctggaactgctggcaggttccactatgcttggctaatttttttttgtattttttgtagagacaggatctctacccaagtctcaaactcatatgatgtcctcaagccctcccaccttggcctcccaaagtgctgagattacatgcatgaatcacagtgcttggcgtcagtggaaacactttactcttgattgtgccattttccataggggttggtggctggattgtactttctagttgtgaaagtaatggtgaggtaatggctttgagtctagggatcagatccttcaatcagtagtaatataagtgagaagtattaatatgacatagtgaattatctataatttctagagaacatttaacttgcattcttagatctggagatggaggaccggttgattcagactacattggcttcaaagtgataaattctatattcacctctactaggacatatagaaaaagaaaatagctttgaaagtatggctctttctttcttctttttctgaatagtgacaggcatctatgaatagtgatgaattcaggaaaactcctaggctagacgttatcttgacagttggtggacagatgctcctgatttgagtgtgagactgaggtattcagaaagcacttcaaaacactctcctatgccagctaacattattttcgttatattgtgattgagtttttagttgctttgtaataatccctcagataaagggcctggtgtgagctgggaaaaatgtttatgatttattttgagcataacagcatatagtcatttttataaattgtttttcagaccttattattacttgtaaactaatgtattaaaacacatattaacatattaacaatttcacattgaacattttaaatgaaaataataaatgttaatgtttaaatgaaaagtggccttgataattttgaaaatgggtgcccagacttactgcatttcttgagaaagattaattgcttcctagacagggttcttacggtgatagttgtttttacattgctcatgtctaatataatatttgaggtataatttgccatggtatttctttttctgagttagttgatgttttattgaagacatgaatcattatgtgattctctccatttaggaaaaaattttccatctttttcagtggggattgggcaggtcattctcatccagggttctctagtttagaatttg

SEQ ID NO: 59248 - DNA, 1030 bp, Homo sapiens
ttgcttgagtcaggaggtcaaggctgtgttgagctgagattgtaccatcgcactccagcctgggcaacagagcaagaccctgtctcaatcaatcaatcaatcaatcaactaacttacttttggtattgtatgctgatttatgaaggttgaacctaggattaaatgttgtcttttgtctgccctttatttttcttcccttaacagatgccatgttgagctgccttgtcctgattttgacccacaatgtgtattcagcctcagcacttattatgtaggttaggctccttttaaatgttaatgtttcacatttatgcttgtgtgaattgctcattttctgtcataacctgggggtatggaaggaatctgttgaagaccaaggaggtgggctttaccacaatactgacatctcttctcagctcaggcagggagccttggctaggccacctattgccactgcctaagtagaaggtgattggcagaatcttatctgctttgctttgacttttcattgccagagtttgttgaaggatgccagatgtttgggaaaacaagtttctttttgctttctatccctattcttgccaaattcttacctgttttttcatgaggatgccctggcttgcaagaaaaagcaagaaaaataaaaacataagtttgattcttaatttgagcattctgacccattttcagctttatatatccttggtccatttttcttcctgttattttgacaactctcatggctgtgggactgagtgcttgttcatagataaatgttaactttcttttgggttgaaaaagagaatattggttgctaagttgagcaaccacagactgagattttcagaaaattgacaacttcttttgagaatttacctgttgtaagttatagaaactgaacttaaatattaccaaacaaccatattaaatatttgccatattttagattgttccctgcattaattgagttcactttataggtgtaaaatatttttatatttagtaagcagatcaaataatattaacccca

SEQ ID NO: 59249 - DNA, 1029 bp, Homo sapiens
ttacctcttctgggatgtctggcatatgactcttgccttagagtccatagactgcaaatgagtttgtgcttttaatgacacgtactttaaaactcattgatcttagttttattaagtctttagatttttgaaaattttctttcaagtggttattctttgaaatcgtgaagaactgacagcatatgaccagacagtttttctacaaaagcattgggattgcctgtcctgtcctatctgttcccataaagttttaggtgaaatacaaaggtttatgatctaaattcacaattgctagtatgatgcattagcacaccataagttcacagtactctttgcactatattcctgaatgattaaaacttacagctggcatagtatcaagtgctggctgcccaagtgtctccctcacaacctatagatagagtttattgcctgtcacagaaagggagtacaccacctggttagaactttggcggtttcttggagggaagaaagcaaggatagtatgtactgagaatcaaagtttggttgaggttgagtgaatactgggtgtgtgtgtgtgtttgattaaaattggatgatgaccattatgcaacagcaagggattcaaaaaatcttacatactgttggggctttctattgaatcgttgatgcgtgtttcaggagtttgctgtgatgaacaatcaaaccgtttgccagggtgaggctctccctgaatagtcaagtcatgttaacgtacactgtgagttgtttagggagttgatagttttagtcttcaagttgtatgtggtttctgttaaactattaatgtcataggactacaacatactacttcaagctcttaaaatggctttcccttatttttgagagatgtagctgagtgctgcttatagtcaggtcaattcttataaaacaccaacatccctctatgcctaaatatcaaatcagtgttataattatttttttaaactaagattatatcaaattttttagtttgatacttacaaaatagttatgatgctttttttt

SEQ ID NO: 59250 - DNA, 1171 bp, Homo sapiens
tgaagtccacagtagtctacagtaatatactagaccttcatattcactcaccagtgattcacccagagtcacttctagtcctacaagccccattcgtggtaagtgccctatagaggtgtgccacttttttttttaccctgtgtactgtatttttactgtaccttctctatgtttagatttgtctagatacacagataccattgtgttagaactgcgtattcagtacagtaacatgttcagatttgtagcctaaaaactaggtgtttctatgatgttcactcagtgaggaaattgcctaatgatgcatttctcagaatgtatccccatcattaagcaatgcatgactgtaatggagtaatgtgacctggtattctttttcctttttatagttcacactgtatatttttaaacaatacttcagtgtttcagtttatttgtgaactttgatttgtgcactcatttacacattcatacatacattgattcactccttcataaatactttattgatgaaatattacttactggaagtgccagtgaggtacaggagatacagcagtacacagtgctgaaatagtcacagccctcatggacttgacagtgtgtttatcattggattggatttaagagaattagctaatttttttctgttgagagttcatgccatatttgacttttggattttctgagatttatattaatacatttgaaaattttggttttagaattaggctaatggttacagttgtacctcagtttattgtgctttgtttaattgcactttgcacatattgcattttgtacaaattgaaggtttgtggcaactctgttgagcaagtctatctgtgtcattttttccaacagcatatgctcacttgattagcatttttagcaataatgtttttaattaagatacgtactttttaaaagacataatgctattgcacatttaatagactatagtgtagtgtaaatataacttttatatgagctgggaaaccagaatttcatataacttgttttattgccatatttattgtagaggtctgtaactgaacccaaaaggtctctgagatataacttgtatatagattttgatttggtcactacatatgtttatgattgttagcttatacttattggcattctgaaattttccttttttcactta

SEQ ID NO: 59251 - DNA, 1261 bp, Homo sapiens
gtaaacaagcaaaaacaatgcatgttattttttattgacaaactaaaataatgtagttaaaacaatattcttctaccattggattttagcatttttaatgtttgctttttagtatatactacctaattgcttctttagagttacatagttttgcatttcttagattgtaactgaacactaaattttacagtgtgtaatggtttaccatctttatttccgtgtcattatctgttcatcctcaacgagtactaagtgggaagtgggactggagacatttatgtatacttttgagcacataaattctctaaacattttcaaatttgataatataaaatttatttacattttctttaagatgaagcttattccttcttaaaagaacaagtactttatttacatgtgaaggtttactagacacctccctaaagttgaagccctaacagtatctgatgaatgttaaacgtttaatactttcccccattgtcctcctaagaaataagatgcatttctagcttcattttccagtctcttaagcttatgaaagtagtcgagacagtttgttgaccccaaagagaccttttagtctctggcttgttagacaacagggtctgtagtcttcattggcattcagatcacaggcagccactgggctcagtgcaaagccaagcacagctttaggatttagacaaagccaccctggcaaaggaacccagttgtcagggtagctggctgtattgtaaagaactgttgcataatggagagaccaagtagaactattaggatgcaaatgtgaaaaaaatggtggagctaacctgcaaaaacaaacatttcttttttggtgaagagtctagtcattgttgctttcttctgttttaacttctctgggccagggatgtagtcggtgcaatttgagtatattagttatcttcagtcataatgccatcctatattactttaaaatgaacagttaatttgtaggaagagaccacagtacttcaatgttttggaatcttttcataatttacaagtgcatcctactttagtctagatcaattttatatgtgatttttattctagattagatgggaaatcctttttgctcctgattttatttcatctgatttataacaaaatattgttctaatcattgccatccaatgacttctccctgtggattctcatagttgtcctatttattgtagaatttttggctcaagaggaaagctactgaaatccttaaaacaagaattgctttatttta

SEQ ID NO: 59252 - DNA, 1065 bp, Homo sapiens
ttggttagtgatagtaaaaccatgtaatgagctcccaggaagacccttctcttccggccacatgtgttgacatgaggacatgcctttggcctattttgggcagctaagattactctgtggattgattcatattttttgagtgcctacaaaatatgaggcattttgataaatgctggggatacaataatgagcaatagtgatccagttcttaccctcacaagagcttgtgctgtgtaacagaaagggctctaaaaagaaaaagtgatttctaatttgaaacctgagggactagcagcacatgccaaaggggacaaagttcagcatgttccgggatttggggaaagcattgtttatctggggaacagagtgtaaggggaaaatggagatagatagctgaggctggaaaaggaggagggagcctaggttgcaaaacctgtgtaagcacttgggttttgtcagatcagcaggacgtggttgaggggctttaaagccataagatgatgtgaatgatctctgtttttgaatatgttcagtctaggttagaagaggcaaaaattgaagacctacatttgtactgttcaacaaagtagccatgggccaaagtggctgttgagcacttgaaaggtaactagtgtgatgaggagtgagttttacatttttgttaattttgatttaaaaatttaacttaaaattttaaacaatatgttttcctttaactttagtattttgattggactacatttcacataagttattgaaaatttagagtgcgaattgacctatattataggtgtaaaattcacactggattttgagttcaagatataaaaaacaagaatgtaaaatatctcaattttttctatggttatatgttgaaatgatcatattttggatatacttggttaaatatattattcagttaaattttactctttctttttgctcttttatgtatggcttttagaaaatttaaaattacatgtatgtgtcacattatgtgtcttattggactactccggccagattccagttcagaggctctcataggaatctagatgagagatc

SEQ ID NO: 59253 - DNA, 1679 bp, Homo sapiens
gacaaacgtttgttttatcattctaccaaatgagaagaaaactttcacaaaaagaaatgtttaaggtttctgattatcagagttttatttatttattgagatggagtctcgctctgtcgcccaggctggagtgcagtggtgccgtctcgactcactgcaacctccacctcctgggttcaagtgattatcctgcctcagcctcccaagtagctggaattacagacacccagcaccatgcccggctaatttttgtatttttagtagcgacggggtttcgccatattggccaggctggtcttgaactcctgaccttaggtgatcgcctgcctcagcttcccaaagtgctgggattacaggtgtgaaccaccatgcctgacctctgagtatatttattatttacataaaatccgattctttttataacattaaaatgattttaactagttttgcttttttaaaaaaattttcaatttagaaaggtggtaactatcagagaggcatatgacacagacatagtggccccttggtatccacaggggattggttctaggtcccttgtggataccaaattccaaggatgctcaagtcccttatatacaatggtgtaacatttgcatatattgttctattgttattttttactgttttttttttttttttttaattttctatctgtagttgtttgaatctgtggatgagaaactcatgggttcagaatggcctatcacaaactgaggattatggaaaaatactgtagtttacaggtatttttttgaatactgttaatacacagattactcatagtctaattggaataaaaatattgagaaaaataaagtccttttcatgtttaatttctaattctttgcacaaaagtaattttttggaaaagctgtttcttggtttcattttagaattcccagcaaccaaaagtaagcctgagtttgtaccaaggtaggaagtattttatgttttatcatgtctgctagtcttgttctattaaattacttaagcaactttttattataggaaatttggaaatgtgagatgtttagcgcaaggaaatgatcttaaatggaacaaagctggttaagaaattgaaatgaataaaaagcatgttatgaaaatatgcaacactctcattgacctaattaaaatagcttatataagattattgttggactatgtcttataaacttacaagggaaatcttgattccctctctttaactccttatagttattgccaagattaatattcttacatgtatatttttacaaatatgtatgatagaatggtcactgtaaaaaagttctatttttaaaaacattggcatgagaaaaaggtgaatgcttcttaataaagtattggaataattatttattagtgttactggaaatgggtgattcagtgtcactttttgggtaatgtggatttgttttgagagagaaacagagaaacaaggaaacaaaaatcaacaaagactaacaaaatttctgcccagaatacaggtacgtgcttgcatgaaacaaaggtcctatcatgaaaatactaaaagtctttgaagaactaggctggagtttatactgttagtgttctttattgacgatatatggaacatacagttatatatgtgatgaagttaacattaatgatataaatttcccagatgtagggct

SEQ ID NO: 59254 - DNA, 1041 bp, Homo sapiens
tggctgtatgtctttgggtgtgcatacatacacatttctgttggctatgtacctagaagtggggctgctggatcatagaacgtgcatatgttcaacttttgtagatgctgctagatgctttccttaagtgtttattctttatattccagcagcagtttgtaagtttcatttgttctatatcttcaccaacacttggtgatattgttggtagagatgggcctcttcctatggttgctgaggctggtcttaaactcctgggtgtaagcaatccttccaaagtgctgggattacaggcatgacaggtgtagcatcaaccttggccagtaatgtggttttaatttgtattcccctgataactaatgaagtagaactctttttcatatatttactattcatttggagtactaaaaaaattttatgacacttgcattttaaaatattaaactttcctatgttaagaagggctgttgtaaattagttattttctaaaacatttggcataatcattcagtctatctctgtatttgataagttgtgaaattctttgaaaatatttttttccttaataaaactatgtatttcaaaccatggaattgatttcaaatgctaccttctgagtgttattaagactatttattcatagtatttttgaaaacaagactagaaaaaatgaagtgttttaaacaaacagtggtttttccttccagggaagtcttctccaggaaatttctttgccaggatggtcaagtcccttatatacaaagtttttcttccagggtaaaattattaggcattgtagagggtataattaaaagttgatctgcctaattttaggtttaccggccaattacaaccttatcattgaacacagagtttggaagattcttgagcagtattttagagctgtttttgagatggagaccaacttttctatgtgctcctacattttcgagccttccgtgcacttcctttggatctatgtgactaatttctggccagtgaattgggagtgaaaatagtatgtgtcactttggcctgagt

SEQ ID NO: 59255 - DNA, 1047 bp, Homo sapiens
tctataataaaaaaagcatgaaaatatgatgcagaaatctccgttaatgaaattcctcttgaaattatcctctaattcccttttaattctcaaattcactttgccgtataactttcaaaatgaaacttctgacatttttgtttgttcttggaaaaagtgttcatttctttgcagttttacggtgaaaataatatcctatatttctttttaggaatatattcctttgttgtgctaggaacagtaagtttatttagataatagccatctacactctctatctctaatccccaaaggccttaacctccattaggaataaatgtagatttttgtttgcttgaaatagcttcctgggcatgtaaaaacccctttgacatcattatttaggggctcccatcctcccaatggaatcacagcctaatacaaaaactttgcagctggtgagctcccaaagccccttttgatgattgttgttaaactcagcatggcagcttgcagttgttcctttcctgtactgccccccaccccccatgttcatgttcttcatgacaataagaattctccagaggtaaaacacagggctgaaaatttctgatgtctccttcatcctctgtttcttctcattcatttccattctaagcatatttataaagtttagtggagattatcaagggaaagattcgttctctctctgtctctaataaactaatttctttaaaaacaaacaattgaatatgaaagcattgaatatgcagaggttatgagacccctcatcttttctgtagagtatgttagtttcaggtacattagaaatcagaggtcctggctgtgacttagttcaaacttggaagtttcttatgtcatactgtgttctttattgataaagtgaggggacaaataacccaagcaagtggtaattaaatgattcattaactcagtgacacactaattgaccagaaattttctctaaagtttttgttctaactttaactggctgtatcaagtataggcttatgttggtattatttaggggaaaaaacatttatcact

SEQ ID NO: 59256 - DNA, 1839 bp, Homo sapiens
tcagtaccaacagctaaaacaaaagtcagttttttttcttttaaaaaacattatttctttttaatgaacagttattgaagtattggccttaattggctaggtgtggtggctcatacctgtaatcccagcactttgggaggccgaggcgggcagatcaccggaggtcaggagtttgaggtcagcctggccaacacagtgaaactccgtctctactaaaaataccaaaattagccaggtgtgatggcaggcacctgtagtcccagctactcgagaagctgaagcaggagaatcacttgaacccaggaggcagagtttgcagtgaactgagattgtgccactgcactccagcctgggcgacaaagggagactctgtctcaaaaaaaaaaaaaaaagattagccttaatcaacaagcatttactaataacttaccggtaaagagtagtatattcagatttaaaacattttgaagaaatgcccagaagtggaggacaaaggcattgagcttgctgtccttgtaaaataccgtgtgtgcgtgcgtgcgtgtgtgtgtgtgtgtgtgtgtgtgtatacgtgcatgcatgtgagaggggagagaaggtgggagaaggaggcatacagtagttgcaagttaacataatagagaatttttaaaaccttaggacacatctaaagatgatacaaaatgtatgttaatgcaagataaaatttggtttattagggacagtgaattatgatttgaaataattggggcaaatttaaccaagtagggttaaagcattactttgaaggaaaggagggtattaagcagtacataattttgagctaaattcataggcaaatcaatttctatttagaaactgaagcactttctttataaaagcatgacttcgcctctttatttgctcaagtatatatgaggccatattgcatttagcctatatgagaaggagaagaaagcagagaaggagttatgagggagattggaagagaataaaaagatcacttcactttagatgccaagcaagagcaattattacagcattatttcaggattcaaggacaacaaggcctgtaaagaggccactgataacctcattggtgactttgtggagatcagtagtagtgatggtaaatagcaaattggcaggagttgaagagtgaatggatactgaagaaatggagacagtaatcatagatttttcttctgagttattttttgataaaaggaaagaaaatagattacagcaagccaaagaaagatgatttttggatgggatgttttgagcatattcataggttgaaggaatggagtcaaaatacagagggaaattcagaaagatccaagagagagattcatcatttgacataatcaaatcttagatgacagtaaagatgggacacaagaaagaggggttagttcttgaaaactagaatgtatatgacttcctttgttataagtaaagggggtattctgaatgtttgaagtagagagctgggaagttgaagttattcacgtttaatggtttccctgctttctaggaagtagggatattataaaatgagaaagatggggttgggggagaggggtttgaagagggataaagaagatgtggcatgattcctttagaaaacaatcatgatcaagtcaactagagatgaatgaaataatttcccaggtttgcatgaattatgatagatttatttggtttagtttcgtgatttagtatagcagtactcagaagagttccacataaaatggattatatcatatacctaggatggagactgataagatgtgtataatgaaagaaaaagtggattagaaaaatatagaatga

SEQ ID NO: 59257 - DNA, 1493 bp, Homo sapiens
atttaatggtactaactagtactgttaaactaactagtactgttaatagacctttatgacagcatcctcagagttaactatttatataattgttctctggagcaaagcattcagagttcccagaagctacagtgaatttcacaccacttataaaccaagggactacctgcaaagtgtttctgttattttaaaatctaaagtctatttgaatttgaaaaaataaaatgaaaagttgaaaataccaaatctaagacttgtgtgtaattgaaatgaggttgttttagaaaattaaatttggcaagtgattaatgcttaataaggagtaattgttttatctattttagggaaaaattaatttaacaaacctattattatgtgaaatttaggtaatgaacatgggcagtacataatttccgtaacatttatagcatcgaccacaaaaaggctgaattagtgtcatcaaatacaaagaatgttcatttcagaatcaaagctgttcggaaagcagtgctcatggttactataattaattcaacatttcaggactatttaaaattgttatgtcatatcactttagtagatatacctttcagatgcatatatgcctgattttggataagtgtattttttgtacttttcagtttaaaaatttttttcttagttaaaaatgttctctcatttaatgatttttggttttgtatcaaaagcaaagaaactttcagttatctcttaaataataaaacagaggtcgcccaacctgcactgttttggaccctgtatacagcattaacccagctcaacagctggctgtgattggctagccaatcagagtaccaattctgtagtgtcctccacctttccctgaagctagtagagttttggttgagtggggtataaatgtgaatagcagattagctaattaaaatggtcctagatagttgtaggctccagtgctgaagttcctggaggataatccaacctccctaaactctcttgataccgaagaactcacctggaatagctacagcctacttttctgtccccctccccaccttccctgcaagctctcttcccctgtgggctgggtcctgtttcagctcttccatgcatgtctcaggaactgttcctgtagacaaaggtccattcagcactagaatgctttttccaggctgcatttctaaatctgagtccctgtgtatcttccagatcaaagtgcccctctccccacaacaatggactagatttgccagggcctcatagcagaatatcctgtctgactctctcttcactagactaaggagaaaaaataacaaaacaaaaatgaagaatttattttaaaagatgaatatagcattcccccctcccctaaaaagaaatgagcaactattacttacacaaaatgtagatacaactgtattccttgtaggattacttattaaagctttcttgatacgtaaatctaaatccaagcgtttggcatgaatgtctgcttc

SEQ ID NO: 59258 - DNA, 1744 bp, Homo sapiens
tcagcatttttgaacccgatcattcttcctcgtcatagcaggctgtcctgtgcgctataagatgattagcagcatccctggcttctgcccgtgaggtcagctgtctccagccttcttggcaccgggggctgctttcatggaacacagtttttctgtgaacctgggtggtgtgtgggaggggggacggttttgggatgaaactgttgcacttcagaccatcaggtattagttagattctcaaaggaccatgcaacctagatccctcgcatgcacagttcacaatagggttcgcactcctgtgagaatctgttgccacagctgatctgataggaggtggagctcaggtggtaatgctcgctcacctgctgctcacctcttgctgcgtggcctggttcctaacagccaccatccgcggcccaggggtggggaccctgcacttggtaacagcacctcctatctctccatccctcagcacattggcagtaaccaagaatgtctctatgtgttgccaaatgtccagtgagggtggggagcacatcactactcctggttttgagtaccactgctcacagtaaaatcaaatgcagatacaggcattctacagctaatcattcagtgtaattatcaactgtggtaaatgctaattatggaaagtacagagggccatgagactgtaaccaagaaaataatgactccataataaatttggagttcagtcaaacaaatcaaagtttcccttgagtgtatagtaggtatttgatgtcagaaaagaaacttaagacatggtcttttactttaaggataagctggctgtgtatcttccaaaccagtaccctgttgagagtgaaagcgtgctctataataaggaaactgggaaaataaatagagatgaggcaaattgtacataatctacttccaggctttcattatctacccagagaataagaccagtatatgaaacacacagagaataattcaagacagtatatacattaagcgctaacctatgtcacattattagaagagagggttcattgttacttctccatctttgctttatagaaggcttcatgggaaaagatgggattctagcccttcaatttagttctggaggtttgccataaaatatctcaatgttcctattcagttattttacactctactacctaagcccctaacctgttcaagagttgtgtttgacatagcagacaatagagaacaactggagagtcttgatgaggaatatattatgatgaaatggttacaactcctagaagaaacattcatttctctaccaaccttgatcagcattgaggtacaaaagaacagtattatacaactatcagatgtacatactgaaaggacatttctttcttaaaccaaattctagaagttttttattgaaaacagatttcctagggtcatttgtgtgtatatatatctaaggggacattgttggcttgtttctctttcaatttttaggtcaattttgaagatactagattttgagaaactatgtttaggggaaaggggaagaaactgtaggaaagtgaaaaatcgtacgcttttaggttagtgctaatctgcttacgtaggaactttctgcatccaaataccttgctttatattccctagctttctttttaaaatgttgcttttactttaattttttacactgcttaagaccccatagattatacatttatttaagttcatagtcatggaacttaattacttttaaaaa

SEQ ID NO: 59259 - DNA, 1963 bp, Homo sapiens
tgctggttattattcatgttagttatgttacataaaggggccacagatactgacccattgctctaggtgaaatacagggctgggttcttgcaagtctctggtcacgtcttcatcagctgatcaattacataacctggttttatgtgtgtttctgtttgaggacatcttatttaatattatttattaattaacattgaactcatggccatgaacactataactcatgcctgaatgaagcttatttaaacaaacatttattctccataaggcatatcatagccttcttttgctgagaaacactaggtgagacttcaacactatacatgagggccattaaactgaaatcaccaacaggaagcacaaaaatgtgaaaaacatggcactaaatactgtgaaaaggacattgtttgtaataggagagctgaaggaagaaggctgagtgacaccttgttcagcctcatgtgagaacatgggcatcagtttattcaaatttttttgctgctctatgcctgcaaatgacccctaaagcacccagattttttatcacaaataattttaggtgagtaggtgaatttgcaaatacagaatccatgaataatgaagattaaatatgttagctgggcatagtatttgaaaattatttgtagaaatatgaagccttgggttgggcatggtggctcccatggtaatcccagcactttgggaggctgaagctggaggatcacttgagactaggagttcaagactagcctgggcaacatagcaatatcctgtctccatgacaaaaaaaaaaaaaaaaaaaaaagccagatatagaggtacatgcctgtagtcccagctatttgagaggctgagataggaggatgcttgagcccaggaggttgaggctgcagtgggcaaaggccacaccaccgtactcctgtctgggcgacagagtgagaccctgtctctaaaaagacaaaatgaagccttgagtaaagttatcttcatttaatatctgctggatgccttggatagcaatctaggagtagcctaacccaagtttaaagcctaaagtttcctggtccactcaggtgacatgaatctagggtgcagatctgtgcaagatttagtttattttttggttccccattgacattaacgatcagccatttgtgatttcagcttaatgtggcaattgacttatcagagtcctaattttgtcttacattttaaattgttctcagtggagtattcatctgaattattcaatctgatatttacagaagcagaaccttccttttatccttcttaattttaatttctcctgccttgtgattttcgtattaccatctcctctttttccttcttctttcctaggtttgtgaagcatttactacagttgttataagattaaataactgttctcatttaagtacatttcttaaacttacactaagatgtgaccttcagattgctttaataatgtaagaaataagttcattttaaaaagaaatctggatgttggaacaagaccttgaatttttattttttttttctttttaattcataatattattcattacccatcatgttattttgggaaggtatagcataaaatatgatttagtaatttagctttcacctaagtttttattgtactttatgatataggactggctgtcatgaaaaagttaaatttgatggacattctctcatcaaatttgtccttgtattattttattttatttttaatttaatttaatttaatttaattttattttttggtgagacagggttttactctgttgctcaggctggagtgcagtgcagtggtccgatcatagctcactgcagcctcgacctcctgggctcaagctctcctcccacctcagtttcctgagtatctgggactactggtgcacaccaccacgcccagctaatttttgtagttttttatagagacgaggttttggcattttgc

SEQ ID NO: 59260 - DNA, 1060 bp, Homo sapiens
ctttgctcactgcaacctctgcctcctcggttcaagtgattctcctgcctcagcctcctgagtaggtgggattacaggcgcatgcctctacacccagctcatttttgtatttttagtagagatggagtttcaccatgttggtcaggttagtatcgaactcctgacctgtgatctgcccacctctgcctcccaaagtgctgggattacaggcgtgagccaccacgcccggcctatatctcagttttttaaaagttgtggcacctaactaaaatgaactgtttttgatagggatagagaagggttctgtaggagtatacagaatgacattttgacctactgtgtgaagttgacagcaaactcctgaaataagtaatatttcaacagagacctgaaaaatgaattggagttactcatgtgaaaaaactgttagcaatggaaatgaggaaacatgtaagaatatatcagttaaaattaacagctgaaagccaattttagctgtaacaggtataagctcctacttgtgtcactatgtaagattttgtcaaagactttttgccttaagtaatgtaattatccatggagaaccatagcaatataatatttgttataaaatatatatattatatatatgtatgtatatctcctagcttctggggaaaacagggcatttattttttattttttgattctaaatatttttaaattatagtttatggcattttataattttaaatattcttgaagccagaactaaattctagagtttgtttatgctttatttttttccccctctctatatattttataaggcaattttctaagctttgatcctatggaaattttaccgttttcattacttttgacagtttgagattagtttcagaaccctgtaagcaaatagtaaatataattagggaaaattaaaatatttctgtttcctggtaggcaataagacattaagaaaaaaattcagacttataccaaagtagaggcaagtataatcagcacccatgtaatcatcaccagcttcaaaaattttcaactcatgaccaatcttatt

SEQ ID NO: 59261 - DNA, 1041 bp, Homo sapiens
tagtctgttcaagctgccataacaaaatttcatagtctaggtgttttctcacagttctggaggctggatgtttgagataaggtgccagcatgatggggttctggtgagggctctctttctggcttcttgctgtgcctcacataatggagagtgagcaagctcttttgggtctcttctgataagggcactactcttatgagggtgagggccccaccctcctgaacttcatctaactctaatcttttcccaaaggcctcatttcaaatatcacactagggggttagcgtttcaacatacggattttgttacagtctttagtggagacaagcaggattaattaatttatggaaagcatgcagcagtgtgcctctaacataaaaaatgtcttatttaacctgtcatcatcatcatcattttgacttggcctaaaatttcgcatatgggctagtggagaaaaattagaactaatttggtgattttgctcttcattgatggaaagtatgtgataacattcattaagaagggcaatgtaggaagaaagagacagttgtaggcatgctgtggagagatgcttccttcactgtatcagtagagaagaagatggttgtcaacctcaggtttatggatgaatcctcagtatgctgtaaatagaagaaaagagatgctttagtgttctttatatctatgtggcctttaaaatgcagtcctttaatttgtttttattcaaatctttattttttattttcttttctctgatttaattgatagatcgggtttttcagtgagcctgggaaagcagaagtaccatttttatgtctataaataatactaaatttattttgctggattttgtaaagttctgtattaaacattatggatcttaaatatattttggtattttaaaattagagtataatcagtttctgttctctagcctttggatttagactttttcttctctaagttaatgagtccaggactgattttgttagcctttctggagctgttaagaattcctattctttcgtttttggtagtcat

SEQ ID NO: 59262 - DNA, 1682 bp, Homo sapiens
tgaggctggattttcttcatatatgccaagacaacatacagcatcagagtagggaaaagcccaaatgtccattaataggaaattggctaagtaaatcatggtacagcaatacaatggaatattacatagtcgaaaaagaatggtaggatgaggtccattcagtgacaagaaaaaaaaaagaatcggaagaatagtatttatatggaaaatcatggaaaaacctcaatttatgtaaaggagaggagataagatgttatagttgtatttgcttatattgtcataaactctggaatgaaaaacaactaatattttatccagaaagcagggttaaacaggcagatggatgggtgtgatgagactttttactgtatacctttttaacgtttgatttttgacatacacatgtacaatctgtttaattcagttttaaaaaatgatttccagtataacttaaacctagttttgacacagcacacacttatactttgtacctctaaaccattggcctacagcacagtattcttaacacagtatggaaagccttttgtctgtctctataggatgatactctgcaacttccagcttcatcctttacattctagtgacactgaatttctggtagtagttctccacatgtggtactgttttatatttgtgtatgctttacctgtatcttcttcatatcttttaagaatcagtttgtgtcatcttctctgggaagctggcctcaacctttgcaaggcttagttgagtgattcagtcataatactctgtataattgtctattattgctcttatattgcattgtaatcattagcttttttattgtacttagacacagataaccaaagatttgctttagtgtatttttttcactgtattcccagtagaaaagcattaatgtatgttatttgatgtctttttctgcagggtagttgccctgcctcaaacagcttatagtctttaatggagacatgcaggaatgcaactaacataagagagagtgtactaagtgaggtaataggcaaggtcatacttttaaaggaagccagtctttgaaatgaatcttaaagatggtcccagagtccagatggaaacattctaacagggcctatttaggagccccagataatgtaggggtagcttcagtataaaggatacatgcctcaaggtgagtcagggagaaaaggaaaaacagggacagattgtgagaggtctaacattccagtctaaggaatttgaatttgaatattatcttgtgggtgaagtaggattctttaatgcttttgaacgaggaatcagtatctgtactttcaggatgattttatgctttgtgtaatgtcttccaaaaaagatgagagatggggcacctgttaatatattttatattataaagtacagtgttgaatatgggatcaaaaaaggaacagccagccacatttccaaatcccatgtttttgaccagatagtcccttcaacctagaattatgtctcattcaagcagtgtgattctattcatctcaagttgtcataagaaagacaacttatatgttacttccactagtgatccctgataaattccttccaaatgttattaataactgtatcctgttttgactgcattgtatttatttctgttacaatttttctcataccctacctgttttacagtgcaggggtcc

SEQ ID NO: 59263 - DNA, 1010 bp, Homo sapiens
ttggggctgcacagctaggaacaacaataccaccattcctaaaatagctgtagaacaacacttaaataactgactatcctgcttttaaagactgctattctttttttacaaacttgtaggttgagaaatttttacttctattttcaattagaagtctttgggaaaattatgggatgactggatttgtgtatatctataatccagagataaggaaaaagaggaaacacagattttcaggagatggaagcataactttgttctgctttgtgcttgaatacctctttttgatcagggttagaggataaccttaggtcagtgcatttcccttgtgtttttgttaacaaaacatagttcagatcccttgattaaaaccctccactggtttcttgtctcatgaagaagaaaaaatcctaactgttcttgatgatctttaaggctcagaatgatctggacagaggtatttaccttgaagctcataaagcataggcctttctcacttgcagagtatctttctgaagctggactaaattggttaaggccactgtacttttccactttgtcttctttcctgtcacacaccctatcctttcaggctgtgttgggatggacaaaagcagttctggagtcctaaggagaagatgagtgggatatgtttctgtgacctgcagtcattttaaagtttagctgttgctagctgactccatgtaagaataccttccaggaatttgatggctgtgcactctggcagtgcagctggcatggttatagggtgcttggccgaaggtttgcatagcaatatgaacgcatcctacgacacatctagccaacactggaagactgtgggtaatggacgagaaaccaagattgactttttgcaagtttttaaaaataatcttcttgtaactcacatgtgaaagaaacatgagaggttttcacaaattcagtaatttgagacatttacatagcatcaccaatagttgtgaagctgaaactttagttctaaactataa

SEQ ID NO: 59264 - DNA, 1071 bp, Homo sapiens
ttactcactttattgtggtggtctggaacagaacgtgcaatgtctcgaggtatgcctgtatacaggataatgtgtgtaggttatatgcaaatactataccatttgatataagagacttgaatatctgtggattttagtatccttagtgggtcccggaatcagtcccccccacgaatacccagggatagctgcactcacacataatgaatttatagtggaaattctatgaaatgtatatagagttgttataatatacctaggatgatcattggtatttcggaatagcttttagaatatgaccaagatacatgacatctactattatataaacctgtgtttgtttcagcatgtttttttcctatgttttgttccatgttagatgtcatgagtttgcaaagtataataagctatattccctgccttcaagtagcttaccatccatgtaccatttcccaaagtgtacatcattagcaggtaggtattcctcaaaaatagattattgtctctgattaagtttcagagatacctggattaatcaaaattgaaagtttttttttagaatagggttctcaaatgcatacattagggaattccagaaagcgactgtatgttgcaaggttttccaagctttgtcgacacactattttttttctcatgaaacttctgtggtgggatctgaggggaatggaggtggggaagagagtggcagtggtgtttttaggaagaagattaatgtaggagaggagtgggaggaacacctaggacagtagctgtgtacctggcctaggttcctcagtccagatggtagcaagtctgaagacagggagagacttcttccagaagatgaaattcatagaaacctgaggcaaattggtatactcaaaggagctttgtcagactggagagtctggggtgaattgggataaatatatagtagataagtatgtagaaaactaaagaaatgagaaacaaattattaattgcaagggaaacaaaatgttatgcaggaaaagaaaagtaattattgtttactgcttggttcagctctgaataccctatgtagttataatg

SEQ ID NO: 59265 - DNA, 1025 bp, Homo sapiens
caacaaaaactttctaatttttactagttttgttttttaaaaagtttgtttccttttaagtgcataacactttaaaatgagctcagctgtattagcagataaacatgttgattcatttggtccagagctactgaatgaagcttgcaggagcacagtttgttctttatgccgcccaggggcagaatgtttctcttcctctcctccttattgagagaaggggactggaataagtgactcctcttatttaggtttgcctgaattgttgacgagggaagggggcaagatttcttcaccatttatccttcgtctcatttaaattctgttcattaacataaagtatatgcactcatactgtgatatacatgttgaattattagtgtcatatatttacagtttttacaaaaccattttacttaatgctctggtttgagtaatctgttgtttaaaggtataatgaatcagagttgtttttaggcgtattgcgtttttgaggatggacttaattttggaagcaaagagaagtatgttctatccagtggagtggagttgagataataggtatgcagttcgcctctcatacccattgtgggttctgcatctgtggttctatcaactgtgtgtcaaaaatacttgagaaaaaaaaaaaagaatggttacgttcatactgaacatgcatagactttttccccttattttcccctaaacaatacagtgtgactatttatatagtatctacattgtattaggtgttttaaataatctagagatgatttaaagtacaggcctagcttgttttattgcactttgctaatactgcatttcttacaaattgaagatttgtggcaaccttgagtcgagccagtctatcagtgccatttttccaagagcatgtgcttatgttgtgcctctgtgtcacattttgggtaattcttgcagtatttcaactttttcgttattattataccggttatggtgacctatgatcagtgatctttgatgttactgttgtaattgttttggggcac

SEQ ID NO: 59266 - DNA, 1016 bp, Homo sapiens
catgtgggattataggtgtgagctactgtgcccagctgttgttttcagttttactcttctgtggtatgtggtaagagggagcatttgttttctagagcctgcagcatgtgtgggtcagttgaaaatgtataaaaattttgagttacgcacggtggcttgtgcctgtaatcccaatactttgggaggctgaggagggaggactgcttgtgccaggagtttaagactagcctgggcaacatagtgagaccctgtccctaaaaatatgtaaaaaaaattttaaaataaaaattttgaaatgcaatttgtgtcttaaaattctgccttatttatttgcaacgtgtgtttcttgtcatgtatttgctgctgtatgctggtagaaaaagcatagagagtggactcaggcagtccatgctctagcctcctgttctactctgaactagatgtgtgacattgtaagtgctgctgcttcacttcgggtgttactcctgatttgcacagtgaaaagtgttttattacaagatgatttctagaagtttgtttctgttctgacattagatgacctgtgatatgtgaagcttaagacatcttttttcattactgggtttatacggggtgttgaggcttgtgatacatttactgttataaattcattttaatgtgtttggaggacttgagatgattggagattattagattgatagctgatgtttggctttattattggaaaatagttctagctacgaaacctgtttttgagtgaaagtatgctaggaatggccattgcttttcttcctacagagataagtgatctcttggtgttgtacacatgaagctctcacctttatttttaaagtcatggattttaccttggctcctataaactcttctcccctcccccatgtagctgtaagcattcctactcctaggatgatttggaatgtgtgtgtttcaaatcatgtttagtgattgtaaggctaatctcagcttaattatcactgccaaaggaatcctctgac

SEQ ID NO: 59267 - DNA, 1702 bp, Homo sapiens
cctatgtgcccttgtggatgggtgagtcccttcactaccaactccctggcctcaggagaacaaggtttattctttgcaaaattaatgaagagctgtctggactttgaaaccaggggccgtggattgttgcttggtttaaaacaaggagatcggccgggcgcggtggctcacgcctgtaatcccagcactttgggaggccgaggcgggtggatcacgaggtcaggagatcgagaccatcccggctaaaacggtgaaaccccgtctctactaaaaatacaaaaaattagccgggcgtagtggcgggcgcctgtagtcccagctacttgggaggctgaggcaggagaatggcgtgaacccgggaggcggagcttgcagtgagccgagatcccgccactgcactccagcctgggcgacagagcgagactccgtctcaaaaaaaaaaaaaccaaaaaaaaaaaacaaaaaaaaaaaacaaggagatcaagggaaacctacgcctgaactatagaagtgttagctctcttcctctgctctccttccagaactgcacagtcaagcctgtcctatccttctcctgtggaagactgaagataacagcatcttcagatactgataggctttctgctgagagtaccttaagtgaattctaccagtcgttaagccctgttttcccacacagatctttcagttagttcttttcaggggcttattcttaaatatgagcaaacaatctaacaccattggtcatctgggggaagactccaacattaaaaaaaaaaaaaagtagacatagagaggtggagagggagtgatacttggaacactgggagaaaacagataccataagggatcaaaagaaaactttaaaaatctccagtattatcagagaagacatgtatttccttccccacttaaatgatagtgaacacatataaaagcagaaatccatgagggtaaagagaacgagatgagagatgacagcaggcaaacaacgtcaactaaatattggaagctgagaacctggtgcgtgagtggtaacagaatttagcagagctgagaaagcagaaagtcctatggtgtgggtagttgtgcaaaaactggtattcttttaattaatgatgtgctttgctctatttggactgctgggttcttatttttgagcagtatgctctctcccagttgaagctgttaatgggctgtccaccaatggagaaatcagaatgattaaaatgtagttcttgtatttttatggttctcttaagcagtcatgcattatactcttcttcttgtgtctgagccaacatttcataggagtagataacacccatttctggtggcactgacagcagggttgaaaagaatgttataaaagaaaatatgaataacatttaacttaagaatatgttccaaattttgtttgtaaagtagttgtttaaaacttggtagttctttttgatataatgttataaatggcagttatcctagaccaaactttaaaatatgtttcattagcaattaaatgggcatttgtaagttcccagggaaacctaatcacattgtatagtattttttaatgaagaaacactagctgggtacagtggcttatgcctgtaatcccagcactttgggaggccaaggtagatgaatagcttgagtccagaagtttgagaccagcctgggcaacatggtgaaacctcatctc

SEQ ID NO: 59268 - DNA, 1052 bp, Homo sapiens
tctgggttgagacctagaagacagttaattcatttagccaccaaatgtgtattgagtgtcttcctattatatatttattaccatattgtgtaggtagtgttagaagacatcccaggtgcctactctgtaactggcggagagataataaacaaacaggataattttatatagtgctaagttctgtgaagaaagtataccatgatatgtgccagataattacctggcaggggaaaggagagagagagctttgcatagagtgatcttgggaggtgtcttttgaagagataactcttattttttatcttgcttttttttttaaaaaagtattttttaggttgtagtaaaatatatataacataaaatttaccattttaaccatttgtaagtgcacgtttcagcgacatcaagtacatgcacattgttttgcaaccattcaccaccatctgcctccagaacttttttcatgttgtgaaactgaaactctgcagccattaaacagtaattttttattttctctctcctctcagcccctaacaacaaccattctttctgccttcttaaatttgactgctttagtgcctcatgtaagtggatcgtacagtatttgtgtgactggcttatttcacttagcgtagtgttttccaggttcatccatgctgtggcacatgtccgcatctccttccttcttaaggctaaataacactccataatatggatgtaccacattttgtctgtccacctttgaactgagatctgaaaaatgagaaggggccatgcaagaactagaagaagaacgttacaagcagaggaaagaacatgtgcaaaggccctgagatagcaataaactggttggtggtctaggccagtgttgtcagaatatattaatagtagagaaaagtgcctggaaagaatggtattaaatgggatcagagatagacatacattggccgtattattttaggctttgaaagaccttggcttttaagtggagtgagaagctgcttattaggaagttttaagtgggggagtgacttaatctgatttccatgtaa

SEQ ID NO: 59269 - DNA, 1737 bp, Homo sapiens
gagtactacaagttatgaggtgtatgaaactaatagtttaaaccgagtttgaatcacttatctagaaagatagctttttcttaagctcatatgtagaatttcaacctagaagtgactttaaaagttatctagtcttttttttttttttttttttttttttttttttttttttttttttagttttagggatgagtctttttatgttgctcaggctgatctccaactcctggccttcaggagtcctcatgcctcggcctcccaaaatgttgggattacaggcaggagccactgttggtggcctctctagtcttatatccattcatctgacagatttcaaaactgaggccatatttcaagttaggtatagagccaggattagtacctgagatttcttttttgctgatcttagatacttcagattttgtttctttcttgacgtttaggaatagattgaatttcttcaaaaaatattttgtatcttgttgggggggaggggctcagaagttttgggtggaaagatttaaaatcctctgagtatggaaaagggggagtatcttccaccttgtggaatcctcacactgtgtgagtaatattattcactgctctacttcccagtggagaatgcagagaagctgtacctcttgaacttgtgttttctctctttgagtaactgtttccatagtttctataccctttgacatagagaaactttctttagtttgtgttcgcattttataatcaatcacattaccttttgatgtgtgatagccctgcacctaccactaattttctgtgtttttggttatgctagtttttcggcttggcatgttttttcccctctgtctttttaagtgaaaaatctcctgtgtccttcaaagccaaattatttacccagatcatggtcttacaaaattagaatgatttcttttgtctgtataatattgcaacaatttcctgtcttgacctccttatgactttctattgccttgttattacatagatctgttatttctcctttccattgtaacctccttgacagcactgtgtctaatacaactttatattttgtacagtttgtaattttccttctgaaatacagttcaccattattttgagcacggtagtctcttaatcagtatgtgatacaaaaatggggaagaaaataatgattctagaagttcagataacagtatgtcacagatattagggcaaggaactagaactgggacagctgaggcaaggtaggaaacacagactagatcacagttatgaaagcagcctaatgttcaggagagagtttcggtaagggcagcactggaattctagaaccatgttgtatatctgtcaaatttttgtgtagcaaaacagaactgacagggtaggaattggtagatttgactgaatggttattcctgacaaagatagtgggttgtaccctgattgtcccagaatggactagtaaataaggtatctaaattaggtaagtagaataaaagattgggaatattgtagtttttatggtttggaagattaatgcgtattttaagggtaatttttgctttactcttagaacggtaaagtacctctgatttcatgaaacctaactttctaagcctataagaagaatcttttctactgtgtttctaatggatcacttatcttagatattgtgggcaactaaagttgcactgtatctgtttcattatttaacagctctgagcactggtggtctttgtt

SEQ ID NO: 59270 - DNA, 1028 bp, Homo sapiens
ctcaaagacgagcctgtaggtatgttctaggtgactctaaatctctaaattggatttcagcacttctcttaattttttcccttatagctagtggtaatatttgctatgaaggtacttagtgtattaataaagtaggaaatttagccagtttaaaaggtctaaattatagaattaaataaattgcaatagtattaattaagggcttattataatttattaactttcatttgcttaataaaatttcataaaaacctaagtagtcttttataaatgtggaaagctagttccttgataataagttaaaatataatgtataactagtcaattcataatgttactgttttgagattgtcataaatctaagaggtgatttttatcattaaaagcattttgatgaaaatgttccatgctcgtgttactttattctactttttgtattagtatctaacaaactgaactttcatgttgtattctctatgtgtaaccagttttggctttcaaataactttttcccttagttttctttgtactgactttgtcctttgaataatatttttcttatattccatgaaatggtttatttagatgaactacagtgtcggtatttggtaatgccaggataaagattttgtgtctatgagttgtctcacaagatagcttaattctgctgagcaaaatatactttagcaacataaagattgtgaacttggttatgctgtaagatgtgattcttgttatctagtcaaatttaacaagttgttacagaaaacaatttacatttttgagtgtttatctaagtccaggggtcttttcttctcctttattttgtgcatgcatgtgtttttttttgttcattttttattcacaaaatgactttagaaataagttataaaatgattaggagaaagaaaatgacagtatgatttcctgtttactacccagcagcaagctttttccatagagagtaaagagctgtggtagtgactgtgtaaaccacatggtacattagagaagctcactttgactgt

SEQ ID NO: 59271 - DNA, 1012 bp, Homo sapiens
gttggacatttgggctgcttctagcttttggttagtacgaataaagagtctggacattagagtgcatgtctttgtgtaatgtgttttcatttgtcttgggtaataacttaggaatgatattgctgggtcatatggtaagtgtgtgtttaactttataagaagtatatgtttaacaaactgcccagctgttttccgatgtgcctgaccatttgtattgtcaagtgtaatttctttcaatgtcattctcctgttataaattacgaaagcattttcagatttcagtgctttataaaggcttttttgatttactttttaaacgtatttatattattctactttttttggagggggatggcaaatcacttgaacctttttgagttttactttactaatctctaaaatctgctttcacaagatggttttgagggttaaatgagatgatggttgtggatttattttgacagttctaacacaatgtaagctgttgctatctccacatatttatcaaaggtttaggatgattctttagtctgtttaattaattatatctttgaaataccataatagaaagtatttagtccatggactatagaaaaaaaaatgaataagaatttgccatcatttttctaataatgtgtatgtgtttattttgagatgtgtatgtgtatgtgtttctaataatgtgtatgtgcttattttgagatgaatagttgcataaacataaaaatttgaataacacacaaaggtataaaatgaaaaataaaaatctccctatcttttctacctcctttgtcagagataatcattttagaactttttttcctatttttaattgtctcatcattatgccagttttttatataatatactaaactttaaccttcagtaacctaatatctccccattgtgaaaaatagaaggatttaacttttaatactgatcctaccttcttccttttattttttggttgcctttatgattaaacttatagctgtttaacagttaactttag

SEQ ID NO: 59272 - DNA, 1019 bp, Homo sapiens
gcagagtaagaatacgtaaatgatgagttcttggtacgttgtattttatatcacttaaagtattcacgactggttgtggtggctcacttctgtaatcccagcactttgggaggctgaggcgggtggatcatgaggtcaggagtttgagaccagcctggccaatatggtgaaaccccgtttctactaaaaatacaaaaattagcagggcgtggtggcgcacacctgtagtcccagctgcttgggaggctgaggcagaagaatcgcttgaacctgggaggtggaggttgcagtgagcagagatcgcgccactgtactccagcctggcgacagagtgagattccgtttcaaaaaaaaaaaaaacaaaaaatttacaattgcttctgaaattacagggatttagggcaattaactttcattctcttccctcttcacctcaaatacacatcaccaaacaaattttctctattatttgggtaggcgtgactggttttcttaagacttttttgttgcaacctcttaggttaaaagtttcactatcatttgaaattggtcacaagactagggaagtgctttcattatagaactatttaataaataagttccccagtttgaagagccagacttttatgtgaggtcaggccagttgaagacatttacaaagaattagttgtttgttattgctctgtgagttgcaagaatggaaaaaaaattctttcttcaatacttccttccaggctgagtcatcactagagagtgggaagggcagcagcagcagagaatccaaaccctaaagctgatatcacaaagtaccatttctccaagttgggggctcagaggggagtcatcatgagcgatgttaccattgtgaaagaaggttgggttcagaagaggggtaagtgctccgcaaaccaaaaataatacggttggtaagagtgctagcagtgagtggtgtcttagaagttgatcttttttctgatactgttaaactgtgtcatgctatgtctagtaagagagaaatg

SEQ ID NO: 59273 - DNA, 1053 bp, Homo sapiens
ttataattagggagattcccaagacagattttaggaggattttacatgtatattggaatctatattagaaagcttctgactgtatttgggggactaggggatgggaggggaaggaggacagtatttttccaataatggagcttagcccaaattttgtcttagttgaaatgctgtttgaatgttttatcttccaattatcaaacttttgaggacatgaactatgtatgtataatcatgtctttcacttatgatgccatctatatatgaagtagatactccgtagattttaacttgcagaatcataaatattagctctggaagagctataaagctattcagagttcatctaatgctatactttcatttttatggctccggaaactgaggcacagataattaaagtgaccttatacagcatcactctgggtggggcagggactcaagtttcttggtctttctggtgctcttcctaatacaccattgtgatgaaccttgttagaggattccatacctattgggtagctcagtttaatctgggggtaaattctgtcaagctgattcttggtatttaatggaccatatatcaattgcattttatatgtatgtatggatttttaaaaatttatgatgaggctcccaagacagattttaaaatgattttacatgcatattacaaaaatatggccaactgtgcaaccaaattctttttcttttcttttctttttttttttttttgagacaggttctcactgtagcacccaggcacggtcaccactcagcatagcctagacttcctgggctcaggtgatcctcccacctcagcctcctgagtagctgggactacaggtgcctgccaccactcccagctaatttttgtattttttgtggagatgggttttgccatgttgcccaggctggccttgaactcctggacataagtgatcctcctgccctggcctcccaaagtgctgggattacaaactaatatccctttttgacactctacagcaacagactcatggtgattttgaggagtctcagccttacctatag

SEQ ID NO: 59274 - DNA, 1107 bp, Homo sapiens
aaattaatttcatagctgtaaaatattttaaataagattatatttaacaaatactggagtgtgaactgtgtgctggtttaattaaaaacttttaatatttacatttcattcagaaaatcactgtcagaaggaatctgttttcagaatcactgcaaatctaaataaacgtgttgattaaacttactagggaacaaatggacttagcatagagacttgtggaaagtaaggacttattttttaagctgtagcttttgatgtaaacatcagaaattttctcataaaaattcagtggaaatttccagctatctgggtttctttaaaatgaggaacctgttttacaaattgattttgtagaagtttagcctttacttaaactttgtgtattttcgtgaaaagatagctatgttttcttttgttattatatcttttagttcaagaatttgtccttgggaaggtaaggcaatcactgttaacaacttgttagttggatgcttagcatgatttgataggagcttgtctttatagtgtgattaagttttgaagtgttaaaaagaaaaatttaaaactatcttagatttgagcaacaaaatgcaagaactgaaaaaccattttcattttgagcaaatcagtcttgtgatctgactggcatttttatttttaagttaatatgcattaataatacaattaatttttgttagaagatttgtgttactccaggtttcagcatgtgcatcagtattttaaatcctggtcacacagcataccttcttttggaaagatagtcctgaatcttccgacaacaaatactttgtcctgatcttttacatgggataggattagattcagtttagagttaatgctaaccaatgcctggtaagcagttgccatgtgccaggcactgttctatgtgctttacctgtattcatttaatctttcaaacaacccctgctacacttttgaaagtgattttcacataagaaaaacttattgtggcattctaaaaataccttttatttaaactttcctaattctgcaacacttctagtgtttttcttgtttgtacctattattacagttaacagtgataattctaaatttgcaaaattt

SEQ ID NO: 59275 - DNA, 1771 bp, Homo sapiens
ggatgcccagcgcggttgacaccgacaccccccgctttccggggaaagctggggggcggcggtgcgcagcgggccgggggaggggtgttcccggcctagcggtaccgtctgtgtctgggctgccccggcccggcgcctgctgtctgcgcaactctcgctccttcccctcgcccctccccgcccgggccgcgcggcgtggggagggggcgcccgcctggaccgggggcggcggcgaggttatataacgcgtggagcgccggtgtcagtgtgtttgggttggggggagggagccgtctgccgcgcgccctggcgctgaggctgtctgcgcgtggggtggggtgaaggcgaggatgcacaggcgtccccggggtctccttccttcccccacccttccccgccactggcgcgcaggaaaagacggcactggtggggtgggggggggggtgtgtgtgtgggaggtgggtaacgtgcttgtctgtgtttttaatagtagtggggttttgatccgcttgggagttgtgtgctaagaatagaaatgtgcggaagatgctgggtttggctgatccagtgatgctgtcgctgctggcggcggcggcagctctggctgcaagtaaacagaccagcctcttccttgtccacctcctccggcgcatcggtccgcatcagccatgatgccggtggggcccttcagagcccaaagttgaagcctagctggttgctgtgttgaccctgacgccgaggcggggtcaccatcccttgtttgggatttcccgggaatctacagttagcctagagataaagaatctcgttggggccaggtttttccaataccggtatttactgtttatgttctgaaagcagaggaaatgcttacccacaagtcaaagctgggatgctcacatttcttccatcaaaataatgttgttatgaaaataaaaccaactcatttcaccaatgtggcattttggttgaaagcctggtagtttgcaattgatgaagtttccaaatagaaagtcaacagtgaaacctatgcatctatattgggtaatttctagccataataaagtgttcacactttgattttagttgaggctaaagtaaaaaataatggctttttgtagttaatacattggcagttgtctcaacagtttagacatgtgttccgtatttggtaaagcatggtcatatatgtcttttagtagaactatacatcactaggcaaccactgggttttgtcagtggttgaagctgacaaatgagtgaaactcattggtttaggttatgtatttacttaggaaaacgaaggtggaagagtctaataaagatggtgtaggaaatgaagattagtcttcagaacttgagtatcacttgcaaaatatgtataaacgaatacaaacattccgggggtggttgtctaaaacatgaaaatattttataattaaaatagcaacttattactaagttactagttttccaaggtttatgacttaatgcacaattatatgcaagatatatatccggactgtaattgttttccttttgccagtacattatcttgacttggaaagtttaccaaggagatagtacttgaaagtttacagggagatggtacttgaagatctttttgttttccttactagggttgaccccaatatctttgattggcttgaggttccagttttaaagtgagggaggacaaatattacatgaatgagactgttgaaatttagatgaatgtagggttttagttttcagttgtgtatttgcattg

SEQ ID NO: 59276 - DNA, 1032 bp, Homo sapiens
gtttagtgtttgggtgtctctttaggataagaaatagcaagtcaagagtgacaaggaatgcaaaaagaaacatcacacggacagaagataaagaaaaatacagtcgttccaacatttagaaaatatctctgaactctagtcctgtatgcaggtaattcctgcctgagaaggagtggatcacaaatctacccagacccccagccattggatttaaatcattgttcctttattctccaaatgtttggctttgttcgaaagattcataaaaaaaaccaagcgtattggctctgttacacagaaaaactgcatcagctttttgctaaaatcagttttatcatgaagttaattacattttattaccaaaagataagtatgctaaatgaatccatatatcacaacatctcttataggtttgtagaagtgatggtagggatggcactatttttattatgtctatttttaaattaccttaatttgacctcattttaccccaaattactccttgagatgattttgcaggctgagctgagtcccaagttaaggatggcactgaaatttttctgtagcaagaagttaggtatgatttggtttgttttgagaataaacaagattaagaaaaatttacattttagaccagtcgagtactttaggtgtcatcttttacagatttcacatttaatataattctactcctgacattaaattttattactctacaaactagccagaagtaataaggttctaagagctataaaacacgtatttggcttttctcagctgtttgaggcaatggtagaatttctgaggtacccttaagtgttaatgaaatgaattcgtaaatcatttgttgcttgtcagtcatattgcttatcaataatgctattatcaatttcctctaaagcatgtagatttcatacaaaaatggaagctacgtaactacaatttttcaccttttataataacattgtggggtgcaggaagtggaggcacagaggggccttcaacttctccaacctactgtaacattctctg

SEQ ID NO: 59277 - DNA, 1050 bp, Homo sapiens
tgagcagaaagatcagatatgcaggtgcagcattcattttaagtgactggagcaggttgtatcagtttattaattggtctcgttgaactgaagtactttccaggatttcagaaagtgcagtttcagcttgttggtaccgagaattgaaatttgcattgactgtggcagtgtaagaaatttttctgagaaggtagttgtagataagtaattacataagagtgaaataataaggtgaaccagtctgaagtaatagttctgaacaagtctgccaacatttgagacatgtataccattatctcagcagaaaaaaataaaaaagtgcggtaataatgttgaaatgggactggagatgtcaaatgggttggtttaaaaatatccctaaactgctttagaaactaaacgttggagttgaataaaagtgaatctggatttcctgaatagcaccgtggcttgagtgtgctgtcagtatgtaagccagtccaccaacttaagacagaagtgttgctattccataaatacagtagaactccatatgctgagtttttcaatttcttctgttagaaagtttggaaaaaaaggaagactttgaagtattttgtttatactaacagaagagaaaagttctcctaagaaaaagctggtggcaggagtgtagaggagtagcatatggcattaaaaggagcacagctggaggtagcatttccatctgaacatgatgtcagagcagctgacagcctgccatccctcagccttttattctaacacacagacagggagttagtgtgtgcggatctgtggtggagaaggtatctcattcctctctaacatcatctccactttgcatctgtctctcttagtctgctttttttccaccgatgtaacagacctggagccagcaggactcagaggaaaggacttaatcaggtttatgtgtcctaaaggtaggagtagcaagagattagattgagcatatttctgttttggtgttttgtttatttaattttaaaaatcacattacttttctaacccagtttaggaataatatatgaa

SEQ ID NO: 59278 - DNA, 1982 bp, Homo sapiens
cagaatagagaggtgtttttcctttgaggggataggggaagtaagccaataagaaccttttaaacaaatcgtcctgtcacaaaatgctttcatatggcttaattttgtcaacactgcattgtcttttgagctcttttttcccccccaacaaagtttttttgttttttgtttttttttttaagtagaaattccctccagttttattagcctctttatatgtctcaaattgcatgaattttttctggctgttggaaacctgaatgcttttagacccaaatggaaaatttctgaaatgctggattatctatttttaaacaagcagttgacttaaaactttctgtggcaacttctggttttctgacagttcccagtgagagaaatgctgaaagtacactgggatcactgggacactgtcttatgaaggtttgcttgggatgaaaaaggatattgcagcttcagcagtgttgaactgtgtgtttaaaaatgtgaattactgttattgtatactgtaattgattacatgggctgggggggtgtcaaagaacttgacaggttgtgttgatgctcttagttgagtcttgaaaagtaaatattaacgctacagaaatgcatgagtttcaatatattttttgtctttgtttgcattgtataactttaacgagtgagtttaaaattatttaatttccttagaaaaataacaccatttggaaaaaaaaactggtgttatgaagaacgtaaatgcactgtttttatttttattttatataatttaaattgactttcccactgtctttaagttgaaactgttaagctgaataaaaacttaagctgcaaattgataacttcgctacataacaaggaaaatataaatgtttacaaacagcttaaagatttgcatgtgcagtgtgcatttataacaaacttctaattgcacaaaacccatgccagctcagagtttaggtgtacacatttacccagttgagcgttcttagaataactactgcacaagttgacaataggtcgttctctctttttttttgtttgctccctttttctttttctccccttcctccttaccctccctcccttactctccccccccaccaccaccctccacccccaactcatgaaaagattctatggactgaaaaagccccaggctgaaaggactggactgccttgattgacatggggaagggggttagtagactatgtggattgcggcagcagaggctgcagcctaacgtgtggttttaatgaccagcacgcaaggcaaaagcattttgcacagtgtttgttttcctgtcttgcacttacaaataaggtctatgggagtagcatggaaaacgtttgctgtttttcccttttttttttaattgcttttgtttaaaatttgatcgccttaactactgtaaacatagcctatttttgtgcttaagatactgaatggaaaactccattgtgtgttgctggactgttttggaaatatttggttaaatgtgtgttaatttggctgtaatggcatttaaagcaaacaaacaaacaaaaaaagctgtgaaaatggccttggagcattatctttagttacttgaagagtttctagtttttttaaaatacagtttatgttaaaataatttttattaatttagagaagacaatcaatgtctgtgagaaaacggactttcttttggattttctttttgtggtcattgtgagtgattgctttttccttttcttagtttcacattcttcctttgttctaaaacttagactgacatctagctttgacaatcatagtatgttttattttcctgagggggaataacttataatgctgtttagttttgtactattggtgtgttggtgaatttttaaactgtgtgctaactgcaataaattatatgaactgagaatttcttgtgtgtattttttattgtgattatgtagtgtatagattctaaatatgtatcatacctggcatc

SEQ ID NO: 59279 - DNA, 1048 bp, Homo sapiens
tgcctgctaattcaattgcctagaattccagtcattagccaagcagtcttccaaattaaaacatccggtctccttcaattttccacttaaaccagaacacaggagaatagatttgaccgatcaacttaggataaaattacacacgaaaagtgacttacggtatatggattagtagttgtacagtgtatttttaacaacctatgctgccacgtagtttcatgattcatgagtttctagggaattacctcaacattcttgatgtagattgtgaaaatgggtcgcattttttaaatgtgcatttagtatcttcttaagtgactagaatgcttacacattttccactcgagtgatttaaggcattctaataatttcataaactccgaatagaattgatattaaagatgccaggtatgatacatatttagaatctatacactacataatcacaataaaaaatacacacaagaaattctcagttcatataatttattgcagttagcacacagtttaaaaattcaccaacacaccaatagtacaaaactaaacagcattataagttattccccctcaggaaaataaaacatactatgattgtcaaagctagatgtcagtctaagttttagaacaaaggaagaatgtgaaactaagaaaaggaaaaagcaatcactcacaatgaccacaaaaagaaaatccaaaagaaagtccgttttctcacagacattgattgtcttctctaaattaataaaaattattttaacataaactgtattttaaaaaaactagaaactcttcaagtaactaaagataatgctccaaggccattttcacagctttttttgtttgtttgtttgctttaaatgccattacagccaaattaacacacatttaaccaaatatttccaaaacagtccagcaacacacaatggagttttccattcagtatcttaagcacaaaaataggctatgtttacagtagttaaggcgatcaaattttaaacaaaagcaattaaaaaaaaaagggaaaaacagcaaacgttttccatgctac

SEQ ID NO: 59280 - DNA, 1901 bp, Homo sapiens
gcttatcttggcctgttatcaggaacttgatcaccaactttctgtaggtctctgctggtgttggtcaatattttactatcctaagtcattaggaaagtgaaaatattgcacagttaaaaagggaacagtaaggcatactgtcctgtgctgggtcttatttgtacatcctgtttagaaatcggcacagtctgctaacagaatagagaacagcaaaaaggcacatagggaaaagttatggtgatactgagaaaagtaggggactacctgttttaatcccaacgagtgaacattagagatgaattgattcaattccttttctctttgtattctcctagttaagtggattggtgttggtaaatccagagaatctatgattcaactcttttaatgattgccagtaatgcaagaaacactccttgagagggaggggaaaagactttcttaaatatttcatttatgacctgcaaattcaagaataaagacactgaagtaagtttgaagccctacagttgtttccagtcttttcagatggatgcctactgtggagattaactttggcatattccagtgtcagctttctttagctggaattgccaaatcatttgttgctcctgctgctctcatggtgccacgttttttttttcaatgtttagtaatagtataatccatgttgtttgatatcaaaagtagaattacttttaatgtagtttttcttcattattgtcattgcgtgttcttaagttttacccctattagatggtaagaacaattaatgcagttttgcacaaatatttttacattctgatcattcagttctgtcattgtaatctttgttgttagaaacaaatgatgaaaacataggggttctgtaaacttttgtaatgctatgaattctgtttaaattttgggctgtctattttctgctgaaaccatgcaaaattgagctttggtggggctgggagggggttatgtattcatgggacctttaatttgtacagaacacagaacttatttctgtcagttatttaatacattgaaaatttagtgaaatgttcaaagagaatagatgtttcccaaaacaacaatctttatgttaaaaatagtcattaaaagatctgttgtaatatatggtggatatttttctttaatttcaaacattacctctgaaatgtgtatcttttcttttttatcttaccattaattttaaatctagtggattggttttcaacatcgtgcctgccgatatgcctacagaatcatctgtaagtgtcaaaatgaacccacgttgttagccataattttgattatgcctttatttctcctttcttgaaaaaaaaaaggtgttattttgacaattaggcataacattgttttgtagattatcttttaatgaactattttaaatgttaaattaggtgccacttaaatttattttattacaccatgaatagctgattaaaagaaccaaatatttctagtatgctttgcgtattgtgtttttgttctactaagagaggttagtaatagtatataggaaggagctttatctctgtagtgtaatacttagttcaagaaaaattctcaaataggagcagtatcgttagactcaataagtataaagaacaatacagattatcctacaagccaattactgatagtaatgacttacatgtaaaaataatttataatgaatatataatttctgtttaatagagaatgaatgggcttttaaagtctgcattcttatcttggttgcaagtattgcactgttaaaatgtatttttagtaatggttcagagacagatacaaagaactcattctccttttcaagtatatgtgttagactcttcctaggtattgggtatgcagtggtgacaggagcacagtcttcctgaaactta

SEQ ID NO: 59281 - DNA, 1047 bp, Homo sapiens
tccattaggggatacagagaaaatacgtagaataatgaagaaaatttcaagtagaaccctagatttctcagaagacagcaggtatgcaggccttctttctgtgaagttgctgtcatgcagatctacaatccctaatcaatagaatggaaattcaataagctttaaaactggaaagttttaagtttggcacccagattcatttggcagcaaaaccagtcttgaactaatgttagtattacataatctttatcctcttatagcaaatgatcatatgcgttgctgcagaaatatgtttgattatagaatactactccagatggtatttgcgctgttttacctttctactacctgaagaattctaaatcccaaaacatatgtggctccaaagattttgaaaagacattttgaacctacaatatatcaaaaagttgtttgacagtaaacagtgtgtgccatgaataaatgtcctctttaacttttagcaaaccaagaagtcttaaataaagttgaagttcaatataagactctcccaggatggaacacagacatatcaaatgcaagggcgtttaaagaactacctgttaatgcacaaaactatgttcgatttattgaagatgagcttcaaattccaggtaaacataaacactttgtgaataagttttttcttttctctctctctcttttttctttttttttttttgagacggagtctcgctctgtcccaggctggagtgcagtggcgggatctcggctcactgcaacctctgcctcctgggttcaagctattctcctacctcagcctcccgagtagctgggattagaggtgcgcgccaccacgcctggctaatttttgtatttttagtaagagacggggtttcaccatgttggccaggctggtctctcctgacctcttggtctgcccacctcagcctcccaaagtgctgggattacaggcatgagccagcatgcccggccaactgtcttttcttttaacttgcctatgtgcctttgaaatagaataaaggaaagatcattgttactttacag

SEQ ID NO: 59282 - DNA, 1975 bp, Homo sapiens
accttagcttagatatttgagcatgttttcgatcttagttttcttcagaagggcattatgatatcaatgacttattagatacatttgccttatggttttcaggaaaagcatcaaactacagctcttggaagaactggctggattcgtctatttaataaatacttttttttcttaatctgtcaatctaaattttaggaagttatctgtataacattgtaaaaaatattaacataaaaaaatgataataaatgaagcattccaaataatgcctccctcagataaaattcatcatctctgtggaattctatcttcaatttagttattacctgaaagatgtttatctcaaagaggctttgctatgatctctagcatatattattccaccagatatatagcactgctattctaatcctaaagttcaattttctgttctgtaggaaattggagaattattacaaacaaggggtagagagtttggtgtaactactggaaggaaaagaagatgtggctggttggacctcgttttgctcaaatatgctcatatgatcaatggatttactgcgtgagtattcttcagaaacatttatttcaggaaatcatagatgattaatggccataggtttaattttgtggagtaccttaataggaaaatttcactctttagactccatattgaaattgtagtgccaggcagaagtagaccaagatatagggggaagggtacacaaggagagagatcccaagttatcctcctagacatccaaggttgttgaaaagaatcgtgatactctaagtatagaggcaggcagaatagggtatgtaggcagataggtggacagatagacaggtgggtagcacagacaccatgagcatgtacagccgggaggcgatgtacctagtgatccgcgcatgggcttaatgtctgagttcctggattcagatctcagatctgtgcattatgcttgtgtagctgagcaagttaatcatcctctgcctctgttttatcctctctgaaatctatataacagcattacctacttcataggggtattttaaaaattaggtgagaaacgtagtgagagcctatagcacactgcctggctaactgaaagtgctcagggaaagttaagttgttattaatacgtatacatgaataggtaaataaatgtattcatatctgtattagactgaacttccagtaaataacaataaagttaaaaatacagtttttggacgagaatcccaaatttagtttgttatctaatttctgcagattttctctttaaaacctgttttccagtcagtttgtcgggaaattttgatgtatcatgaagaggtccttgatgtggtttttctcactctttgacaatttctgaccagaagggtagaggtgatggtaaccagagtgaagaattgagggatgctggcatgtgtgtaaatgtacatgtatcttaatcatccatgtagtgtagtgagttctgctgtgttccacggccacagtgcaaccttaactccaggcagccctcccacaaatacatgttgtttgttcatcaatcataagaaagctgatctgggcatggtggctcatgcgtataatcccagcactttgggaggccgagaggcaggaggatcacttgaggctgggagttcgagaccagcctgggcaacctggtgagaccctgtctctacaaaaaatacaaaacaattagctgggcctggtggcacacgcctgtagtcccaggtactcaggaggctgaggtgcaaggattgcttgagcccgggaggttgaggctgcagtgaaccgtgtttgtgccactacactccagcctgggtgacaaagcgagaccctgtctcaaaacgatcaaaaaagaaagctaagcaaaattcatcagtgaaaatctgttacaattactagcaaagtaactcagtgtatattgtcctctagcgtcttatgtgtggcacgctttaaaatata

SEQ ID NO: 59283 - DNA, 1050 bp, Homo sapiens
cattggcttttgactccaagtaaactattaaagaaagtgtatttctgtatggtagatatgtatttttgataccatagtatgtctagccagtctggaaagaaaacagagtgtctacttggtagagtgaatagttaaatatgaaggagatctttgggggtgagaaagtatgccactctttaattagctcttataattggagggttattccctgagtagagattaaaagctggggaaatgttgaatcctacaaaattcttgtgttgccgtcactccaggttgctacaacactttaaatattcgtatgagggagtcatatttgttttacactaacaggaaactatgaaaataagtagatgagtttcagcattaaatttcttcataatccagtaagtgagtagctgctataaagagctgagtcagtaactgtacatgcattcaaggagcctctctgtataagcacttgcgttaaagctctgacctcgtttttatgtcattacagctaaaatgaataaaaagtaaaacactgagtctttgagagggcagttacagttcagatctgttagatacctataatatactcaaatgcagaattgtaacggtaattctgttttaaaatgtgttattcatgtgtctactatattttaatgtctgtttctgtttttagggacttacccttttgtaacctcttcaaattgtactgttggaggtgtttgtactggtttgggtatgccacctcaaaatgttggagaagtgtatggagttgtgaaagcttatacaactagagttggtattggtgcctttcctacagagcaagacaatgtaagcctattctaagtaaataatcaaaatgtattaaaaattcattcttcttttttttcttaatgaattattgtctcctgtgcctttcacttaatttgcaagattggtcagaacaacattttcttaaatacataattttggctggacgtggtggcccctgtctgtaatcccagtgctttgggaggcagaggcaggcagatcacttgagcccaggagttcaagatcagctgg

SEQ ID NO: 59284 - DNA, 1050 bp, Homo sapiens
tccaccaaaagaaaaagaaaaaaatttaggtggtcatggtggtagtgcagctacccaggaggctgtggtgggaggatcgcttgagcctgggaggtcgaggctgcaagtgagccatgttcccaccactgtacttcagcctgggtgacagagcaaggctctgtctcaaaaaatgaaataaaataaaaaatttatggttttgtggattatattataaatgcagcttttcaaatacctcacaaaatttaaaagcacattgtaatatagtcatttatttttattttcctgaaagctggtttatgaagtatgactactttgctgggagggttttatttgcagtgaggttaatatagaacctttgaatttcactgtatctctagtttttgttgagcaatgctcttttctgttcctggaaaatcagcatgagacatgaaagctaatccaaatgttacaatagagtgagcaccgtcaccagcccttttctactttgcgtttgtcagttttcatgtcataaagtcaggtaatttattcttgttctggttatgttaaacgtttattagtatacatggaaattggtttttgtctttgtgtatagggttatatggaaaagattaaaccaatggtgagagatggagtttattttctatatgaggccctacatggaccaccaaagaaaatcttggtagaaggtgcaaatgcagcactattagatattgattttggtaagtgagatatgacttatagttaagggagcttaactgagccctaagtagttaaaatataaataattaatgttagcattaaggagttttaaaacaatgtttttagcttgtatattcaggaatgatgaaatttgtcatcttgtggcactctttttaaaggaatattgcagaacacacaatacatgtgttacgttccctattttattagaaaaataaaatcatcatttgagttcagtaggtctgaggttctgtaaattgtggttttcgttggtttatggttcaaaccctggaactataagataagataaattctatggaagaatctgcatct

SEQ ID NO: 59285 - DNA, 1412 bp, Homo sapiens
ggttgtgtataataacaagtggcatcaaagctataatgacattgtatcccctttcgatcaaccactcaacatttgtctgcactggcagtgcacctttactgaagaatattagattgctaatgtctgcctctctctcttttagaagtatcatgtaaactgcccccttttgttgttgtacagtataatacagttaattcagatttaagtcttttgtgtttacagattttagtcattccatttctcttccctccctacacacatatcaccttaattatattgttgctatgcctaaacttgagtaaaaaaataatttgaatgtcttacttattcatatggctgatctcctttattaaattttatttctcagaaggtgacttcagtttcaggattaatttgctgttaagatcatttaccatctgcagaaaccatttgaatgaaatgatattatttgaaatatttttcacagagtggtaatgtcttgatttatctgtgtttctcaggtttaaagttctagctaaccaatacaaatctatataccccactttggaaatagacattgaaggtgaattacaaaaactcaaggtaatgctttctggcatctttaatgttctttttaatacttgtttgccaaattggcatctagatcttttcattcatgcaggctttgggtaagaactggcaaaggaaattgtttgtcttggacatggtatgtttgagtgactttacatgatatggcttagacaaaatattgagtagggagcaggaggagtacctgaagtaaaggagacagagtccagatcatatgtctcatgtgcagtgacagggagtttagatcttaccctggagataatgaaaagctactaggaaattttgaacagaaaggagactagatttgcatcatataaaaatcacttctaacaattggaggacagatcagcaaaggctgagtgagaacttttgaggctaaccaacccatttaggaaggataaccccatagggccagattctttagcactgcactcttaagagacaaataaggtaattgaccaaagattagtcttttcttggcaactagtaggtgtcagtggtgcttacattggccagtagttgaaattcctgtcctcttcattctttcaccttttacgatttttgatgaacttcaaactgtttcctgtgaatctgattattacttcttctcatctatagataagtatcaatatcagttccagaactaagtaggaatctacaaacctcatatgccattctagaataaatgcagaccttaggtctgcccatccactaagttctaaaaaaatatgacctacaaagaacattctaaatgttaggtatttgtatttcagtgcactgattattgtgtagaatagactgccattttctttttattcagctat

SEQ ID NO: 59286 - DNA, 1095 bp, Homo sapiens
ggtgttataaacttctatcatcacttctaaaaatgtgtttaatttattatactgaaatgaggctgaagggatttataacttcagtaatttgaaatgcggtggattttgcttttgtgtattatctttgtttcaacaactgtggttttatttcccctcagtatttgattttcatcaagcagctgatggtatccaggaacaacagagacaagaacaagcaggaaaaaagtatgtgtgggtttttgtttttttggtacagtttaagcatatgcagacctttatattttagttctagaccagaagtttaagaaaaataagtattagaatatcctgttttagagaaaatcagtaggattatgaacatatacttagcaagaaataacataaacagaaaatagtcatatgtaactttattcactgcaatgatctgaccaggagacctacatctttcttgtctgacttaaagcttgtttggatttgtttttaagtttgggtacaacaaaaaagggcattggcccagtttattcgtccaaagctgctcggagtggactcaggatgtgcgaccttgtttctgactttgatggcttctctgagaggtaactaacttgtgtttcaaaatggaaggaatgaatgcattttttgattttttttaaaatctagggtgcaaaatgatacagtcggtattctagttaaatagtggtggttggcttttttaggtttgaaatattaaagttatttttattacattctaattcatccttggttacagattaacttcatgaaatataacatgacggtgatttaatagaatgtcctaagaagacaaagccagagttatatttaagaattgaaatatggaatggtttcctgagaaatagaatgattccaggggctgtggctgtccttgggtggttacattctaaggtcttgatccttgcattttcaggcctagagactccttatgtcctcccacccagaaatcattagctctcagatactggtgaattattgtataccaagctcaacttgaaatcaacagatgctacgttaacacatgctttctgtagccagatctccttgggaaacctagtagtcatc

SEQ ID NO: 59287 - DNA, 1530 bp, Homo sapiens
ttcaggtcacagagttgcttgacacactcttaggatgatgggaattctatgaatatttacatcaagttagggtaactggatagattactctatcttaagagattttttgtgtgtgtgtagatggaatatcatggttagattgccataatcctccatagccaaagacagactaattgctctatgtatttttttcactttttttcccctcttttaagaaggaatatgattttctgtctttcagaaacctgaattccccaatttctatattctttcaggataatcactcaagtattctacagtggggaaaggagacagccaaactattttaaagccttttacaaatgagtagaggtggtaaatatttgggctctcttaagttgaccttttggcaggaggtcattaattcactttggagggagataggttatttgtagtatttatcatcaggctcaattttcccctatcttacattttagggaggaaataatgctggccatacagttgttgtggattctgtggaatatgattttcatctcttacccagtggaataattaatccaaatgtcactgcattcattggtaagtatataaactgaactgcatggagattcccccccaccagttgataatggcgtttattttttattgtcaaaactgttttcatctctcactgaccagatggttcattgatctcttattaattttgaccttgataccttctggaatatacatgactttggctatttgtcactgtaagatcttttaacagtaatactttttggaatgattactttgcattcatctgtgctcactgacaatcttaattctgtaaagaagtattagatcattgaatcagttttccaaatacttttttttccacaaatactttcaaccatgactcatagtaagaaatatgagaggttcatgaatttattttgaacccttacaataaatgatgcaatctgatcttttctactctccttttaatttttaaaaatccttatcacaacctactaaattgatttatgaccactaatagggtgtgattccccaacttgaaagatactgatttagcatgtactgtgaccatgttccatttgcttaaaattacataattagtttccttcaaaatcatatttcactttgttttcaagaaattttcagcttcattgagtataattctagtgttttatattcactatattatgttccattatgtatttaaattatactcctgtgtaaaacttggaatcatttctgtggtaacaccgtggtaaatcagaatgtcctttaagttacatatgtctgagttatagatgtttaccgttgggatttgttggttttcctttaggaaatggtgtggtaattcatctacctggattgtttgaagaagcagagaaaaatgttcaaaaaggaaaaggtatgaaagaatgagtctacttggtaaccagttgttctttgtaaagttttattaggatcttatgccagacgaacaacatgtttgtcttatgctttaaaatttcgggctat

SEQ ID NO: 59288 - DNA, 1027 bp, Homo sapiens
tggaaacaatagatgcaaacctagtggcgttttcactcttaacagcgcttaaggcctgtgttgttcagattcaggatttatggggagttatttataacttggtaggttccccagatccataaatatgtaggacttgcatcaaaggacaaccactactgctgccttaattttaaatcaatatttattttaagaagaagagagaagaattaaatagaggcccaaccctgggtacaggtcattcatctagtaaacattgagtatctgcaggggatcacttagcctgggagtcaaaaatctgaaaaaggcagggattgtgcccacaaggagctcacaatctgggggacaactgctgtgtaagcaaaagtgttgagaaggtcgggatggagaaaggtactagtctaatacgtttctcaagaggttaaagtatgggaccaagaaagtccctttctggcatcacaaaaggaagcctaatactgttttttccccagttctctcaaagtaaaatactgtgctttgttttctgtattttgctgagtagaagctacagaaacttcttaactatagtagtttataccaggctttaagcaaaggcttacttatttattgttcttgaggaaagtaacttcggtggtcttggttataatgacacacatgaagttgcctgtgatcgggaaaggctagagcagtgttccgtgtgtattctctccaaggcttcaaagtcaataaaaagagaaaatactaaagttagtcataagggaaagcacaccccatcacttgatatatgtttataaaagcttgctataaaaataaacatactgaaaaaatattactattttctagctagatacaagtatctgctgaagatctgaaaccactattagtgttaaagaagcataaaagacatatcagcagcaaactaaaactttctccttgaaatagaaaaggtgaaagataatttaaaagaaaataacgttagtattatttaatgccttgaccttgtacagctaaaatgatctgccagactact

SEQ ID NO: 59289 - DNA, 1320 bp, Homo sapiens
aagaggtgggctggcggggagcctttgagagatgcgcgatgcctggcagttgcagttttgcgtctggcgagtggtgctcagcgccgggactgaggccggggtggaggtgggatgcggtccgagtttgaggagctaccgcccgaggcctgctcccaactcttccgactgcgggcggagacccggcgcgacggcagaaccccccatcaccgcccccccgccccgcccagggcggcggagtgggagtggattgtttcgaaacgtcctgaaatcagactcaccgatcccccatctgcaggaccgtggcatgcagtgctttgcttcctctggtccactttgttgacatccaaacccacccacctctgggctttggactgttgttttagggccctgagtttcttgtttttgtttttgtttttacagtgtgctccatacatgaaagttaaggagaaattacttttactagttggtcccagaggaaggaatcccttctctgttcaaaaaaagtgagggaagtaaatacatggatgtcaaattgagtatttggaaataaatatttgcattgttaaggtgacatcgaaagtgaactttcggaaaacgaggtggtaatgtacttctaacgggagacacgtggttttcagtgtaacctttcttcctatttgtcgtttcctttgacgcagcatacagggtaaggcctttgtaaaggctctcagataactctctccagtttcaaaattctaagcagatgagcaataaccactttcaaaacaaagcataatgtaatatttgaagttaactgctatctgtttaggttgcaagaatatttgtttttgaacatgcatggcatgatatgatggtgccatgctgtatatgttctagtaagttataggcccccttgaataccattttgagcatgcagaaacaatgaaatcacaggtatgttaaaaagctaaatgcaaatactgcaaatattctctgatttaccttgtttcgttttgttttgttttcatttagaaatccaccctgcccattctgaaatagctgttgcactaattgcctcttaggaaactgtcactaccacctctccctccttcccttccagcctattatttctccacccctctggcaacacactttgtaccttagcaatcttcagggtgttgccattaaattcctgccccgcactttcttaggaaatactccagaaatccagcctttacctaccttttgtcttacattcagatctggtcatgctgtggggaagacgtatccgaataccgagctttcttgctgtcgacagcgggagagaggctgaggcctgtg

SEQ ID NO: 59290 - DNA, 1030 bp, Homo sapiens
aactttggagtatggcaagcacgcagaatcgagtccaagaactggtttgcctgatttttgcagtgaaatgcccccagaaaaaagcacccggtagagaattgtcgttgcagttagatgcatgtttgggtgtgtttgcttgctttgttctgtagaatgggtttttgttctgtagactggattagtacctctgactgcagtgcttaaaattccttgtaagttgactgacaaatgaaaaattgcccgtcgttatttttgttggcttaaagatgcaggagagcagaaatactacaggccaagagtcttatacagttctaaactttgtattcccttgtattatttataagtttctaaatttacagtgttattatatcttgggtagagtgggatttctcatgccatatctgggaattgtgtcagaagggtgtaggaactgcctgccacttgagatgagtcctctgttgaattctgatgtgagcctggagatgaaaggagatgagttaacatgctgagaaaagtggaacaggacagaaaaagttgaagaggagaataagccaaacaaaagatcctagaaaaccatggcactttgtaagttctgtggcctgtgtcactggttgagaaataattctctggatttaaactttttgtgttcagctgaacacctttatctttcaagactcttaactgcccttttactttctctgtgcacatccccctaatctgaatttggtttgttttttattcatgagggctattactgtctttcagaatatattctgctcttgagatcacagtgtgccttttctcctagattattaaacaaacccgtatttaaattaggagtatacagtggccagaagccatggtttcagagcctaaaagaatttgtgagaatagaggaagagagttttaccttttatatgaaaacgaaaatgcatgttttggcatatagtgggcttctttacacttgaggcattctgtgatacaggaaaatctgcaaattgtggtcgattgggaaaagctagagatggta

SEQ ID NO: 59291 - DNA, 1786 bp, Homo sapiens
gtaagtgatctgcctaaacaactaaaaatacaatctagaatttgtagaccaaaatctgattcactatcttctctactaattcctgcacttatgtctttatattgcttttgcctgtgaacaggagatgaagcatatgaatgtttatcggaatgataaatagttgaattattagacttttaataaacttggtcttatatgttcttttgagggctttgagtgttttatgtcactaattcagcaacctaccattacttattatttttgacctggtagaagccacaaggatgagttaactgtcctttcttctttaaggaatttagagtattgtagaggagatacacaacagtggcaacaattcaagacagaatagcatggttttgataagagcagacaaggatgcaaaggaggagactatgtagttgtaggatcagggaatgctgaaaaatcaaaggtatgaaacttgaagaatgggtagcatccacaaggacagagaacaattgacgtgaacaaaatggcaggaatagggaaagcgcaggtgggatttgggaactatcagctggtccagtataactagagtagagcataaatgaaaggagacaaaactgaaagtttgattagaacttctttagtcagatgtgttgtgggcttgggtgaagggctgagggggctccttgagccagcagaaccatttaaggttttcatggaggggaacagtgtgatcagttgtttagattgagatacaaattttggtctgttatactaatttttctcaagtcagttttggtttttgaaatatttttgtttgatgccaagggtaaattccttttatctttggtaattcttcctattcatcagagatgctttggatgagggttgctgttgtctgtataggcctagtacatcagctgtctggttccaactctgtaaatatgaaaatcaaccttagggatgcccttataatcatggttatagggacctcttgccatgtgtccttgtgtctctttgttagattgtcacccgttccagttctgattgtatttttctattttctagattgggctgctgcggatcatttcttttcttccataactctgccgtatgcatgaaaataattctattgggggtcaccagtattaacttccttctcatggaagaagagtgtgatcctcagaaggttacttaattatgcatagtgttcctattgcttgctgccttatcagtgattatgttcctctgtgtactttggagtaatctaccaccaataaaaacgtcctggagctactttctgagtcgtgggaatgagcttgttcacgtattcctaattgactggcacacatagcaaagcaggtgactcagattagtttcaaatactgagacaaatctctggtgtagtcattttaagtcttcatttttcatagatccagattttgtgcttttcaggttatcttgactaatgaatttttataaaataaaaatatgcaggtatttgataatgtttgcaaattcattgtgttaacaagtttctaccagttttatttatttattttatttatttgttttctcactctgtcacccaggctggagtgcagtggtgcgatctcggctcacagcaacctctgcctccccagttcaagtgattctcccgcctcagcctgccaagtagctgggattacaggcacctgccatcatgcccggctaatttttgtatttttgtagaggtgggtttcaccatgttggctaggcttttctcaaattcctgtcctcaagtgatccgcccgcctcagcg

SEQ ID NO: 59292 - DNA, 1171 bp, Homo sapiens
gaatgtattttggtatagatgtgacagtaacttaaaaacaataaattaaaaatcaactaattggccccacattatttgaaataagtctttcctctctaaattgtgatgtcatccttaatcataatactaaattcttacccatacggaattgttgattctagccttattaccacactgttttaattattatactttcacgttatatttggaatctgattaggccagtttccctttactattattccaaagctttattggccttcatttccttttctaggagtactttgtaaggctcgctgaaaaaaattccataggtttttgttttgttttaattgtgttaaaatacacataacataaaatttacgtttttaactatacaatctactgtgttaggtatattcacatttttgtgcaaccagtcttcagaacttttttatcttgcaaaactgagactctatacccactaaacaacaactccccatttctccctcccctcagtccctggtaatcatcattctgctttctgtctctgtgcatttgactagataacctcatttaagtgaaataatacagtatttattttgtgactggcttatttcacttagcatagtcctcagggtttatctatgttgcagcatgtatcagaatttccttcctttttaaggctgagtaatattccactgtgtatgtatatgccacagaaatcaagctaattttctttttttttattattatactttaagttctagggtacatgtgcacaatgtgcaggtttgttacatatgtatacatgtgccgtgttggtgtgctgcacccattaactcatcattcacattaggtatatctcctaatgctatccctccccgctccccccaccccaccacaggccccagtgtgtgatgttccccttcctgtgtccaagtgttctccttgttcaattcccacctatgagtgagaacatgcggtgtttggttttttgtccttgtgatagtttgctgagaatgatggtttccagcttcatccatgtccctacaaaggacatgaactcatcattttttatggctgcatagtattccatgatgtgtatgtgccacattttcttaatccagtctatcattgatggacatttgggttggttccaagtctttgctattgtgaatagtgccgcagt

SEQ ID NO: 59293 - DNA, 1063 bp, Homo sapiens
taaacaaaaaatctaggatccagtcgaggttcattcacttcctttaattgccgtaagagtagcccacccttcctctgccttcttttgactttgctaacactgatatttttttaaaaaccaagccatccatggccaggcacagtggctcatgtctgtaaccccagcactttgggaggccaaggcaagtggattgcttgagcctaggagttcgagaccagcctggacaacatgatgaaaccctgtctgtataaaaaatagctgggcatggtggcatgtgcctggagtcccagctactcaggaaactgaggtgggagaatggcttgagccctgcctgcagtgaaccgagatcaggccactgcactccagcctgggcaacagagccaaaccctgtctcaaaaaaaaaaaaagaccaggccagttttcttgtagaatgtctcatagtccagacttacctgatttttccttatggttgtcttctggtttaacacatttgacaggaaaactaacaaagcaaatgtagcttttgtatttcgtcacatccaaaggcacataatatcaattggtccaactattaatgatgctcagttcaatcacttagtattgataaggtgatatacaccatatttttccattgcaaagatatcttttttctttgttatttaggaaaaatagtgggggttggcaagtgacattggtgcaacaaatggggagaaatggcaggggagaaggaggtgatactttgagacattgtgtatatcattcttaaacagcctttcttctaatggttttatcatccatgatctttgcctgactcaactggtggcaacaaaatggtgattgcctaattttgccctttcgtctacttgtactagctggctggcttctattaaaaaaagagctttcctccttttactttttttttttttttttaagtattaccatggactctgagatagtctttttattcaatatgctatagtccattatcattattctttttgatgttcaccttttcccatggttgactaatgaaaactgctttaggccagcttctctataatct

SEQ ID NO: 59294 - DNA, 1027 bp, Homo sapiens
ttgaagaatccttactgtatgtaatcttactactctccttccaaaatcaaattgattcacataaaaaaatgtagccttcgtttcctaacttgccatccaaattctggctctccaaaatcaggaactcaaaaaattccgatcaagagggatacttatattctcatatgaatctttgttatatccacacagattctctctttttgcatattatttatctttttatcttgtttttatgtagttttataaaataaaaagttgtacatttttatgtagaatatctgttgatattttcctctgtaaattctaggattttactttacttaggttgtcttttcccacctaaaatttttaaaactctattcccttctatccatatatagttatttttagacacactagaatttttatacatgaaatttatgcataatcaattttgtcaacatgcttttagtaagtcatactttgtcattaattttaaatatctcctttatcatatatcaaattcttatatatacaagggtctgtaccaggatctgttcctgcaacaatgccatattgttttaatgaatatttcaatttctagatgggaaaattccttgttttcatatatttatttatgattgcttaattcttcttccaggtacgttttattttatttttatccacgctcggccccaggtacattttagaaaaaaacacaactgacttgttcatttatgcttcttccagcaatgcgtgagaatgtgtgtaggtctgagaaagactggctaggggtctggagccaaggttaagacttgaataaacctagaacaattaaagataaattatctgtcccctaacctgggagacatccaataggtttgtaacacttttgagtgttacctaagtgttttgtttagtgagctcttaactcatttacctttttctcagtttaaccccctccacttcacctttttaacccctttcacagtcatttcctgtaatttcttatcatataacctatgtacatcctcttccctcttcctgg

SEQ ID NO: 59295 - DNA, 1027 bp, Homo sapiens
aattgattgttgatatatgtacttttctgttaaattgttcttaaaaattctaagaattatcatttaacaccgtaatgttatcagttccgatgcttcctctacagcagggattagcaaactactatagcctggcctttgaaccaacaccagcgtgtcatctgtccttgtacagcctgcaggctaaaatggtttttacattctttttaaggactgaaaaaagccaaaagagtattatatggtgacatgtataaattatgtaaagttcaaactttagtattcataaaatttttttttttaaaccggaacatctattgcattactcatcgttgaaattcttaagatgaactggatgctgcagcagctgccctcttgggtttaggtggtgttccttcacggaatctgtgcctgaatctgcggtctacaatttttaggtgcctcattcgaccagtcccagtggtattttgtcttttagccttggcactgccgttatactttctcttgcgcttggcggggtagccacatttgccacaggtcaacttctgaaggtggtaggccttagagccacagcagtggcacgtgtgcgtcttattgcgacgctttccaaacgatgatgttgccttcgtcaccttgcttctgtggctaagaccagagagattcattaagttttattagaacacagccatgcttatttgtttacctgtttccttgactgctttccggctgcagtggcagagttgagtagctgcagcaaagatttatggcctataaagcccaaaatatttattgtttgacctttaacagaaaaagtttgccagcctctactctgcaagataggtcccttcgaattgggtgctaagtggcttaaacattgaggaaacgttatcttacaaaacaagtccagaataaggcaggctccattccaatgtggtcagtgtctcaactgtgagtgtcatagggatgtaaggtctttattcatttctctaagctgccatccttgggatgttggccccaccggcaggccagctcc

SEQ ID NO: 59296 - DNA, 1034 bp, Homo sapiens
aatatattgtattaacaagcgtcttctgtgtgttcaaagtacttttcagtgtgtctcacagcagttgcagagatcaaagaaaggagccaagtgaaattagcttgatttcacagatatgaaaagtaagcaacttgacaaggttctttagaaaggaaggaatggagccaacagtagggagcccaggtcctgagtaaagagctgcttgttatcaaaagcctggagtgacaccactgaaggctagtctgccgtggcttctctgtacgccgcccccctcctcccaccctccactccctggcagtggaccaggtaatcttaacctctcttacctaatacagaactctttctcttctgtagattctttgtgggaaagagattcctcgctggatcaatcgacttgcctacttcagctcctgtataccctttctacagagttgcctcccgaaggagtggctcacgcccgcagccctgcagtctagtgtcagccaagaactccaggatgaactggaggaagcagaggatgctgccgcatccgcttccgtggcaagcactgcagcaggctccagacccgggcgccacactaaactataaatgtctccaaagtcacacattcagaactgtctctggcagtcgaatatcactagagaaaagtaaacagagaagcatcctttagatattttgtatgcaaagatggctctcccccaaatcccagtttttcagctcaggattatatttgtaatcaaaaaaaaaaaatcacttggcgcaggagggagaactttgtaagaagctgccctctgttttttttatccactcgtaaatctggatttatttcttctgttttatacaagctctgttaagttatgtttacagtatcttgtatcgctgtttacaaatcttgcatggactcctgccacagtgaaagaagaaaatcttcatgtcttcaaaaattaggcaggtaatctttgtatacttctgacaattgccagatctatggcataaataggcacacaaaaaggtacttaaacagttatagtcac

SEQ ID NO: 59297 - DNA, 1717 bp, Homo sapiens
gcattagcctgaggacaatgaagccacttaacctaatttatgctttcgactgttctgtttccagagaggaaagcctttacaaattactctcagttctttaggggcagaaggcttgtttcaagaggtttgacagaagaaaggaatatatgaacttaatgagatgtcgacttggttcaggtctaaaaatgagggcaaaacactaaggctctagcagtgacttgttcactaaaaagagagagtcctgtccccagacggttagtacaaagccttggatacagtttgcttgtaatatttttaataatgtgaggagtacagtgttttctaattcattcaagtatatatgatttaaacctgggctactgacacacacacagtagccattagttagactcttcttagtgaatatcaggaacatcccatctgtgcttaaccagaatccagcaagtcagcacacaagtgattttattgttattttgttgtatttacttgcatttgttgtatttactttcatctgcagcatttggagtttaaaaataatgtaaagggttctagtagaaatagtgtcctaaggccaattacctaccatactaacaatcagcagataaaattctggacgtgagattccttataatctaattatacctgaggttgagcaagaaatgtcttcctttagaaaatctcattcaagtcaggttcttctctacagttcaaaattgagaatggatttaattaactagcatttagccagctttttcttgcccttggagaaaaagaatcattctcaacctgataatctgttaagaaaaatcccatatgaacaatctggtcattaacatacatatgatacggagtctctttgttgtcaccaagtgaacatacttctcatggtgggttggacagtaatacatgttagagggtcagaagcttctggtttctgctgtttgctttaaatacccttggggtttttttttaaacccttacaaggggagcatcagctttggaaagtgtgactctgtaggagtgtagaaggcagtggtgtatgatcttagcctcgtcctgatgcctgaatccagccagctgttgctctgacccacagcaatagagcaagttacccatcaccagcatttgtacagagcagggaattctggttttagtccattggtagcattgtgtgtatgaggagattcaacaccacagacagctgcaggactcgatatccatggcttctttccatcacaaaacgggtagaaacacattcactgcttcagggttctaatctgtgtgtctccttatgactccatttctgtaagctactctgtaactttgatatatgctgtattttctttctttaaaagatttagatgttttttcagcaagctagccatacaaccattgtatctctttctcttcagtatggtttagagcccagatcagttagtaggctttcgttgtcttctctttcaatacatgtacatctttactgtttgaaaagtgttacagctgtcaaagaatcttcatggacctgaagataatttcttgtgaagttgaatgcaagtgtactgtcattcatagtgtttatatcaaaataccaggaatcttcacttttgctaccttgatatagcattgggctatcatgttacaacattgaaatacattgatttattaaaaaatacttttataagaaatgttttatagtgctttctttcagattataact

SEQ ID NO: 59298 - DNA, 1600 bp, Homo sapiens
ggagactggggacaaaatggagggagcagctcgctaatgaacatgcgtcagcacgttggtgtccgcggagagggcgcgcgtgtggcgaagtcttccggcgtccccgaaggaaaaatgcctctgcaacgtgcatttttgatgtgaagtcgtgttccacgtttcactcctccctaagactgcgacataacgtgaaacaaaatactgcatattgtcgagctcaatggagaacgcgtgcatgcagggtcgagcccatttttcagccatcaaaataatacaatgcaattttttctagtatttataatttttcccctttaactttatgcctcctttatgtacttctacatttcacgtttaggttatatgtaacctaagggcactccttaggaaactggacttgtagaatatgtcattgtgcaaagtcatgctgcttcgaattatgctgcgcgctggcacacagcaagcgctcagtgttaacgatgtcgaattcatattaagtactgttcattgggcgttttcttactccgtaaggaccttacttgcatgcccatttgatacctttctacaatcccagtaaaatacacagttaaggttgtgtatttatgtgtcacatttttttttttgaggtttttttttgcgggggcggggggggtttttttgtttttgtttttgaaattgtagttagaaactacatactgtgccgggcgcggaggctcacgcctgtaatcccaacactttgggggctgaggcgggcggatcacgaggtcaggagttcgggaccagcctggtcaacttggtgaaacctcgcctctactaaaaatacaaaaattagcctggcgtggtggggggcgcctgtaatcccagctactcggcagcctgaggaaggagaatagcttgaaaacggaaggcggaggttgcagggagccgagatcgtgccactgtactccagcctgggagaaagagcgaaactccgtctgggcggggggagaaactacatactgctctactgtttgctagggaaaagaaaaaaagtcaccctactggtgatatcctgccaattctggattctctgctgaaattataatgctaactatgctttgaactccggatctgaaaggccgtgttgaaggtagtaatattccatgaaggagggggaaatccttttgaagtcattgttgattatgttgtaaaaggaaaactggaaaagtaccagctaaaacaccaccgagtcatcctattttatttttattatgactttgaaaatttgctagagtagacattgttggggtctatttcatttgtctttgaaaagtattttcataaggatgatttattttttattttttattttttttgagacagagtctcactttgtcgctcaggctggagtgcagtggcgcaatctcagctcactgcaacctctgcctcccgggttcaagtgattctcctgcctcagcttcctgagtagcagctgggattacaggcgcctgccaccacacccggctaatttttgtatttttagtagagaaagggtttcactatgttggccaggctggcctcaaactcctgacctcaggtgatacgcctgcctctggtttccaga

SEQ ID NO: 59299 - DNA, 2049 bp, Homo sapiens
gaaaggtaattactaggggaattttaaacggcactacataagcaaacatgactcaaattactttttccatttctgcttcccaaattattggagttactgaagcaagctatgctgctttcaattccaatgataggcatattcccaaataaactcatttaaagagctcataaaatgaattatcctatttccaagtcagttgattagcaaattaagatacagctccaagttaccctactgcttaagggttttccggtccaatttgtaaggttttcggatttaaagattcagactgcataccaaaggtggacaaagacaacgcaagctgatttaggttgtcacgtggcacatactctagtttaaaccctcaactacaagaaaagaaatggtgtattgtcatttttgccaaagcaccccaaaatgaaatactttcttactcaatctaggttcttttttttcattctagtcccttaagctcctaggatttttagatgttgaaaatactccctgcgcccggcattcaatattgtatggttcattaggatctgttgtggctggctttggacattttttgttcactagtgagtatctgtattttttatttctctatgtactaaaaaaagcatttctctacataatgaactatttttttttctaggtggagtaatgtatataacgtaattatattctaattaattgttatgcttatttttacaggtagaattagaagatcatgtgatgttggagtaggagggtttatcttggtgactttgggatgctggtatgtttgctaagtattcaagaacatccatgattatagtaggttatctaattcaaaaagcacatgctcttttcagagcagtctcccattgggagatcctcaccctcaatgaagaatcttgatttttcaggacattttcatggaaatcttaaaatgcttgaacagataaatgcatattagacatcccattaaaaagaaagctgtggtttttacacttcacttaggaaagcctcaaccatttcccttaccctaatacttatttcatccctgcttattcatatctgaaaatgctactttaagaatgtgtttacaactactgatgagtgaatataaaatatggatgaacctcaaatatttgccagacctaagagtatgatatgtatgtactatatggttccatttatacatgaatttctacagtgagctatttaaggtggtagaaatcattttatgtagacatagcattattatcccgttaaaaacgagagcaaatacttgtttcttataatagccaatgctatcagaagacttaaaaactaatggattttatcactttacaaattgttatgtagacatcctttttttcctaataaaaaaagaatgtgttgataggtattctgacaccaaaactgcccaaaaatagcactataaattagaacatatttttcagtctcagggtagtagtcatctgtatttaagttttgtgtgatttagagaaatttcataaattaatttctgtaggactttatattaacaatttattcatattcttttcttctaaggtttcattgtaggtataattatgcaaagcaaagaatccaggaaagaattgccagagaagaaattaaaaagaagatattatatgaaggtacccacctcgatcctgaaagaaaacacaacggcagcagcagcaattgaacaatcttgagcatagaagtcaatgtaaacgaagttaagatcaaccacataaaacatttcatgtgcaataagctctcaatcaagtaaataaagtttaagttgtagtcatttttttcccacacttgtgtggaatgaaaacttgccagtttattctggccctgtgtctactgccaggatagcattcttacgtgttacatatagtggacttgtcatccttaaaatgtgaacagaatttattggcagtgtggcaaagaattataaaacatagtgtttaatgtacttggagtttccttgtagtagtaagtatagagtttgatgataagtaaacgtcccttaacaaaaacctcaacctt

SEQ ID NO: 59300 - DNA, 1718 bp, Homo sapiens
acttcgtttacattgacttctatgctcaagattgttcaattgctgctgctgccgttgtgttttctttcaggatcgaggtgggtaccttcatataatatcttctttttaatttcttctctggcaattctttcctggattctttgctttgcataattatacctacaatgaaaccttagaagaaaagaatatgaataaattgttaatataaagtcctacagaaattaatttatgaaatttctctaaatcacacaaaacttaaatacagatgactactaccctgagactgaaaaatatgttctaatttatagtgctatttttgggcagttttggtgtcagaatacctatcaacacattctttttttattaggaaaaaaaggatgtctacataacaatttgtaaagtgataaaatccattagtttttaagtcttctgatagcattggctattataagaaacaagtatttgctctcgtttttaacgggataataatgctatgtctacataaaatgatttctaccaccttaaatagctcactgtagaaattcatgtataaatggaaccatatagtacatacatatcatactcttaggtctggcaaatatttgaggttcatccatattttatattcactcatcagtagttgtaaacacattcttaaagtagcattttcagatatgaataagcagggatgaaataagtattagggtaagggaaatggttgaggctttcctaagtgaagtgtaaaaaccacagctttctttttaatgggatgtctaatatgcatttatctgttcaagcattttaagatttccatgaaaatgtcctgaaaaatcaagattcttcattgagggtgaggatctcccaatgggagactgctctgaaaagagcatgtgctttttgaattagataacctactataatcatggatgttcttgaatacttagcaaacataccagcatcccaaagtcaccaagataaaccctcctactccaacatcacatgatcttctaattctacctgtaaaaataagcataacaattaattagaatataattacgttatatacattactccacctagaaaaaaaaatagttcattatgtagagaaatgctttttttagtacatagagaaataaaaaatacagatactcactagtgaacaaaaaatgtccaaagccagccacaacagatcctaatgaaccatacaatattgaatgccgggcgcagggagtattttcaacatctaaaaatcctaggagcttaagggactagaatgaaaaaaaagaacctagattgagtaagaaagtatttcattttggggtgctttggcaaaaatgacaatacaccatttcttttcttgtagttgagggtttaaactagagtatgtgccacgtgacaacctaaatcagcttgcgttgtctttgtccacctttggtatgcagtctgaatctttaaatccgaaaaccttacaaattggaccggaaaacccttaagcagtagggtaacttggagctgtatcttaatttgctaatcaactgacttggaaataggataattcattttatgagctctttaaatgagtttatttgggaatatgcctatcattggaattgaaagcagcatagcttgcttcagtaactccaataatttgggaagcagaaatggaaaaagtaatttgagtcatgtttgcttatgtagtgccgtttaaaattccccta

SEQ ID NO: 59301 - DNA, 3346 bp, Homo sapiens
attcagggtttttttgcaccattatgatcaccatactgtgccaatgacatagttactcatgagcatgtccagtctgtctacattaatgaaggataatgcagagatcacaggctggagagttacatctgacagagaagtgctgcactattggggcatattctttcctgctattcctttaacagttccattctgaaccttacaggaagtaaaataagttatgtctggtaaaatatacgttgcaaacacttaaagcattgccacaaattggtgacagccaagacatttttaaaaattttaaaacaccaagaatagacgtggctagtacagacaccagtttataagtgtgacattaatgctataaaagttaaagcatatatagagatacctaaagagttattggggcttatttaaatgtcaactaacaaaggaattttttgaggcagcttgtatcctgtatcagttgtttgtagttaaagattgggagagtcatggtcacgtacaagaaaaaaagattccaacataactttttttttttttcttgaaaagtaaagcaaacaaatgtgttgatttacatttcatctccttttccttagtctgtccatgtgaatgtgctgtgtggaagagttaaagggcccaactaaatgttccagtgattccaataggtattccaaattaattgctgcttgtacatttaatagttatgttaggcttccagaatcactttaaataggactctttttaaaagatgggggaagagagtaattggtaatcagatggacagagtctctgtaacagaaaaaaaagggtgttttctcttgcatatctgaggtgaagtgtgtattctgtgtgctcttagcaattggcagtcctcttgcttaggtttacaggtgtatgtgaaaatagacctgagtcttttcaaagttagatcatttttctgatttcatcttttaacttttggcaatacatttgttttgatatccaccctacttggtagagtgtaagtacttccttacaatgttctaatgtaaaacagtgcataggagacctttctgtccttggttgcccaaaatctttttcatttctactaaattcagaaatacatatttttactagcttatgaaaatttggaaaatagcttgacatccttttggataatgaagtgattagttcatatattgaagtatataaaatcaactaggaagtaaattcaagactgaaggaatgggagagcttgtgtgagttttggttgtatcagtccagaatatgtaattttccatttccctgaaaaagacttcagaggaaatttattttccccactatacgctccagaatgtctttcggtgaaatgagagggcttgggctcttctgattctagacgtagctatcagagtttgcttaatgaaatatgggtctactcacaaataaagcaatttaatggtttcgaaagagtaggcaacttgtggtttcattaccatttctgttcatttgagaaaaatcataaaattacagaaaaggaaacattcatttcaaaaataagctttgaatttagatggtaaggcatatatgttttatttcacatgacttcagggtagaagtcaaatgaagaaacatttctatggaaacttaccctttaagaaaccagtatatgcaaagaatgattgataccccctgagggtgtgccatataataggtgactgataacatacaggatttaattcttagaataattaagaacagatatcacccattacattgacctacatttttctaaagtgaacaatagaaacctctctcagaattagtatttgcctattaatgtaatcagtgtagccttctcaacataaaaatgtccttattctagaacatggaagcgtacggcaaatgcaacggttgaaagcactgaaaaatatttgtaaaacatctgtagtgctcacattatgaactttaaatgtaatactttgaaaaccatcttcataatttttttgttctaacagcttcctttttaagaaaacattttaaaacattttaaaatggaacttaatgtgcaaaataagttgtgtaaaataccagtatttgggtggtggaggatattggtatattatattgacctgggttgatgactactggactattttaagatacctacttccaaaacttattttattctagaggaccactaaaaatcagaattacagcaatcattttaatttttctactttccttgttaaggtcttctgcttacccaaagaatagtgtatatcttaacatgacttttaaaggggtatcttgatccccatcacagatttttatctatgaatagaaggattgaaaccctatttgatccctagctctttgctgaaaagtgcataaacaggaatcctgaatttattatatagacctcctcgcattatataatcgaagcaaagggaaaccagcgatggagtagaggtacgtagactaaagagatgcttgcaaatgatggtacctagggatagtcacattttcttgttgccaaactcagacaatataatcacaagtccagagaagagctagttaattttaaattccccgaggtccttttactgagatggaaaagcacaaacagtcaaggaaaaccaaagagggaggggtgagggaaggggaaagtgcataaagcacttaaagattttttaaaagtaggtatgatagataagccacaagaagtttttaagactactaataaccataattctattttaatcagctatttagctggtacctactgctatatcacctagtgtgacatttcggaattaatggaacaatgaaggaagctgtacactggaggttccaggtggtcatggaaggtaggttactcttaaagtttgaaattgtaaagtgtgaaagtctggatagaggggaaggggaacctggactatttttatttttttttgagacgagtctggctctgtcgccaaggctggagtgtagtgacgtgatcttggctcactgcaacctccacctctcgggttcaagcaattctcctgcttcagcctcctgagtagctgggattacagttgcacaccaccatgccaggctaatttttgtatttttttttttttagtacaggcggggtttcaccatggttggccaggctggtctcgaacttctaaccgtgtgatctgcctgccttggcctcccaaagtgctgggattacaggcgtgagccaccgcacctggccaggaacctggactgtttctttttgtctagcatttattgactatcttgtgccagatacttggatgagaatgtaaagataaaaatggccaaggtttttgccaatgagaaacttaggctgtatgtgatt

SEQ ID NO: 59302 - DNA, 1178 bp, Homo sapiens
gtctaaactttgtcattcattcctaattctggagctctgaggttgaggtgttcagagtttggtgaataattgggtttaagttttaacattttagtaataataaaagcaaacacatacatgttaaggcctgacaataggttgcaatacccatgcattgggactcatacccagcataaatggtgagggactgaacattagtgctttgagcaagaattggttaactacctgagatctctaaaacagtaatttgaattactaatacataaaccacaagtctcttcgaattgttaattgcctaaatttaccctaaaacttagttaacgctgcagtgcctttattaaagcttttttttgggggggggtgtgggcacagctactccataactttaaattttaaagcatgaaggtgatctagctagtgttagtgcttgagttggtagttacataggctgctcttgaatcgtcctgttttctttgcctagtattagcaccacaggtacatatttgtaaaataagcattaaaagtactttgtccagctaactcatgttggagtgacctttgtcttactaacctttgttactaaacttgttaattagaataagcccttgagaatttggaagtgagctatactactaatgtagtatatatctcttgagtgtgttggagtagatgaaaaaccaggggtccccaagggtatatttttgaaattgaacagaaacaattcatcttaatatttagttttcattatgtttagcttaatatgtgtgctagtttatttggcgtcacacttatgtcaatctcaagtcatgcagaaatagcacagtctcagaaaagaggttaggtgggaaatagatgatatgcttacattattgagcaggactatgctttcacatcctaaccaattgactaaaaatataaatgattgaagtaattttcattagttgccccaggagtctttaataatagttttaagggatagtagattggacatagatagatgggttattcataatggatattcataatggatattcataatgttaacctagaattattcagaaaatataacacctatgtagtagaatctattgattgtaagcctagtgttggtaggcaaacatgttgatgatgggccaggacatcagtaatcactacttggttaggcaagtaattaggac

SEQ ID NO: 59303 - DNA, 8028 bp, Homo sapiens
taaattaaaagaggagcttggaaccttcattttgttgtgacagttaatcacggttgttatgttagaacttgccatgcagagctaggcgattttttatttagggtacttcatttttatcaagcatttgaaagggccaccaaagagttaaaaataaaatttggttacattactgcttttgttggtgagaaaaacattaattgtatcctttaattggctttaagttaaagactgacaacatgaactttaaaaatattaagtattcttttaaatatgggtcaaataagtatttaactctttaaatttcaagttataagcacatcagtttaaagttcttacaaatattgggggtgggctagagtgtgccttctttgtatttatagctagaggaagattagcccgtggcgcaatgaaatatgcgagagttaaggggttacctccttggtgtattattttaattatttaatgatttgactttcaggttacagagaagatcccagtaaggcatttatatacaaaagatattgacatacatgaagttcgtattggctggtcactaactacaagtggaatgttacttggtaaagcttctttttgactgatgtgggctcatgaatgttcaggagggtctgatttcagtgttttttaactagagggcattctaagccttttgtctgtttttatctattctgttaatacttcagacaggtaatattagcacatagtaggcacaggctacattttagtttttgttcctttattagaagtttatgaccaatggttgaaataaaatcttacccgtgatatgcaaatcgtcaactaatttggtctctgcgtatatatccctcctaacttccatcaattctggtacagagatagaaaagtaatagtgtcagtgacaggtgattaggttatatgcttatttctcttgtagcctacatcttaagtagtaaaatagatgagtctttggactattttaaacatctacttcatgaagattaattattttcttaggtgaagaagaattttcttatgggtattctctaaaaggaataaaaacatgcaactgtgagactgaagattatggagaaaagtttgatgaaaatgatgtgattacatgttttgctgtaagttaaagctaactttctatgtataaatggcaaagttagtagctatatctaggaactttaaagaagctttactgaggtcagttttcaatatgagcaacaaaatacaccagtccctggattagtgtaaagacttcattcagcagttgaattgggaaaacacaggacatttttgaggaactcactaattcattttgactgaaaacagtgaacatgaaattgacctagaaaattcagtctagcttctaggtcagtattgtttctggttctggagatacgtgcttcatggtttacaaccatcagatttcttaactgtgtagcccttaaaggccacctaatagttctttaacctgtagcttccacaggataagctttgctcctaattttaattcttagttttttagaaagtttaaggaagcagattttaactgttgaatttttttctgtgtaacagaactttgaaagtgatgaagtagaactctcgtatgctaagaatggacaagatcttggcgttgccttcaaaatcagtaaggaagttcttgctggacggccactgttcccgcatgttctctgccacaactgtgcagttgaatttaattttggtcagaaggaaaagccatattttccaatacctgaagagtatactttcatccagaacgtccccttagaggatcgagttagaggaccaaaggggcctgaagagaagaaagattgtgaagtaagggatttttttttttttaactgtggcatttgaatattgcttgcctggcacaaaatgacatttagaagaactagatgattagtctgtttcatttactttgtgctgtgcatattgctcttaagtaattgtttcccccttatgttgactgttaatctttccataaacaaatttttgtccgttagtgtaagggctatgaaaacttagatatttaaattggccttaacaatatttaaagaattattaggtggtgtctactgacagtgaaatgacatttcttttcttttcactaggttgtgatgatgattggcttgccaggagctggaaaaactacctgggttactaaacatgcagcagaaaatccagggaaatataacattcttggcacaaatactattatggataagatgatggtaagtaaaatgtttagggcctgatctcagtgtttaaaatagactgggagaggctgggcatggtggttcacgcctgtaatctcagcattttgagaggctgaggtggatggatcacctgaggtcaggagtttgagacccacctggccaacatggcgaagccccgttcctactaaaaatttaaaaattagctgggtgtggtagtgggttcctgtaatcccagctgctcgggaggttgaggcagggacaattacttgaacctgggaggcagaggttgcagtgagttgagatcgtgccattgtactccagtctgggcgacagagcaacactccgtctcagaaaaaaaaaaaaaagaaaagaaaaattatagaccgggaggtattctaggtaaactttttgtctttgtctctatccattttgttagtatcttaaagagatgggaggaaaggcaagattaagttggttctttcaactctgagggtaaactgccttccactggctaggcttctgtttttttccgtagtgtttttgagctcttaacatctagcagctaaaaagaattgagtaagtgtaaggtcttgttacatagtttaagtgaccctgtttttgtagcaataatggacaaaggtaatatttaaattataaaatgttgcctgctttacatatagatatgagttgaattttaaaaagcataacttattaaaattcacaagttcaaggggaaattttaacttttgaatataggtggcaggttttaagaagcaaatggcagatactggaaaactgaacacactgttgcagagagccccccagtgtcttgggaaatttattgagattgctgcccgaaagaagcgaaattttattctggatcaggtacgctgtagctttgaaattgaaaaatattaactgataatttagatagattggtgtagaattaatgtttagggttgtaaacataaatttctttttttaaagacaaatgtgtctgctgctgcccagaggagaaaaatgtgcctgtttgcaggcttccagcgaaaagctgttgtagtttgcccaaaagatgaagactataagcaaagaacacagaagaaagcagaagtagaggggaaagacctaccagaacatgcggtcctcaaaatgaaaggcatggaattttaattctgttactgtgtgaaatcttctttttaaaagaatgtttttcctacatattctgcttgtgtaactatgttaaatctattaggacttaggcctcctgaaagttaacattttttccagcaatactgcttcaggaattaaaattgcagttgttacatatgcatatatgtttggtctgtttttatttttaggaaaatatgttactaaacctcaagaattgtcagctttaggattgtgaggattcgtggtgggtttctaaattaataatatgactttgtttcctgcaggaaactttaccctcccagaggtagctgagtgctttgatgaaataacctatgttgaacttcagaaggaagaagcccaaaaactcttggagcaatataaggaagaaagcaaaaaggctcttccaccagaaaagaaacagaacactggctcaaagaaaagcaataaaaataagagtggcaagaaccagtttaacagaggtggtggccatagaggacgtggaggattcaatatgcgtggtggaaatttcagaggaggaggcaagttaattttgagtgttctgtatttagttcaggatcgaaacaagtgataattttatagtttggatgtagctgaagtttcttcctcattaatggtatactgtcacagtaactaaagtattcatgtgatttgatattaaatacacctaggttatgttaatggttagaattaaacatttcttttgtctttaaacaattatttttggagaaaaaggaacaatctagaggaatcctaagtcttctgtataagtagggtacaatatacaatgaaactaaaacagctcttgtcttttagcccctgggaatcgtggcggatataataggaggggcaacatgccacagagaggtggtggcggtggaggaagtggtggaatcggctatccataccctcgtgcccctgtttttcctggccgtggtagttactcaaacagagggaactacaacagaggtggaatgcccaacagagggaactacaaccaggtaatgattcaagatccctggaagcatgattgataactgtagcttagtctggaaaggtgtgagctttatgttggggtgtcttagtaatccgtaaggaacatgataggcattgacataaggaaaattgaactagtaatggtgaaatgagtctacttacttttgagttttttcaggtgtactaaacaagtcagatgcatttctcataatgaataaaaaattaaaacataagaaaccagcagagggtatccagaatttgtgtattgcttgctacctaagattaggggctagcaacctgtccatttctgctcctctctctcacccccacaaacctaacaagcaattgggctcagagctcttagagagtatttcctttttgtagaacttcagaggacgaggaaacaatcgtggctacaaaaatcaatctcagggctacaaccagtggcagcagggtgtaagtaatttcttatgtgctttatgtacattaattgtattttgagttcctaagatttatcagtcttgaaaaagatcttgttcagggattgaagtgtttataagtgttaatagggtaaagtgtgaatcgtcttgcagtagtagccataatctaccttttgaaggcaaaataggttgaagattgctataagttaaatttttttaataaagtaatattatttaatatatacagttcttttactgctagctttaattgtgtaaactaacaaagtcatgatgtttcgttttgtaatgtgtattgataattatgggatattaaaactaaatctggtttggtagaaatcagaggtatgacaggtataaatttgtttccagcaaattactctgaattagattcattgtcatttcctaaaaacagtttgagtggcttattgatgttttttctttaaaaacaaaattttctcttacagcaattctggggtcagaagccatggagtcagcattatcaccaaggatattattgaatacccaaataaaacgaactgatacatatttctccaaaaccttcacaagaagtcgactgttttctttagtaggctaactttttaaacattccacaagaggaagtgcctgcgggttccttttttagaagctttgtgggttgattttttttcttttcttttttgtacatttttaattgcagtttaaaagtgaatcgtaagagaacctcagcattgtgcacgataagagaatgtgtcagtatttcagggttctacattttatctgtaaaatgtgacttttttttttttttatcacaacagaagtaaaatgttgctttgtacctggtgtcttttattaagaatttactccccccatttctcacagagaataacagtcgggagtcattgtcacaatataatagaaatgttagcaaccagattcatgtaaggactaagtggtcctcatgaattgcattaagactctgtactgctcatattacactccatcctctctgtagtttgctgggtagtggagggggtaagctaaatcatagtttctgacaataactgggaaggttttttcttaaaataacaatggaattggtataattgggattgaaaactaaaacttggaactaagatagagaagatggagtgtatgtagaagggctgttaaaaatgtaaaacttggttgcattatttgtggaggctcaaacttgtgaaggttaataccataatttttccatttgttctgcattttgattctgaaaagaaagctggctttgcccatttcttattaaaaaaacttgttgtaaatccagttgtctaatgggatctatatgaagttagccatgtctgtatgcccttctcccacaaaatactgtataactagtgtgcttgtagtagttaactccaccatctttgtaagctaatgaaattgtgagtcacccatttatatcttaatttttaatcatgtcagttcttgaatgggtatctccttagcctgctgatttctttttctttctaaagaaagtgggtggagaaattaatttagacgtttgtttgcaataaaaagaattcattttactcttgttttgggattctcgccatcaaggttcaaaatccctttatataactcccaagaggagaaatttattaagtgtgtgctttctggacagcttattctttactctgcatagaacatttaggttttaaaaacttaaatgtatactgacaattgatacataattatgaagtaaagttgaattcttcccttcccctcccccccagacaacttttaacatatttaatgaggggaaaaggtactggctgggagaagttaacactgagtttatcatctttacagaatgctaatgctgtcctcaactgattattttatatacatatatatgatacatgaaactctgggatcagatgcttttagaagccatcatgcaagccagtcattgatgtcactgctacacaacactgctaacttgactgtagctatgtaataacattagatcccctaattgtaattatattgggtttgcacagaacactttaatcttcccctcaccaatgtgaagtgaggaatcaggagtcaaactgtagaactaaaatttgacttcagtctagcgtttccttggtgtttttaggttgctttggtaagtttaggtttgctatatttctgattgcttagaattttgttttagccctttaaaatcagatcataaatatgaattcatacttctaaggaattttcttgctataagctggagtttaggtgatgtataggttcagttgagacatttttggaacaggcaaatccttagttaacataagatatttaacagttgaagatagtgtcatggatttttatcttttttagcaagtaatgctaagaaccactggcctgagctactactcttcagtatacattattaggattgcatagacttactagaggaacagtttcaggttttgatgctaatcagtgttgtgtcctaaagttgtcctttgtgcctttaaaaagttttggatatatcttctagtttaaaattgcttattaaggaattcattttataattgcagtgggaaagtaatggtcaagtaacactaggtagactatcatgcctgtttagcccagagaatttggggggagagagaatagataaaaatggcacccagaaaaatgttaaaatctttagtcaagactagaattaatacaattgtctacacttgtatggcagaaataaccttataaagtgtttaaggaattcagagaagggaatgtaccaaataagcaacagggagaaaattaggtaagaagtaagatacgaacgagaaacctgatttattgctcatccttcccttgcctccctaatggcaagcaaaactctgaacatctgaaaaggatgtagttctggacaaatcctgactacccagaggaaactcactgtgagattgctgttgatttgaagggtgctttcactaaggttatattttaaagtagaataacacatgctgagtgtaaactggctttggattggtcagctgcagtagtacaaaaacagcatagaatttgagaaaactaaaactgctatgagatagctatgagaaaactaaaactgctatgagatagaaatg

SEQ ID NO: 59304 - DNA, 3226 bp, Homo sapiens
ccgctgtattgtgcaaggagcgcaggggctcggcgtgacgtcacttccggcgggaggagccgggcggggcggggcggggggcggaagatcagtacaatgcggccgcggggagcgcgggcccgcgggggaggggagcgccgccgcgccgggctcggcccctccccctctctgcgctctcttcgggatacacgtgggcttcgggcctgggccgcgcagtttttctttggctttctcgaatcatcgaggagactggcaaaattagtaatgtctttagactgcgtcactagcgccaatcgaattcgtagttgattgttctttgaattcacatttgagtcctcggttaaaacctcagttaaaaagcaggataaagtcgagctgctttggttctcggaacggaaaagcgtttttttgttgtttagaggcttggcctttatggggctcgtgtgtgttttaggggacggcaaaacagaacagaaaggcggagataaaaagaggggtgttaaaagaccacgagaagatcatggccgtggatattttgagtacattgaagagaacaagtatagcaggtataggatgctcacctagttttactcatcccttattcgttcgttgatcggaaagctgtatcaggagacaattctgtctttcagagccaaatctcctcagccacctgttgaagaagaagatgaacacttcgatgacacagtggtttgtcttgatacttgtaagtgaagctgtttctccccaattatgaaatgcggtgatggtggtttttttttttttttttttagaagtcttaatgcttaagtgcagcaaaacttgggttagtttttttaaaagcaggaagataatggtttacattcagaacctagtagtttaatatttagcacgtcatcagttgtattaagtggattattttacaggctctaggagtttcgtatttttatgacttgaaagttctcattcttaggaaatgtaaaattaatgccagtttttgactagctaacggaaacttgtaacactacctataatttagccttacaggcttctacaataaagtaattcatttttttgtggaattatattaagtgagctatttgggctagttaaatatttactaatgacttctcccattagcacacaagtatattccctattttaaaagattgtaatattactttttcaataactgctcttttgttctcaattccagttcagtagctgctgctttaaacataagttgatttcttccaaagacctgaggcagcagcagtgggctatcactgggccactagctttcttcagcagcgaatggtatcaatggcagtgcagcactgtaaatactgctactttacccagttgggttgcaattgagtgagaaagtattgcaaacctctaagtgggctttgactgtcagacttgttttttttttttttttttttgttacaaaaaaacgtagttggtttagtgatgagaatgtacaactctgggtgtgataaatagaccaaaggataaaaataactgtttcaaaagtatcagctatggtgtcagcctgctgtgttagatggaaggcattggagcttagcttctcatgttttcttgtacaaattggctttattcagatttgtaagagtgtcaatgtaaaactctttcttactggaatatcctttacagaaggttgagatagtcatctgagcctttttaaaagaaaaaactgcaggtgaaaaaggagttagttgatgtgaaagttttagtgaaattctgggttgtataaataagttgctaggaattggcaaggtagtgaagtggtgactcacacaggtaatgtaattgttagattttttagcaaatcaggaatatgtcaatataagtacaatgttgaattcaaacaatctgttgaattaaattctgttgattagaataactctaatttaagaaaaattccaaactgtagatttatttttctctgatcagtaaaaagaaaatgagttccagcttgactttagctgttcaagtgagaagtctgaggaagtgcatgttaatgagccagtgacccataggtagctgggttaaagacactttggatttggataatccgggaagcaattaatccctaattgttgaacaggcagtcctgggtaaagaggacctaaaatgctgcactattaacagcattagacggccaggtttgtacttcatagttttaggctgtcttcttcacaagttttagaaaaagaatttaggagctagagccctggtgcaggatcaacagcagctcatactcctattttaaaataatttggtcgtggcctcccttcagttttaatgtggcactggtaaatctacctggttctggcatgcttcactttgatttcctgctatcctctactgcttgcctctaaatcaaggtaaagagcagagcaggtatgtattaatgtcacattgtcttgattattttaaatacttaaaatatacatgttaaaccttggtattagtttcacaggcagtttacttttcagtacataatttaacaggagtgacttggtgggagtggggctttaaactgaaaattggaacaacagcatgatgtggagaaaagttgtgcagcattaagaagtacatgcaaaaattaagtaaccaagttttgtctacatagcagatatgtttacattggatgtcaaaagtaacacagtatttgatataattacagataattgtgatctacattttaaaatatcaagagatcgtctcagtgcttcttcccttacaatggagagttttgcttttctttgggctggaggaagagcatcctatggtgtgtcaaaaggcaaagtgtgttttgagatgaaggtaaatgcaattttatgatttgtttgtttgtttgtggagacagtctcactctgttccctaggctggattgccgtggtgcgacctaggctcactgcaacctccgcgtcctgggttcaagcgattctccttgcttcagtctctcaagtagctcggactagaggcacacactaccacacctggctaatttttgtatttttaatagagatggggtttcaccacgtaggccaggctggtcgccaactcttgacctcaggtgatccactgtctcggcgtcccaaagtgctgggattacaggcatgagccactgtgcccagcctttttttttcctttttaaaatagtgacaaggtctcaccatgttgcccaggctggtcttga

SEQ ID NO: 59305 - DNA, 1349 bp, Homo sapiens
agagccgctgcgtgtaacagttgccaatgtatgctataccagtcaaaactgaaatacgatttgaaggagttttaaacgaagagctggagaaacacataagaaggcagatctaagatggaagaaaaggcggattcgggttgaaacgccaagttgaggactgaagaaagcatttggataaagcagcctccaagctgggaaggagaaaagccaaacgagtatagccaccaaagacccagaaaggccaatatatcatgcagtgagtcggttgaactgaaaggcggtttccttttcctccatttgctcagtcccaattggaagcgcactgcgcggcctccaccgcgctctcggcccgggttcggcgtgggggcggggaggtaagtacggtaatgggcggggccgagcgcgggcgcgctccggctttcctcctgcgcagtgctcccgtcagcgcagggggcggggcgcctatattacgtgcgcggcgccgctcctgcgagaggacgttgcgtgctcgctcgcgccaggcgagtctccgcgtctccctcgcgaactcggtgaaaggaattggcgccgttcgacaccaggcggatccgctctgcagcacgaacccatctccagccgcagccgcagccgccgcccgggccgaggagcagccgcagcagccgccaccagtggccgagtgagcggagccgagtttgaggcagcgcctagcggtgaatcggggccctcaccatgagttcctcgcctgttaatgtaaaaaagctgaaggtgtcggagctgaaagaggagctcaagaagcgacgcctttctgacaagggtctcaaggccgagctcatggagcgactccaggctgcgctggacgacgaggaggccgggggccgccccgccatggagcccgggaacggcagcctagacctgggcggggattccgctgggcgctcgggagcaggcctcgagcaggaggccgcggccggcggcgatgaagaggaggaggaagaggaagaggaggaggaaggaatctccgctctggacggcgaccagatggagctaggagaggagaacggggccgcgggggcggccgactcgggcccgatggaggaggaggaggccgcctcggaagacgagaacggcgacgatcagggtttccaggaaggggaagatgagctcggggacgaagaggaaggcgcgggcgacgagaacgggcacggggagcagcagcctcaaccgccggcgacgcagcagcaacagccccaacagcagcgcggggccgccaaggaggccgcggggaagagcagcggccccacctcgctgttcgcggtgacggtggcgccgcccggggcgaggcagggcca

SEQ ID NO: 59306 - DNA, 1119 bp, Homo sapiens
gctgaggcaggagaatcgcttgaacctgggaggtggaggttgcggtgagccgagatcatgccactacactccagcctgggcgacagagcaagactctgtcaaaaaacacccccccttcaaaaaaaaaaaaaaactccctcaatttcctgacacatacgtgtttatctgtacttactggctccttacaaaaacctcttacctggtttacttgttttcatttattatgctgtaaatctggttattggttaatgaattctctacctaaaatccttaatgtcttcccattacccttaggatagtctgaattctaacaaaacagacaaggatgtcttctgtctccagggttttttttttttttttttttttctgattacatgtgtggtatcaccattcacgcattctacacttcattatacgcttcatcatagagagcaatttctttgttgttcctgtaatgaaagtgctagcctgcgcacatattgtttccttatcccagacttcatttagtaaatagcattgcttagtggttaagaacatgaagtctgtagttaatccttatgggctcaaattctggctttgccactttagagctggataactttaggcaaggtacttaggtgttctaatttcttcacatgtcaaatgaggagcatagcagagcctgtcccatgtggtggtaaaggatgttgtggagaacttcacatgccgtaagagctctagaaatgttatgagtccttacttaccgtgttaggcctggtgctagatgttggggaataaaacagatttgggccctgtcctcttagatattgctgtagaggagagaaccattaaagagttacataattattgggccaggtgtggtggcacacacctgtaatcccaatactttgggaggccaaggtgggcagatcactcgaggccaggagttcaagaccagcctggctaatgtggtgaaacccccgtctctactaaaatacaaaaattagccaggcatggtggcacacacctgtaatctgagctacttgggaggcggaggcatgagaattgcttgaacccgggaggcagaggttgcagtgagccgagatcgtgccactgaactccagcctgggcaacagaggg

SEQ ID NO: 59307 - DNA, 1036 bp, Homo sapiens
cgtagggctgtctgtgtatgtcactaagttttagcactgatctgttgtgatttactatagctggtctgttttccttttaagttagaatgtatttatagtagatggtagctgatcaacaaacatttcataaatgaaagcacagattaacataaaagtagatgatgattgagtacagtatttctttctttttttttttttgagatggagtcttgctctgtcgctctggctggagtgcaatggcgcgttctcagctcactacaacctccacctcccgggttcaagcaattctcattcctccgccttccgagtagctgagattacaggcgtgcatcaccacacctggctaatttttttttgtatttttagtagacatggggtttcaccatgttggccaggctggtttcgaactcctgacctcaagtgatccgcccacctcagcctgccaaagtgctgggattacaggtgtgagccacagctacggtatttcattttaagcctagtgttttggtggtatattgtctttggatcaagttgtttatgaaaaaagaattctcaaagaactattcctaccacctctctcccctgacccccccagccaaaggccaagaattggattcttgatttttttttttttgacagcatatgtctggaatatgtattggtattaattgggtcaaatagaacaataacattatctgtactttcagttaattaaccttgagggcatttctttaccttcttttttgtatgctttaaacagttcccatggtaagtattcctcttggggcttattattttatcttaatttctgtaggtgggattttgagtatctaattagatatttaaatatgtaaacagacatctccatgttagaaaaaactcagctgcactatttgtttaaaaaacttctcttatatccttaggtgatttgacttgtgttttgttatgactgctcctttgtatttattatcattaatttgttctttcgaaattaagtttaactttttttgttgtttttctcctatggtttagattt

SEQ ID NO: 59308 - DNA, 1046 bp, Homo sapiens
acagagttcagaagggtttataagtagatggccgggtgcactggctcacgcctgtaatcccagcactttgggaggctgagatgtgtggattgcttgagctcagaagtttgagaccagcctgggcagcatggcaaaaacctgtctctactaaaaacacaaaaattagctgggcatggtggcacaggcctgcagtcctagctacttggggagctaaggtgggaggatcgcttgaacccaggaggtggaggttgcagtgatctgggattgcgccagtgaattccagcctgggcaacagagcaagactctgtctcaaaaacaaacaaacaacaacaacaacaacaacaacaaaaaaccccagaaaggttgaaaggtgttgatgatcaaatagaattaggaagatgaatttgttagaatgagaaatttggaggactgtgatcagggaatcagtagaagatagcagtgagaaggaatagtagattatgtgtcctcaagtgatgaaccttaatagagtagtagtttttaatatgaagttgaaacaaggatgctcccagacaagtccaggttgtgggccattctgtatgatgctataaagcctggtctcttcaacaagctaatttcatgtgtgtggggaggggtggggaaggatggaggactgttttagtttcaaagagaacaaaataatatgtaacagccaaatgcagtacataatctttgattggattttagtatgaaaaaaatacctatgagacatttagggacagatggagacatttgaatatggaatagatattagatgatcttagtgaatttttgttaatttttaaagatgtcataatagcattgggattatgcaggagaatgtctttatttttaggagatatgctgaagtatttagggatgaattattctgatgtctgcaattgacttagagacagacagacatggaaagaggaatcaaaaaatggcaaaatattaacaatagtttaggcggtgggtatagagttgcttgtaacactaagctttcaacttttctgtgtgtttgaaaa

SEQ ID NO: 59309 - DNA, 1053 bp, Homo sapiens
aggcttatgcacacattgattaggtaggtgatctctccaatctagtaagtcacagagctgggatttgaaccctagtggtttggcgctagaggccatgcttttaacactctgatactaatgtcaacttcaccacaaaactctgcggtagacattatcatccccattttacaggtgtggaaactgaggctcaaaagagttaagtaacacttaacgtcagttggtacatggccaatgtttctttttctttctagaacttttttatattggcccaggcaaggcatttgccagtcaatgaaaccatttctttcatctttctttggttcacttatcctcctttttctttccccagaaaacatcttttataatcatgaggcaatatcggagtgatttggtttcctacattacaaaatatgctctgagataatttggagaaacctggccttttcggagtttatattctaaaaccattgaaaacttttttttttccagagagattggaacaattatcaggtcattaggatgctgtcctacggaaggagagctgcatgatctgattgcagaggtgagtacggcgaaaaggtttcattcagccagctctctgtgtgagagctactccttgtaattaaaaacaatccttaccggaaactaaaaaaaagtgccccaaactactgaatgtgctcagtggaaatattaggataactattcatattagccaaccaacaaaatctgaaagaattgagcagatcttgaagaaatgactatgaacaagtaacacaactgatcaaataaagaacccactgtagaaatgatcctctctgtaaaattagttgaaaagaggccagtagatgcaaggggctgaccgtatgcagaaaggctattgacagagacagtaaggaatttttatttatttggggaaataaaactaacttttagaacaagtagtaaacagaataaaatatcaagaatgaactttacattgaccagagagtctaagaagtttaaaaacgagtcatgtgtaatagtggaggtgaatgatcccataaggcagtggat

SEQ ID NO: 59310 - DNA, 1022 bp, Homo sapiens
acctcgacatctgtgcacagccatcattctgggatctttgtgatatttctgggagtcactgttttccttctgggttggacttctttctatcccaagttttcctctttctagttcctctagcattttaacatattatttgataacttcttgggaaagagtgccttgggggtaaaatttttgagatttgtatgtttgaaagtgattatgctaatctttggctggaaatagaattctacattcaatggatttttcttcattaaatggatttggatttttcaggtcttcagtaagagttctgaaggcactgctcatcttcatgttcctggtaatgctattgagatagtgcaaatccattctggttcccaatcctttgtatataaacattaattttttttttcctgaaactctggacagttttttttccccagagtttgaaatttcacaaagatttacgttggtgtaaacacatatctaatgtgttaggtacctggtgggccttttcaaactagtgacttgtattttttggttccaggaagttttcttgcaattattttgttttcttttttctgttttttggaactcctattattcatttttgtgtttctggactggactagtctttaacattcttcttttttttttttttttttttttttgtatttttagtagagacagggtttttaccatgtttgccaggctggtcttgaacacctgacctcaaatgatctacctgccttggcctcccaaattacaggcgcatgccatcacgcccggctaatttttgtattttcagtagagatggcatttcaccatgttggccaggctggtcttgaacgcctgacctcaagtgatctgcccgcctcggcctcccaaagtgctcggattataggtatgagccaccgcgcccagcctaatattcttatttttcacttattttccatctctgtctctgtgttctctctggtagatttcttgaactttgtcttccaatatttttattgagtttctcatttctgttgtgt

SEQ ID NO: 59311 - DNA, 1033 bp, Homo sapiens
acggatccggtcttgctctgtcacccaggctggagtgcagtggcgcgatcttagctcactgcaacctccgcctcctgggttcaagtgattctcctgcctcagcctcccgagtagctgggattacaggcacaggccactgcgcccagctaattttttgtatttttagtagagatgggtttcaccatgttggccaggctggtctcgaacttctgacctcaggtgatccacccatcttggcttcccacagtgctggtaaaaattcccttttaaagagcttttctgtcagtgaagttacagataatgtagcctcaattgaatactgaggtcatttttaacactaaaaatgtccttttttaatgttaattgaaccatatatatttgttttgaacatggcccatcatacatatatgcatacacacacataaaacctgcacacttatatatatatgccaacatatttcctttaggaattctctctgctaggctgatgtgtaaatttgtttacactgaaggtcagtagcctgatggacagtctcctgaaaccatcctcatattggtccccttgccttctcccatacaaagctagagctctctggttcacagactgggtcctgaatgactcagagttgctaatcacttgaggcagaatgaaaagcgcaagtgattttgagtagggaagactaagactgcatctacacgcacaactggtttgaccattccagcttcatccaccttaaggcggaatacagagagtgagggtcagaatggcaaggccgtcacagctgccacccaagaactctgacgccattgttaaaattaccttcgggattaattctgatggggatgttacgactttcaaagcatcagcttcttcatcctgaggattagtctaaagaaagtaaatcctaggttatatatcaggcaacatgaatttagtcaaaatggcccaaacagttagattttcctactgttgtgtgcctactatatgtttaatatttagtaagtgtagtaaggtataatgatacttaaatct

SEQ ID NO: 59312 - DNA, 1020 bp, Homo sapiens
gactcttttggaattagaccaaatggacccttttaaagatctgctgagttaacaccaccttatatttatatggctgcgttcttcaggccacactgtactgggtcattgccactattttcccacctttctctttacacccctttaaggagtatcatggccagatgtggcgtggtgtctcttaaattcacttaatagacaaaagagaaggacatctctaacagtaatacaagaaaaaaaaagagagagaaggacagagagaccaagaaactctttttttactcctattcagcaactatgtatgtacttatttatttatttatttatttactgagacagaaccttgctctgtcatccgggctggagtgcagtggtgcaatcatagctcgctgtaacctcaaactcctgggctcaaacgatcctctcgccacagcctcccaagtagctgggactgcaggcatgtgccaccacacctggcccctcagcaactatttttacagtatcgactctgtgtcaggcgctgttctaggctctggacgcttgatgagtgtcaccagtgagcttaggacagagctgacgtcttctgcctattctttggctttactccccatagggcttttctggagaagggccctttggagcttgtgggatttcagggtttattgaaatttatttacctttttgcaggtgtctcatgcttcctcggttaaggaatgggaattatcataatgtataccatggtgtctggccacagatgaagtaccacagtcatcagattatgaagcctccaagcttctcttgcagaggactccttcaaaccactctcgtggactgtggctaactgggagtttctcctgggggcccattgctcattccttgctgtctctcccggttgagacttcccaccagggtgaaaagctagaacagtggcttttgtctttagcaaggccattagatggtacagtaactgctttcagatgctgctgatgtggcccagattcagcatagtgacccagaggtgaa

SEQ ID NO: 59313 - DNA, 1085 bp, Homo sapiens
ttttcccatgcgtgagccctctgcagtgtgtggcatgctgatcggcctctggcatgaagagtaaaagcaaggccacataaaaatcacaggtgcccctcgcttcgtgcaacatgtgtgccagtccagtttctgcaacagccccccaggcgctgagcctgctccatgggttgggagatgttagacctcaagctgtgcccctagctgggtgggtatgggaagttacatggcagtgctggctgcattctgcttatcactgaaagaagtggctttggaatgggtgatttcttaaggtgtttccccactcagttcttctgttcatttttgtacattattatctcttcattgttgtacatttgttggagcttagccccaacagtgcctgcctaggtggtgcggactgaggaatagagatggagtaatcatgatatccaatgtcttatctcactggcctccccgccccaccacatcccttcccattggacggtgaggactgaggctccatcgctgaaatgcacacgtgttaccaggcagggttgtgagggccagttcaatgaacataaatacccttgtcagatcagttgtcatgattctagagaataaggccggaggaagtgagcatgctgatactaaagaacaggggagagaatactgggtttggttgtgcctggtcactaaaagcaaacttcacccactgagaacctgctagtcaacctcctatgatgttcagaagcctcttgaatgttgataattaatggacagggtgagcttggccaggcaggctggctcatgcctgcagtcccagcactttgggaggtcaaggtgggcagatcgcttgagctcaggagttcaagaccaggctgggccacatggcaaaatgctgtctctggaaaaaatacaaaaaaaattagccagatatggtggcatgcacctgtagtcccagctccttgggagggtgaggcagcaggattgcttaggcccaggaggtcaaggctgcagtgagacaagattgcactgctgcaccccagcatgagtgacagagcgaggtcctgtctcaaaaaaaaaaaaaaaaaaaaaaaggtgagctt

SEQ ID NO: 59314 - DNA, 1238 bp, Homo sapiens
gtaaacctttgggttcataggctttctaactgatgtcatggagtggtgggagggttttgttttcccttatccattaactttattcttaaaataacaatatcactaataacatttatggcatacttgtaagcacttcacatatattctctcacttagcatcatgacaatattctaaggggactgaggcactcagagcttaggaaactcgttcaaggtcacctagctaggaaacgatgtgctgttttcaaggccctcatctgaataaaactatcttccctttactctcagcggtgaaaatgggggagagatctgtattggaagctcattcagatgttgccttcttttgcactcgaaggctttgctctctgaaggcaggaagcagcaggcacgtgtgcagggaaggctgtgtatgtggcatgtgcaggcagcagcagcaacgcgggacgatggggagagagcccaggggagggaggatgcctgcagaagcggctgtgatgtgtgggaagccccgctgggccggcactgtggaaaggtgacctgcagagccacagctgcaaatgaaccactaattttcccatctctgcttgcaatttacaaagcactttcctggtgtcatgagtagctcccaagtatcagagcagggattgaaacttaagttgtttgacgctacactctgatttcctcaccccacctcactgtcttgccagttccaactgtacccctcaggaatttctatcaggagtctgtgtcaacatcagcatgaagctgaagaaggagaaaggaaatggggcaacaaagcacacagatgttcctaaaaagcaaaagcggaagagagaagctagactcgcctgtctctggtttttctcaccgcctgattgttcctttcagatgacccgcatctctcggagctgacctcagctcagcaagggtgcctgtgacccatggagcagtggccactatctctgcattgtgggagggtggtccgtgttgggtctgcagggtcgttgtcacagcgatgaatgtgtagatctgtgcttgctgaagctcaggctggtcgctgtcttgtcatcgtctcctgttacacagctttcaggctgcttttttggggaagttagactcgcctgctcttttttggggaagttccacctcactgcagccgggtatggtggtttgctcctgtagtcctagctacttgggaggctgaggcaggaggattgcttgagccaggagttcgaggc

SEQ ID NO: 59315 - DNA, 1686 bp, Homo sapiens
gttacacggtggtgatatacgatttcaacatttcagggttgatttggattttctgtactccctgcctggaattttcctgctgtgttgttttgtgctttactgttcaacaagaggaaaataaatctagaaacctgcttaaaaatagacatcctgttttcaattctctatcattaaaagatcttaaaagctagaatttagttctcttcccggtagaaggaaggagttgcgctaaggtcccttcttagaaattagctctagaaatcctaaaattctagctaaccaaccacagtgttcacgggcctaatatcccttacatttttcttgtctgacaggcccagagggctcactgtctgtgagctttcacggggttgttgctatcccccagggttgattgatctgtttattctaagcttgaggccagagctggaagggaggccgtttgttttgggcactgctgagaaaaacagactaatcacctaaataccaccttggggaatgaagttacttgaaaagaaactgaatggagcctgggcttttatttggaatgaggaggcaaacctgggaagctgcatgccgctgaatgatgatgaaaagcacaaagctactgaatgcctctggcttggccgccaaagagaattggtttctgtaagtgtcggagagggaagacccgcattccagagctgcacccctttcttcacatttccggtccctctcccccagctcctgcacaccctgatgctggaccaaggggcctgggcagaggtgggtgtgctgggcgggaaagtacgtcatggatgcctcaacttgccatggatggcaggttgacttccttcccagcaacttgcagatgttcagatgcgcagagttaaggtctaaaacaagaaaagtttgctaacgtagagtggccgctgggtcttatctttccgtcttcaatggccttgaaaaatatggggcacgcatggggatttcacactcttaacaagctaatgtctctaacactacaggttacacttcacctgatttccaggttagtgcagcgcctgacctctctccagaggcaccctcgtttagaagcatagatgatgcaaaaacatggtttctcttctcagttcagattgcctctgttgcaaggactgagaactctgaggagatctaggagatccctaagtatattaggttttaattctgggtcaaatcagcaaatgtttattaagtacacacaacagacagggcactgtaagacaaaacaaatcaatcagtcaacgtcaactcttgtcattgcttggggggtaaaggcaatacaaggaatgactggcaaatacaggtgtgaattccacttaccctcagcaagacgagggaagaagaagattctggaaagggagaattctgccagcaccaacctgatcatccttctgggcatggccaaatgcctccatttttcctctgaggggcttctttgccctgaggaatatacaagttgatagggctacttgccttcttgctcattaatatctgcttggctccggatctgcaggtagagcagtgctggaattatcccagagctgtgttgtgacctctggatgctagcctttccaagcagggactttgctgcgactccctaagttcatagggaaagcagcaaggatgagttcgggagactctggcatatgcatcagagttccagag

SEQ ID NO: 59316 - DNA, 1038 bp, Homo sapiens
caagtgattctcctgcctcaacctcccaagtagctgggattacaggcacgtgccaccatgcctggctaatttttgtaattttagtagagatgggattccgccatgttgcccaggctggtctcaaactgatggcctcaagtgatctgccagccttggcctcccaaagtgctgggattacaggcatgagccaccgcacctggcccctggaacttatttgttagtattcaggctactgaggtgttgcacctgcagactctcaggtggcactcacccattctctctctctgccgagctcccgtgttccatcctttgttcctcagtgtccccacctgttaacgtgttgaatgtaatccccgtgtcttttggataaatcagagaatcccatatcatttgttacttaggatcctgagcattcagttttagctttcacactaaagatagagaaaataaaaatagataccattaatctttacacttctcctgtggtcctgattgccaaccatagtctgaaagatctgcagtggatttattactttgcatgttctttatttcctttaaacccgggcgtgtgaggaacgttgatttatggagcctagatcatgcttggctggggaatgggaggagggaagcaaagtgttgttcaagctgcagtaaatttaaacatcactagtatttctttacacatgcaagggggaaaagtcctaacttaagtccattgctacaggagctcataaattaaaaataacaagactatttcctatacacctggagcttcaaaattacatgccgttaattctttgattgcccccttcacaaaagagccattgagggtgacaactcaaacaagatctccaccacagccgtgaaatccaatcagtgattcaccttgtgtctttgaccttgttcaagataaggaagtgacttgtctgaaacatagactctaagaatttagtcccattatttttttcctcaaacttttccctctcattactctcttctctctctctcctctctcgttttattttttctaattttaca

SEQ ID NO: 59317 - DNA, 1085 bp, Homo sapiens
gcttaatgtgttgtacctcttgcttcttgcatttcctcctttgaatgccccagaccagcttcctcctccctgtgccccaccctctgcttttctttcattctgagttgggcagaataagaaaacctgctttattttttcccgtcgtgatttgattccaggggttcttatcatgcatacatttcttttccctctgattttatatccatatttaaatcatacttgggaagtcacttactagattcctcaagctcatggtagaaactgtttgagatccttgataagcttaatatattcatattaaaattaataggagaggtatattgtttccaactttatgatttgatttaaattcattttatttaatatatgaccacaattctaaaattacttaaaaaaacagatgagattgaaatcaattctggggaccctttctctattactgagttaactgtatgcctgtaatgtggcagacaagctatgctgcttttctcatgtgacatttcgagtctggatgtgggtgtagcaggcaccctccttggaggcttcaaatgagtgctctgtgaaagattatgtgcaggctctttttaaatgctaccattaaaaaaaataaaatttaatggaaagagataagcttttcccaacaccagcctgctccaattttatatttccttaatctgttttatatgctactgcaggaaattaaaccagaattgtcctctctgacatgcgcatgggtgacagatgggagtggtaggagaagggagacacagagctacttgaaacaattgctctcgtttgtcagaaatttattgtaacttttttgggggatggtaatgtgaggggaagccctcctcatcttcctgctgtactgaagggctgtgcccagggccacacagggccctctccgtacatcgttgaggactgtctgccccagctcacccagtgctgaagggctgtgcccagggccacacagggccctctccgtacattgttgaggactgtctgccccagctcacccataggcccaggtgatgttcaagacaaggaccagatgtcctcatcaccaggtgtgaattgcagcttcc

SEQ ID NO: 59318 - DNA, 1040 bp, Homo sapiens
tccgcctgcctcggcctccaaagtgctgggattacaggtgtgagccatcgcacctgtcctgaaaagctcatttaaactgtggttttgtgtgtgtgtgtgtgtgtgtgtgtgtgtgtgtaggcatttccaccagagacaattctgcatatacagcgggggctcagtattctctaagagtaggggtagggggtattggggccagaagaggccaaactgctcatatttggttaaatccaatatggtaaattcttgttgaattgaagtaatacagctcttcacagggtctgaaacagcccatagccggagtcgtgtgcgtcctctttctttggtccacgacaacaccgtattctattctgttctatgtgaaagggtccagtatggattgagttcctcctgcatgtcagacatcatggagaacgcagatggggtgcctgaataaaaagcactataatccagtgagatgataaataaatacacacgtgctcataagaaaggtgtaccatgatggactccacagctgagattcaatcaaagggctttgcggttaaaaggggggtgtggtaggatctagttgggggatgatgaaaactttgtttattcaacaaatatatattgagaggcaatctgctgttccagggctgtgctagtgctgatgctgatgcttcatggaagagcttggaggaggagattagcacctgttctccccgccccacccctcccaaatatcaacgcagagctccaaacttttgtttctcttctctagtgtttatgagggagaccttctagtcctgtcattttttttccctaacacaaaacacattctgaggagctggagaccagtcctgtgtcaattcccctcagtactgcattctcctggattgcaaagctgatttcctttcagtagctcattaacattcacagctagtgtctgcttccactttcgtagtctcctgatgaaatgctgactgcaaaggtgagggctgctgacactgtttgccgtttggtttcttccaggatttttttcccaggaagccatcccg

SEQ ID NO: 59319 - DNA, 1029 bp, Homo sapiens
ggagggaacacattcaaaccaaagcagtagccctgaataacaaaggccttttcctaccctgtgaatgccaaagctgccatctgtaacggaataatgtgattggtaattgtgtcacgtaggaccaatagagatcagcaacctcagccagactgatagagatcctggcatcagatatttcttctccatgtccttttgacttcagatcccagttccctgactttcagcctccctgtaaaatatatcagtaagatcttggtgcttgtgggtctgagttaaagctggtgtgtacatttccttcttttctctgcttgtttaaacccatttcttcttatgcacttattcaccatagaaacaccaaaaacatttttttccaatctaggccaagcattctggaacatgtgattgctagcattatacctgtgaaaggaaaatttatatcacccaaacaagtaaactgccttgttgaatgattttgttgttatgtagtttgcttgtatgtttttgtggaagcgtttctatttctgaatcatggagtcaactcagactccactgcacccccttggatccccagattctgttaaatcagctgcataacctttcttgtaccaagtccttcttttctgttgatattgctgctatcctacctcaagtatttttgcctctagggtctgttttccaattttcttggttttctattgtgataaaatatcttcagccccctttggtagtgcctcactgctggcaaggtaagtccagagttcctagctttgcgcgtgtgtgtctgcacagcctggcctcactgctggcaagagaagtccagagttcctagctttgcacgtgtgtgtgcctctgcacagcctggccttgagtgcacctcccttcccactcccctcctctgctggccggaccagcatgctcactgccctttggcattcagcttcctatcccatcaccagagcaaccatccatcccttcccttgtcccaggatcccatcatcatctccagtggaaacacactcaggctctgcc

SEQ ID NO: 59320 - DNA, 1012 bp, Homo sapiens
tattgatacaattattagctttagcccatttttccaacttgagtttttgtgattttttttttttttttaacaaatcctgattctgctattctttgtgtaaaagaagataactaactttactggttcactttatataccttggctcattaattctttacaataaccctacaaaatcgaaatcattgtcacactttatagatgaagaaatggagagtctgctggattaactaccatggccaagattataagagctcttatcccttcctctgagcttcgtagcagctgcaggtttgataaacatgtcttaaatatcttcatctaaatcatggacttagacttgaatgcctgaagtctgagatatttatgacaagaagtaagtttagttaccgtggctagaaatgatggcctgattccatgccctccaggccagagggatgcactcatcagcgtcttgtgggaacagtttgcaaccacttaacaatccaccttgtcaaatccgatactctgtttattgacactattattgtttttgaaaacacttttgcatataaaagcatcaaacacatttttaaaagtttagctattttaaacatttgtaattggctctagtataatacgtagcacacccagacaaaaataaacttctttaggattgaattctcttaagtggggctgtttatttggcttgtccaccagaaacttgactttaaaagtcaaataagacgtagtcagttctggcccccctgcataatagtatctagagggctgtttcaacccaggattttatgtaatgaacaaagaatttgcagagaattactacaccccacattctgtaatgaaaactgtataaaattcattctacacaattatgtccaactaaccatgagtatgccctgctattagtttctgtttctttgtcatcaggaaggtggtattactctttagccacactggccaagaaaagagtcattgtcagccagcccgaatccttccccaagttcctggggccctg

SEQ ID NO: 59321 - DNA, 1105 bp, Homo sapiens
tgtgtgtatgcatgagtatgtgctttaataagaaagatactgactcagctgggcgcggtgcctcacgcctgtaatcccaacactttgggaggccgagatgggcagatcacaaggacaggagttcaagaccagcctggccaatatgttgaaaccctgtctctactaaaaatacaaaaattacccgagtgtggtggtgggcgcctgtggtcccagctgcttggaagtctgaggcaggagaatccttgaacccgggaggcggaggttgcagtgagccgagattgtgccactccactccagcctgggcgacagagagagactctgtctcaaaaaaaaaaaaaaaaaatactgacttacgtaactggaaagtccagggatatctggcctcaagcctggttggatccagggctcaaaggatccaataggacattgtttctctgcatctctctgttccctcttctgttggcttcaaaatcaggcacatcaaattttagaaattttcttaagctgataggtttgtgtgtttgtcattttccttccagcttttgttaactctagaaataatgattttcctttccttaagaattcccacctaattctagtagttccagaaggcatttctataatgtcgttttgttacataataactttttagcctccacgtggctggggtttgcatttgagttgtcgtccatcttcttcccaccatcattgcactcagagaaaaacctgtagaataccactttccccagccactggggggctttgtgtgtatttaaccatatgaaactgttgacagtcaccattgttgacctgtgaaattggccagttcatacgtgaaattggccagttcatatggttcaacctaaaacaccaggtttgtagtggtaattgtttctcagcaacagcagttgtgtctagaaagctttgcataaattaatgtttttattttgctgttggtttgctcctagcacctctcctgtgccccagtgtgacgaataaacagctggaggcaaatgacagagtgcttgcacatacggcaagccattcataactgaatcccaggtgcaagatgaccatctttcatgtcacagtcagaggtttcggc

SEQ ID NO: 59322 - DNA, 1050 bp, Homo sapiens
tacaaggatgcttagagttctgggaagggagtaaggaggattagcgggggattctgaaacaggtgccctgcctcagggcgccagagtcatgggggtcatccccaggggagggatcaccagtacaaattgctgtacagtgagcctgtctcatacttgagctgcagaatgagttgtaggctcttagttctgagttctgtgacagcctctcccagcctgttgggtgagaggcctcacctagcaagagaggtgatgtttgttccaaagagctgctctaactcgaaggctctgctgccttgtggtagactcccagagtactgcggaaagagacaaggccgcctcctgcccaggcagcaggaagaactgttaaacttggtgaaattggtttctggtggtgaaatggatggtacccaatgagtactacttacctcgtttgtcccctctgaaaccaaaatcttggctccagtggtaaattgggtacctgcatttcagctacctggagggtctctttatcttgggactttgtgaaaatgacaatgagagagaacctgtcatctatgatgaagactcagtacagctaattccaaatctttacaataataagttgtcaaggataatacagagaaacttctgccaccagtctgcagttctgtctcactagggaattgtccctgagcagtgtggccctgggaagctcctctgtgctggcctggccaggatcctcttttcattgtcccctttttgtcctggtcaggcacaattgtgcccgcactaggatgttttctgcgtcttgcctcctaaccacgccaagctttcagcctttacttgggaatctaaacaatgccttcctgacgttgcactccttgttctctctcacctgagtgtttttgtctgtatgaccagctgccacacaaaggaacaacagcagggttctcagggaggggcacttctttggttcacaaagttagaactctactccttcctccttttgaactcactgggcttgggaagaaagcgcctctcctgctttctctgtgggtcccaactgaggtg

SEQ ID NO: 59323 - DNA, 1043 bp, Homo sapiens
agtcgtgagtaggggaggaagctggtatgtaacaaaaaatgtgaccctggacctttgggtccttaagagtccagagctgacatctgctgtcattctggccatgccctgccctgcgtgcggtgccttcgggagcacgtgggtctccctggtgcagtcagctctggaagtaaaacctgggaactttgcccaccccatagtacctgataccctgccagagtttttggtatagtgcagttttatcctggagcaagtttggtactaaatcagagaagtgcttccaattttctttcctcatttggcggtctcactgttttgcctgtcctctcttctgcccaatgagagagcagaaatctctacttaaaggcttccctgaacggttgcccaacaactgaattgaacgacttgtgggaaaaacagatgagagagagtcaacaaggtggaagttggaactgtgagagcttcttgaatgagtatctgtgaatattgtccatatggctgaatttggtaaatcctgctgagactgttgacatgaatgggagctttgcctgaacaatgcatttggcccaggaaatcgcagtagtgcgcggcgctgacttcagatgtttggggttaaaggaggatgtgcccttctttcatttcatcgccttcccaaggtgcacttctccagggacggatgcctggagccttagaaaagagagagagagagcgagagcgagcaagcacgagcgcgcgtgtgtgtgtgcacacgcacgtgtggcagagagcaagaaagcttgggggaagggcagagaagcagggacagagaaggagaaatggattttgcaatcgtcctgaacaatgtagaagagatgaatcaggtcctctaaatgccattcctgttactggtcacattccttttgtacttttttatccagctctattcctctgaagccaatggcctctatcttactatatttcacaccaaagaactgagcactccctcgtcagggcccttgtgcctgtgggaggcagaaaaagaatgtcataattagggaggcagagac

SEQ ID NO: 59324 - DNA, 1021 bp, Homo sapiens
cagtgtgaatatacttaatagtactgaactgtacaccttaaaacctagtggcacaaatacatgatgcatattcttccatttttatttaacaaatatttaattaaatacaacatagaaagcagatgctaggtactagatgtaggagcagagatagatgattaaggcagaggaggtctttgccttcataggaaggtcgtttaggagaaaatgacgtggagttttcgtagagtgacttcaattctagacccagatacgtcattactcaggcagtgaccttgggcaagttacttaattcttctaaactttagatttctgtagatgtaaaataggaataattagtatctgtctcacagattgtcataggaattaaagaaaaatgtatttagaataatgacacatgttcagcatgctcagtgaagttctgtttcttgctgtgctcatcaattcctctctcacaggggcttccagactcatggaacaggtaggagaaagccctacccacaacaaagcccacaaaggcatttttaaaagctgaacagagagggggacaagatgcccagggagggccacgcatggcctcggcccgcctagtgagccccttccagcctgaagacacagaagccctccgcccacctagtgagcccctttccagcctgaagacagagaagcaggccagatagaggggccgcctgtcaatctcatcccaggtggaggggccgcttgccaatctcatcccagtaacttcccccgtagtagtttcctctagatatgagactcaggaacaactgaagagggacttaaaccacaagccgaaggtgtggagccatctagaggagcttgttgggagccgttgtgggtttccaaatctaagagaacgtagggagatggaaaaagcttcccaagagtgatggctgacacacgctggcaaagattacagggagaggtggtggaatttcttcctttaatgtctgtcttaaggcaaagctgcattctcacgtgtctgggtggctgttatggggtc

SEQ ID NO: 59325 - DNA, 1053 bp, Homo sapiens
catgagaacaaactgctgagatcatcttccactagttctcagtatatcttcatactatgttatgtacaatcttttttgacatgtaattcatataacatataattactcatttaaagtgtactactcagtggcttttagcatatttacagagttctgcaatcatcaccacaatcaattttagaacatttttatcacccccaaagaaaccccatactcattagtcataccccatctccccagccccccagtccctagataaccattaatctgctatttatctagatttgcctattctagacagtttatataaatggaattataaaatatttgcttttttgtggctgacttatttcacttagcatagtttcaaggttcatgcatgttgtggcatgtatcagtattttctttttttgccaagtaatattttatgaatgttgcatatttatctatcaagtgatggacatttgggctctttctactttttagctattaagaataatgctgtgaacatgtgtgcacaagtttttatatagaaatatattttaatttttttcaagtgtatatctagagtggaattaccagatcatatggtaagtatgcaattaatattttgaggaactgccaaactgctttccaaagtgggtgcataattttacattcccaccagtaatatatgagagtaatacggagagtacctctccatatctttgctaccacttgttattacatgtcttcttgattttagccattttagtggatgggcggtagtatctcactgtggtttcaatttgaatttgcctgttgtctcatccgtgaaagggccctagtgtggaacctcaggagaatggaaactccccctgctgtgtttaatcttatatccctagggcctagaatagtgcccagtgtacaataggctcccaataaatacttgttgattgattaaatattcaatacttccattatttaatccctagaattaagttagcttcttataggttagttataaggtgttctgaaaccatataagtgaacttttcatactatctcacatta

SEQ ID NO: 59326 - DNA, 1034 bp, Homo sapiens
gaagccaagttatccacttaaaggttgaattcccggggctctgctcagggcgtgcttgtcgttttgctttgccttgtcaaggtttcatcaacactggtgacacaaaatgagacattgaagccatcactgaaaccgagtcgggacattgctgtgagtgtaggaccagtcccctgctgccagtgagtgctctctgagttctacttccttataagagcaggtacaagccctgaagaatggatgccacaagcaaggccagctttcatctgtcagcagcttcacatgtttaggacggtccactgactagaaatacgcatcctagagaggtgcccagcagcggatggaacacacaaaccccaaccgactcggagcatttgtgccttaggtggcctttggctgagcctggaattaaccttcataaacacagactcctctctcaagaacttgccttgcacgaagacggctccctatggccagccctgaatgtgctattgtgagtgcatggtcagttcaggaccgcacggaggatgggaaggccagtggctatgcgaggggagcacagggatgcgggttttcagactcgtttgaaatcagcttcagtttctcctcagctcaactgaaaccaggctgtcttggactgtatcatagcactggcttcattttctctcatcctcttcaagctcctgcttctgtttatatccagctgaaactctcatccttctctcctggccacagaagtagttaaaataaccaaattgccaatgattcgtttttgccaaaggatatttttcgatcttggagacgtctatgagggtcagatgggtggctaatgtttggtaggagttgggagttgaggtgggggttcttggttctggcaggaatgagcctttgttgtctctcgaccctctctgagagcagagagagcattaactagcaaagcaagttttcgctgtcctcttaattcctgcccacaggcactgttaacgctaacaagtcacgtcgacggagaacagaaggaagaccagccatgataatgt

SEQ ID NO: 59327 - DNA, 1065 bp, Homo sapiens
tcctttgctttcttgctcttgcgttctttttctctccctccttccttcccttcctggatgctgtcctcattcttcctcacagtcttgtccacagcgtggtgagacagatggcttccagcagcttcttcccccccaccccattcatgttctgctatctgtataacaaaagaaaaagttctattccctccagctccagatttaaaaactgtgtatttgggatggatggctttggcctttgtgggtctcacacccaaccctgcctggaccgagggagatgaggtgctggcagccctgccaaaaatgcaggtttgaaatgggacagacattcttgaaaacctaggagggtgggtgaactctggacaaaccagaagaatagatgtccactgtactattccactcagaaatagtctaataaacatttcagatagaaaacgactcaaagatggtaaagagaatccaataaaaagactgatgaaaggacaattacatgagagagaaggaagcagcagctctccgccattatgttatgcactggggattgagctttgcaagagcaggttcttagaatttccaagggaacagcaggacccacttggaccagagcacaagccagccatttaggaggaagtctgagagctggaaaaggaaaagatggatctctagaaagcagctgaggtcctacctggagcaaagaaattatgtcaggacctgatgtacctgatggcagtgtgtgacatactctatggaggttctccagttcccctgtgtgctatctccttctggctacaggcattaagtaatatagccagaatgctacaaaatgtagcatttattttggaaatgctacagaaacagtgcaccttgatatcagcaaggcatttgatagtgtctcctggcacatttcctatggatggaaaaataggagttagtgaggttaatttataccttttaaatagctatttctgaaccatagtctttcacagattgatagacccctttggggaaatacgcagtggggtatatgcctcaaagctcagtgtttttttggtcttaatggttctcatt

SEQ ID NO: 59328 - DNA, 1015 bp, Homo sapiens
cgggtgcttccctcgctcctgtgcttgggagctctttagccttttagagaatctaattttgtttgtttttttcttgatgaagacaatgaatccttaactaaggttaataacagagtgggagcaggttctggccatgtgccaggcaatcataagcagcaattctgaacggcttcccgatatcaacatctaccagctgaaggtgctcgactgcgccatggatgcctgcatcaacctcggcctgttggaggaagccttgttctatggtactcggaccatggagccatacaggcaagtcccagggagagggctgacataagggctaggacgtcttcacgttgggcaaaggatccatgttgtgaagtcattctgattactactttgcatggagcatttccagctgcttctcaaccattgtttaaaaccaagtcttattttattcactcctcttgttcattcacttatgcattcattcatcatttgtaaagttccttccatgtgtcagacaccgtgggtgtacagaaactaattagatgctgtctctatctggagcagatgattacaatacgatgtggcgcttgcagtgacaaagacgggctcagggtggtgggggagctgtagaggaacgcaggctcagacctagcttgagaggctgtgtcatgagcctctgctggtccaggtgaggatggccatatggggcccttggtctggctgacagtaagaatggtcctttatctctctcaggatttatgctttcagttgaatcatttgccttcataatcaccttgtgagccagggaggacagcagggagacggccctgcctcagcttctccttgagtcaggtgaaggaactataggtaattgcttcttgactgatctcagctcctggagaccagtaggtgttttgccctgagatgtttttataactcagaaaagcattgaagggggtagtgttgaactgctgagagttaggcgctggtggatgctgcaccctgatttgcagtcggctgagaacat

SEQ ID NO: 59329 - DNA, 1130 bp, Homo sapiens
tttcttctcccataaccactaacatctctaggaaagagtagcttagaatccttatcattcagtgccattgaccgtcagacccagaagcttcatattaaaccagccacgactacaatggcagtggggattgctgcacgacacattttctcagcatgaatagtaatgaccacaggtggaccaaagttcagagtaaggagagaccatgtaggatgaaggtcatctgggaaggctccactaatgttttactgtgcaagatagcctgagtcaggggcaggatttggataggccaaggctgagaaggaggccgctcctggtagaggagttcattggagtgaagctgtgatgaagggaaacagcaggcaagaaggaagagatcaaggtggatgaaaagactgcaaaaggtcattcagaggctctggggtaaatttatatcccaggcactaagaacatagcagatgaggtttccaatttgctgacgatgctatttaaagagttgtaaagagccagagaaggaggtagagggaggtttccagttttaaaggtgaaggacataattttgaatcaatagcccactgagtttattagcagtcttgggtaaagaatctaggattggttactaaggaatggaaaagaaagctgtgatcatcacagtgctgcctggtttctccaagagcgaatgaatccacagagtcacagctttctttggtaaagtttgtatcgagactttagaaagggatttgacgaaaagtaatcaagaaacttacattagatgttagcaaagctaactgaatagctacactgaaaaaatgatgttacatgattcagtgtcattctggagtgttgtttttccatctcgggcctctttaatgcataattccatacctcgaatgaagatacagaggacaggtttatcaaatctccaaagtgacgtagatggggaggataatagaggtgggatgatagaatcagtatctcgaaagaaaaaaaagagttcaaaagatctctaaatgtttaaatggtatccaagttttaaagacatgaaatataacaagaacatatataaaatttctattcggatcaaaaagttcaaatatgtaaatatgcataagaacatgtgaaaaaaatttagg

SEQ ID NO: 59330 - DNA, 1067 bp, Homo sapiens
gagcctctaaggaaaagcagcctctgaacagcaagtaactgcagacctagtagggcagcagagggccggggagctgccccgtctccgcagcgccgccctgccatgcatgagtgaaccagaagcacccaacagcgtggcctccccaaggacctctttctcttctctgctactggccttcctgcttgtctctccttgtctaatgcttccatagcctccaagcctgaactcatgcatcctcttctccgggacattttccctaaatcccggccaggcagagggctctgcctctgtgctcccatagcctccaagcctgcactcatgcatcctcttctccaggacattttccctaaatcctggccaggcagagggctctgcctctatgctcccatagccccagggcttacctctctgttatcacgtgcggtatttagaaatgatacatttgtttggccgtttcaaccactggaatgtaagctgaggccacatctcagctgtgtcttctcagatccagtacctggccctggagtgcactggggagatgttgtcatatattgagctaaagagcacctgaagggcatgagatttattccccgtagtgccacagacttggtcacttttgtgtctattgtaaataaactatttgtgcaaaagcagagaacatgggagacagaactgtagattgagcagacaagaaaaaagaaaagcaaaaccatcaatacttgcagcaagtcttaaccatgtcggcacgaagagtgacagcatgatcgcagagattcggagcaatggctgaggcggcaaaggccacgctgatggtccttggcccagactgtgcattggaatcacctggggagcttagaaaagataccggtatctgcctgcccccaagagatgctgatatcatttgcctcgatggaacccggtctgtattcttaacagctcctgaggtgattctaagtatatacccaccttaccttactaggcccttacagcaaagaggagagacaaagctggaggaacaacaggtctgcagtttgagggaaagtcggagccctcagtatcccttaaag

SEQ ID NO: 59331 - DNA, 1050 bp, Homo sapiens
gtggacaactggagatttcttgcttaccttttccctacaatggggagcctttcctggctctgagccaatcccggctgagactgctgcttatcttccctctttctctgtgccttggagagtccctgtcccttttgtgctgaattccattgttccctcttagatgctctgtttaacctgtggttatctgctgactgttttccttctttttggtggaggagatgagtgccagctgcctctagtcagccatcttgatgatgtctctctgtttctttaacatttgctccataaggcttttccactgcagcacattattagattgagatcacttatgtaacaacttttactctgagaaaggagagacaaagtaaatgccatgaagataatgaatggacttttcttctgttactcatatacctttttcatgttggacctacttatttttaggtccaatatgaaatatttcacataatcagattgtctaaagaaatcttactttggaagaatgtttacctcactagaattctttcgtaattgttatctttcttggtctgagtaattataagtaaattaggaagtgaaactcggaaaggttcagagatatgcctctgagacttatcccaggacttacccctgggacttaaaggaaaaagtggcaaaaccaagtctgacacccagatgtcatgactaaacctaatgctcctgccagtataccacaactcactgtaactcccattggcaacatgaatcaagagaggtagttgctctcactgcatgagaaaggaccctgagctcattctaatgctgcaggagtccatgaacatgatccattttgccttaagaagaacttttgaaaataagggaattaagtgggaaaagttgaatattctaatagctcctgaagattcaatctactttattgttagccttttgccacaggcaagaatgacagaaatcatgggaaactgccctgggattcctcccagaccatgatctggaatgttagcaaggtagctttccaccagcatccttggttggaaatgagaaggctct

SEQ ID NO: 59332 - DNA, 1011 bp, Homo sapiens
cagaaacaacaggtagaagagaaggatgatttaggcctccagtttggagagtaattagtgacttgtctgcttttccttccttagtcatcttgagcacttgcagctgtgcatcttcctttgtgcctgatgcaagctgatattttagggtgaaagggtgagaaggaaatttagattcaaagtgctgacaagataaagtacattctgtaaagattcattccccttaaaattggagttcttaccgagatatcttcacttagcagactgatgtcaggaaagtaaaaaatggaagggaactttgtggttgaaaattatgttcctagaaatgagggttgaccctgtttctatgagaagagagagcatgtgcggctctgctgatgggtacagagaagtgcctttgtggtagcgcccaagggagaatgcagagtagaccaccatctctactctgattgttttcaattctttctcagatgcctacaaacatttaaaccttgtctgactctgccttcccttggtagttttaaggcatatggaagaatttcaacaaactgaattgatttgggggagaaggaggttagatttttttttaaatgttgccattttaaggagctagataatatacaagagacctttggccttcggccttcctgtggaataggtcccgagggagttatgaacttccaaatgtgaaaatgcctatgtaattatttttctctctgtgaaaaatgcaaagtatatctgaaaaagttaagtaattcctctagatgtgtaacgattctataaattcaggattaaagtaatttataaggctaatttatgccatttatttatttatttatttatttagagacagagtctggtttctgtcacccaggctggagtgcagtggcatggtctcagctcactgcaacctccacctcccaggctcaagtgatcctcccacctcagcctcctcagtagctgggactataggcacacactaccacacctgactaatttttgtgtctttttttc

SEQ ID NO: 59333 - DNA, 1035 bp, Homo sapiens
ttctagccactgaagagtcattaattattgtggttcattctcacagcaaacccgtgttgattttcattgatcccaggctctcaatttaaataagaaagctagcaaagttattttcttttgcctccccttctggcttaacaaagagaactcagaagtacttacgttttgagaaaatagagacccatttaaatagtgttaccagagtgacacattattaactaagaaaatcagaattacatactttttagaggttgcctccacaggacacagtggtaatctctgaagcctggaggtctcatagccctatgatgcagaatattatcaatgataggaagagaaagcattgcctccttaacagtgtacggaggcatcttccaccagcactgggaactaagcctccactgatgaacggcacaggagaaagacacagacctgagaaggctgaaatttacaacgcgggaaagacgagggcagcacagaattattaaatggaatatgggaaacgcgtggtttgtgtctacagtccacacttgcaacacaggtaccattgtgtccattgtatagaggagaaaactcagttccagaagacttgagtaacttgccccgagtcacaagattcaaagatgccagaccagggagctaaatccatgaatatctggctttaaagtccttgccttttctttacctcacagtggtttacatgaggtgcattgttactcgtacactgaatttccttcactacctgcctttttcaatataaggtgaattctgcatcattttgttgaaatggaaagttctaaccattattgttttaatataggaggcacttgggccttgaaggagagttgtcattccagtagtctggtaaagggcatttcagatggaagacacagcctaggcaaaggcactgaggtgagaacgctgcagcttagtcagggaatggagaatagattcatttgaggagaactgagtgtctcagtagatgggggttatatcatgagaaggacgtgagagcctcagcatggagctggtgag

SEQ ID NO: 59334 - DNA, 1036 bp, Homo sapiens
gttcagttatagtgaggcatcagtggtgcccgagacatggcaagatcagcagtgactataggtgactagactctgtacagcgtagtgtttgcttcagactctgcaaagctgggctttggagtttgaatcttttactcactgaccaggtatgtagctgtggacaagtttcttaatcttcctaaatctgagattcctcaactgtaaggcaggatttgttagcctccttcacagagttgttttaagtgttagtgatcatgtaagcaaagggcctcccacaaagcagcatctggttaaatgacagctgctatttttaaaaaaataaacccaccaaccatgaattgagtgactgctatgtaccaggcaccaaggtaggctccagagatttagagataaaaggtagagtccctgcggccttcaagggacatccccgttagtggggatgtttcagagagaacaacctaagctcaggttttccctcaggaagaagaatgcgttctaaccagacgagagcgtgtgcgttctcttaatagattgtataaactgaaattgtgcaatagccagtttgggtgcaatgagctactcaaatgacacattgatttttttttttaattatactttaagttctgggatatgtgtgcagaacagtgcagctttgttacataggtatacacgtgccatggtggtttgctgcacccatcaacccgtcatctacattaggtatttcttctaatgctatctctcccctagccccacctccagacaggccttggtgtgtgatgttccactccctgtgtccacgtgttctcattgtgcaactcccacttaagagtgagaacatgtggtgtttggttttcttttcctatgttagtttactgagaatgatggtttccagcttcatccatgtccctgcaaaggacacgaacttatccttttttatggctgcatagtattctgtggtgtatatgtgccacattttctgtatctagtctatcactaatggacatttagattggttgcaagtctttgctattgtgaa

SEQ ID NO: 59335 - DNA, 1097 bp, Homo sapiens
agacgatggctttccctgggccggagacgatggctttccctgggccggagacgatggctttccctgggccggagacgatggctttccctgggccggagacgatggctttccctgggccggagacgatggctttccctgggccggagacgatggctttccctgggccggagacgatggctttccctgggccggagacgatggctttccctgggccggagacgatggctttccctgggccggagacgatggctttccctgggccggagacgatggctttaggaggttggcataggagatgtaggagatgggaaaaatgaaatagattcaagatacattctggggtcagaattgtcatgactctgatagactggatgacatggattggggagaaatgggggaaggttttataatactgctcatgtattagagaaaaataaatactgtcatctctcagatgggaatgaatcttcccatctaaggagtaggtttgggggcagaacttagtcatattaaatttgaaaaatgtcatttaaagagagattttttctcattgaaaaatcatcttccagtacacaagtgtcagagtgaggatactcacagtgggagtggctttgagagaggtgggaagaggaaaggagggtgcctgaacagatagtggcatctgttagcaagtcagggtctggaggaagggcagcctgatttagtttgtgacttgattgaaactgtttagacctataagcataggtattaatgatgatgattttgttaaaatgcaaaagtctattttacaaaatgactctcatatgagaaaatactctgaaattgaatttaacatccaggaagtcctatcatatttaaaatttatttttctggacatttacgtttccgaatgacttggtgagaaataggtctgtgagtgactcactgaaccccccaaaaaagtactcatataggtagatttcctcgtgccgatcaaaagacgttattaagggaagtgttctttagccatggctaactgggacatttgttcttgagttgggatggtctgatgctccttggacagtgtctggttacaagagcaactgatgggtgcacta

SEQ ID NO: 59336 - DNA, 1021 bp, Homo sapiens
agcaggcatccccttagcactgtgtgctgttggcactacctgtcctaaaacctcaatatttatttggcctcatgtttattctttgcagacttattgagcacctactataaatcaggtaggtcatcgtctagataggtctgacccagataaacaaggtttctgtcctcttcaagcttaattttaagtgtaatcacagtgggatactccaagttagggatcaacagacctctctctaaagggtcagatagtgaatgatttaggctttctgggctataccgtctttcttagaactgctttactctgccttgtagctcaaaagcagccataagcaatacataactggaaaggcagggacgagtaccaacaaaacttgatttacaaaaacagtggccgaggtaccatgggctgtagtttgttgactgctagtctagacaatgccaatccactgagacagaatccatatcatacagtctggagtagggatttgtttcccagactgcaaagcagctttccagtcaacgtcggcagccatagagaataagtgcatttctcagcatttgctgcctgttgcagagttactgacagctgcatttgtcatgttcttgaattattttttccaccttggtttaataggtttcccaaaaagcctcagtgaggaagcatcaccctaatttgttctacatgtcatgtgtgtgataagcagaaaggaaacagacaaactcagaccttgaaactggaatgaagcatttaattcctgctcccatgctagcttggcagagttgagcaatacatctacagacgtccttccaacacaatgacttcgttgccctctgtgtggcctcttacctggtgctgggctctagggttgatgtaggacttgggtcctgccctcagggatctcacatcacaggagtggagtcgatgaagtacattcctgccttcattcccgaggcatgtctgactacctgccacacatgtgcaaggagagcaaaagtgaccaaggcctggaccccgtcctagg

SEQ ID NO: 59337 - DNA, 1232 bp, Homo sapiens
aagaagcagcattttgatgtgtttagtttttaggggaaataatgaatttgctgtaactagtcattaattttctttttctattttctttccttttgatgaaaatgcatttatattaattctaatatgggaacacaacccccatggggtgaaagagtctgaaaagttataactgaaaacaatgtcccgaaagctgccacaaaataaggccagggagatgaggcatcttgtctctgtgaagaccttcagtatgaggtcttctcagctggtagcatggggggaaagatcacgttggaagtcatctaccatcatgcagagccccagctccttgctatggaagggtagattggactttttagatctaagaaccttttttccactcagtaccttgagcatttgcgttgataaatgtttggtttctgacagcagtcttggattcaactgtataagggaacctttgaatttgaaccgctttgcaagtgtttcttgtttcgtgtaaagaatgcttggccacatctccaaaggtgtggctacgaaagaaataaggaaatcctacctctaaatggaatataacagtcctcaaagcgaacccagtgagtcaattcttgtctgagtttttgcttattctatggagtaaatagattttgttaatattgtaaacacagtttagtggaatatgcaatgtttccgtagttccttgattttattattgggaatatgaattaaatacaaattaagtgggtttagaaggggattagtaaaaaacaaaacaaaacctgaattagaaaatgttactttaagatttatttgatggaagtatttagcctataagtgagcctttactattatattagatcaactctcagactgacattttgattgtttcacatttgatcagaaattgagactataggatgctacttctatttaaatataaatgtgggacagatgtagtgactgacatctgtaatcccagcactttgggaagcccaggtaggacacttgtttgaacccaggagtttgagaccagcctgggcaacatagtgagacttcatctctacaaaaaactattagccagctgcagtggctcatgctggtcccagttactccagaggctgagaccagaggatcacttaagcccagaaggtggaggctgcaatgagctgtgatcatgctaccgcactccagcctgggtgacagaacaagatcctgtctcaaaaactcgaaatgtgatt

SEQ ID NO: 59338 - DNA, 1102 bp, Homo sapiens
ggtgggcaagtatctgttgagtcgctgctttcgtttgctttgggcatataccgagaagcagaattgctagatcgtttggtagtttaactttttcaggagcatccagactgctttccacagcagctgcaggagtttgcatccccaccagcaatgcacgaggattccagtttctctacatcctcaccaatatttacttttcatttcttttgtaatagccctcctaatgggatgggcatgtggttgtcacatggaaatattggctagtaaataaaaggaggaaaaattgaaaattgaagaatcaaacggtgcttcagacatgagtccctagtcaggtcactgacttagaattatttattcagcaagaatcatgtctctgtaggagctatcacgttccaaaacctctgggagctcagaaaatgaagtttcattgtactctttacccagggttaaagatctccattccctccccaagggtgggtaagagatgagtggggtgccaccgaagcaggggctgatagcaggaagatacttccttatctttatttcttttgatgaagcactgtgagccaagcctcagaggagccagcctgtgactgtacattttggaatctgtctgctcacaggtgttggcaggccctggtcctggtccagcacagcgttttccctggaggaatgccatgctttgaatttccttgtctacagactgtgttattgtccagcctctcagtgggatcagaaagaggttggtttgtctggcaattgccagaacagtgcctatccgtgacctcttgtctgagcatctgccagagaaagctgtgatctctccagggaagtgtagggcttgaagacacacttagcaatggctgatctttctcccagcagttctgatcactccctgaccatcctcacatcctgcctttgtccttccccctttgtcctaaagtgctgtccgctgccgtgactgtgtcttgtttccctggtggtggtggaggtgctgaggtctggggaagggttgggaatcacgatggtgggtgcagggcttgctcctctgtgtaactgcatagcctgctggcctggagaaagtcctttcctgcacagcact

SEQ ID NO: 59339 - DNA, 1116 bp, Homo sapiens
cagaaccagagctggaaaccagagctggaagactggcggccggagaatctgtcaaaatctcttgttctgaacaaaggaaagagatccagaggatcccaggtctctttctggccagtttaatgctcttctctgagtagctgccagctcccaaaaggcagagcattgatattcaaagaaaggaaccatctgtgaatgttatttactgtagggtctgcaattctgaaaattatcagccagggcaatgacccctgtttgactatcatttgtagttcaaaaagaggatcatggaaaacatttaaactattttctgtcttccccataaaatgttagtcatttatgtataggattattattgtttccgtcttcaaaccacagctcgcagagccagcgaccacatgatgagaaacagccatgcttcttagattttggcaagggtggctaatgtaaaaacggcccatctccaaaacatgatggatgccacataccccatggtttccaggatgaagccagacactgtctcttccatagtacctggagcaaggagaaactttcaaaaacatctgcaccctataaggttgaagatgggttggcaagaggaggacgtgcttgtgggaatcatacttgtaggtaggcagacgtgtttggacttgcctggcatatttttctccttggagcaattcatcttctcttgacataaaactttctcactagtcagaagcaacactttccgagatgtcatttaattcacactaacaaattacaaggaacttcaggtgaataggtgggaaggcagcgtttggagctagcccgataggatcctaaatatggttctgtctgttggccttagagtatcatttgcatcagtctcgtttccctcctcgtcgggggcgcaggacagcggcctcatttcgtaagacttgagtgaagtggtgtaaatgggctgataattggtgggcttcttcttaccatcacagaactttagaaattaaggaaaaccttactcggacaaaataaagcagtctctaagttagctagactttcgatctatgtggaatgtagaaatgtgatcttctgtttccaaacactccatatgtcataagtcaagatgtggcttta

SEQ ID NO: 59340 - DNA, 2722 bp, Homo sapiens
gcttgggaacaattaggttctcaaactccacatctcatatggaggccaattgaagatgaacatctttaaatgtcaagaggtgtgtgttctggcctgtaaccacggctccatatgtgtgctggttctgacaggggccctaaattcagtgacgacgtctggtaatgattgagagtgactgctgactggaggtttgaaggacctggcttcccccactttttctttctttatcccttttgcagttttcataggattctctgtttgtgagaggattctgcagtaagcaggtacttgtgttttgcttttataacatcactgtaagcgtgcccctttacatgcttaaactatgcccatatgactctctgcagaaaactggacctgtttcctaggccctgctgtattccagctgagaggaggcataggacataccaagggagttttgatttgcttatcctcacatcctctaatttaatgggtagccctttatagagacaggtgactatccgcattttagatgagcaaaccaatgttcagggaagttgcccaaggtcagagagctagttaattgagaaaccaggattgaaaatcaaatccagttccaagtacagcgttggctccaccatatgtgatggtcttccagctgtaagcgtttgctttgctactgtgagaaacatttatacttgtctgctgagtcatagggcaatgggaatatttttggcttgctctatctggctaattaagcaatggcagtaagataggcagagcccacatttttgaggtttttctttgtaaccaacattcttcatgtaatgtttcccccttaaaatgttaaaattaggccagtcccagtggctcatgcatataataccagcactttgggaggccaagatgggcagatggcctgagcgcaggagtttgagaccagcatgggcaacatggagaaactccatctctagaaaaaaatacaaaaaaattagccaggcatggtggtgcacgcctgtagtcccagctactcgggaggccgaggtgggaggatcagctgagtccaaggaggttgaggctgcagcgagtcatgattgcaccactgctctccaacctgggtgacagagtgagacgctgtctcaaaaaaaaaattattatcccttattcttttatttcttatagtgtctgtagcatataggcctccccagggaacagtgctgtccattttctgggttgccctgcctcaacacaactctccagaccaccctctgtctggcctcaaccctacgtaaccctttgtgtgcacatacattccctgggctcccaaggatagagcctcttgcatgaggaagctggatgaaagcctggaaaggttattttgtttaaattcttaccttgaagttcctttggtgagggagccagcctggaaatcattccagaacagtcgtgtttcatagttacagtgtaatcgggaggctgtcattcatggccattaaattgcttcctttgaagtataagaaaaaccaggacaacttttatggccctttaacccacaggattgtagtacacatgaatgaaagtcaagtgtgttgtggactcttgcaggtactgtggctggcagaattccatcttcaccctggtgctcattcattggttgactttcaagtgaaaactggggtgagcggtatcagaatcttggaaggcttttcttctctctcttttttgcatttttataaaacaaatcagaaatgaggagtcttattttgtagcttgactaaaaatgagaattattatttctctggtagatctctttggggctgggcagcaccttctagatgttagcactgtgctggccattttgcgtaccgatttccatttaatcctcacagcaatcctatgaagtcggtaggctcattcccattttacagataggagacaggcttgagaaggccccttagtaagtggcggtgcccgaattccaatcgaggtctgagccaaagcatgtggttttgctcccatgccctgtggcttcccagaactcatacctgagcttatataacagaggaacattggtggagccccaagtcgtgggtcccagtatctctaggataatcacttgtgtaataaatcacttagatttacacgactgtattatattttgttcttaagagaatcacatgggaaaactgtggagaaagaaaggcaacaaagtaaatattagtgtttaatgactagatgtgtgagatatttatattacatattataataaatttaatgcttcatgacattgatctgtatgtaatttaaagagatgctcaaaattcagatcattggaataataagcaaggtagttttacattgctgaaaaaggtacatctaaaggcaatgtatttcttattgaaaattttgttgatagctgagccgttcaaaatggggtgggaagagataaaaaggaatggggagggaatctttcagtatgtggattgtaaagttactctacaattgttctgagaggagataatccataggacgtaacaatgtgtgaacttcagctgtccatattcctcaataatatatcctgtcacctgtatttattgcctggaattgttgcaagacggaattagtcctaaaagagtttgattaggtcatgataagtcccaccgctccaccagatggcgctgtggtagcatagctacacctgatgcccctgccagaggtttgagaagcagatgacaaccttctg

SEQ ID NO: 59341 - DNA, 1043 bp, Homo sapiens
gtgttcagtttgtgtagtggagcaagcgtaaacttagcaagataaggagtttgtgtgtgatcatgcagatttcagtgagttatcaatccactttaatgctagagccagtgcccctccacccatattaattagttatgccattctcctatgtgaattaccatggcataagttagtggttttaacagagttaatgaactctgttgagatagctgggtcagaaggcagctaactaagagggagcttgcactggggcctttgtaagtaggaattcccactcacagcatcgacagtggtctaggtgatttttaaattctcctcctttttatgtcctttttctaaattttacaggcacataggccaaacctgtagtgttcactttctgaccatgaaaaaccgttatgaataatgttcactttctgaccatgctaaaccattatgagtaaactttaagtcatcttattgaggattgacaccagctgatgattcctatattggtatttaaaattccagaaagtcaaagctcaggcagaatagtaaaagaaaatgaaataatatgaagtcccagagaggaggaaggtggtgtttgaggagtgtttttcaacctttggcaatttcttcagctcttagggccttgatttccccatctatgaaatggggaattcagatcacaaaagttttgaggttccttctgcctatcattttgttgatgtatttgaaacttatcttgctaatacaccattagatctctaaatttgtaatacgatttaaaatgtagatttctagtcccaatgtggtgctagacttcgctcttcctgggccgcatatggggacaagatgacgtcttcagccgtcttcaaaccctgtgactctggaagcatgttatatgtccttcctatgtaagaaagtatccaagttttcctaggagactgtcaaactaggataagcacacctttccttggggaaacaccatctttccttaaccttctttagcttaatgtttttgatattcagcacatactatctaaatagatgacgcagatatc

SEQ ID NO: 59342 - DNA, 1144 bp, Homo sapiens
agagctactaatctgtactccatttctctaatgttgccatttcaagaaagttgtataaatagaaaatgcagtgtgtaaccttctgggtttttttttcacttaggataataactctccagagatttatccaggttgttgcccttatccctagttttttttttattaccaattagtattccatggtgtggatggaccacagtttaacctttcaccctttgaaggacatctgtgttgcttccagttttttattactataaataaagttgctgtaaacattcatgcactggttttatgggaacatggtttttcatgtctttgggataaatgctcaggaatgcaaattgctcggttgtatgctagttgcatatttagcaggtttagcttgcaacttgcagcgatccctaaagcattcatgattatcattcttattatatacatttgaggaaattaaagcctagagtagttagttcacatacccaaaattacataactagttaagtagtggagccagtacttgaacccatgtctgcctgaactctccaaatctacatcttttccagtgaggactctgctaaagtatataaccttttacatgtatcagtgtttggaatggaaactaacggttctgttttcacctgaccttgaatcactaaaaatgagaagatgatttcatagtcacaatattgtatctgatttttttcctcaaaagagcagaaagcaaatatgagtacagaagacaccaaagttcatggtagaaattatcaaattaggattcctagcatttgaatgcgagggaatggagctttatgatcccatctttggtgagaggttgttgctcagtgaatcaagggcagagccaggactcggatatgagctctccatcccgttctgtctggctgccatctgtctctccttcagtgctagggcaggcagctcatggctggtaatgctcagaaatgcagatactatcaattattggtgtgttagcggcaaatatgtgggtagaggagggggagagtgagagattcccaggtgttaggtgacctgatcatgacaggtactgaaactctgaggccatttatggttatgagatgcactgtggggaattgcagccccttcctgtaatctacagggttatttctgg

SEQ ID NO: 59343 - DNA, 1008 bp, Homo sapiens
cattttcgtgagaaaaaagataagcggcagcacttgcgtttgtggtggcgaagcacaagtatttaatttctgaataagctgtgatggtggggtgtctgtgccaggaagcttgaatccgggtcatgttcctacttattgaacccctccggagctacataaatcctcttctgttttcatctttgttgttattaatatcccggttgtatatgtaatacaggaaatatccaaaacagcccaatattaattgcaaaccacgtgttagaatacagctatttgaaaagtgaatgctatttctgtttcatgataggatcttgtaaggttgactgaataaatacagtttaatactagccgggagaaatgtcttacttaattctattacatcacagatcatgtcggacgttaactgtaacttacgctaagacaatggtactaatcaatgctgcgttaatgttgttacttttctagtacttgaaataagcttgggcttagccactcttcttctcatatcccttttgatctagtggcaagatgttgagaactattgggcctggtctgtgtctttgaaatacaatataggtcattggcagagagtactgaacctgcgcccttggctccattacagcatgacctaatcaattgagaaaacgcctctccacggcttttctctggatgattctcccctccttactaccctgtgactgatgtttgtcatcttgtggctcaactaaactgtcgccagttactcctactcttttgatctcacatgctgtgagtcttacccattggcgcttagtagaatttatggaatcaatttgtgtaaatggagacatgaaatctcagtttgtagtatcagtttgagggatacagcaatcccacatttcgaaggctgctacagatcattcacaggtgttagacttattacagagctgtgtctttcttattccccaaagcctttgccactttggttttatatgttggtttcggtaaatacacattttctaatatgca

SEQ ID NO: 59344 - DNA, 1050 bp, Homo sapiens
gggcaggacttaattttgcttttttggatctttctgaatgtctgtagtgggtgttgaagcattttatgttcagaacatatgagcattttaattgattggcttctactgctttacatagtactgtgtgctcagtaaatattagtctgaataaaggcaatgcatgaggagactttggtagattatgtgattttgtgtgaatatcataaattcttaaatttcttcctttgtcttgtttttacatgaaaggtagtagatgaagcagagttaatccatggagtaatcgatgctgtgtatatgtgtacatgtgcatacttaagtgcaggtgttggcatgtgtttatttatgtgtagatagaggtggggataaagaagtagtgacaatggctgaaaaaagagacaaacatttcccagtgtgttctggaaattgtgttaggccactcggaccatttgatttttcatttatccctaagagtatatttacgtatttattaagagtagccactattcagagcccctggaaatagcctcaacaaaatgagtaaaaaattaatctccagtaaaaaacatagcagagaatgtgtggtcaaagctttgttgaaggtaaatacagggtttctggggttgggggaagacaaaacagggcagccatactagaatgggttcagaaaggctttgaagtgtgtgttgagcttagtcctgaagattaagaaggaggtaacttaccaaaaagggtgcaaagtggttctatacaaaggaaaccgtgtaagagaatgattgattaacgcagctctgatttcttctggggtgatcagggagaaatattctgaacttaagacatcataggaggttcctgtgttagaatcggttcactaataatgcgaagtccttacatggagagaggtaattgaacggtgttcccaaagagcagaccggtgccactgagtgctccgtggcttggagtgtgaacctgtggaaggtgctgagctcctcactgcttaatctgcagttaggaatttttacaaaccctgagtatgtggctcttgaattacag

SEQ ID NO: 59345 - DNA, 1048 bp, Homo sapiens
attaccttgggcagtatgtccgttttcacaatattgagtcttcctatccatgagcatggaatgctcttccatttgtttgtgtcctcttttatttcgttgagcagtggtttgtagttctccttgaagaggtccttcacatcccttgtaagttggattcctaggtattttatactctcaaagcaatattttataaagagtcaataatggttatcctagtccagtttgtcattttaataaaaatggctttaacacttcaccactgagcattaagtctgctattgaattttgctgaatggttcttatcatgtttaagtaatttttacctttcctatttaagtatttttaacagacatatttattgacctaatttgttgcacacctgtacatatgggacctcattacctctcttctgcagccttgatagaataaagagttctggtaaaattgctaactgggctggaaatcagtttgtaagcatttttttcctcagtgaccagtgacctctagcctctctgccaagcatgagacggagcctgactgatctataaattagttctggttttacgtacctacaaaatttcttgcccaaacaacccatttatttgcaagttcttgtactggcatcatcattacccagtttgtgcacatttctctgaaggtaaaatagacatcatgcgatatctccatttgacatggagttctcatgtttactgtatgaacacctgtgtatcttacccagaacatgttattttggtgtgtatggacatggagttgtttaaactattttctataaattgaaccaggaatcattataatttgcactgagaactaaattgaggtaatgaatttttttttgcacagaaactcctcttaatttataaaaatgcactgtgaatcagttcaagttggtctttattcgtagaactgttgaattagaagaaaactggaatatataatattttgtggaatgatctctctccgttttaaaaattgaaatcttagactaaagaggctgtgaaagaacctcactgaggtgtgagagaaaaat

SEQ ID NO: 59346 - DNA, 1076 bp, Homo sapiens
atgtagtttcatcatgttgcccaggatggtcttgaactcataggctcaaatgatctactccctcagcctcccaaaatgctgggattacaggcatgagccactgtgcccaggctggtgaataatttttaagattgagatatttagtctatctagaaattcttttgtgtatgctttgaggtaatacaatccagctttcttttttccacaggtggagatgcacatatgctaatgcctttttattatacaaatggttcttttccccactcaattgaaaagtcacaattgagtgatttaacacttggcttaaagttatcataacacttggcttttttctgtgctatctggttaattgttcaacttttctgtccctgttctagaatcattctcttttcttttctttttccccatggtttgtagtaagtttggtatctggcaagacaattccactcccactattcttttgcacacttttctttactgttctgtatggacattattgcaaatgagctttaaacttactttaccaagttggagaagaaaaaataccactggattctaattggaatatatggaattaaatgtatgtattaagtttagaaagcatgacattttaagaaagtaacctcctcttcaggaacatatgtttatctttttgttcatatggtattttatatctttcaataatattttctgtttgttatatagagtttatatatattttgttgttaaatttatactgtgtggcatttgatataagttgctactttttataaaatatttttcatttgattttctagctgtttatctctggtacagagaaaactaatgatttctttgtatatttgtcttacatctttgtatctaagtacattctcttattagagttggattttttattaaagttggattttcaaattatgtaatcttatctgtaaataaagatcacctgctacatatatgtatataaaatttcttcttacatcagcaaaatatatatattaaaaaaatatataaaatatatatattttatatatatatattttattgcattttaagttctaaggtacctgcacaca

SEQ ID NO: 59347 - DNA, 1002 bp, Homo sapiens
tgaggcaggagaatggcgtgaacccgggaggcagagcttgcagtgagctgaggttgcacccctgcactccagcctgggcgacagagcgagactccatctcaaaacaaacaaacaaacaaacaaaaaaaacacatagtatatatttaacgactctgttttttgtgaggtggctttgataagtcttccccttgcagagtctaagaagcacagagtcgtttattgtcaggatacttgtggcctgcaactagaactgggctcttgaaggatctcagggttgggctcatgctcacacttgctcctcccctcaaaatgcctccaaccccattttccttgtttctcagtctcttagggcatctgtacataatgctgcatgcctgctatggtctccttttactaagaactagccaaatcctctcgtcgtatgccacagtccaaacccagtctcgcttccttaattaataactatcgcctcctgtttggacaaaaaccatcccagatggacaatgtcctggtttgttcaggcaatggtaagtgagataagatctgttatcttgacaaaaaaggaatcccacaacagacattactttgtgacttaattttcttgaaattgattttaagaacacttttttttttttgctttaaatactttatctcatttgagccttacaataaccttgtgaagttgctatcattctccctgtttgctgatgaggaaacgggtccagagaacttaaggaggctgctgaagttcacaaggttaggaagtggtgaagcccagacttggaatgggctgtcgggcttccatcctctagagcccttactactgtatactatattacatctcactgcagcaaaatacagtttttttgcataatgtgtgcattatgttccgtagaaatggctgtaatgtgatatattcagtcatgccccattaatggacccagtatttttacttttttgtcactaaaatatgcgatagacattctagtgcatacagctttg

SEQ ID NO: 59348 - DNA, 1056 bp, Homo sapiens
ctttttatgacctcaccatttacgttggacctgacacttagaacctcttcttcatttatataccttggctttcttcctcaacagtgatagagattgttcctctaggcagactaccttatattattctaggtgaaaaaccacccagtttggcctggctttgaggccctcatcttttgcccaaccttttatggatgatgccctactctctgtcttgtagctgtgtcttaagaaatatgttgtacattgagtctctctgaattcataattgggtaacattatctctgtgaactatttttgtgtgtgttgcactgggctacctggctggaatcatcttggcactactacttcagtgtttttgcgtgatcctcttaattagagaaagaaagaaaaattctagactatgagtctaattaaggcctatatggaacctctgatctttcatttcaaagtgaaaagaacactagcttgtagtttatggccctaatctctaagtatttcgtgaaaggttgtttgttggttatattaatgcgttcactagttgctttcagactaatactaaatggtactgctttttgatattatagtcaacttctgtttacttttgttcagtatttactacgtctattgaaaaatttgtatattttatcttggtggaaaccactgtttattagtgggctattgaagtggtaagtaatgactgaaacattgagatgggttatgcagtgcttcttccttccgagggtttgtgagccactgagtaggtgtgggaggaatctcataagctgacttaagtattagaaaatgataatttacaatgtgtttttatattttttactcattttacttgaaatgctagtttgtttttcagttacaggcagaagcctagcctagctgaactggcacagcgcagttgacgtctgttaaatacatactgtgttttttgtgtttaaaacacatagtatgggccggacgcggtggctcacgcctgtaatcccagcactttgggaggccgagatgggcggatcacgaggtcaggagatcgagatcatcctggct

SEQ ID NO: 59349 - DNA, 1964 bp, Homo sapiens
ttttttttttttccatagagatcgggtctcactacattatgcaggctggattccaactcccaggctaaagcgatcctcttgtctcagcctctcgagtagcaggaatacaggcatttgccaccatgcccaactataatccatttttaattaacttttgaatatgttatggcataagggttttcttgattctccacacaaatatacagttgttcctgcatcatttttttgaagagactttcctttctccattaaattgccttttcatctttgttggagatcaattgcccatgtttgtgtaggcctgtttctggactcactattctatcctttcttcagtaccacaccattctgattagtatagctttttagtaaatcttgaaatcaggtagtgtatgccctctaacttttttttttctctctttaaaattgatttggctattttcacttgccttttcataaacattttttaatcagcttgttagctttttaaaaagcctgctattttgattgaaatggtgtgaaatgtagatcacttaggggagatttgacatcttaatattgaatcgtgaacatggtatgtccctttttttaaaaaaattttttttaagacagggtctcactttgacctccagggctcaagcgatcctcccatctcagcctccccagtagctgggactataggtgcataccaccgtgcctggctaattattattattatttttattttttagagatggagtcttgccatgttgcccagactggtcttcaactcctggtatcaagcgatcttcctgcctcagcctcacaaagtactgggattataggcgtgagccactgaggctggccctttcatttatttagagatcttatttagtttatcccaaatgtgcttgtctgttttgattgtgatttaatgtatgcaacacctattctaggacaggcaaagtacaaagtgccttacacttaatctcccataattacttcctgaacatggattgttctcactgtgttcagatgtcataactgcacctgagcgttacagagccaacaaatgttggaactgggattcaaaggagatctggtcactccaaaggccatgctcttagtctctagtagtcaagataacacatttgagaattctgtagataaatatttaaagacatttttagcaattgttgcatgcttgtttctcacctcctgtctccctcaaccaaaaataaacacataaattgtatgagtggatagatgtatctgtggatgaatagattcgtctttaattcaccatctcaaactcacagtggacttgcgtactattagaaaatcatgttaggattatctttgaaatgcattttaattagccttggtttttttttcctgttatctatctcatctagatatcatcaagcataaagtacatcttgtactatcagcatcacataggaaatcattagcattccccagagttgtctgatcacatgccgtcccattgatgtgttggtcacctgaccccatcatcgttccctgcatctctgaggaggtctaagaatgtgacctacttggatgtcacttgttaaaagttgtctggaactttagttctgcctaatggttttttccttcctttaaaagacaagaaaaatgaatgggctgttttataaccccctttcaatcctctgatcttcagagagaaaaatgttaaaaggcatgatgcagccgttttatgttgcagtttataatctaattaagtgtattttatccagatcattatggacttcattagagctctggactttttgtaagaaagatgatgagttagatttatgtagaatcatttgggtattttaaatgttgtgatcatgccagcagtgcctgattaaaaaacattcaaatctgcctatctgatttagttggtcatttaattttggaaggctcttgcttccaattttgctcactttttttgtaagcat

SEQ ID NO: 59350 - DNA, 1027 bp, Homo sapiens
aggttactgaatggggttttctttcatcattcatagtttccaccatacatgttttttaaaaagatgatttttgaagagcaaatttaggttcacagcataattgagaggaaggtacagagttttctcatatccctcctgccctcctcccccacctccaacacaaaacacacagcctccctcattctcagcatcctctaccagagtgggacatttgtgacagctgatgaacctccatggactcttcattatcaccaaagttcagcttctgttagcgttcactcttggtgttgtacattccgtgtttggacagatgaatactgatatgtatttacctttatggcattatacagaggtgctctgtgcctcacctgttcatctctctctcaactctcatccctggcaaccgctgatctttttaccgtttccatagctttatcttttccagaatgctatataatcgggatcatacagccttttcacactgccttctttcgcttagtagtatgcatttaagattgctccgtgccttttcatggcttgataacatcacttacttttagtgctaaataattgtccattgtctggatgtgcaacaatttgattatccattcaccttctgaaggccatctgggttacttccaagtttggggagttatgaataaagctgctgtcagtatccacatgcagatttttgtgtggacataagtttttaactcctttgggtaaataacaaggagtaagatttctggattgtgtgatgagtatgtttagttctgtaagaaattgccaaactgtcttcccaagtggctgtaccattttgcgttcccatcagcagtgaacgagagttcctgttattccacatccttgccagcatttggtgttatcagtgttccggatttggccattctaatatgtgcgtagtggtatcttcttgttattttaatttgcatttccctgatgacatgtgatgtggagcatcttttcatatgcgtatttgccatctgtatccatcatacatttttaatgc

SEQ ID NO: 59351 - DNA, 1126 bp, Homo sapiens
tcaccaggttggccaggctggtctcaaacccctgacctcatgatccgcccgcctcggcctcccaaagtgctgagattagaggcgtgagccaccatgcctggcctaaaacatttatttctaatgagaatgaatatgtgaataaaatcagcattctgttaggaatgaaaaggaatagatgtgtgtagtcagccagttagtgtacactaaaccagttggtattgtcagtagcagtaagagtgactgtctcctcagacttttgatgggctggcttagaaaagtaacatgaagataaagtgggtcctggatgtctttctttatgggagctgagtgattatgccagacatgagatctaggactcattttgcaaatgaagaaaaaacagctgaaaacttgtcaataaaaatgataaccaaaggagaaattatcatatgatccaatttagtaatgactgagggatcataaaaatttattaaaatgaataacagtttattgcttttctgctttttctatttttttccttttttatcttcagaaatcaagaaagacattttgctgctttgggaatgttatgccatttttgtcgttaaacggaatatttagagttaagatatgattaggataaggtaaaaccttatgaaatgttctcacatataaatgtatggaacttttcaattagctgtttaaaatgaaatatttatatatggagatcttctcagatatataatgtttaaaaaaaaaaacgcaacctttatttttattttttgagacagtctcgctctgttgcccaggctggagtgcagtggcataatcgtggctcactgtagcctcaacttcttgagctcaagccatcctcccatctcagcctcctaagtagctgggactacagatgtgtgccaccatgcctggctaagtttttttcttttagtagagacaaggtcttgtaatgttgcccaggctggtctatcctgagtctgagctcaagtgatccttccacttcggcctcctaatatgctgggattattacaggtgtgagccattatgccccgccaacttttttttttaaagcaatatatttagtggtctctggagtagctctgtcaacactgtcgaatttgaaattgtaact

SEQ ID NO: 59352 - DNA, 1003 bp, Homo sapiens
ggagttcgagactggcgtagggaacatagcaaaaccctgtctctactaaaaatgcaaaaattagccaggcatggtggcatgcgcctgtaatcccagctactcgggaggctgaggcaggagaattgcttgaacctgggaggtggaacttgcagtgagctgataccataccactgcactctagtctgggcagcagaggaagactgttaagagagagagagagaaagggagggagagagggaggaagggaaggagagggaggggagaggaggggaggggagggaatgggagtgagggagggaaggaaggaagggaaggaagggaaggaaggaggaaaggaaggaagggcaggcccacaagtttggcccttggctgacatttagcaactgagatttcagcaagtgtttcccccttatctggtaagagtggctgacagtgcctaaactgtttgtgtcaacattatggtttatgctgatcccctgctgtccttccaggagtccaaaattagaggctgcctacaggcgattgaactccaataaagaccctgggtactgagtctctaatgggtttccctgactgggacatttctcacgttatcacagctttttgtaggaggagtgaagtgcctcccttgtgactccctgggggaaggcccttggaggctcccactctgtttccacagacttctccccatgtgcctttccccttgctgacttcgcttggtgttgtttccctgtaataaactgcagctgtgagtacgactgtgtgccgagccctgagagtctgcctagtagataactgaaactgaaggtggtcttgggctcttcctgatgcagtcagctgtggatgtagtggtacctctcatagcataaagaacgcaaaagtggtagcaggtttgggagtgggagcagtgatgcattctgctgtaagttttccaaggtagtcacttatattgctttactagggttattttgagctagcatttattattatatgttttctattt

SEQ ID NO: 59353 - DNA, 2702 bp, Homo sapiens
ctaatgaattaacataaatacctgtgagtaggttaagtacacacaaggagcagattacaaaagaatgaaaacttaagcaattagcaaggattttaaaacattgatctatcaggtgttctagaaagtatttgcttctacatttcgagtttagctcaaattttactgagcagcttaaacagcactgtctgcttttgcctctaggtcacaggtcattgtcaaattcatttataagatagtttcaatctgtacttatttagcagtgcagagaattttagacacactaccttttcactgtttgtaaaaaaaaatttgaaaaataagaattgtaatgtaaaaaatattggaagactaattcttaacctacatgaagaaacagttttcagcagctttctaaatgtcttgtttacatccaaattgttgagaagctcgttgccaatctgttaattcatgaaaattcaaccttttaggatgtccactaagctgccttttattagcccggtttgaatgactgtgttcgtacttgagatgagttgaactgaattgccttaaaaattcaaatctgtaatgaattcataaggagttttcatcccaaagttcaaattggtagggcctagtaataactttagacatttatgtggtgacgagcttttaatcttccttaaggtttttaaaactctgcatgtactgtccttcttctatgttctcttgtccttttagttggttttggtagaaattttataaggcaaattaatgaaagttatctcctgagtggcagtttacaacaaaaacagatgtaaaggagaaaaaaatgaaatgaaaatttggattaaagaagaaaaaagtctcatgttagtaacagatataacaaaaagagtgaactctacgtggctataagttccttgacagcaaggactttgcctttcttaggtggaatctattgacatgtagagaaggaatgttttacttaggaggttgtcaaggaatgtctgtcaagtaggggtagaaggaaggaattaacagggctttgagaacattctcacatttgaagtgctaataatttctggtgtgaatttggtgataacagtgtttcagtatttaatattaatttgaattttctggctggttattaacttgagttacgtttataggtgatgaaacaaacgaagaggattgcatgtttatacacagtagaacttgagggttttctaataagcatactttaacattgcctcagcctgtaaatctgggattacaaggcagataagttttagggtgattacttctttcaccccataattacttcatggatttgccgtggtgtttctgtaagtagtgagcatctctagtaaactgacattttgattctatttaaacaactcattttacccagtttttcagcagcacattgactggataaagtaaggcgcgcatctgtcctcacttttttgagtcttgctcctaagtcttgtgaagaaaatatgggtgcacgtatgcattcctttatttagagtaacttcattgcatgaagttgagctgaagaactaggaggaaaatagctctttttgtaagttgtgctttaggagactttggatttagctaggaatgggatactgagaaaaactgaggtttcacctcctctaaacaatgggacagtgttctcatctctttgggactatatacatatctatttatatcctgctttagtccagaaggaatttcagctttggaaaaaaccatgcacacacacaaagatacaaataaagtgtaagtgaagtaatcagagtaagaggttggggaaggtaagtcgaaaccaaaagtgtaattagtatacagattataggctctgcagacctacacggtcacaggaagaccaccacatatttggctgttagcttttgaacaaagccaatgcaaagaggataacatgaacgatgcacggttcccagtgtctgtgccaaaatcgtctaagttcagtccggtctagaaggccgggggatggagctgacctcaggggaaccctgctgaagttgtgacatttattcagtcaagaagtatttattggacatgaacaatttgtcagtgaccatgctagacactggggatacgcagtcccacctttaaggacacacagtataggggatagatcaataaaatagactgaaattgcagtgcagtgggataaatgccgtggaggggagtaggcatgaggtattagactgggagacggggatatctggggaagatttgtgttggtgcctcagctgacttctaaagcctacatacttcttaacccaggcaaaagtggaaatgcattctaggtagaggacaagtagccagaacaaagtgacaaaggtaagaaagtgccatgctttctgagaactgcatttaatagttcagtttgactagaacagagagtacaaaagggagaaagtgttgagaaattagagagaaaacttgggcacatcagaaaaaggccctgttttccactatgctcgggaggttgagggcagtgggcagccttcccggcaaagagcctgtggagaatggatggaaggataggcaggagacaaggtaggagttccggcagtgatgcgagcaagagagaacagaggcctccattaaagcccgatagtgaggacaggaagaagggagtacagggaagttactcaggagcaaaattgacaggatttggcctagaagag

SEQ ID NO: 59354 - DNA, 1045 bp, Homo sapiens
gcaagcatagcatatttgtacccttttaacagaggtggcagtgaaatgacagctttttgctgcgtgggtgttcttttttttttttttttgctgacctgtagtttgatttccagtgtctagacttaacagtctgaatttaaacacgaggcatatacacaaaatcatctggaactgattttttcacactaaacacttctttctgatcctactttccaggaggctccttcctccaaacatacctccagatgaaaatcacttaattaaccaagaaagactcaaccgcccttaactgcttttctaaacagtcacacatactggatttacttattttgagacatgacaaaccagttgcaaaccacaaattcattctcatgggccctccacacggtctcttgttccttctgaagagggtcttgctgaggaccatttgtcccccttcctgcagcagctactcagtcggtgccggagagtgtggcctttcgaactatttgcggttttcctgccacatgatgctgacggacctcagcctctcccggccttggtgcacatacaacagcctgtaaaagctccactttctattccagattgctgttatgcgtctgcttctcattcaaaggaaataagaggagatgtaaatcgtcgctgtgcagttacgtgtttaatgaaaatgatcttgcatgctagattcacgtccaggagcgagtcgcccttactgctggtattgaactcactctccttggagcgccccaaggctgtgggctgtgggggggcattagtgtgtgtgggcgcagctattatttgtaccaggaggcacaagtctgcacagcaacctgaagatttagattttcaagaaactgcaaatcctgacacacctggtgataaaacccagatgctctccccaactcataccttgtcccgcaactcccactccccacttcctgactagactttttattttttggtccagaagataggggtaagagaagaatgctgaagggagtgagtggatgagagaatgcttggcttacttgcccattagatagtt

SEQ ID NO: 59355 - DNA, 1041 bp, Homo sapiens
ttcacttccccccaaactaaggctccacgtaggagggatgtgggggagatgatggtatctggggcagtccaatagctcactgtccatctaagcattcctgggaagaatgacaacagtctcattcgtcctgcccaccaccaaccccaaatggaataaatggaattcagccttcgcaggcagctggaggagtgagcctgctgctgcctctgcctcaggattcttcagaggaagccacaaagggtttggatgggggtgaacttcaaagtggcatgatgaaaagctcgaggtgatgtcttccgggatttagcaatgccatctttctgttttatgttggctttctttcttgatttgggattgtgtttatcagttcggcttattaatattaagtaattacaaacaatcatacatgcatttaggaacttatgtttaatctctggcaacagcatagtttattggcaaaaacaaatgcacatacactgtaggttagtgatgaacatcagcagacaggcctgctcttgagatttttgtctaactgaggagcgtcattaccatggcagtattgttctgttttatgtgaaatgtgttggatatttatgttgagtttaagatatctggcacgaagctttcctcacacagaagaaaattttcacaacttttgcagattctcagtttgttttcttttattacaaattaaaacattttgatttagattttctgtttcacaattttcatttttatggtagaacatgataaggcagctacaaggtcatgactaagaatacagagtccagaagcagacaggctgtgtgactgggggcggttatctctgtgctccagctacagcatctcaaaattggagagaatctaaatgatgttctatgtagttggtcgcctttgtcatgttatattttcagatgagagccaccttgttttctgcacagacatatcctagtcagtgattcttctccttcccatgttggtttttgatggtttcatttttgaaaagggagaccagcttttcattcgctttttcagcagaag

SEQ ID NO: 59356 - DNA, 1111 bp, Homo sapiens
ttttttgtttttaaaggcctgtataccaatattttcagggatgatggcattcaggattgtgtcctttgggattataatggcaccacccctaggtactaggctcttcccatactcagtaatcactacttgtgattatagtggggataaataagtctgaaattttgaaatattttaattgcacaaataatgtataaatgcaataactttattttaaataatttaaaacattttataacaaaggcaaaattccccttcatcattgtccttaatccctgttttctcccaccgtcctaccctccttcctagaagtagccactgctggcattttggcacctcaccttcagcattacacatccccactcccacaatttttttttacagacacacacaaaaaattgttttgtgttgttttgataagcagcaccatattgtatatatatctgcaacatccttatttttacttacttacacatcttagatatctatgtttattacatatggatttactgtatttgacattctatactccagtgcttctgctgatagaattaatttatcctattgtaatcttcttaggaaacccttcaacaagtatttctgatcgaaccagtaaagcctcattgttttggagcctacttacttgaaatctgtaataattatgcctagaatagaattaaaatttatggttgccaattaatgacttaaaagaatatttgtccccactaagagataaatagcttttaaataccagtttaaaacataccaattacacataaatttttatctgtgtttcattatctaacaaggcagtggcttgttctgctgacccttaagcatttgcaggcgataaaaggtgcatgccattaaaaccatcctccagtaggactgggcactaattaggactttgcttaggtgaacgtaaacacaatggctccctctccactttatctcgccattcactttgttctgttgctttttgatcagggttctgacagatcctcaggtcggtgcttcacctcttcgtgaggaggactcctcttggggcccatctctgggtactttggggaagtgaatacaggaagattatcttatggtgttgtagtaccctgaa

SEQ ID NO: 59357 - DNA, 1854 bp, Homo sapiens
tgtctcaaaaaaaagaaaaaaagaaaaactagaaacaaacaacaacaaaaagtcttccgtttctatatttgagcagtctcacagtttgtaaacacaagcacagagtctccttttgaagcttctatttagataccacagagtgaaaacaggatgcctgcttaaacacagagaagtctttcagctcttaggttttaggttttgacttagggatttagattttgactttagattttgaaggtaaccacactcttcccagagcgaatcaatggacgctatgtaaatctttccttcctcaacgctaaggtcataggagttaaatttgtctcacattttcctttcagtgggttgcattgtttgatagtttatgataatcaaacaaagtggtaacttatctgtattggtgatggacttctttcagaagggctttgcttttgattacacacactaattatccttatgaaaatatacatgcattccataaacgagctgttttgttatccaagccttgattctttcgtccattcttagctactgttgactacctagtgttgttaaccattgttgtagatattggggagacagcagttaacaacacagataaaaaatttctgcctttatagagttcgcattctagaggggggagatagataatacactaagataaatcaaatattaagcttttctgtgtattttatatcaaaaaggtatactgaacttggacactaaggtgtagtaaggatttcctcctttgtatggtaaaagaagagtccttggtaatctttctttttacaataataatagttcttttttctcctagagtctcccgttttcttaaagaactttacccacacaagcaaggttgccctaggacagtggttcccaacctttctggcaccaggaaccagtttcgtggaagacagtttttcatggatggggcggtgaggaggggatggatggttttaggatgaaactgttccacctcagatcatcaggcattagttagagtctcataaggagcacacaacctagatccctcacatgcccagttcacaatagggttcacgccctcatgagaatcgaatgctgccacttttctgagctccagtggtcatgcctgctcaccctccatgagaatccagtgctgccactgctctgagctccggtggtcatgcctgctcacccgccactcgcctcctgccgtgtgacccagttcctaacaggccatggaccagtaccagtccgcagccctggggacccctgccctaggagactgacttacgagttcatgaagaaagtaaaaaataaatttagggatcctaaataaaggatatatataggataaataaagtcgagttttggtgtagagccctgatgttccaaattgtcccaaagggttgaaaaattaaagccttctcttcttcacacagattgaaattttccttacttaatcttatctgccgttaggttacctctccaattcttttttcaattatttgggcattaaactgctctatcgtgagttattagagatcactttctatggctgacaaatgtcatttaaaattaataccaacatttatgatttctgtgtgaaatgtttattctttcatgagataggtttcatatccttgttctcttgttaacatcccctactttgtttttagttgtggggtttttgttttattttgtttttgcattggagaccacagtttgcaataaggctatgcactaagcctcattgatttcctctaagctcttgtttattgagcacttcatatgtgccttgaattctgtgagtgacagacagtcgggggatgatgatatacaaggcgcagtttttgtttcccatgagtg

SEQ ID NO: 59358 - DNA, 1050 bp, Homo sapiens
ctgctatgctgagtatgcctctgggcgggggccatgggaccaactgagtcataagtcacaggtccaggggggtgagttggttgccagcatgctaacgtctgaaaaacgtttcgaaagaccaatcttaggtactacaatagtaatgttatctgtaggagcaattgaggaagtcacaaatcttgtgacctctggccacatgactcctgagcagtaagggattatagaaactacgcctacattttaacaaattgcaggcccctcccataaccctaatcttatggcctttcattagttttacaaaagcggctctggtccctgagcaaagaggggtttagttttagggagggactatgaccatccttcctgtctcccatggttagcttggcctgtgcctaggaatgagcaagggcagccagcctgtgagactagaagcaagataaagttagtcacgccagattcctctcaccgtcatgatcttggcaaacgtggtttcagaactcctcaaatatccaggagctcgatttggcctttaggctaacttgaaagaaataaatacttctattttaaattctttctttaaaaaagtttttttgtagagatgaggtcttggagtgttaatccaggcctcaagcaatcattctcccttggcatcccaaagtgccaggattacaggtatgagctacattgctcaggttattttaaattttttctagcaggaggagagatgtattcaatcctgagctggtacactagtaattaaaaaaaatagaagctaggggctgggtgcagtggctcatgcctgtaatcccagcactttcagaggccaaggcaggcaggtcacttgagggcaggagtttgagaccagcctggccaacatggcgaaactttgtctctactaaaaatgcaacaaattagccaggtgacatggtgcaggcctgtagtgtcagctgctcaggaggctgaggcatgagaattgcttgagcttgggaggcaggggttgtggtgagcaaagatcacaccactgcactccagtatgggtgacagagtgag

SEQ ID NO: 59359 - DNA, 1056 bp, Homo sapiens
tgggtgacagagtgagctcttgtctccagaaaagaaaaaagaaaaaaaaaaaaaaaaaggaattgtcagttggttaatgtcttacagggcaataaaactgttgtctttggggctatctttctatcacacaaaaatcatttacatccttttggacaaaaatctgcaagttaatatgttacttagcagtccttatgctgatagataataagtagtaagccaaacaatactacagtattaaaaaaaaatccttgggtgggcctgtttagactgtggtccaatatttaaaagaatataaaggtaaccttttgacatattttcaaatttttcataatttttactaataaagtctttcatttcgtttggtttcggtttataatgagttatatgattcttgagcaaatacaaattgtgacctttatgtgtgtattgtgtgggttttttgtttgtttggaccagaatcccccttacttgggactcagtaagggaaagggctcatagttttgacttacctgaattgtaggtgagattagctgtgttattgtttaggaacttttattctgtgtgaagggaactgtagtcacccaactggctcttcctgtctgctgcacagacaaaactgaaggggtggcctgcccctccacacttgtgggcgtttcttgttgggtggaacgagagacttgagaaaagaaagatacacagagacaaagtatagagaaggaaaagtgggcgcaggggacccgcgccggcaccagcctctgagttccctcagtatttatcgatcattatcgggcatttctgggagagcgggatgtggcaggacaatagggtaatagtggggagagggtctgcaggaaaacatgtgaacaaatgtctctgcatcataaacaagttagagaaaaaagtgctgtgcttttgatgtgcatatacataaacatctcaatgccttaaagagcagtattgctgcccgcatgtcccacctccagccctaaggcggttttcccctgtctcagtagatggaatatacaatcgggttttacacggagacattccattgcc

SEQ ID NO: 59360 - DNA, 1170 bp, Homo sapiens
ggtgtccatataatttgtggtccaaagcagaatgctttgagaaccaaagagggcattcttaataattatgttgggataagaaatgtaaactgggactgtaacaggcaaattgcaacctatggtaattctagtcattcggcatgctagattcttgtacattgttcaagcaaaggcaaaaggaaataaactaattattctttttctactgtttttagccatccacatatcttaaacaccccttgtttcaccaaggaaaaatatttttatctataatgcaaattatcaaatcctttaaggttgatcagaaacaaagatatttgaaaatgttttgtagcaaaggggaggaaaagtatctttcctgctacttattttgggtagctgggaccccctctaataaaatttattttattagaaatttattcaagttttatgtgacatgggagacttcataaggaaatgaagacccgaagaagcagttaaacgtgagcttgtttcatagtaggtttgatgaagagtggagagtcttagagaaatgtgataggacaaagcgggggatgagctgaatgttataaactggaggatgcttagtaagacctatttgttcaggtctctatgtcactgcatgtttggagataaggatgcccctttcttctgggtatagggagggcacctcacacattagggtcctttgacctgcttcggggaaggtcataaaacgtaggaaagattttataacctttttcaggggagaaggggagggggaaggtctgttttctcaaatccttcagcttaaaatatctaatatgccaaagtaccatattttggggtaggatgtcttggaccccatcagtagctacctctggcattgtggcagatggtcaccatgtgtcagatgataaacatccacctctggattaattcctcattagggtacttcagatgttaactaataccattagggtgtgagtggaaactaacccagatacacataaatcacactggaaatacttctatattgaagtgtttaaaatttactatagatagtgtaacactttctttgctggagataaaatttatgttgttaaaagagaaaatgcaatattctttaggatgtacagctttaaagctgcattaggagtaaaacacaggaggtacatgcagcatttagtg

SEQ ID NO: 59361 - DNA, 2016 bp, Homo sapiens
ctctctctttctctatagagagaggagtcttccaagtggagaagacccaatttcagttcttggtggagatcaggattttgttcaaacagaagatggtgttctctctgtttcttccatgcccatttaatgaccaacgttcagctgtcactgaagggctaaaagagagaagctcttatatgtgattattttgacttaatttttctggaactggtttctttctctgttaggacatactgggtgcttatgcaaggattatgtatgttggacagtttggccattcatatatacctttgtagaatttttctgtatcttttcttttgtactctagtattttaatatattttgtcattttgcaatttaagcctgggtctgagacagtttcaccttattcttaataatgctagataattccatatccactaatagaaagaaagggaatttgtgatggtgactgctttggtaccaagaggacagagggagaaaaagaacagagaaaaactgactggattcttctagtgccagccagtggaaaatggaaagaaaatttctccatacccacatttcccccaaatctcccttgtaaaaacacccctcccccagaaaaaaaaaaaaaaagcaaactaccaatttcagacataggttttaaatgcagcatcatgaaaactgagcaatttggagggcgagaaaacatgtgagtggctggcatttggggtaggaacagccggtaaaggtctaaaagttttgtctactcatctcctgttcataccatcatgagataaaggggcagttttctacccgagacttttggttgagtagttgaaaacttgttttcatggtgtgcaaaagaaatataacatgaaaatctggatcaagtgaaatagaaatatttttagaaaccaaaatcttcaacaagcttctgtgaaggtttgtgaagattcatatgttcctttctcacggtcttaaaggagcaactgaagtgatttcaggaatctaagctattctggctcgaaatagggatgggttggatatgcacctttcccaaaataattcactgcatctaaaatttataattaaaatagttcttaggaaatataataacatgaagtgctactcatggacatggaaaatgtaactcatgcctaatgttttggttataggagaaagaatgttccagggaaatgtcatctttatgtattgaattttctaaaagtagggtcgagtggctgggcttagtggctcacacatgtaatcccagcgctttgggaggctgaggcgggaggattacttgagcccaggagtttgagaccagcctgggcaacatggtgagaccccatctctacaaaaaagtacaaaaattagctgggcatggtggtgcatgcctgtggtcccaggtacttgggaggttgaggtaggaggatctcttgaacccaggaggccacagtgagccgtgtttacgccactgcactccagcctgagtgacagtgcagtaccctgtctcaaaaaataaaagatcatctcaaataaatataaggtcaagtaattacctacacaataatcaatgaattcaaagcctctgaaactaaaaatgtagctaaaacttttctggatataaaatatatatgtgtgtgtatgtacacataaatttcataaagataaaaacatttgccatcttcctatacaaattataagctgtctgaaattattagaaggggatgtaatataggaagtgtattgtgacaaagctaatttttcaaacttttggggatattgtactgaaaacaaaaataagcactaatcaatgtcctcagacttacctctaggataaaataaaattttagttggactacttcatggaatttccctcattactcttaacttttttttttctttgagacggagtctcgccctgtcgcccaggctggagtgcagtggcatgatctcggctcactgcaagctccgcctcctgggttcacgccattctcctgcctcagcctcccgagtagctgggactacagg

SEQ ID NO: 59362 - DNA, 1008 bp, Homo sapiens
ttgcccctgtgtgcactcacttctgcccttggagtgcctagcacattatctggcatacagtataagttcgataagttatttgttaaattaatgattgagtagctatgaagagatacgaaatggccatgggctccttcccctttctcctggacagtcttaactcctgtttcgaattgttttgcttcctgtgaaggaaagaagtatgaagttgtatttgtgctagccacccgcaagcccatggtgtggggagagacagacaaacacattccagtgctgggcatcattgatgcgatgatatgtgcacggggctttggaagcccagaagaggagcctgcagttcagctgaggggaccagagaaggctgtttgaagaagatggtgcccgagcagaagaggatcaagacgtcactgggaggggcagagggtctaatagagataccaatgcggggcttgccgtaaacactcagggccacagaagaggaaagtccgccatggagggagggaatggcaaggaggcaaactggagagaggctccgagatacgctcagcagatttagatgcaggttagatatgaaaagtgggaactgtgatgtgtgttaggtttgttatgatactgatttctggtatttctggagggacattagccgtgaagaaatgaagtatggctcatgtgatatgtcactttaaaatcctgagggacagccaggagtgatcctgtgcgttttgctatagaaaaagcagtggctctggacctttgtgtatctgcctgggcattgaacggcaattctttgaccttgttacaacccagagggctttaaaagtctggaaagttatggactgttggtggcgaggcgggggacatgctctctggaagatcagtctgagagagccccaagtatccagatacactaagtcataatgatacaaaacttaaatcctgtagtctttcacagcaggcggaagtgcaaggactgggcttatggttcagtcctctcttctaagtttaaga

SEQ ID NO: 59363 - DNA, 1339 bp, Homo sapiens
acgtttctttgtctgaacaactatatttttcacgtgttttgtgcattttccaaatatttaagaatccaagaaatactttgtaatgaaagaatttttaatgaccctatgcagaaactgtaaattgcatgtctatgttgtgagtttcttactggattatagattactggattatgtaggagaaaatggaatgagcacctacaaatcaacaacttggataaataatatctagaaactagcagggactcatcatttcattgtctttggtaagatggacagatcatttggtggttgttgcacatgtcttttcccataaactgtacttgttgtcacgtaactggaattagagttacaatgataaccatttgttacaatgataaacatttgttacaatcataaccatttgcaagaaccgtgaatccttttattcaacaaaagttagttctggtatctttttcatatacattgcctgaggctcagaattgcaatgtattctagttaggtctttgtgtttaggctcccaagtacccgtattaatcagaacatctaaaaagcattcccataagtacaatggactgagattgccaggtgtctgatgtagtgcaaagattattgctgtttaaaagattttgacctcagagcttcattcttcccatcgtcataattttctgagcgctgaggcattgcagatcttgtctttctgtttattcagctatactttttgccagcaaagaggcctgaacaagtaggtaatgagactgtctacacagaggttctgcgagcccacagctgcccactggcaagacccgtttaggattaatatttcagatcatctattctgcttgctctgagattgatgcgcaagacacaaagcaacctctagacacttcagctaagaataggtattaagcgtgaatgcatttgcatatttggtggcaacctattctacattcttccttaacatttttttcttgtttattaaacagaggatgcttttgcttacctctcaactgcagaaaaggtactgtttgatatatatcggttttatttactctgttctcacagaattgcacgtgtgctgttcatgggggaaatattttatgtaatttccaataaatattgaagaaaatactataatcatggcttgatagaaggtgtctttgtatggatatttcaagggagttttagtaatggccctgctctatgaaaaataggagttgaagttgatgttcaggccatttctcctttatttactgttcttgtatttttttgacacagggtcttgcctgttgcttaggctggggtgtaatgacataatcacggatccctgcagcctcaagct

SEQ ID NO: 59364 - DNA, 1004 bp, Homo sapiens
agcctttttctaaatgcacaaaatacaaaatattttctcctaaagtccatgaatggtgccttttggcctctctgaaccctcttcacacagcaggatttcgaacgtgtgctggacaccaggaaactcatgtcattcccgcagggctttggatttaggactttcttagattgacagggaccgaatatttgaaataaactattgacatgcaagaggcagattaatgtgaaggttagtagttttggagctaattccatcatctttcttgttcttgatttgcatgtgtgcattgaattatgttgtctttttgggtgcgggtatagatatagttttacccaattgatcattaacttttttgagggcatctatttgtatcttgtttatcttgatggaaataaaatataaaaatcagtttagtggtaatttttaaataattagacacaggaaggaagaacagggttgcaacaaaaacactacgacaaaactaaggatggtggaaaagcaagaaggtaaatttaatgtagacgggtgtctgtaaaatataattgaaactaaacttctgacaccacataattttaatcacagaaatatacttgggaaggaaataaattctcaaagaaaaccaactagatttaagattgtcactaaggaaggctgatgcaggtgccacacaaagtgatttaggtctagggccccggacactcctctacatcatattgatatgataggtagcaggtagatatccaagtctgagttggtcacgaagcagaaggtattgtgtgacttctcaggcagtggtacagccctctcggtgaaagtactggttggaaactggggtgggattgtgggggttggaaattaaaggttggaacaaaggaatgagaggttttggacaggtctatctgagaactctggagtactacagagcttttgcttttccagctaactctgaccaagccaatatagttcgtatacgcatattggcaaccactggtgacctttattac

SEQ ID NO: 59365 - DNA, 1010 bp, Homo sapiens
aattatgccaagggtgttttttttccctttcactttaaatcacccgttaggatcatctcatcagcttcctgaatgttgctgcagatgaaattattattgacatcataatgttggaattttaattttttctctccagttgtcagtgaatccagtgttcaacaatcactagtttttcttagccccattgggaccaaacccaaactagtcttaaattttatttgcacctttttgggtttgaagcttgattgttcgggatattggtgacagtgctaggactcagtgtcagtcattgttccattgcctattgaggacatagttctacttcttttggacagacagccttgctttattcaagcgtcccatggaaatcagtttgttgccacagagaagcagatgggtagatagaatggtcaaattttgctgtcccttcactaataacttagagaactgtttattcacagccggccatgaaacaaagtaaatgtttgtttcaaaatacgtatcaaattgaatattattctgaagaaacaacttgcccgataggcccgacacaaactggctattaccatttattttcaacttatcagtctgatacaaccaaagagattaaatctgatagttgaaaactattgtaggtctctagcattatttaaagatggagactggttagaagaggttggctggaaaagggtgggagaaaagcaaaataggaaatgttttgttccttttatgaccaaaaattctactattcccagagatagcctagaagtagtttggcaaatgacattttagttatttttggagctgcttttcaatattttaacatgtgtttatgtgtaagcctgaaaggattacaaatgtgtgtgtgtgagtgtatatacatgtacatataactacacatatctttctttatataataattatgtttttgaaaagttgagtataataaaatacttacaatctaaataccattttaataggacaagggaagctgactttctaaatacaat

SEQ ID NO: 59366 - DNA, 1986 bp, Homo sapiens
cgcttgcctaccgggaagagtgaaaagatgttaaagaaaaagagggaatcttttcattccttgaactgttgtgttgaataaattttaaagaaaaagaagcaaaatgaaataacttgagaacaagaacctaaccgcatatgaacataatttacatgccataaaataccattttcaatgtacaattaaatgatttttataaaatttacataagccatattttttaaagtattaaaagacagttatgagctaagcttttaagtacagtgatgattgagagtgtgataaaaatactgcaggtagcatttaattagggaaattcctgccagttgaaagatgtggatggggattggcagagattgaaggaacagccattttgtgccagacactctgctggaagaggagcagataaacgggcgagtctgggagcattttaagcagcatttaaaggataataaggtcctgtcttcactaagccattgacatgaatgtgatacttttatatttgtttctgttttctgactttagccctaggaaaataaagggtcatactagcattgcagttattttctcacataaaaaattatatttggctgcttctaattggaagtatctattttaagctcaactaaccctaacatctcaggtaactgtggacagaacttcacatattataagcgtcttactctgtaaaaaaaaaaaaaaaaaaaaaaaaaaaaacaaaaaacccctaaaaatacatattactagtgatgtattcatttaaacaagctatgacgatttatctagtttctggaagatactgaaacttgatcatttctttgctgcagtgacctacagcataagttaaatggtagttttagttgattatgctttattttattttgttttttaagtcaaagcctgtttttctccatgataatatcctcctcatggtaagactgcatggacaagaagttgcatagagaatagagtgttcgtgggatctttctataacttgtaagcaaaggaggctttgggtttgctgtggatcgtcctctggagagtcgcattcattttctcagaggagctctgtcccaggatgctcaggaatataaaaaataaaagtgcaaaaggaaagaggacgtggcagagccgaccttttccaactctgagggtgaatatcttctgtcttgggaggatggtgacaagcttggacttggaaccagaaccctggtctcttgagccatgtttgtccagtcctgagcgtcagcaagcagtcagggaggagggaaagcaagggttgcaggcagatctgtggaaaaagtgagctttggtatgagttgacataggcattgcctgttggtgtggtaattgcccagtggagacgtccacaggccttggagtgactcctgagtggggccatctgactcgtcatgctgccaggcagcggcaggtcacagttgacatgttttcccatttcttcactacctacctggcttttccacaaaaatgaactcccttttaatcatcatttctgcagtctatttagagagtatgaaaagcttatactaatctaaaataaacttttttttgttttaatgcgttgaagtcttgctctgtcaccaggctagagtgcaatggcgcaaccatagctcaccacggccttgaactcctgggctcaagggatcctcttacctcagcctccaaagtagctgggactaccagcatgagccatcatgcctgtcttcccaatctatgtattagtgccagtaaaacaattaagaagagtgaatatattagataaatatatcctagcacattccgaagatgaatagaatttattatgattttaaatcgcccactccagtttttcctttggcacggagaactgaaagctgcatatcagtgctgggctgtccataaatacttactagtcattgtactgttaacagttatttaatgatttaatcagaaaagactggctttggatttctgatgaggtaatga

SEQ ID NO: 59367 - DNA, 1054 bp, Homo sapiens
aggacttctcatttcagaaagttaatggtcttctctcctctctgtcagtgtgatgtatgtaaccactgattagctgactcatttgttcagttggcagatacagaggcgatcagtttactcgccttgctgtttaaaaatcatgataattttgcactccctttgagaaatgggtaagttcagaaatcagttttgggactatctttatttaactaaggcataagtgactgcaccttcagcaaatttaattcctggcttcagactgcagtaatcttaaatgagacattttgttgtatgcttataacctcagggattttatctgctgccgtcgtggtcttttgaggaggattctcctgttgcaaaggatgtctacaatgtaatgaatggcaagaagtatcaggagtattttgagtgcttaaacccatccgaggtttattaattttccggatatgggttaacatggttccatgaataggcacaaggcctagagagtaggattaggaaggtttccagggattctgaactcatgtcaagcaaaactggcatgctgggcagctaagtcaactgaatagggaaaagactttgaaagtgctttatctcactgcataatgtttgtcaatttcattcaattaatttacagctgcagggctcatgaggctgaaattaaagttttgtaaagtttcgataaggaggcagccaaacaagtttgattagcagtggatgttttggaaatgagttggcagccatgcaaaaatagagggtttgaatttcaggaggcacgttggcatggcagtgcccatttgattaaccgtggaaagcccattactttccacctggcatttcgggcatttcttttctctgtgtgtcttctctgaggtaacctctaacattggaataaacatctttttagttaagtctcatcagcccattgttcttagtctgttttattagcaataaatccgttgtctgtgttattctttctacagccatacaacatgctctttagtctttctttccaaattgtagacatttcagtaaggtgtttctccctctgcag

SEQ ID NO: 59368 - DNA, 1001 bp, Homo sapiens
ccaggataatcatcccccattgaaaaactaaccttttcaaggttaagtataatgtgaaacaaataatattgctccagaatgaatttctgtgcagtttgtatgaattaacagctggctaataagaagctcttgaagtctatcataagcaaggtcttgtattagccatagactgagcagacctattgctgcctctaccgtttacctcacatggtgaagtagtctgggaaaaagcagtgtcactgttccactccagatagctgtcattatggtattacataaactagcagactgctgtgggacgcaaaggggatgtgcaccgttttggttatttgaggggactttggcatgcccttgtaggagcccagaaggaaggatcatacagtttagtcttaagctgtgcaaaaacatgaccacatgaatgaaaccagtcttcctgaggccagagggcttataaagaggaaagatacacaccttgagtagacttctttttgagcaaggatatccagaagtagagtgttaaggcaaagcaaaagattctttagactgcactcaagtctgtctttataggcatttcttgcttgtgtagcatggaaaggaccactgcttgctcagtgtggcttttttttctgctatgctggaccatgtaagtagccattgagataatttattcctgagtcaaaataagagggcattaaatttagtagaactgaagttggcactggctagactgattactatgatgggatcccttggagagcatcactggtgaaagcacctggattctatttagaaaaacttaagtatgtaagttgccttctttgggggatgaaacttataatgaactattgtagagggtatgaaagcccacggcatgtttctatcatatactatatatatatatgctatactaagatgttatgcatgggtcagggtccttggtaaggctcacctgtcatttcttatgtagtttatatttgtttctctttgcgcaaggatttggt

SEQ ID NO: 59369 - DNA, 1054 bp, Homo sapiens
cttctcaaagcaagaaatgtgttttattcgtttttgtatccccactgtagcaacgtggaatgaacatgagattaaagaaagccatccttcatgtagtcatttttgtcaacactgagaaaatactgattgagcaggtggtgtaagccaggcacagtgcttagaggtgggggtaccagcttgtgtgatacgtgctccctgcccttctggatctcacagcctagcagggaagacagatgtgtacataactaaccccaaatacattcagagtgtctggaaacacacaggagggatggttgggttggagatgatttcacagaataaatcacattcaagtttggctggcctgtgacccataatttataaatcaaaatattggccatctagccaatgtcattatgagccacgcattatgccaagtgctgaagatacagaactggacacaacatactccctgaactcaagagcccattgatttgtagaagacatatacagatgtttaggaatccaacaagtagaaactgtgaatgggatgctgtggaaggaggagaaagactgaagaggagagcctcagtagggccggagaagagaggcccagcaaaaactatacgggaagcgacccttgagtttaggaagggggactaggaatttagtaggtcagtagagggtggattaaggtctggtttcaggcagtgaaacccctcatctatgaaaatttggagcatgataagtgatggggttccggacatgctaccccaaaatatggcattagaacaaacagcagaagcaagaaggtcgctcttatcttctactcatccttatctcctgaagcaagttataaatccttcattccagaggcatactctctatacctggagaagagaccatccttatcctcaaaggcagagagataccaagaagaatgtgaacaaacaggcgttgctaagttttccccaatttattaccattagatcatattcccattgtccaatcacacttccccataactctctggtcttcgtcagacctaagcataaaaatagaccaatttccctgc

SEQ ID NO: 59370 - DNA, 1561 bp, Homo sapiens
tcaaaaaactcaaagtatgttttcccttgacagaaacttcctatgaagaagttctgtgatccatagatttaaaattggcctcttttgggagccatttgattggcctgaagttaatcatggctacgcccttcattgtgtttttcagtgcagatgtgaaattagtcccggagagcaggggcatgtttgtttggtgtccttggttaggacatcagctgagttcggcctggtcaccatacacaatgtcatcttacatttggttactgggcaatccagagttcaatgaaagtgtccagctaagagttaaatgaaacgtgtcctttagtcaaatatgtgatttggtctttaattagttggtgcatttttgaaaattacttggcaactagggatatttcattagcatgtaatgggattaatatttagtgaatcatttttgaaatacatgacagatgttcggagccttggtaatttgccatatggtagcaagtagtagttttcagaattcttagttctgtcatatacgaatacaccttcataagggtgtgtgactctgtgtttgagaaacagcactctctttgttgcttaggctggagtgcagtggtgcgaccttggctcttggcacactgcagcctcaaacacctgggctcaggtgatcctcctgcccccgcctcctgagtagctgggactacaagtgtgcatcaccattgctggctaattttttaaatttttttgtagagatgggatcttgccatgttgctcaggctagtctcaaactcctggcctcaagagattctcctgcctctgcctcccaaagtgctgggattacaggcatgagctacctttcctggccctgcattctttataagtgtgtctacttatctccaaagaatattggagattctttttttttttaattagtcttttcttcctgttcattctgcaagggatatttatatttgaaattttggagaatgagagtttttcctttaaaattgaactatttttgaataccactccagaggatgtaggtgttgtattaactgaagtttcattctgaacatggaaagtttaattatcttgtgatattttatttgattagaactctgtagtaatcgctttgctatattgtgatgctcttgtcacagatgatatgcccggtttctgtcattaacgctgcactcttttccctataatgacatcactgattactcattttagaaccagtttccagcatatgttcttcctacttcctgcaacagtcattttgtagttactggcctggagggtaagtctttatccttccattagacgggttcagtatgagctgctattaattttaggacatgaaagagagataatcaacactgctatttctctgggaatacactgaaaattaaatatgtagactaaaaactacactgtatcttaagtcaacttctgttcattttaacagacatttagatgaattttggactctttcatttttaaaagattacagttataatgaacaataattaggaaagctttttttttttttttttttttgcaaaatggaaggaatttc

SEQ ID NO: 59371 - DNA, 1164 bp, Homo sapiens
gggtacatgttaggaagttggctctattcaaacctcgccttctttgtggacagcatctttggattttatgcaatttaattaccttcaaagacttagtgatttggttgataaaaccttaaaaaaaactcgtacagctgtagtctttattgctggaagtaacttttctttctttctttctttctttttttattcattcattcattcatttggaactttttaaatagtcactttggccaactccacattttacagactgggaaacaaactagagaggttaagtgacttgccttaaatccacagccaattagtgacaatactgagactagaacacaggctaaaggtactttttaaagagagtgtttatcacttattaaaacagttgcttttgcaataatagtgataggataattcatcattaattcaacacttattgactttgttatacacaaaatatggtttaagcattggcagtgaggtaaatacgaagacaacatcttttgtggaaaggatcttaaatggagagattttaaaataaagaaaatgtggtatattcgtagatatagatatagtgacaaggatgacagacatgacttgtaagaggcgttgataggaagaaaggctgatggcagcagatgcaggactagtcccatctttgggtgctagggttgccatttcgttaacggttcctatgtaaaattgtgcatttctcaggggaaaaaaaacacaagaaaaatggacagtatgcatccctttgtaatgttttaattaggcattttggacttagcatactgccttatgtaaaacaatacaagcatgtaatacaattttaatagcttcaattttattagggacaaaaataaaaagatggaacccaaggactgccaccattaggaaagtcagtgcagaatgatttgtgtgtgtgtgtgtgtgtgtgtgtgtgtgtgtgtgtgtgtgtgtgtgttttgagatggagtctcactctgtctcccaggctggagattgtagtggcgtgatcttggctcactgcaacctctgcctcccgggttcaagctattctcctgcctcagctgcccgagtagctgggactacaggtgcccaccaccatgcccagctaatttttgtacttttagtagagatggggtttcaccattgttggtcaggatg

SEQ ID NO: 59372 - DNA, 2663 bp, Homo sapiens
attgagagattttgaagacacaaagattccccatctgtcccctgcctgcaccttgtcttccatcttgcatattttttgaaggatcgcaatgaacaagaatgggatcaacagtggggagggccacacacctgtaatcctagcacgtttggaggccgaggtgcgcagatcgctggagccctggagttcgagactagcttgagtaacatggcaaaaccccgaaaaatacaaaaaaattagcagggtgtggtggtgtgtgcttgtagttccagctacttgggaggctgaggtgggaggatcacctgagctggggaaagttgaggctgcagtgagctgtgatcgcaccactgcactccagcctgggcaacagagtgagaccccatctcaaagcaaaacaaaacaaaaccaaaaaagcacacaacacacacacacgcacaatggagctgactaatccagatactcctttcaccccctaaagggagaaaaagagtatctgagctctactgagtttctgttgtggcgagtatggaactttgaagtcagactgcctgggcttgagggccagccccactgctcactggctgtaccatgtagaacagctgttgtactctctctaaatcccagtttgttcatctatgaactgaggattcataatatttaccttgcaggcttttataataaaaattaaataagatttctatgtaaagcacttatcaatgtgcctggcccatagaaagcactcagtaaatggtatgtgctattgttcattctttccacaaatacatactggttaacttaccctgttccagacacttttcagcatgctggactgtatagtgaacagttcctcccctcatagaaatatattctagaggtaggaggcaactataaccataataaatgagcaaattactttgtatgctagaaactggtaagagctatgaaataaaactgaacatcgtaatagagatggggaggaggagtgcaggaattggggcaacttgcagttttacatagaaagtcacattaggcctcgtggagaagacaacatttcaacagtgacttggaggtatttgattgttattgttactaccaagtaggattttgttctaccaaacagggctttgctttacgcctacatttctacccttactgcattttgtaaaagttgatgataataataaatgcatacttaatactaataattaaaatagtaatactggaaattataatctatgtttacactcattttagctatataatctcctctccttttcgtatttttcttttcttttcttttcttttctttttgagacagagtcttgctctgtctcccaggctagagcacaggggcgtgatcgtggctcactgcaacctccgcctcccaggttcaagtgattctcctgcctcagcttcctgagtagctgggattacaggcacgcgctatcatgcctggctaatttttgtatttttagtagagatggggtttcgttatgttggctaggctgctcttgaactcctgacctcaggtgatccacccgcctcagccccgcaaagtgctgagattacaggcgtgattcaccgcacccagcctccttttcatatttcactcatttccactgcagtgagtttagggattagaccagtaaggaaattagttctttttgcttacagacaacagaaatagaagaaaacaaactagaaattagctccttaaaaacaaaatactaaaacaaaatacagaattcttctacaggatttctcaactatcttttgtctactttatccaactttccaatgcagtatcatcacactaaaatgctagtatttctgaaaatacttgggctcatctttgttgaagttattgacaaaaaagttctcaccttttctgtgaatgagaaatattgaggtgtttatgcagtctatggtttggtgctgcagttgactcaggttggcatgggaactggtgccttgtgaccgcttacaataaccaagcatcctcaaagaacaggaaaagctgccctttcagagttctatatggcattaatctgtatttctctcttctaatcatgagcaaatgatattttcctttacagagctagcatcaccttttggtacttttgcactttaccttcctgtgtagatacattggaatccgctctctacggtttctctgtgcatccaaagcagtggttactaaccctattagattcagtgctgcatctttgtaatgtgttttggaatatccccttcatttctgaaatgaaatgtattaataatataactgcctctacacataaatttaagtattaaaatagtgttacaattttaatataaagaaaagagaaagatagctttcagtgcattttattatgtaaatgcttacttgttgactattcctggagataaaatgatgtcatcagatgtttggacctacttgcaatgaatatatttggattaaagaggagtaaaacaacattcaactgagtattggcaaaagcttttctttctatttgaagctttgaaataaggagtaaataagtatacacataaacatacatagaatcctataaatgtaacatctgtgtatgtagattgatgcctggttattgtgttggtgattgaaatgccatgaattgtcgacatgatttttcacaatgatgaac

SEQ ID NO: 59373 - DNA, 1052 bp, Homo sapiens
tcagaactgtctggagtgcaatgagtggcatgtaactactgcttttaatccaaacagcattttctttttgtgattagggagacattaaaattctttgttatataacgagaataaaaattggatttttgaaaacaaaaatgccctgtttttacttaaggtttctagcttctttttgaatgataaatataggttgtaattttctttcactgatgcagtttttaattttaaaagggtagtcactctataagaatcagcatgttttagcataaatggtcttcctgtgagagacagtcaatctgagctacctgtattttaatttaaatattttggtttttgggagacataaaatggattcagggcttataaatgggagctcaagtgtttataacactgaaaatatggaggcctgggaacttcatgaaaagttggacaaccctaaatgatcttagtgataattttgtctacatattaaacgttaaaactttcatcctaaattgtagcctctcaaggtgaagagttccctccatttatgatgggatgaattctatgatgatagaaaaattgaacatataagtttttctcctgatgacttgctgtggtcacctgcctctggggaacctgttttctgaggatattctttccaatattgtacttgcaactcattctgaaattatggaattagtattgttagtttcctcttctctctgcctttaaacagaagtagacatagctacagttatatatttgacttggcagaattttcagttttcaaaatgcctgctatgaagggcatggtaaggaagtattttttgctgtgggatcatgattgtttctatgcacaaatttagtgagtacactctttgcttgactagctaacaagtgctatgggcttatatccatttttcagtctttaaaaaaaaagagaaagaaatgtgttcagaactttctcaactcgatggggaaattattcatgttacgtgaacagacgagtcctctccatggcagcctctttcatgtaacctctagtgagtttttactttccttatgtgtac

SEQ ID NO: 59374 - DNA, 3350 bp, Homo sapiens
tatgtgtttgtgtgtgtaatgggggatgacatacaaagcctaaatgaaatttgttctaaaattcagggtaataatctctgagaggaatttggagatttcctttttttttaaatgtgtgctcccaaataccaaagagccattccaaaactcagtagtagaattatatacaaaatgtaatggaaataccttcttagatgactttaaaatggaaaaagaaatcggcttatcctataacccgctacttccgcccagggacttgcagagaaacacctgtgcgttctcagaacttgtttcactctgtagggtggagggaaaaatcgatcatgatctaaggctgtggttgctgaattgggttattagttgtgcaccatctacttttaccgtcttttgatctggccactatatttaggttgttatggtatccagtggggagaaaaacaacttaaacttttgcaattgggaaaccaagtgatactttaaaaaacttaatgaaccttgaaaattgctactcaccgtgtgagagtaaaaatgtcgcatcaggtgggtagcaaagaaaattgtcttgatacttcctgcattctgacaatatttctttggcagataatcatgtatcttttactgagagtctgctttgtgcagatacccttatattgtccttgtatgcactttggggagatacataaaggagaaattaatattaagattaaaacatgtgaatcccatggactcaggtgaggagaaatggcgagtaaccactaataggtccagagtttccttatggagtgatgaaatattctggaattacatagtggtgatgagtgtacagttttgcaaatatatgagaaacaactgaattgtatactttagaagcatgaatattacagcacgtgacttatataacaattaaaaaaacccaaatccaaaattctagtatatgcatgatcagaaaaacaacaacccaattgcttagctcgtagtccttggacctgttgtaagacttctgtttcttatcctctgcctactgttccctgaatgatcttccacagtgactgatttaatagagttaaaaactttccgtgaactctcattgcttttagttaggtctgtgcatacagttgggcagactgtgctctgcagaagtctaagaaatgtctttctcattctgcttttttggatgaattcagactcattacatgacatttaggactgtctgcatcttagttccagcctaccattcagcaacttcattcatttatatgcccactcattcacttattcattcattttatttgtatgttcattggttcctatgttggttcattcattcatttactcactcattgattcatttaactgtattccttatcttgcctactggttgttatgttctccctgcccagtctgcagagcccatgctgtacattgtctcagcctttttcccaccttcttcctccaactcccagatatattctcaaggccctgcttctatcctgcatttttttgcacctttcttttgccattacagagttgtactttttttctttaagtgcccagtacataacaaaagaaggttctatctcagatggggcagcattattcacaactgtctccgggctcctccatgaggtgtctaaggtgtctacctttctttcaactttaaaatctgaacatgatggacctatgcttttggaattgggggtgggtagccaactaaaaaatggagagccactctttacctggatagctaatttttatgttattgtaggataataaccacaaatcaaggcacagctacctattagagctggcctgaaagctttaaattctgcagaatgtgttatatgtgccattaactccaatctgttggtgctaatttgaaatggtggtttgggaacatgtgcagttcctggtgtacttgaagatttcaggacatgaatgacaaacagtaccaataactctctgatctaacagtgagaagttatcagcaggcactgccagatttgagaatattcatcttttctcacattgttttctttcttattttgcataagtgaataaaggatgattttggaaagccttacacttgatatacattatacaatcctagaggcctttaaaaaacaggacagaaaacttacttgaatgcttgaaaggtaatggaccagattagagtttgaactagatgactcttagcagttccttctacttggatgatgtcatatgcttctcttttatttaaaatgtcattttggtttgtatattaaaacaattttagctgtatatttctactctgttcatatataatatgtatacattatgcatatataatatgtatacattgtatacatacacgtatgtgtgtgtgtgtgtgtctgagacaattgccagactcattttaattatgaagctttaaggtgattgatattgggatcacttttgcctctgcatcttaagcaaatttatgttctttgcctaatgacttctatatttgccagcatggacttatcttgagatgactcaggaatgttactggaagtgatagttgtttggaataatttgacgcatgtccctaagatggcttacttttgcccctctgtcattttagaacatacttaagctgtgcacactgggatagcttccagaagcttaaattttaggatttaattaggtcatacaatattaattaataaaaaactttttgaattgctttgtgttcgcaggtactgtgtctgatgctccacatagaaggatgaatgggaccaaaggtcctactctaaaccattcacagaggagtagtgagacctattagaaaggatttgaaacaaaagctttcaggtagatgactgaatcactgtagctcttcagcatattgtaacagaaaaagagccagtttttgaatttttatgagcatgttatagttttaaataatgtgattttcctgaactgtaatattgatgtaattctaagtcagagaagctgttttgcatttccagctcttcctgcctacttcagcactaaccaaggtaccaaacagcagcctcttcagcatatatgctaagttttttttttttttttagcttgactgggaacattttcttggggatgtaattttagtttggtgtgatatgcaaacaagcacactttaaaaatagatattatttagcattgaagtggaaattaaaaatgagtcattaaaagcggcaggggggggaagaaaatgtggtcaatcaatttcagttgcatataggtgtagatgcaaatggaaagctgcatggttatttaaccctctaaaagtcagagggtcttatgtctcctgttcagagatgctgcttatatttaaataatatgat

SEQ ID NO: 59375 - DNA, 2462 bp, Homo sapiens
gctgcagtaagctgtgattgtgccactgtaccccagcctgggtgacagattgagacccctatctctaaaaaataataaataaataaatagcatttccttccaaatgggcgggataaaaaggtttgatgctttaaagtataaactttaataggaaaataatccaccacggagcagttccttcaatgaagatggtggacacttccgttctctgttgcacagctgcagtaactgctagcggtactaatactactggtgctagtactaatactaaagctaacatttgttgaccttatattgttgctagaaagtgtaagtctttcattttttcttagtcccaaagaatacgtgtacaagatgaataccactaataattttccagaggaggaaataggcttagagaaaagtgtctgggccaaaataatgcacatccaaagcggtggagctggaatttgaagcgaaaggtcctgatccccagaacccatcatccttttacctgttttaccaagcatttcagcagaaacctggcacttgtacctcattgaccattactggcaagtcttctcatttgtatatatgtgcattcttcatgatccttttgaaagagatcttggtttagataatattcttatgtaactaaagaatgatttgtccattcttatgttttgtcttcgatcaaccaatacatgatgaaaagaatatcttgatgaaagggagaactgtgtcattgcagagtgaaatatgggtgattcatatcttaatgaaagggagagctgtgtcattgtagagtgaaacacaggtgattcatatctttgtgcggactatccatggcatatttaaaagcttagatcagctgctctttcctttccagcaggattctttgctgtcttctcagagtgtgatgaaatattcaattcttttaacattagcttgaacaaaacaaaattggagaaatagcctgtcattaaggccttctataacccaccattgttaaccatcttggattttctgtgtaatattagcacatatcaacaatttttaatttaaaattctacatgtgtaactataaaatcagaatttttcatttttgttaaagaaatgtgtttcaaactcagcttcttgaatgcttatggcatgcagtttgttttgctgtgaattgacaaagggaattactagaaaaagagaaaaagagtgcagagtttgctaaattcctttcctggaaaatagggaattgatagttgagaaatgaaagtgtgttataaagctcttataacacccactggaaaataatcattaaatattagacaatatgattggattaggaatgttttaggtagaatgaagtcaaccaagttctgtttttctgtgtggtcttgagaaaatctatgtattgaaatactcatgttagcctcccattttcattagatatattttataaacattttttggtccattgagaaagaccctttataacagaaggttaaaaggttaattttaggtctttggtctatgaacaattaaaatttcccaggaagcttaatcagacattaatgtaacactcaatcagtcccctgaacctgctgtgagtttcgccattactccttattgattagactgtattctttttgctgctaatgaattatttatggaggattccttgagagtattcaggcattgtgaaggaagaagataaaaaccccttcctctgtatagctcaggccaggggtttggtggctgctgtgactgattgtgaaggctctgtcccctgggtccctgttgtcttaactgtcctgcagctttacaaagtcttgagttactgagagaagatacaaaagggattagattatgtctagcaaacttgacagacctgagcatttagaaaatattttccacatgatttgtttatagagagcggtacaaagaaatttaggtactgtgcaaagtatttaaactttttttaaaaataaatttttggctgggcgcggtgactcatgcctgtaatcccagcactttgggaggccgaggcgggcggatcacgaggtcaggagatcgagaccatcctggctaacacggtgaaaccccgtctctactaaaaatacaaaaaattagccgggcgtggtggcgggagcctgcagtcccagctactcgggaggctgaggcaggagaatggtgtgaacctgggaggcggagcttgcagtgagctgagatcgcgccactgcactccagcctgggcgacagagcgagactccgtctcagaaaaaaaataaataaataaataaatttttaaaatagtttataggaagagatgaactgaccaaaatgcagtcaggttttttgttttttgttttcagttcgggctttattttgttttaaatcctagaagcttagtattatgaaaacaactgttttaatgcaaatatctttcataagtagtgagcgaatatatacgaagagggtgtcttgtt

SEQ ID NO: 59376 - DNA, 1057 bp, Homo sapiens
ggtgtgagcaccatgcctgtcctgctttgactttttttctttcaaaatgtgttatggagagaactgacttagaatcctattgtatacccaagactgcaaggacactgtttaaacttacaaagaaaggcacctgttttgaagcctttgggaagacgtatttcttgcagtaatgcatgattcactaagagtccctatcctttaagcaggtcccaagaccctctacactgttagtctaattggaggatgcatgtttgtgtgtgtgtgtgtgtgtgtgtgtgtgtgtgtgtgtgtattaaatatacaactgtatttccattaaaaaagataatgtaatccaggttagcttttttgcctgttaattcacattagtgagattttgttgtccattgtggtggcaattatttcttaccattccatgtgggtcttacacaattaagagaggctggttgcacagccagacttgcacagaactttctaccctcgtgtttatctccatgaagaagctgccaaaggttggaactaagatcaccaagcccttcttacttgtcttcacactaaacatgcttcatgatgttctggccaatttgtgtttgtaggtgtccagaaaagagcaatatacttacgagaactctctactgaaagtacagcagtgccccccttatctgaggtttcattttctgtgcttttagttacctttggtcaactacagtctaaaaatattacatggaaaattccagaaataaacagttcataggtttacagtcgtgcactgttctgagaagcatgatggaatcccgtatcccccgggacatgaatcattctttcatcaagcgtatccatgcgtatacacgacctacccattagtcacctagcagtcaccctcagttatcagatggagtattgcagtctcacagtgcttgtgttcaagtaacccttatttgacttaataatgctcccaaagtgcaagactagcgctgtcaatttggatatgccaaaaagaagctgtaaagtgcttccttcagtgaaaaggtgaaagttcccgacttaataaggaaag

SEQ ID NO: 59377 - DNA, 1110 bp, Homo sapiens
ttcagcatacctttgtaatactaggcctgattacagaatgggagtggtctgtataagtgagctgtggtagaaaatacaacccttcagaataagttaaatgtaattaacttcactttaccagagtcatttttgttcccacagttacccgagtactaatttctaaacttgatgtgtcaagaatgtggcagaatggtgtcaacttaatggccaagaaatgtgatctgttttgaaagagaatggaatattatagtctatagtacacaagaatggaatattatagtttatagtatactttctttgagtaacatttctgtgaacattgaaattgggaaagaagattctgttattttcttctgagacttaagagagtatcacattaaagtggcaaatttgtgtttatgccaaatgttactgtgatgttttcttctatagaatcaatccctgtaaggtaagttaaaaaaacagaatttctttctctatagctgcggatgcaaaagaacagagagattaaattaacttgcttgtacatatagaagttaatggttgtttcagataaagaatgtgtagaatcataaatttcttaggacatgggttaaatggcagacagaggaatctttgggttacattgtagacagaggggtgatctttgcatatgagcaagttttgtgtcttataggtggtgctttcaaggatgctccttagaatcgtgatctctattttgaaagggatgaggatttgatgttaatttaatattctgtctacttggcatattttggggttttgtctgatgtagcagaaaagttcctacccagaataatttttaaaacatggtaacattggattagggcagtaacacactgctcatctcaataatgcttccggcttttgaattcattaaaataataaaagcttttttttatctgcctcattatttttaatgcagttccatcatagagcagacttaatccctttgttggtgaaggtagttaaaattttccttttgaaaggaaaaaaaattatcacttctgctagttaatctgatacctttctctttagggtattttgaaacatattaataaagacaaaactaaaactaaaattgaggatcag

SEQ ID NO: 59378 - DNA, 2190 bp, Homo sapiens
acctgcaactgtccattcaatctgctgtgcataaccagtggggaataagcccattaattagaataatttaagcatctcagcttcctgcaatcttcaacctagtggggtctcactggcaacatacttctttatgaagctcatctctcatctgaaccacaggtctagatccttaatgcagtgatcagaagcttgcgattctgtggcacttgaaaatttggaagccccataatatatggtctggtttgcagattctcaacgcagttccactagggattgacacacccatgctagtctcttgtgtaattaaccacaacaacagattgtagcagaatataaaagaaggaagctgacctatgggggggaaaaaagacaaagcttattgttgtggcaaggagggacttcattcttttaggacaggctatccaggtgacctgataatggatatagaggaattccagtattgaattaggccttttgcatctgacaaaggacaggattaaaaggaataacttgggagggaatgtctgttggcatctgtttgcttgatgatccacccatgatgcctgaccggatgagagcctgtctttgggaagctcatgagtttataagaaacagaattgctgctgtttcttaaactaggcagtgttctggtgaagaacgtgggctctgggacaagagggccatttgctggttgttttctcttgtcgagttaattatcgctctgcctcagtgttctcatctataaactgtgagtagccagacctccctgaaggacacttgctggcaaggccaaaacacaagctacaaacagaggccaagcagtggaggcagggggcgccccgaagggacaggtgacaggcagtgatgccaagggcagctcttgtcctcgtcccagacttcgctactcattggctttggtgatgtaagcgctaagtaaaaagctactgctgttccaaacagatgtgaggcgaaggtttaagctttgcggtctgcgtatgaccttttcatctttgccctcgtacctcctagcatccctttctttgtgaatggtgcctacgttggattgtttatccaaaccagacacctgagtcattctagggtcctttgtgtcacccacctccatgattcagcaaatcactaaatacggtttgttcgacctttttacctgtgatttcctttttagtgtaggtaattcctcatcagccttcaaattcagctcaaatatgacctcttaagggaaagcattctgtgactctccctttcgtagtctgattaaggtgcccgttttctttgctccccaaaacaccttgtagatattttaggaaacacagcatttcttgcaaatgttaatttagtttcctccactagactcttaagctcctgtgggcagagactgagtcctatttggttttatatccctaatggttggcatagtgcctcacaaataacaggcttttaatgtttattgaaggaaccaaagaaagtaggtttctgtgagttcaccttggatcataaccatgatatagaacttatttttatggggaaaatatgttcttaccttcccaataactcagagttataagctttagagtattagcagatgtcattctaaaagttcctttctttagaatctaaattatttaaaaaacttaattttgtgtgcaggtaaattgcttgtctctgccctcatcaacatcccaggggcaggatttaaaaaaatcttcacgttgttgttttattttgtttcacttttttcttgcccatttctgatacaaaaatgggacaaagagctttctgatggaaagttattattagctccatttactagaaatgattcataggcccaaggaagtctttttgcatgtagtaaacacatagtaaccaaattaggtatgtgagccaaaggttaagagccaaagtcaaacttccagaccttaacattaattgaaaaaaaaaaattctgtccttcgaactctgtagctcaagataaatgtgattcttagaggtcgatatatttttttttttttgaagacatagtctcgctctgtcacccaggctggagtacagtggcacaatcttggctcattgcaacctcagcctctgagattcaagcgattctcctgcctcagcctctgagtagccaggactacaggtgcgtgccaccacactaggctatttttttttattttt

SEQ ID NO: 59379 - DNA, 1028 bp, Homo sapiens
ccagctgttaggaagtgctggttattttgtaatgatgcctgaaaaccatggactcctcagcattgtgaaatttggatttaggggtaacacaaacaaaaattccagattcttgaggagataagaattttaaatgattcaagaacatgcacaccaattctattagtttaaaaataattaatatgccttacgtggcagtagagttcagatcagttggctgcaatcttcagaaatatttatttatatggtgtcaacttaggttgtctctgagacacattccaattgatacttctgcctgcctctgacagacttcttttcccagaaacaccctccacatatgcttattcctgttagcttaacctagttctagaatgttcttttagggtaattgaggtaagactctcttttcacttagccaacttggagttgttggcatttcaattagtggtcattgcgggatagcattacttcactcattctcactttagatacattgctcccaccgacttatgttgtatagtagtccttctctgatagattcaccaagaaactactgttgcttagccggccaggtacacgtccacacgctttgacctcacttactgaacccacagctctgccacgctgtcctcttctgttcctgaaactctccaagcttgcacccaggctgttatctttgtaatattttttttaccctcttgcaaccaacacacatgcactattgcctggcaaactcctacttctaggagtttttggcttgaagcctgctattggcttaactagagaagagtcatatgaaggtctggagagaggccagataagtcagagctgtgcattcaaagaaaaatcaggacttgggaagacatgttcctgcctgtcatttgaaatatactgtcattggccagacctgtatttgattctctttttacattttagaagaacaatacttttaagccatacatttgataagaatgatcaaaccaccactttgttgcaggtttactgctaggctctgtgggtacatctattcg

SEQ ID NO: 59380 - DNA, 1032 bp, Homo sapiens
aagatgcttacatgctcttttaaagagtatctaaattaataaacattgagtacagaaacctaatctgaatttgtgtttttattgagagcactctcattaaacacaggctggaaaaaaaaagaatcaaccagaccctgatgcctcttgcaaaatctgatctgttccaagtctagcaggtagagtcctgattgcctttatttgcaagttcagaagaatgcaggtaggtgaagattagaatggcctcgtagtgaatatgtataagcctataaaattaaagtagaacttggttaaagagcaatacaatctcttgctatttcatgaatgcttagcagtgttataaagacgtgaacatattgctgtgtttcagtgagctacagccttaccctttgatatgcttaattattttcaaggtcatttctttttataaaatcaaggcaagctggaaaatgtcaaacagcctacaagtatagaataaactattttcattgtcattttatagtcatatatagttgtggttttgagtttcccagttacaaccagtcactgagtgtaagagtcacaataaattctcttaggaacatggtatcctttatctcttcaaccattaatgttccaaggatattttcaaatgaaagaatgataaaaattagttgatgcgttctgggaatatgcacatttaaaatttcaagttaacaatacagatgaaggtggttaaatgtgcaagagctagctacaataagagaaatgtagttgaggctactgctgaagggattatgtacttagcctctaagccacttaggatatatattaagttggttgtgctctaccattttggctgaagataattttcccttacataaagcaaatatttagtaacaagtgaggtaagtctgagttgttcattatgcaggttatatggtacggttgaaatcctgaccataccactagtctctgtacctctgagtaaccctcacattgtattgtacttaaaggtttgaggtgattcttaagtaggcattgtaactgagaaat

SEQ ID NO: 59381 - DNA, 1171 bp, Homo sapiens
tgaggctataaggtggaagattgtttcgacgacttttaacccttcacctctcctcacccctgaaagcatcagcaaacctccctctttctgtcccgaaatccccaaaggcaaggatgtcttttcctgttttctagagctcactcttttattatttgatggacctcactctactagttatctagtctcaattattttcaccttttttagcctttaaatgtgcctgtcttcctcttaggaaggaagaaagcgagggaggggaaaaaaagaagtaatgcctttgctccacctcttcctctacttatctttgaatcatctctcctttcacaattacaactgaaattatttacatttttagtcttcactttcttacttcttgtcacctccgctgtagtctggcgttcaggtccttaactcaattgaaactgctgtagttgcgatgagcagcaatctccatgttgctcaatcctccggatactctaacttcatgtgtcctgtggaccgctccctttcgggaacgcttttccctgggcttcggtgacaccatactctcctagttttcttcctgcactactgtcttcccagtcggtggggttctttcgccaccttgtttgttctctgcacactgtctgtgggttaccttactgattcctgtagcttcattcaccgtctctgtgtggctgactcccaaagttagcttgtgttttagttacctttgtatacttccagcagccaacatgggacctgttgcacaacagtagcctatgttaagtaaatgaacggactgataaatagatgttttccatgattgatactcttcccaaaatctttcattattaccatttgtcacccatcacaagaacataaactccatgagagcagagacgttatcagtcttgttcaggactgtgtgcctggcacgtggcacacgtatccagtatgagcaaaaaacaagtggctcacccaaaatgatcctggcaccaggaagtttctctttgggcctggcttccttggttactcacatgcccccgtccatgtgttgtaggaagaggaaagatgtaagcattaaggatttggctcactggggctggtcctggtggtttggaaatagcagatctctaaggcattccatcacctcatgagagaagtcttatttatttatttatttatctat

SEQ ID NO: 59382 - DNA, 1043 bp, Homo sapiens
tgaagtacccatacatgctccagcacgggtgaacccggaatacattatgcttaatgaagggagccagacacaagacgccacatgctctgtgattccgtttgtatgaaatgttcaaagtagatgaatccatagagacggagtgcagattgatggtcgctagggcttgtgggaaggggcacccgagagcagctgccttcagtgggtatcgagttttcctctgtagtgatacaaatgttttggagctggataggttggtggtcgtttatcattgtgaatgcactcaatgttactgaattgttcttaaaatagttaattttatgtttcacctcaagaaaaaacaataatgactaagttatcccgcggcccctagctctcaggtattacagtcagttgcagcttttatggagcacatatttgcatgttattgggccaatagcaagttaaacaaacactgtgataggcaaacattatcttgagcactttacatgtgtggacaagcacaatgactgacgtggttcccagactccagccgagactccaggaaccaacagcctttaagaattaacaggggaacagacaaaatatgaaggctgtatgttgatttagcagacactcagcaaataaagggcttacattttggtgacgccaacagctaaaatgctttttcacacagtgagtagggtgttaccagacttacatgtgtgctcaggcagcatgatcttatcctcctcctaatcagggtaggtttcagtcatgcatgctggagcaaatgattccggtgagagaatctgaaagaaccctatacaaacatgtacctttttttctttaggactgtgaagggaacgtggcagtgtgtggcctggtgcagcctgtgcccagagggtttttcacgttcagtatagacctttgatgttctcaggttattttccaagttgcccagaagcatgacacatacactgcactaaatccttgaggagttgcaagaaaacagatagtgcttttcttcttcttttttttttaaaaaagggaggggaacctagtcc

SEQ ID NO: 59383 - DNA, 1011 bp, Homo sapiens
catgcccaaccttatactgtatttttattgtacctcttctatgtttagataagtgtagatacataaatacctaccattgtattacaactgcctatagtattcagtacaagaacatactgtacaggtttgtagcctaggagcaataggcaatatcatgtagcccaggtgtgtagtagactgtctcatctaggtttgcgttagtgtgtctatgatgttgacacaaggacaaaatcacctaacaatgaatttcttggcaggtgtctctgttaagaagacatgactccagtactctcaggtgtaagctcttttccagtgatgacaccggcactccctacccccatccctctggaaaaagaatgatctaaaatgttatgatttaaagcaaaaggatatgcaaaggtgaatcagagaaattcaaagaaaggagggattatattaatgtcatataaaaataatttaagataaaaaacaattgataggataaacttgatatcttttataaaagaaatatacctttttttcagttatctttgaaacgtttaccaaaatcaattcttgattgtacacagacagcattggttctacctcacccaatgcgtgggagcacagaaactctattagaccaaagtagaaatcaaaaccacttagaaaactagaatagagaaccataacatgtactgaaagaaacaaagtatactcagaaattgataatctgaaagtagtaatttgtagactatgaaaccatagaaaataatcttctggtttaaaaaaaattagagggttgtttgaaaaataacatgaattttgcatataaaaaaactgaaaggttttgcaaaatacagtatttagcggtcacaaacagtgcaggaaaataagaagtctacgagctttaagaaatgtagaagattacttggaaagacatagtatgtttgtagatgataagactgagcattataacgtgtcagtctttctcgactacgtttcttgaaagcagttttccaggtaattttt

SEQ ID NO: 59384 - DNA, 1420 bp, Homo sapiens
tttattctgtgtctgcacagtataatatacttggaattcatggctactttacacatgtttcatttacaatgtatttgaaagccctccttaatgaataatgataattaggtgattgacatattctcccacttgacaatcacacatgccagtaaattaccctctattttcctggagtgtcggcaataaatgtttaaaactttcccctagcaaatgtcattcagcaaaatcctaacagattagaagatactctgtttccccaaattgagtgaatgaccaccctgtgaatggccctgtcttcctcgatagttcacagactacttccagatctgtgatggaaagtatagttcaaacttaagaagttagatttgaatatttaaagtgttttaatcctcaggtggtagagggattttcaagtctggagtacttctgtactgtaaaggttatgcataggaaaaaataacctttttgtttaataagcagacagttattactccagatctcaaagaacaaagcatttattttacctgaattgtaaacctctcccagtggtgctttttgttttatctcctatcagttggataatactaagtttattataataaggtatgtaaaaatcatcttgaagcctgactctaatttttggtgcaatataaagggatatttaccatgttacaaaatacgatgacacaatattttctactcaaatacgattttgtaaataaatgaatgtttgtctgtatcaccagtgcgttttctacatagggcacaggcgcagttactccttgagctatacttagtttttcccccaataatttctgaactttgaggtgtattgtataaatgataaaatgtgtatatttaaggatataatttgatgatatttgagtatagataaatgcatattcatgtaacccacactctcattaatacctaaaagattttcatgaccttagaaagtattgtaatattttagatatttctaaaagcagcagagattcatcgactggtgatcagagcaaacgttatttcagtttatcaggtgcttaccagatgaaagtgtgaagaagaaaggcagatatattataactaataattagtaattgttgagactccactctcctggaatagatccactgttaagaaacaaatgtagtcatgcagcggtgtgtacctgtaattccagcattttgggaggccaaggcgggagggtcacctgaactcaggagtttgagaccagcctggccaacatagtgaaaccccatctctactaaaaatacaaaaattagtcaggcgtggtggcatgtgcctgtagtcccagctactcaagaggctgaggtaggagaatttcttgagcctgggaggcagaggctgcagtgggctttaattgtgccactgcactccaacctgggcgacagggcca

SEQ ID NO: 59385 - DNA, 1731 bp, Homo sapiens
tggagtgggtgtgcctgtttttatgctgtagccatgcatgcacttgtccattcattcatttgcttgtttcagtaaatattgatcgagcaggtatgatgtggcaagcgtgaaaatacttccacaaagcaagtaactcgagtggagcctctcccacttcagtggtgtttttggcttatactctgtctacggcatttctcaactgtatgtaaatgactcccggtctaggagatttaaaatggtgttgtgtggtattgttccttggttcattcaagttcagtctttaatcttttcagagtagctccaaccatcttttggggctttaccttcctcttgaatcatcaaattcttgaaggtgatgggtgccacctgcttgattccagaaggaccgtctctgatccctggcattgttcattcaggtgactggcaattgaacatccatcccagatttacagttgcgatcctatgggaaagctccctcctcctgccatttcacctttggaactgttgctacactctggaagattttccagtaactacatctaattagaagggtgaataaattaccaaagcaagttaaattaccttgtgtgtcataacaataattaacattcaaataggaaaccactgccatttttataaacatcactaaatggaggcagcaccctttttgaaagcaggaaccaagagagtagcacctccctaagcctgctgtaaggatggcctgggggagttgctaggcgaaatgttgagaacatccgtctggttgagattgatgtcattggagaaattctttaattgctctacttaatatctgaatccttcgaagtagcaacttttctatgtactaatcattatccactctgtcctcatagctctatgtgttttgcttatgtcttccatctttcgagaaggaatggaaattgatctggtcacaagacatttttggactaggctttacttagaaagcaggtcacagcctttttagaccccacctttcaacagttccactccttccttgctcatttaatatacctacctttgttcttttttgctgttcttcttaaacattttctgtcctgaaaatgtttattcttctccatgatgctacttcggtgtggtctcttgattttatgtttgtgcttttttgcttttctatagagtgggattatcaattgcttttatttattcagtaggctgccatgtctagaatttatttagacaattgaaggggtaacttggtgcaactctggcttaaataataatgagttgttaaaggtttttgttttgtcctccttttaaacttataaactcttaaatgatgtttggattgtaagtgatggcatgtaatttaagaagacagcattgaagttgtaaatttgctcataattgagagattgtccctaacatactcctacatgtttctactgaagagaacagtatattagcagagtgtagtaaggtttaaatcacctgatttcttaatattatgaataggtggctcttgtgttttgaaaagatttaaccaagccataaataaaatcatagatctttataccctcaggccaaatataaatcacagtggttcctgtaatatccaaacagcaggcctaaaaacaatttaaagtttcttttccttttcctttgtgtttcaccaatttgggttaaagtctatagtttggggattcagacattatgtttgtatgttatacgtgcattcttttagttcaagag

SEQ ID NO: 59386 - DNA, 1150 bp, Homo sapiens
atttcaaataattctttttattattacaaatgccccctgtgaaataagcaaaggtaattatctctacgtgatcattggggaaatgtaggtacaatgtaattaaacaatttatttgggaatttagtatgctagtgttagaattcatttttcaaatctctctacctggcttctctgctttaagttgtgtctatgtatctggaggatatgttagcccactggtgcttggcacacgggttgtagaagtactaatatatctcagagatggacatccttcatcctcttgaacgcatcttaaggactagatcccaaaggggacccctatgtgtctgtttcataattcagtaactgaatttatttcttataaataaaaccatacaagttaagaaaaatcacatacctatggggtattctgacatttcctgtgtttttgtgtagaggagatctttggttgcatgaagtgtgaatcatgaaatgatagaatttatagtattttctttgaatttcctgagtcctctagatgtcagacaggatgtcagatgtactgccattactgaatagtctcagctgtggggagtggcagggatgtcagctgacagcctgaaatgctttgcattagttttgtaagtacacagattccttacatcacagctgagtataatgtcaaggatgcctcctacttccactagagctgagactagtgtatctgtttgaaggttggatggaggaagagtacaggaaaacctttgtccttcagtgcaatcatttgtattagaaatttgtaaaatatactctaggcgagacattgatttgccttgctctcttgagacactgctttgcatggccatttctctcagtggaatgaaacctctgttcacaagagcacttgtttccacatcccagaggcgcatggttcctaccacttctcaaggatgggaatgcatgtggagagatgaatgatagtaattttcatagttaaatgatcactttatctgtaggaaacaaatagaacccctatgatggacatattagagtagagtatgttcctccctgatattttgttgcttttaaagcacgtcacatctctttatggctccttacgcctctttctctgtttctgtcagttctggggagtgtttctaaagggaggaat

SEQ ID NO: 59387 - DNA, 1687 bp, Homo sapiens
gtcaatgagctctctggtctctacctgtgaggacactaatcctattgtgtcaggtccccacctgtatgacctcatttaaccttaattactgtctgagaagccccttctccaaatagaatcagagggttagggctgcaacgtaagaattttgggaggacacaaacatttagtccataatctgtgatattgttagaagcaagaagtcacacatctgaggtacagattgaggatggcaagaagtagtctccccagaggaggcctggtcattgttgaagacagccaagagttggtgagtttgatgccaatctgggtgcttctataattagaagatactaattatactgacccattcctatttatctgttctaatttttcagtggttacaaggttttcccaataggaaaaaagggcaatatacttgcttttctttctttttggattttaagcctgagacctctttgggtcatgatatatatatttagattctttcagcatgtgtaacaatatcccagaaaggactagtgttttatattcttttaactcctggtttttctacctactgcctttactgctttggtgctcatgggaatactgccacttagggaaaaatacaacctgatcttttgtggatcttggagtggcttacttggtttaaaataatctgggacgtggataggtggagttatttcaagcccttcggctttacttccatgcctaatgtcttttctcatcatttattaaagcgctttgactttgatatgtatcctgttaccaccttgtaaatccttttagtaatacctttctatgatgaaggtgtaaacactgctgtttctaccgcatttacttctccctccgtgtcatttttataggactttaaacctgctaatgttccaggttattaatttaaaacagccagccaaatagtagaagcttctttctcatctgtaatgtcctgacctcattttacctgtttccttttcaaattcagtttggaaatctcaattttcataatcttttgagctactacttcacttccctgatatttgcaatttagcagccttattattttcaagactttatatcaggaccacacatgaaataattactttttttttttggtgctggacatactcccctagctagtcaggatttttatttatctttctttatcttgtaggaaatggaattcttatttgcattttccctgatttctcaccttgcttcttcttaaccttgttctgacagtatttaagtgatgtagcttggacattgtttgcttttttatctcttatgccaaccttcttgtatttagctacatgcttagagctgcccaattaaatggcatccagtaaactgtattagggtttgtgcttgaaaatgctttgaagacgcagttgatgttttctttgtagtttctcgttattcctcaagtttgtaagttagtctaattgaaaagtattgtctggaaaactgcctcgtttacatgcagatttcattgattgccctgggcttgtacagacttcgcaatacttttgttgatggagtttctcttatgtgaaacactttagctacctgtccttggttctggactctagctttccaaaagcaacatggagaatttaaaggggccttagataaaagccaaaaatagacttagaagataaagttaaaggggttacaattattt

SEQ ID NO: 59388 - DNA, 1153 bp, Homo sapiens
cataagaaccttattgttttctcagagtgcttttgggtccttatttgatatcttttccactcttcattcctatttgtttctcctttcttttcttttcttttttttttttttgagacagagtctcactctgttgcctaggctggagtgcagtggcacgatctctgctcaatgcaggctctgcctccgggttcacaccattctcctgcctcagcctcccgagtagctgggaatataggcgtgcgccaccgcaccaaagtgctgggattacaggcatgagccaccttgtttctcctttcttaaacgcagatcttttgactggagctgtggaactggggtcagagttgagctccatcagcacatcacctcgttatctagcacatcacacctactttgtatgtttgtgtagcagaccatttcttctttcgtgtttcctcattttacatttcatctcttcagtcacagcgaaaagttgttccgtgagacctcttgcataatgactctaaggggcttcagagacattctcctgcgaggtaactgtgcctgtgatgtggggagagtgtgagactgggaagcagaagaccggaatgtgatacagcctttcccacgacttggctgaggaactgctgttgtgaaccttttgccctggtgggattattgtaagtattcagagggatcattttgagagaagtgctgtggacattgacagtgccagactctcacaggtcaagttttcattgtctcttagttttggggctgatatgaaatgaacttgggtctttttctgagggctttcagaaagttagcaattaaacaagaattctaaattctgttttttgaattcacccaccgtgctgttctctggtttcagagtacttgtgcatggtaagggactgtgaggaaagactttgaaatgattaaaaaaaaaagagcatgttttgtctactcaaccatcaggtcagctctgcctttcactgtctttgagctgtactagaattgtgtgtgctgcagaaaatagacagtaaagcgcctggttcttgtccataaaatgcagttgtgtttggagaatgcaatagattattttcctatgcatattgactagttttgcacattttacatcttgctggcatttctgatgcttatgtatttgtgtctt

SEQ ID NO: 59389 - DNA, 1004 bp, Homo sapiens
cctacttcccatgcttccttttttttttttttttttttttttgagacagagtcttactctgtcacctaggttggagtgcaatggcacgatcttggcccactgcaacctctgcctcccgggttcaagcgattctcctgcctcagcctcccgagtagctgggactacaggtgcctgccaccacgcctggctaatttttgtattcttagtagagacggggtttcaccatattggccagactggtctcgaactcctgaccttgtgatccaccctccttggcctcccagagtgttgggattacaggcgtgagccaccgcgcccggcctcccatgctttctaatgctgaaataaaactcttaagtatacgctacggtctgtgtgtggtgctttatacgcaccattttacttaatcctttgttaagcagtattattttgaggaaacagattgagagcgattatgtaacatggccaaggtctgacacttagtaagtgataaacttgggtcttaaatactagtcttttggacttgggcatttaaggacgactagcctgtattacctttcctttgagatccttcctcagataggaggtgaatttaataatctggatttcttgaaataaattagactccacaaaaacaaatcctgcctttaaaactgatctccatatttccccttgtttgttacggtgccagttctttaaacatttgcttgaaaagagaaatgtacatgttgcttttagagacacgtgtctcctaagcacatacaaatgacagtattttgccgttgctgtgcctgggagtttttattttagttatttgggctttaaaagcagcatatgatggagtttcaatatgtcttaaaaccacggagtgctaccatgatacgtacataaataaaccgtagggggtctctttctttattttgcccatggagatgtctgatagctttcagaaaaaaggcagccaccctaagtgactaatgtcacccatttgtagggaaatagtt

SEQ ID NO: 59390 - DNA, 1026 bp, Homo sapiens
aagttgcaggagttctgtagcccctttctttttgccaatttcttcaattaaacctcttttcttataaattaaaaaagtaaataagtaaataaaataaaaaatagctgagcatgatggcacatgcctgtggttccagctgcttgggaggctgaggaaggaggatcgcttgagctcaggtattcaaggctacagtgagctataataataccactgcactccagcctgggtgacagagtgacaccttgtttcaacaacagcaacaaaaacaacaacaaaagccacacatagcctcttctgtatccaacttttaagtgaaagttcttaagatcttcaatgtatgattcttaattttttccgtaataacaacactccagtgttttcagatgtttcagattgtatctgtttttgtgcagtggttctcaaacttcaaggtgcatcagaataaccgattgctgaagtttctcatttattaggactgggtgggactcaactgcatttgaacaagttcctgacttactgatgctgttggtccgtggccatacttcaggaatgactgtgttatcatatttgattcttcgagaatccagtgagatcttgggcagatacagatagggaaaatgaagcttgaagacatttgtgatctttttccagcgacacatcatgaattaatggttgaacaggtaccagaacccatgaagacctttctggttttctcctgctcatggcaagagttcagttcccaaaagacatctctctgatttcaaatatgtttgatctttttgtcttattcttttaagagctattcatgtgtttggatacacacccctaatattcacatttatttataatatatgcttaaaattttcttgtctttcagttacatgactaatttttgtgcctagagatgttctaaaaatgcagtgtctttctgaagaaacaaaaccttacataacttgtcaaggccacccaaggttaatcatgaggaaaaacgttgaatttttttacccaccagcctagtcttctggc

SEQ ID NO: 59391 - DNA, 1030 bp, Homo sapiens
ctaggtttggcatgtctactcgtgagataatgtctgtgaaaaactgtggcatgcagccgggtgcagtggctgacgcctgtaatcccagcactttcggaggcctaagcaggcggaacacgaggtcgggagttcgagaccagcctggccgatatagtgaaaccctgtctctactaaagatacaaaaattagccgggcatgatggcacatgcccgtagtcccagctactcgggaggctgaggcaggagaaccgcttgaacccaggaggtgggaggttgtggtgagctgagatcgcactactgcactccagcctgggtgactgggcgagcctccatgtcaaaaaaaaaaaaacaaaaaaaccccacaagaactgtagtatatgaagtgttcaaaaaaatgtttacttttccccttaggaagtgtgtagacccccttgatacttttttaaaacaacaacccacaggttaataaatcttttgttttaactttcccagtatagtgccattgctcatgtacctcttaaatttcatgatggtatgaggaacctttagagctgcagttatagagaagtacataaaaacagcgtacctctcttaattgtgcgccacccccaaatgaaagagaacataatgaccaatttgtatccattttgttccccagcactggcttgcgtgaacatgatttagaatgctttgctgcttttgccattttggtgtacgtttgaataaaagggaaagcttgaaaggggacacaaaggtaagaaagaaaagaaggcctagaattaaagagggagaaaaagaagcgtgagtacccggagagctgcgaggacgatagcagccgtctgcggctcggaagaactgattgtagatctacaggaagtgtgctgttgtgctgctggcggaggccgtccctgaggaagtaggagaagaccactagggctgtgtctaaggtaactgtaaggcctctccatcctttctgctgattatgactagcagctaatttggatctgatttatactgtggggaagaagctt

SEQ ID NO: 59392 - DNA, 1348 bp, Homo sapiens
tcctctgtatcgtaagatattactctgagaaacaccccttcattctttcaggtgaaaggcagcctattatcacaggcagccaaccactgcaacagctggtattgacaaaggctctgaccccttttggttaaaaatgaagcaaaaatctgagtgttcgtagggcttcctaacctccggttgagctatatgtaagaacccttcacccattataataatccaggtatgcgatgttgtattacagtgacctgcagggtcatgacttagtgagaggcattctttgtcaacacagggaaagttaacacagaaggtaaaatttagaagaaaggtgaatggttataatattctttcagtgcgtgtgtgtgtgtgtgtgtgcgcgcgtgcacgcacatttgtgtgtatatatttgtatattccttcagcaacatgtcatatggtctaggaatccctgggcgatttctggttttggagaataggatgtgaatgtacctctgaaactgacagaatgatgtattaccttgtaggtcactggagtagagtccagatgtgcttaagcatttatgaaaagttacctattgtcacagaggccccgtaccacatgagtcctgtgagactttaaaggaaatctaaccaaaattgaactctatttcaggtatagcattttctgtggtttgataatgacattatacctattaaaataattttttgccctcattattaaaaccattagtttatttagtgacttcacagtcacaagttttttatatttcctgggcaagcaaaacctcagtagcataaacttagttttgtcactgccccggggatcccacttcatatgggccaataaatttccaggcaactacaagtattatgtcatatgtgcaaaaatgtgatgtcttttttgatccaaacctttgccagacattcaagagaggttaggatgtagtaagtgtttgtaaaagactggagctctcagtaggccaagtatagcgtagaaactggcagtggtgaaaacctggctgcaggtacaagagaacacacgtatatggattgtagttacagctttagtgtgagcgaattaatcttcattgtacgagggacccaatgtaattcttcagacgtttttgtggaaaatcttcgtgaaggagacttagatcattgttgtgccgtagaatttctctgataatggaaatgttctctctttgttgtgcaatatggcaatcagtagccgttttcatgtatcaaacacttgaaatgcgttgaatgtgactgaggaattgaatttcaaatttaattttaatgatgttttaaatttaaatagctacatgtggttagtgactaccttttggat

SEQ ID NO: 59393 - DNA, 1060 bp, Homo sapiens
aagaccacagagataaagtgccgttttcattacatcctacctggaatatgctctattgacttgacttgttgattttgaccttgatcacctagctgaggtcgcgtttgtcagccttcgccactgcagagctcctccttttcccttccacactgtcctcgtcacagggacgtcactaggcaccacccagacctaaggagaggggagccacgttccacctccttgaaggaggagtatttaatatgtaaattatttggaattcctctgaacaggagatttgtcttttatttatatcagtatgtattcgtacacaatttattttatatctctagttataatccaatactactttatgttcttgcccaaaatattctaacttttggccgcagggaactttttcagttgatttctgtgtccgtttgacatatcctcatcattgcagagttgtttttttttttctttagcacctcctcactttctggcactacaagatgcttcaggcttattttttatgtttcctgctcatatcctagaagcagccatttcttcaatgtgccctgttttcttttattggagaatagttttagaaattggagaatttagaaattggagaatagttttagaaaacaagattgggcactatttatgtttattgctaatgagttttctttgcttctaggccctatgaaagttttaacttttaaattttttaagctgcttgagctgctatactaagcaactatttctgtaaatgttggtggccaaaagtgttaaataaatagtttaaaatttgtttttcattggggaaagaatgttgtattgtagttacagttgagaattgccaaaaataaaatttaaaaagaacaatacttagaagaacatttctaaaaacatttcttagaattgtataattgtctcagtcaacttgcttttattatttttcaagataatttttaatgattttatacaaagcagtgattccctgggtaatgattgtgaagattttgccttttgtgcttctcttttacagtggatttttcatttatttaacttggattagaat

SEQ ID NO: 59394 - DNA, 2029 bp, Homo sapiens
tactttgtttaacttccaccttggataaagccttggtgtcattgtcaatcaagatctcctggtaagcatccaccccaccaagccagcgaatcaggtgtgctcttctgaattttgtacgtgacaagatattggaaatgtgtcaaacgttgtcctgaagggagggagtatccagtaatttctgtttagagccctgtaactgctctaagccctcacagtaaatacttttttcaaaacaaaacaaaacttaaaatagcctggttggctgtataccaaagttccctgtttggtgcactgaattggaaataattccacaagcagatgcattcatttgtttaatccaagaattattaagtgatttccttattctttatatatccagtgtgaggtgctgagtgcattcatagaagagaaatatcaggttccctgtccctggggtgtgctcagctcagtgacttcacagagggcacgtgatcttagagtagtagcagacgtggagcatagcctgaggcacaatcccagactgaattttgtattaggtatagtgacagttaatctaactctaaaaacatcagttatggacataaggatgggaacagtaggtactgggactactagagggggaagaggggatgggggcaagggctgaaaaactacccattgggtactaggctcaccccctgggtgatggagtcatttctaccccaagcctcagcgccacactacatacccatgtatcgagcctgtggatgtacccccgaatctaaaatagaagttgaaattataagcaaaaatttacattaaaaaaccctttaatgcccattagttacttataatctgtttaaagaatagccagttgctctcagccttttcatttgtttcattaattgcatctgtttatttactcagtctggtcaagaaaaatacccttaatcgtttatattaaaaagtaggtgccactataaaattctaagcttttgctgaaaatcgtgacctttgattgttcatactggtaatttatttctcatttttatgttgcaattacaacattcaaagcagtagactaagatctaatgatttagaagcaccagaggcattgctgggccaggatgacaagcctttaatgactctcttaggcagtaaaaaagccactgcaattgctgtatgaatattcatttaagaagcattcattggttgtaaatcttttaacatgtagactttaaaaaagatgaataacatactatgtaccccggtcattcttattgaatgtgtcttcagatattttttatcaaattcattttactgctctttttgcttatgaaaataaaatagtatttcattagttgagctcatttgaatattagaaataaacagagttcatatcatgtgaaattgctgacagctcttaaaatcagtcctgcactttgcccagaggcattattcacattgctggttacatctgttcttgggaaagagaacctgccttgactgtgaatgggggtccagtttgccccaggtttagtccctgtgatactcagcaaatgttgcctggttctttactaaatatggctaccctgtgatgagaagctttgggctgattgggccttatttgtcttcttttctcttactgggaaagcaaagactgctgaacataactgatgtcagaatgggcccgtgttagctatatactgtgtacaggtcaagcacataactattaatagtaaaaatcaacttagacaggggaacgggattcagatccagcagttttatcctagcccacactcttaaccacaattacaatggcaaacaaataaatatttttaattgtatgcagtatgatttagtattggaaagactgtttaaattttttaaatagactttaaattttagaaagtgtagatatacagcaaaattgtgaatagtacagagtgttcccctatatattctgtacccagttttccctattgacaccttatattagtatggtgcattattacaattaatgaaccaatattgatatactggtactaac

SEQ ID NO: 59395 - DNA, 1735 bp, Homo sapiens
gtgaaagaaaagagggtttggagcacttcattggaacactggaagcttcctggtcaagaaaataactttgttagaaagagatgacacctaagtattttcttgagctaatttgtgatagctgaactgtatctccttgtaaggaccaccctaggtttctgtcttcttacgtctaaattccatgcctccttttaagtacaaaacttcttttattgtcatcttcatagactccacccttctggagtaattttgacagttcataagtgaagtgacagatgagaagaggctaaattcagtgtagttcggagtgggttcaaaggaaccccctccgcagagcagcacactggtatctcaggaattaagtctggctctcaggctaacagatgtaaaagatagttctggcctgatgtatttctcctgcaaatgaagttatgttagaatagtttaaaaattaaaagccaggagattctgagtcaaggcctgaagagtttgcttatgagtgaaattaatgaatgaacattaatcacctattttgacaattcatagaatttttttcttaccttctgatgattgactgtgttctaaaatgttaagcatgcagataaatggaccttttgggtaaatgacagaatgatatcagcatttgtctctttggaagctcaattgtgccatttgaaggaaaagtggggattttaagctgtcgtgccatgtaagagtatatatgtgacatgatggtccagaatcttgctaaaccagtgaagcaaataggtaaattaagtggtgagctttgacaaaggtaagattctttgatttatcattcctccatttcattgggttgttctaaagaaagagttaagccaatttatttagtaatcatttactgagcccacattctatgctggacacagtgctcagcactggaaatatagagacacaggatctgctttcaaggagctcacacttgagaagggaagcatggcaggtaagatatgggggcttcagcattagctgtttaagtggggtctgggaaaaggaattggtacaaagaagcctgttttcattaatgtgaggatgagtgacaggtcaggaaatggggaaagtaaatttaagagattatagggaaaaaataggggaaaaatagattataaacctattttatttggcccacttacagtttttggggggagtttctgtttttattatcagcatataaaacttgggaaattacatataaatatatttctgggttctcttacaaaacacagtagataccctgggctctgttttcacacctgactgaagttagctggcaatggatagtgatctccacctttagcaggcactggtactctcttgttctccatccggtccacttaggattctcctggctcctctatatttgagtttgagacttctagtttagggtattttcacatcttggcagtgatgggaagcagctagataggacagggggaagatctggactaggagtgggttgttggtgcattaaatatgaaaaagatttgaggatgttattgactgaggtagaagagccaggagcaagtgagaaacccaggagaaggagagtgtgttctgggctgaactgtgtccccgcaaattcatatgttgatgttctaaccaccggtacttcagaatgtgaccatatttggagagaaggtctttgaagaggtgatttaacatgaggcctttagggttgaccctagtccagtatgactgg

SEQ ID NO: 59396 - DNA, 1007 bp, Homo sapiens
actagttatttattggttagaatgacaaatctacttgtctgagaagatgctgagttagaagttctgttcagacagtccccaaattgcctttatgcagcacagtggataaaaatctgaaaacagaattggttattgatttttgttttgcattggtagcaagagaagaataatactgtaacttttttttcaagcatacaagttctgtacataatttttctctgtcatttttgtgtggcttttggtaccactagaacattccatatgaccctaactctatttcttatatttctgtgagattctttgagtctaaatacctctttattacaagtttctttacccatgggattcctgttgcttttacttaagagatagcccagaactcctcttacattcttttcagaagtgttcatgttggtttatggtagaatagatttcaatgtaggtttcccttccttccttccttccccattttgatgtttagttatatgtcatctggattaatttgtttttctttttttaaatttattttaggcttaagttgtatctagatttttataaaatacattttaagactactcttttttccctagtatttccacatctaattgaagttgtcctaaaaacagtggaggaatattattttattcaatattttctatagaaagcccgatccttgccacacatgcagcatcagggaaagcctcagctgagacgtggaaattgaagacagcatgatgggtaattcatcacaccagtgaatttagtatttgttcacccttttataggctttaatattgtgatccccactttacatatgaggaagtgaagatttagaaaagtttagtaacttgccttaagagtgtagcagaactgggaagtttgctcttgttgttgttgtctttgttgttttttgaggtggcatctctctctgtcacccaggctggagtgcagtggcacgatctcagctcaatgcaacctcgcctcctgggttcaagcgattctcctgc

SEQ ID NO: 59397 - DNA, 4464 bp, Homo sapiens
tttgttgttactaaatacttgagtgattatctgaggtaatatgtattcttctgtatttatttatgtgactttttttttttttaccacaatcttgtacagggattacattttactcatctttatgctacccatagaatttttacacagtagatattcaataaacatgaaaaataaatatcacacaatatccaccttgttggattccaccacttactaacatatctgcacgtatatacttcaagcaagtatcaagtttctttattggaagatgtcatgtaaagttcccaagtctcatttttggttttatatgaagaatctattcattggtaggacatattgataaaaattactacctcttcccccttttatttgtctccctcttgtgtactttctctgcctttttcctaaggtaaatattggtattgtctatatgctttcatcacaggtacaattaatttagtagaaacattgcccatctgaaagaattatatattgtggtatcagtggagagatgtttatttttttttaacattttgttgttattggttaataagaacatgaccaagacaagagctttaacagagatgtgagatgtgtattcaaccagtctctgaaaatcatttgctttttgtgttttatggcagtaccttgtggatctgcatttagaatgataattcatgctaacgactttcatatcccatgaggtagcagaaatcaatgctaaaatggcagaatgaaacggtatagcaaataaagtcaatgagctgtcaaagaatttttcttcatcaaacaaatcccaaagcactggtgttatactgaccttccctcactcctctttcctggattcttagaccaatttggttcatgatttttttttcctataatagaaaaattaacaaacatgtttggtcagtgaaacagaaggtatttgaaaatgataccttggagcagtgtctcaatcttcaggaaaatggtgaagaggaaatacagcattgattgctgttgctaagcaacggctttcacagcagacgcgcctgggacagtggtggtgtctgccagcacaccatgcggggccgaaagcagtgcagcactcatgtttctgcgaaatcagaattgaagccctgcatttcctccttcctctcgactttctctgatcaatacctgagaagttaagatcgtacggtcaaatatatagactgtgagaaatttggagcaccttggggatttttggagagctgcgaatggatttgtagagccaattctgttttttttgtttttgtttttttttttttagtttcgcccttgttgcccaggctggagtgcagtggcacaatgtcggctcactgcaacctccgcttcccgggttcaagtgattctcctgcctcagcctcctgagtagctgagattacaggtgcccgcaaccacgcccagctaatttttgcatttttagtagagacggggtttcgccatgttggtgaggctggtcttgaactcctgacctcaggtgaaccacccacctcggcctcccaaagtgctgtagagccaattctaaaggaatcagaattcctattttatatcagaagtactgttagttttctccttcatgcatttatccatccagtcatgcctatgttctcacatatttagggaatattcaaggcaccctgttacacttaagagcttggcatctcttacgttgctgacatgtgcactatgcgtgtgatggtaggcaccattgctgcagggtggtgtaatggagagcatcctcttaggactgtgactctcaaactttagggcacattggaatatcctgggcagatcattaaaagctttctcagccccacacttggtgaggtctgttacctatttccagacctctggaatatgtcctgttacctgaggtctggaaagtaacttaggaatatgcattttaaacaggctctctaggtgattctgatattggtagtagaagagccattcttgagaaatactgaagtcgaagaattagtgaagatttgacagagttaccagataagatgtcatttgtcagttgtaattcatgaacggggaggctactaactgtagttttacctgttcagtctgttccctcccaggttgcctctcctgtgtttccatcttggacttgctcttgattcactagagtcagactaatttgagttctttccagaaactggaatgtgattattccttagtggggaggggtagccccccatcactgcttgggactcatgcaagagcaagaaatgcaagtatacaaaagtacccaagtcttgatctcagtgttctgcagtacaaaccactaagacggaaatttcaaactgcctttcactgaaaacaaaaagcaaaagaacaaggaaacatctaaatcaaccagttacctttttttttttttaccccaatgctgataatatttcagtggtctgtcagttatgaatctgaccagtcctttaataaaatcttctatgcttataaagcttaagtgatttttgcttatacagtcttctaatagataactctttttttccccctcttgttatatataccctgaatcccagttttggtcttaatgcagaccatgtttaagatcttggccttatgccattttgtagtacagataaataattaatggtttttattagtttgtataattcattaaccattcatctatcaagctgaatgacttatagatggcttttacatttcaaattgttcagaagttattaaggtctgtaatttatcatcacagccatttctgacctcgttcttggtccctcactggaatgatgttcattgaatgtgtatgacacaatatgaagaaaattaagttgcactaaagacattaccaatatgagtagggaggcttaaaatgttggcagtaatcaatagtgggacttaatttgtatattctgtgatggagacatttttattacatttatatttttaaaattgattccatttttaaattagttgccctcatttcagactatactcaacagcgaaataatatattttctgaatctaaatcatcatatattatttgacctttagctgaatccagtagtaaagatcaaaatgaattatgcttgagtggaaagaggttttaatgttgctttacacttggttttcccccattccacatgctgtttaatattattgattcagcttgaatgatcatgagcccaaaaactactttagttggttttggctaatgcattcttggatgctatggaagtgcctgtaacacctgaatggttctgcgtaaatagtcacgcatttttataccgtccacgagaggacatgcaacgtgattgcctatgagcagcagagaacagttttctagacgtatgtttttcccttggtacaaacatgtagcttccgttagccctaataggagctgcgtgtttgcatctaagaattcagtatttagaatatgacaagcagtgagtatttgaggagttattactgaacctttcaaataagttgaaaggcagacatgattttgagtactggggaagtgtattaatcccttagaagtgaactattcagaatatttaactctattatcatgaagtgttagtgagtagggaactatccacatgtctagattcctttcagcttaatagtgtctccatacattttacagtcatatcagctcctcgtaatgcacttcaccacgtgaagtgaatgaaatagcctcagtcttgttcacaatgactgggcctttcaaactctccttatttaatttgctggcattatgatggctcttgcaggacctctgttgcagaatcaaaatgtgcatgcagagagacagctgtgctttgatttagcctatgagataataactatcattctaaaattgtcttacatcatatagacacaaatttcaaatctcacctattttcccagctctctcttcagatatgactttgctagaatgaggcatattcttccttgtcactcttcatttttaaaaaaattttgagaatgtagatttacttctactctggcagtttgcacatcttggttaactagaccaattaatgcaaaagaataacccccaaatttactgctccccaggttattgtccagtccctgtctcttattaatgtgattcctgtgaaaacttgagattgaagaatatagtgaaaaagtaccatctaccccaaaagcaaatctaaaatgagaaaactttcttaagcaaattctcccctaccaggcacatgtgatttatttttcttccttccacttagaattgaaaaaacatgattcatatcccatcgttgttataattttgtagacttcagagcttttcttttttcttttctgttttagttaagttgtacgtttctttgtatgtccttttgtcttttactgtttgtaagtgtccttgatagatattaccataatggccctttcctttagcttatactcctatgttatgat

SEQ ID NO: 59398 - DNA, 1062 bp, Homo sapiens
acaagtgtgagccaccgtgcccggccttgagtttgtttttcacattagtccagagtgctccatctttcgctctctattcggtttccttgtgagttattgactgttagagtatacaatagaaaaaatatttttatgtcccttttaaggaattatacctttcaagtggaagatacacactgactttcctccaaatagttacacattttagatttttgtcgtgtcagtggactcatctcaggcaggattacaccccagggcttcctttaaaaaaggaaagtgacattggctttacgtaacagaagcagtttggacatttctttggacagttgagttccgctggcccctttctgtggcatgctgctgctcagcccagctgcatgaagacaggacagagaacgatggccactgagagtgatccaaagtactctgtgggagaaggcagatggataaatattttttcttaaatgcaaagctaacttaatgttactgcccattactggtaactttctttagggcttaagacttgaagaatttaatgttgcctgacaaagttttaagatggctcagcattaaaaaaaaatggtgtctttgaacagtaatgagcgccaagtaagaaatatgggtgtgctgactctttttgatgatctcaaagttatttatttaactacatgcatgaagccccagcgtgtgtgtgtttttctttgtcactgacttcacagcagctcagtaggattttaaatatgtatattttatattttcctgcacctgccccatgacaatatacatagaccatgcaaacaaagatgtatttagtgaagagattgcgaaactgttttattactgtccggatctccattggaagtgaagctgctgtttcacatcctctttaggcatatctagccgccagcaactgtgcagattagaatcatgagcttctcttccacatgcgtgtggccattgtggtgatgaccgatgaatcatcgcatttcaactggaatgaacaaaaatagaaagctcagcagcagcattttttagagaggtaaaaatctgcataaataaaga

SEQ ID NO: 59399 - DNA, 1030 bp, Homo sapiens
gagttttattgccaatggaagtggctctcagtggcaaggtgagctgaaaaggggatggggcaggaaggtaatcttcctgtgaaatgcggtcatctctggccagattcttctccagagttaccccgtcaggctgtccctctgaagtcaagctgcttctctccgacatccagctgcagtctttgatgtccagctgcttctcttctctctgctggctggatctggggtttttataggcacagggtggggtgggatagggccacaggtggttttggaaaaggcagcattcaagcagggaaacagggatgtaagttctactttgggccatggtttgaggcttgaaggtggggttttgttggggaccaccattttctgcctagaatttctctgccccctgtccctatcaatagttggaggggaaaatcaggagttttagttaaattaagcccaacctatataaaagagaggcttgacaactcccaggcatacagataaagctattggtgctctgtgaaatggagatctacatccctggaaaggggacagaattgacaacgttggtcatttccttaccacagtatcctgtattttccagaagcatgtgattgtcttgctatgatattcctgaatgttactggtttcctctttttctaaagcatgtttgttgtgtgcagaactagtatagcttcaggcttttggctaagatacccgtgagtattattgcttttttgttttgttaaataatttttattgaacacacacaaaataccttaaatataaggtacaaataacagtaaacaaacaacttgcatagcagtcagccagtcttaagaaatacagtgttgccactacttttttttttttttgagacggagtctcgctctgtcacccaggctggagtgcagtggcgccatctcggtttactgcaagctccgtctcctgggttcaggccattctcctgcctcagcctccagagtagctgggactacagccgcccgccaccccctggctaattttttgtatttttagtaga

SEQ ID NO: 59400 - DNA, 2073 bp, Homo sapiens
cgtaggtccataagaaaagcaaggagtattaggtgtcctttctggtgacactgactccattttcagtatatacataagatgacaaaatgagcaaatactttgtaaagtgctatatgcctccctaaagcaagaggtccaggaacaagaaactagaattatggagattggaaggtgtctgaattttacaggagactcaggctgcctctatcttttccagttcagtagttactcccagtcaggtgctcaggaccaaaatcaaggcatcgctcttgattaattctttctgtcatcccctaccaccatccccttcatcagcaagtcctgttagcattctgagaacaccttccatctctggcaacactgctgtcttcttggctcactgaatcagttgtgagtggtcatacatctgtggccccacggcttccttatgaccacttttctcctcaccctgggtacaggagactctctttcctgaggagacctctgttcccctccctgtcttgaatcaaaggagttgggcagatgggtaaaagctctttgctggaaccttcaggaaggaatctacaaattactgatctcagaaacaggaaatgtgtgacaatgaatgtcaagggctatctttatgctataggaaataaactatttaacttcatctatcttcatgctatagggaataaactaacttcattggaaagattttcatgtattagatgtgaaattacaatattagagcacatacgatttagcatcaaatgtaccgtgattattactgtaggacaactctgccccttctaaaccgcatggtgacccactcattatattctgtatatttcttcaggagacaatgagaggccactgaagtatgattgtagaacattgagttctttgcatccttcagtttatattaatgttttaggtctaaacttttctttttccctaaattgaaatcacctttgactcctttgtgaaaagagtaatgataaaagttttgacttcttcttatcaaggaggatttcataaattaaggaaggatatattcatgaagaatctactctatgacaggagctcttgctgataacttttatatattttatataattctcaggaggaccttgtgagttaggtctcactgtgcttgcgtgttcaaatgaggcaatggaggctgtgagaaattaagttacttgtttaagtttacacagctaatgaggcacagatcggctcaaatcctgttcttatttctgagttcagtccattttctgtaatatggatctctctgtgctttgttccttgtcgataataaagtccgtaataatacctgtaatatctatttcttagagctatgataatcagatgaatgtgaacacaatacctatacaaatttccagttctattatgattattagtagcattcatttaaccacattaccaaagtgttcttttaattcactggcactttatacaggatttctgaatacaacagtggatattttatctgttagactccttgtagttatgtttgggttgctctgagaatgagttttacacccttccaattgttggcaaatagtcatactgaagaaaaactgcccatctgttcagatgctagccaaaacatcacaaacagtcaaaatagcagattcaaccctatgtgaattgtgatgagacaatataacaggatataagtcatactgtcatggggtctttggggtgtcacttttctggccggaaacatgtgactggtggtgcccttgcctgagttttgcttggacctgctgggcttgttccacccactcgccctggcaggctgcgctcagctcatgctaccagcctggatcccgtgcttcaaagggagtctggagtcaggcatggagtggtgaggggtgtgtgtcagcaaacgtggggtccgcccactgtgcggtcagacacaccagctgctgctatggtgtgggcagctccaggtgctggcgtgagcaccagctctctgtgaggctgtggctggaccgggttcactgcaagcggctttcccgtctggcaccggggaatgtggtgacatcccggaaacttggagatgcc

SEQ ID NO: 59401 - DNA, 1104 bp, Homo sapiens
aaaattgtatctccagccttgattgctatactgagctcccgttcgtatgtccagccatctactggtttcatcctcacttggatatttgaaaagcatctcaaactcaacatagccagagcagaactcttgattcctcggctccctctgccaccttcctttttctgcttctgtttttcccacctcaataattacccccagtcaagtgctcagtacaaaaatctagtcattactcttaattttttttctgtcacttacccccatcaccactgaattcattagcaagtcctattaacattttctttaaaatatgtctaaagtctgtttcccctgctttctttgccaccagtatagtctaacgtaacatcatatcttgcctgagcaatcatagtagtcttccttctgtccttcctcctcctccttcctttcctgctcctctatattctttctcagtggcgcccacaatgaccttttaaaatatgaattaggtaatccctgcaccttcccttaaaaccttccatcgacttccattacacctagaatacagtgtgaatcccttatgctatttcagtactaatatatctgcccctgggtttcctctctgatgtattgctatactttggatacatccccttgaccacacctcagccacactggctttctttctgtccctttaacctaccaagttcattatcaaacagagcccttgcagttgctaattcctgtgcttgtactgcttcggtcttcagggcacagttcaaatgccacaccccaccccagaaaggtcctctctgaccactcagtctaaaggagcttcccattacatctactgtatcatattctccttggaggatttagcattatctgaagtatttttgttcacttacttgtttatctgttcatcgtctctgagctttatgaggacagagtccttttgccagtcttgttctctctggtaggcagtgtatgaaaaaagataaaacagaacccccaaagaaacctgtgtgtagaatgaaagattctcagaagaatgcttgtaaatagaagaatctaaatcctcttacagatgagaagtcttgaaaatgaaaagaatccttcagttctttt

SEQ ID NO: 59402 - DNA, 1534 bp, Homo sapiens
taattatcaatattaaaattagggagaataaataacctcatctaataatctcataatgctaaataaattcaagagtagattttgaaaccaaggaagatgaactagatgatttataaggtcttcttgagctttaaagttcattaatgaagattattaaacacttttggttttaatatctttcatagaaaatatatttaattctgttgccttcttggagtacttgcatatctccactttattcagaggttagtatgagattcttatagcagagtttctctttattccaaatgtaaatttaaaaatcaaaataacaaagctgtaaaaagactagaaatggttctgtttcccagttccactctaacccatatttgaaggaaagtggacgcatcaaatgtgtgtgatctttatgtgtaaacactaacacaaatggtggcagacgctgcagtgactcgagtgaagaagttttagtcagttaatgggttatataatcagcatcaaaaaatcaattctaggcaaactataccactaactgaatgttttattttctgtaatttataattattctagcacagccattgatgaaaatatatcttaggtctcatgtagattaaataaatctgtagtacatggcctcatctttaacttgtctttatgtaaatttaaaagaatgatatttaactcatgcaaagtgtgcttagtggaaaagaaagtcctctgacatgttaatggaatgctgtgaaatgcatttataatacatttagaaattcggtatcagtatgaagcaactaacaggggctttcacaggtcatttagttcctcttcttcttctgtcagcatagtgtccaaaacatttatggaggtaaaaatgctacactttgagttcgggtttatagagcaggtgtgtggaagtttattttaggcaagaagaaacttcaaagaacagattgggagacagtgtgaaaaaaagcaagtaaacatattatggaaaccgatcttgtcaaaggtgactagatcatacattggccttcattattggaaataatttggaaattggattcataatgaagtttccaccatttccagttagaagagcatcttacatcttttgtattgtgttctttgagatacatctagccttgcaatcttgtaatatttaccgaatgctactattttgcacacatttttaaaaatgaagaatatagttgttacgaatccctccgcaaaacctctgattagatttggcagaaaaatatggagagattgaacaaaagagatactaggtctgagatgtatgtatgttgtagatccgtatggtttattcaggaacttcagcagaatgactcgaagaggaaaacaaagaaggagatgattacagatgctccagagacactgtctttccgtaacttctgttgtcacctgtgttaagtgtgtgctggtgcgggctcgctctcctgtgctctagctctctcacacacttgtgcacaacttctgaaaagactgctatgtagttattgtctcttccttctcccctgtt

SEQ ID NO: 59403 - DNA, 1040 bp, Homo sapiens
atcaaagtgctgcaataagagaataaatgctgcgcttctcctggactgtggtctcaagtgttataactgttgccatagcaaaattaggctaaatttcctaaaatctgttcagtgctcccaaggaaaaactcaactggagcataagaattttcatctcactttttccccttttgtttgatttcctctccttaacataaaataaacattggttgtacccttccttttgaaaaattgattgctgtgagaagttgacttatattggatcttgcatgtaatgtgtgcagatttgtacccaaagcagtaattatcattcatgccatgcctttttgtatcaagtcctgtttctgatgaactggagccccatatgagttaaagcagttttgaaatgtaagagatactatctctaggatattatgaaatgtttcgtgatgttattttgatatttcccttgcagtttaaagaaagtaacttcttttttctgtgtgtcaattggaatgtgtgtgtacattatagcaatgaccagaaaacaatttttaatatgtagtttatagttactatgtagaaacttttctgaatactgtaaaaaattattggtgcataaaatttgttatattacatgcttttatgtattatactcttccatatagtggggatatatatttacttattttattaaatagatctattgctgatgctgatatctactgcccagtgactacagaagctcctttctggacaacccgtttattacactctccatgtatccacagctatatcagaaaagcaggaaaccagagaaaatatacctatttgaaagtggcatgtcagctgggatgagagagaagagtaagaatgatggatagttttagagaataagactgctttcaggaatgaatgaagacaagcatccgagcacgtccaatgccatgcttagcaataacccacacaactcactggccaaaagtacactaagtctgtaatcggaaaaattctctggaataaaatagagactcatatggaagtattcaggtgaaaatata

SEQ ID NO: 59404 - DNA, 2395 bp, Homo sapiens
ggagatgccgcctctgcagaaaaataaaaaaactttgggaggccgaggtgggtggatcacgaggtcaggagatcgagaccatcctggctaacacagtgaaaccctgtctctactaaaaatacaaaaaattaaccaggcgtggtggcaggcctctgtagtcccagctgctcaggaggctgaggcaggagaatggcgtgaacccaggaggcagagcttgcagtgagccgagatcgcaccactgcactccagcctgggcgacagagtgagactccatctcaaaaaataaataaattaattaattaaataaaaaaagttagccaggtgtggtgggatgtgtctataatcccagctactgggaggctgaggcgggaggattgcctgagcccaggaggttgaggctgcagtgagctattattgcgccacggcatgccagcctcggcaacattgtgagaccctgtcattcatttcattcattcatttatccataaataaataattaaatgtatacttatttatcataatatttctttattaagaattaaatgtcttttaaaaatcacgctagttttaaaagttgggattcttactttttagggatttggttataatactgtatagagtttgagtgttctgccttatgagccctcaagttataatattttatataccacatttttcaggaatgtatatatccaattataataagtctttactctgtagagtagtgctttctgtgatgatggaaatgttttatatcttgtttctagtattgtagtcattagccatatgtggctgtttaagttcattaaattaaataaaaaattcagtttctcagttgcactagccatatttcaagtgcccagtagccactcagtggctcatgatttccatattggacagcacagctgtagagagagcttagagcttgtagggtcagtgaaccccttgaaaagaccccaagggctctttccccagccctccccttcctagaggagaggctaggaatttgctctagaagaaaaattcaaatagaggttctagcataatgtggggcatgcggaatgctgcggaggggaaggtctgttttgagttggtactactgtgagtctgatactgcctgtgagctggaggtggctcaccatacatgtctttttgtctgtctacctacctgtctatctagacatcctgcagagcctgactgttgcccagctgagacccacaactgtgtttatttttatagttaggtattcctaaccagattataagtaatttgagagtcgggttgtattttataattctgcattctccacaatgaataacacttttgcaacatattcaggaaggacgtaattatctggctagaagctgatgtgttatttatattccagtagaaattgagactaattcttcaattttggggcactggaatgactaaatatagggaggttaggtgagaaactaatgtaggatttatgacactttccagttacagtggggaaagcggtattaactcctgtcttttcttctatgattgtatatcttctgcctcaaccttatacttagaggcaggtctattagtgaaatgtttgacttttagtttttactaagttagtagctcaaaggacctcctagttttgatactaggagcataggaacctaatgcaaagtaaaacgtgattccatgttgtaagatttgatttaacgccacattccacttttcagtaatctgtgcattttcacacctactcctgctttctctttttgaactgaagcaatctcatgggtaatgacctgattttccttcttcagtacaggttttagtctctctatgttgcttttgaattggtttaaagagatacatttaaatataatatataattctagttccaaattgtgtagtcaaagaggtttcttgtctaagctgtaactgatttgtatatattatttttaaattaacatttacagtgcaccatggtttgttatgctaggtgtttagcctttcttgcaagttaaatgcaatattctattatatgaaatattttaagatactaaaatgtaaactacatagtggcatggataggccaatagccatcacagtgtgaattgaaggagtgcttctcccctatacggtatatattcatcacagtgtgaattgaaggagtgcttctcctctatacggtgtatattcatcacagtgtgaactgaaggagtgcttctctgtacagtatatagtcatcatggtgttaacggaaggagtacttctctgcatggtatatgttcatcacagtgtgaatggaagaagtgcttctcctctgtgtggtatatgttcatcacagtatgaactgaaggagtgcttctcctccatgtggtacatgttcatcacagtgtgagtgga

SEQ ID NO: 59405 - DNA, 1075 bp, Homo sapiens
actgagatgaatgctttgcctggcctgatagcagaattaaagaaaattgaaacttcagcgttttgaagatcactggggtatcatttggtatgtattcagaatagttcatgaataatgtttagatggagtccatataaacccaattcatagtagagtggaaaaatttttatatacagaaaactgctgtagccagatagtaaaagaagatatatttaactgtttatagtaggcaacagaaggcagtgtggaagagtccaatgaaaacagtgttaggagtgcttcttgtccctttttacacaactagaaaatataaagcaaaagtaatttttataacatatgccaaggatctactcatatggtacatgttttatatctgccataacagactgacatagcatctttcactgtcaaattgagttagctgtggtacatatcatggatggtttcaaagctattttgccattaataaggcatttacaaatactataataagtgcttatagtatatactgccggtcctttcagattgctgctttgcatgcatcaaatcctatttataaagtggtattatccaaagtgaatagggaaaatgatctagaaagtcaggattttttttttccacactcacaagtagaatccttctctctagtgaattgagtcagcatttcagaatggaaaagtctgatgtgcaaatagctagccccaagatacctataaaatggggtcactcaaaaaggtgaaaagtacaatgaatttacatttaagtgtccttggcctcttttaggtgtgggaaatgagtgatgagtagctgactcaggaactatagctaacctcttttatatatagtctatgtttagagtatagtaaaaagagaagaaactgctttgtgacagtttcccatgtacaagagatattaatgaaataaaatgtttttttaactcatatatatatatgagtcccatgttaaaatatatatatacacatatatgtacatatatacgtgtatatatatgtatatacacatatatgtctcccaagtagctgggactatagacatttgccaccatgcccaacaa

SEQ ID NO: 59406 - DNA, 1031 bp, Homo sapiens
gaaatactgtgaattaggtaaaagaagtcagagagcggctgggcacggtggctcatgcctgtaatcccagcactttgggaggctgaggcgcgcgggtcacgaggtcaggagattgagaccatcctggctaacacgatgaaaccccatctctagtaaaaatacaaaaaaaaaaaaaaaaaaaaattagccgggcatggtggcgggcgcctgtggtcccagctactcgggaggctgaggcaggacaatggcgtgaacccgggagacagagcttgcagtgagccaagattgcaccactgcactccagcctgggcgacagagcgagactccatctcaaaaaaaaaaaaaaaaaaaaaaaggaaagtcagagagcttttgcataactggcccagagggtgtggtagatggagctacactcagactttggagcctgactaataacacaattagagcatgagcaagaggaaggccaggggcagctttgacatgggaagagagctacttacatactgaccggtaattgataatgggaacaaacgacctgcccaaattactttccaaaaagtctctgttgggagacatttcaagtttagaaatgaacaattttgagatgatctgggcagatttgaaatcttgtgaaatcccttcaaaatccgaaaatgagtgtgtgagagcccagcgtgtgttttgtgaagacttctcttgtgtgtcttgtattgcttagagggcatgatttgatgacatggtcagaacattctgggcagaatcgttacatcatcagttcttgtcatattggctccaaccttattttcttacggttgcttttcagttttatgaaacaatttcctccaaacaccttatcagtggctcagtatccgaaccttttactccaaatacagtttcaaaagagatatgctctctgcctgttaactatttcagttgagacccaaccttacatcaatagaatgaatctctgcaacggttggtttcagcaaggtggtgagagggattttgatggtgagggacagcgaagc

SEQ ID NO: 59407 - DNA, 1880 bp, Homo sapiens
ctttatcagaaaagaatgttcccctgtgaagcctttttatactgtcctaacaacccaaatccaggaacacaacccctgctcccaactcaaatggactttttcacccagtcaaatcaatgttggttctgtctgtccattttctttacattaggaaatgacatgtagcccaaaggacaaatgttttaggggatggataccccattcttgttgatgtgcttgtttcacattacatgcctgtatcaaaacatcttatatagcccataaatatatacacctactatgtacccacaaaaattacagaaaaaatagcatctgaaacaaattgccaaacttatgcataggattgagtgaagtaaattaattttgagtctcaaaatgttgctggtgtatttaatttttaaaagagcttaagatagtgggctttcaggtttacattttagtttattgctttcttaaagcagttaactatcattaaaagatggttgcactttaaaagttgattcgggagagtagtatttattgtccaaagtttcatattcatctttaaaagatgtacgtcaaagtaatttttttcttgttttgtttgatagagttctaaatacatgaatatagctttaagagatggaccttaaattgcaatttaatttcagactcaatagacacacgatactctgctaccattttggcagtgttataagcctattgattatttctgatattatcagtgagcagcttttgtagtggtcaaggtgctatataaatataatgatttcttactgactttctgtaaacttacgtgtttggactggtgaagatttatttctagaaataaaatattctcatatgaagtgtgaacattgtatttttacacctagtttatgtgaaaaatatctgtattgtgtattatagttttgcagtcactgaaaatagtgtactgaattcagctgttttcttcaggtagctattccatgataactgagtttgtcaagcaacaattgaagatttgaatgttggactatgaaaatgaggtttcagcagtcacagtcatcacagggtgagaatagattagatagtgttgccaggttttagaagacagagtattagaacctagtatcagtaaggaggaacacaggaatatagagaagaccatttttgagttttagattttatagaatttttagacagttttgcaggtatatatcaagagagggggagggaaaggaatgcgtttgaatttattctgcaggtgcctgcagttattaatgtgctctataattgtgtcatgccagaaggtgacttaatttgaaagtaagctaacatggaacagacttgactacctgggggagctgctcttagaagaaaagagataaagtttaatataaacagtacaaaatcacctatccagtggggaaataacttttgagtttggagaacattgtatctaaggaacagttgccaaagcagatattacagtgaaaggtgagatcaatagacttaacgtgacctgatcttattagttgataagaaaaagttttggaagtacataaatacaaacacacattttttaagggtgaaacagaaattatatttttcatgttactttaggtaaaactgttttgttgggctgtactactatgatgatcaaatataaccttaattgaaaatttttatagagcttattttttcagaaatattttatcccagtacatttaggaaattacaaaaaaaaatacaaaaaaaacaaaaaactaggatccatactgggtgcatttttgtgaattaaaacctgaaataattgtttaatagtttccatatttgtgttgtattttctgtgttttgtgtggagtatcaataatcaggccaggtacggtggctcatgc

SEQ ID NO: 59408 - DNA, 1051 bp, Homo sapiens
tgccatcacatggtattaaatattaaacattattttatgctgttagcgggtcacaagtttcagtgtgtaatgaagaaaatattatctgtttgatgacttctgtgctctgtgatagaactgtgtgtatttatttaccatagtaacaggctttgttctgttagtgaatacttaaatgtgattattaagtgttatgtgaatataactatttcagacatagtctataactgctatacacaaattctataggttttgggaaataataataatgaaaagatgcctctgcctcatatataacagtccctacagtaatcaggacagacgtctttagaaccaggtggtttgtacccagtgataagttaatatgtaataaagtcttgctataagtgaatctgagaaaaaagctacttttaataaatacatggatttttttttaaacagaaacctttaacagaataaatttataatattttagagtcagtgcagttatacatatgtttcttcatactgcttactgtctatgtgaccttgggcaaattcactcatctccgtgtgctttagtgtttttatctgtcaaatggttataataacagtttctatctggtacggtacctgtagttgtacctggcacttagcaaacactgtgttatcttttattatcattgtgtatacgccattcagagtacgtgggcacagtgtttgaggcacctactaaagccgggcacagtgtccgaggcacctactaaagccgggcgcagtgtccgcggcacctactaaagccgggcacagtgtccgaggcacctactaaagccgggcacagtgtccgcggcacctactaaagccgggcacagtgtccgaggcacctactaaagccgggcacagtgtccgaggcacctactaaagccgggcacagtgtccgcggcacctactaaagccgggcacagtgtccgaggcacctactaaagccgggcacagtgtccgaggcacctactaaagccgggcacagtgtccgcggcacctactaaagccgggcacagtgtccgaggcacctact

SEQ ID NO: 59409 - DNA, 3536 bp, Homo sapiens
aagaaaagctagcaggattatttcattagcatgcttctcttcatatgcacctttgatttaaaaatcactctcctgtagttttttatttcttcacaattatcagttggaaactaaatttgttcatctcgtaataagactgattctgtatgcatcatagaattgcaaacattaagtaacaaagtccatgtaaagtgtttagaacatagcacttagtaaatagtggttattattgttgtcactatccccactgtctttctttgtagatatttactttcaccttttcttctatagcagagccactaacaggtaatagagaagtaactagttagatcttaggaatttaagaagcacttcaagatgtggacagaaaaggatttggttcagattgcatactcttaggctatggagatggtacctgcaattcccatagaatgtgtataaagcactgtattgcattagaggccatgggattacaaaagctattctttgtaagacatcttagaatgttgttgatgtgtgagaataaaatcatattgaaaaaatatagaaaagttaccgtctttcatcagttctaagatgcagggtctcaccatcttgcccaggctggtcgtgaacttctgggctgaagccatcctcctaccttggcttcccaaaatgctgggattataggtatgagccattgcacccagctaattgtttttgttttaatcaattaccatatttttagcactgctgtggcttatgctttgttcctttttactactacttgctttgaatgatgcttaaaatggacccttaggaagatgactgtattgaattattatattcagaacaattgatatactaatttaaaaagaatatacagtcccaagtgatagaataaacaagagttactgcttagtatacaataaattttgtattcatttgatttccctcagaagtctgtattcgaaatctgagtttccttctatttatatgtaggttacaaagtttttaaaaaggcaacaaaaaaaaaaacatttatttctgctcttcttaggcaatatggccttttggctagaactcagaaattaaaagcttgatttgttggttgtgtaggcatcttatatctaaggaattattttggcttaatttggggataaaatattaattacacctaataagcagaaatgtaattatttaagacagttactgtcttacacatttttcacttaagatatgaagaagtggttaacgtaatttcttcttctgggacttaaaagaaatgttcaaattaaccactatttaggtttgatcatgcctttggaaggaattggtattatcctttgaaaatgaaaaggcataatttgttgaaggtacatagaattgtacaaaaagaaatcagtaattttcccatttttactattaagttatatcataagcagctattttgaatgacagtatgaaaaagtatgtttgtgttttaaggaggctgtttttgaattaggaaagataaatacgctggtatgaagatcagctcattcaggagcaggcattttcctgcatactaaggagctttaaaggttagacagtaaaaagaaggtgatcattatgtagtctgctccacctcatgcctaccagaaaatttatttcccagcctccctaacttttctacttcaatatacagctaactgttaatgagccctaactctgacctgggtatgtgcccaggtcacatacatcctgtcatttagtcctcaccataatctctgagtgcacagtagatgctgttagaattatctgtattttatagtacagaaacagcctcagaaaagtgaaataacttccctcaaaataaggtagctagtaaatggcagagctaacattcaaccttatccatgtctgactacaaagtaatccatccattacttaccttttttcatggtaagcttttgctttttggtcaacactatgcattgtgccttgagtacatgtaccaacattggaagaccattcccatgtgatatttgtaatagaattaggtattcaaatcacgcattcttgagacaattaaagaatgtaggatttatttacatacaaagttgagagaatgtgcatcatgctgtgtcaggcttcctttccatgattctgttagttttcagtgcaggtatttgccacctgacttgggtttcctagatgtctataatcaatgaaatattttctcttttgaaaaactatttttaaaatacatgttttaacagtgttgaattacaagatgttttaagataatataaacctggacccaaatttctatgtaaatgtttattttatagagacaagtaaattaaccaaataattcagtgaatcttcattgagaacctaatatgacctaggtactgtgctaggtgtcagagaccggctatatggtttagtagaaagagaaatggtagacgctgtgccaagcatagtgcctggaacaagcagaaagtccataagaaatatatgttaactgaaaggaagaacaaaatggaaactgtgtctgtctgagtcacccaaattagtaatgtctgtgagtttatttcctcatctgaaatgaagggtaataaaacctacctcagaaggattgttgtcaagattaaacgagttaagatatgggaatatgtccagaactgtgtttggtacatattagatgtttaataattgttagtcatagtgcgaaaaataagtaacacattattcccattctcaagcaatgtcaagatttaaaatcggattcttatccaccatatcgttagacttcagttgccttgttcttctatttgctttattctgcctgagcttcactaacaatccacagggcttttggactctacaaagaaaacacacacacaaaaatatcatacactcttctatatctactcacatctgcactcaaatttaattctgttctgtgaaaaagaaaatcggcacaaagttattgcttaatactgtcaaatactttttaaaattagttgccctctgtaacaataggagagcatggaagaataaacaagcagcagaatgatgtcagagaaactttggccacagaaggagatcagtaggtattggaatttgaacagcttatttttcacttacttctatacacaatatggatcttacagatttattgtaacttttttctccgatttaagaattgccagaaataaagctgagtgacaagaaaaggatgtgtgtacatgagacagagggcgctgtttatgcccatctgtacagaatgtcattcgttttaaatatgattttcctctttttcctcacagaaagagaaaatggtatatttctccttctatgcaacagagaactgattttttttttaaattcttattactgtttttttttgaagtataatagaaacaaagcagtgtttttctttgttaaggtcagttcatgttttagtaatgtgtcttgagctttctgtattttctgagctaaccatttaaaaaattttgacttctacaccaattattttatgtgtgattgtttaaattctatgggtcttg

SEQ ID NO: 59410 - DNA, 1151 bp, Homo sapiens
tgaggcctgtcctctctcaggctcataggaaaagacagaaatgatcttgcttctttagggattgacagaacaaagacaaaggaccctagactttgggaatagaaatctgttgaaatgagctggaattggtaaaataattgattttgtttatgaattgataaaagcctactttcaattcatcaaatattgttgagcatgcaacagtatgctcccgtacctaaggtgcagtctctgccttagagttgtaatccaggaaggggctgcaagagagactcagaagatgtggtctgacaatatataagcacaatgtctgacccttaaagaatgacaggatttcaacaggcagacaggagaggaggaggaattctaagcaaaggctttcacatgtaaacggtgaattcttagataagatctgttttctatataccaggaacagtttgctggcatttgaggacgaggagtaagttcaaatgaaaactttaaaatgtttccccaaagtgttcatatgaaattttaaggatgtgcctatggactgggaataatcaaataacataaaataaacataaataacataaaccataaaataataccattttttttctacttttaaaattgggcccagaatatagcttgcagtgttttcttaattgataaaacttcagttcatcaccttcaattaatatgttaatgcatgaccatttgctttgtatatatctaggctatatttataattgtggtctgtcttctttggccaagtatgtatgtattccgttatctcttagctcctttgtattcaggctatgcacatttattataatattgctctattccatctttaattaggcaagcaaatattctaataaaaagtttcaaagtgaattttgcattatccagtactagatacatattctgtaactttggggcaagatatttgccaggcttataaaactagatataactatccataaataaaattgcctcaataagatttaatggaagagaattaagaagctgtggaaaatgaataagaaaaggaaaaaaatattattttcgcagtttacttttttttttacttgggatcatattcttttctgaggttttactcgaaaaagtattttctctgtcattactttctttctctctctatcttt

SEQ ID NO: 59411 - DNA, 5392 bp, Homo sapiens
atgtttttggcttaacatttatagggcattatttgaaaaactgaattctgatccaagcagagatgaggggaacaaggctgagaccttaattactggctctctcttgtcagagaaaggtgctttttgtcatattcccatgggatttgattgaccttcggacggcctgtgtctgttaggaggcatttctatttctcaggtttgagggctagtcagtaaaatttggatgaatttggactggatagagggactcaacctgaattgtgaaaatcctgagttacagaatttttaaaagttctatgttgtagttatatataataatttagctattttaaagcacaaaacaaatacgtgcacttggagaatggagtccacagcattcagcaacagtggcctgaagcagagccccagataaaacactgggttgaatgtcagtgtgctgacatcagtgttttttattatatgactgtgttctttctataaaaatcaggcattgtgagaagcccagatgtgaagcttggaacaataaaaccaaaggaagaatacatcagaggtttgtaaaacttagataatatggaagtaattaaccattagactcacgatatgttctctaacagtaaccttgaaactccatgttttgtgtctaatgacttctaggacacataaagacaaaaggaaagaataatatgctttcagagcatgaagaacttgctttagagtccctgtgtcttttgactcgaatacacaggattattatatcatgcagttatgaatctgaggaaagtatgacatgatcgataggtctaattctaaaatatctgataaagaagttaataccaaaattagtgagtttcctaactttaaagtgaaataactagataaagaagaactaaatgcaaagctagcagaaggaaggaaataataaagattagaacagtgttaactgaaatagagaataggaaagcaataggagagattagtggccgggcgcagtggttcacgcctgtaatcccagcacttaaggaggccggtggaccacgaggccaggagttcgagaccagcctggccaacatggtgaaaccctgtctctactaaaaatacaaaaattagcagggtgtgatagtgggcaccagtaattccagctactcaggaggctgaggcaggagaatcgcttgaacctgggaggcagaggttgcagtgagccgagatcgtgccactgcactcccacctgggcgacaagaccaacactctgtctttaaaaaaaaaaaaaaaaaaaaaaaaagattagtgaaaccaaaagctgcgttcttgaaaagattaacaaaattgtcaaacttgtagatagatggactaagaaaaaagaagattccaattgctaaaataaaaaatgacaatggggacattactgggccgggcgtggtggctcatgcctgtaatcccagcactttgggaggccgaggtgggtgggtcacttgaggtcaggagtttcagatcagtctggccaacatggtgaaaccccgtctttaccaaaaatacaaaaattagctgggcacggtggcgggcacctgtaatcccagctgctcaggaggccgaggcaggagaatcacttgaacccgggaggcggaggctgtagtgagccgaggttgtgcctctgcactccagcctgggaaacagagcaagactctgtcccccccccaaaaaaaagaaaaaaaaaaaaaaaaagaaaacagggacattattatgaatcatacagaatgaaaaaggattataggagggcattaggaagagttgtatgacaacaaattgaataccctagatgaaagggacaaacttctggaaatataaaaaactgtgaaagacaaaaattatgaaaatctgaatggacctatacctagttaggagattgaatcagtaatcaataatctctcaacagagaaaagctgacttggagggcttcacaggtgaattctaccaaacatttatagagaagctgatactaatctttctcaaacttttccaaagtattgaagaggaagaaatacttcctaatgcttttattatgaggccaacattaccctgttaccaaagccagacaaagatattatgagaaaagaaaactacaaaccagtatcccttatgaacactgatgtaaaaattttcaacagaatactagcaaaccaaatttagcagcatattaaaaggattatacaccatgaccaaatggcatttattcccagactgcaagaatggttcaaaatgtgaaaatcaatcagtgtaatatatcatataaacagattgtagggggaaaaaaaccccacgtgatcatctgaatcgaagcagaaaaatcattttgacaaaattcaataccctttcatgacaaaaatcactgaacacataaggaataaaaagaaactacttcaacatagtaaaagccatatatgaaaaacccatagctaacatcttactggtgaaagaccaaaagcttttcctttaagattgaggatgagataaggatgcctgcttttcaccacttctattcaacatactactgaagttctagctagaccatttaggcaagaaaaagaaataaaaggcacacaaattggaaaggaagaggtaaaattatctctgttcatagatgatatgaccttgtagatagaaaatcctaaagatcccacaaaaaactatcaatgctaataactgaattaaacaaagtattggggcacaacgtgaatacacaaaaatccgttgcatttttatacacaaacaaacagtgaacaatctgaaaaggaaattacaaaaacaattccatccaaaagaataaaatacttaggaattaacaaggaggttaaaaacttaacaatgaaaagcagaaaaacattgctgaaagaaattaaaggcaacataaataagtggaaacatatcccatgtttgtgaactggaagatttaatattgttaagatgtcattacctacccaaaggcctctacagattcaatgcgttccctatcaaaatcgcaatgatgtttttttgcagaaaaggaaaaaaaaatctaaaatttatatggaatcttgagggactccaaatagctaaagttatcttgaaaaataacatagctggatgactcaatgtgctgatttcaaaatttgctaagaagctactgtgaccaaaacagtgtgttactggcataaagacagacatatagaccaatggaatcaacgggaaagtccagaagtaaaacctcacctatatggtcaaatgattttcgatgggggtgccaagacccttcaatggagaaagcacagtcaattcaacaaatggtgccaggacaactgggtatccatatgcaaaagaatgaagttggacctttatctaagtttgtatacaaaaatcaactcaaaatggatcaaagacctaaatgtaagaccccaaactataaaactcctagaaaacatagggcagaagcttcatgacattggatttgtcagtggtatcttgggaatgacaccaaaggaacaggcagctaaagaaaaaaaataaacaaattgttctttatgaaaatttaaaaaatttggtgcatcaaaagacagtatcaacagttaaaaggtaacccagagtatgggagaagatatttgcaaaccttatatctgataatggatcaatatcaaaatatataattaagaactcaacaatagaaaagcaacatgattttaaaatgggcaaaggacttaagtagacatttttccaaagaagatacgccaataagcacatgaaaagatgcttagcatcactaatcatgacggaaatgcaaatcaaaactacagtgagataccacttcacacaaattaggatgactgctatttaaaaaaccccagaaaataagtgttggggaggatgtggggaaattggaagccttgtgcactgcgtggacgtgtaaaactgtatagccactgtggcaaacagtatggcggcaactcaaaaatttaaaaatagaattactgtatgatccagcaattccatttatgtgtatgtacccaaaagaattgaaagcaggatctcaaagagatgtttgtatgccagtgttcatagcagcactattcacaatgactaaaatgtagaagcaaccctcatgtcatttatctgaaaacaaaatgtggtacatacatacatatcataaaatgtcattcagcattaaaaaggagggaaatgaagacacatgctacaacatggttgaaccttgaggacattatgctaagtgaaataagccagccacattaaagacaaatactatatgactccacttttatgagatacttagaggagtcaaaatcttagagccagaaagtagaatggtgattgccagaggctagaaagaaggagggaactggagttactgtttaatgaatttagagtttcagttctgcaagatgaaaagagttacagagatggatggtggtgatggtgcacaacattatgaatggatttagtaacactaaagtgtatacttaactatggttaagatagtaaattttttatgcatattttattgcaataaaaaatgaaaacagtttcaatctaggaggattttggatgcatctatgccttgagaaatgaatggtttgatgtaaatgcatggtagcaagaataaataattatgttaattcatataatatgttatatatagttttaaagaaaattctatcactgtcttcctatgggtagggctataatgtccagttctttcagggattaagagggtagggtctgaagttaatccttgtttgtcgtaatgttattaatttattcaaccaagacttaattgagaatgacctagcaaaagagacaatctgttcaaattaaccaacttgagtaccatttcaatttgaaaactctgtctctggtgttggaggtcattcttcaggaaccaacatggttcttgggaaggtaaacctcatgtacaaagtcactcaggaataatacttgaccgctgggtgtggtggtacacgcccggaatcccagcactttgggaggctgaggcaggaatatcacttgagtccaagagtttgagaccagcctgggcaacgtaggaagacagcttctctacaaaaaagattttttttaaaatgagccaggcaagatggcatgtgcctgtagtcccggctgcttacggctgaggtgggaggattgcttgggctcgggaggttgaggttgcggtgagctgtgattgcaccactgcactgtagcctgggcaacagaacaagagcctgcctcaaaaaacaaaacaaaacaaaacaacaaaaacaaaaaaaaaaaagaaaaaaaaagaaacagaaagaaaacaataatatttgacagaataaattccagggtcatactggaatatgggggaagagta

SEQ ID NO: 59412 - DNA, 4599 bp, Homo sapiens
tacattctttcaataatattttcatttgtatgttttgcagatgtttttagagtgcctactatgtgcctttactgaggtatatgaggttctgaggatacagagatgacaataacgtaatttcctgtgcttaaggtgtttgctgttgtttagaggagaaacatctctttaaaggaaaaacattgcggtatgatatgatcagtattctcacagagctttactcacccatgatacaagcttgagcataaaatcacctatctcacagagttactgagtagggtaaatgtgatagtgtgtggaaagcacctaactgtagtagtctctggcacatagtaggttgccaatcaatggcagccattataattcataaagcacagtgagttcacaaagaaggaagagaacacattgtcctgggccatttcagtaacgaatctcaagtgacctggcaccagtgaggcaggctctaccacgggctgaatggggaccccacttccttctcacctgtgtggtgtccaatgatatgctagaattgaattctcagatgtatcttttcaatgactcataaatgcctgtaagtacctggagggcaggtgctgtgattagaaaaatctttatttcccggcagtctttgagaaatctgtaaatgtctattgagtgcattaggttttagaataaattcataggctataggagatacttctttggaatattagtgtgattttaattgctaggtttttgcaaataaaatagacaaaggtctgaggaaggcatccttccatttggaatttggtacaactagccatctttgtcccacgttttgtttttgaggtggcagcctgatcaaatataggttgaactatagaatgcagttagctcttgaagcatctgataaatgcagaaacagaaaagatgaggccagcaggggtcagtttaataccagtttaagttgcaagcacagtgtttttttaattctctgtaaagtggaatgataatagaaactgacatgcacagtctaaatgtaagctttaacatttcaagctacagtaggagattgccaaaaattgaggtagatgtctttaacattcttttaaagagagaaatggagatttcactgtgttgcactggctggactcgaacgcctgggctcaagcaatcctcctgcctcagcctcccaagtagctactgtgcccagcttctctaagatttttaagtagatgatggagattattagtgacagaaggtaaactatggaatgtggatagtttagctctcttttctgtcgcatggcagcataggactttcagccaaaccgatttactccactaactggcttgtactgacaagtgctagaaaaagcctgactatatcatgtgcatttctttgatgttcgttacttggtagactttataaaataatactttgtgcctatttttttcctagctggttataaagaaaagttagttttagttatagcttgcatatgaaatgtcaatatttccaagttacagttataagaaactgagcatggaatgattacttgaggacattaaactttaaataaaatcacctcatgctactatatatattcctttgttatcttcgtggatatgaatggccttttctttgcaacctaatgtatggcattcacatttataagactaggctcccaaatcctaagaacatcgtgtgtgctaaactcagaattctgcatactaatcttacttactacgagtaagtactcttagcagataaaattgttttcttgatgccttagtacactttccccccaagatactataattgttcaactaaagatttttatataatgtagaatgatagactcttagacctggaagacgccttaaggatcataaagccttgttttatagagaagttgtgtgatgcgtcacaggcagggctgtccctggcagagcaattcacacttcttggactgttcttccccatggtactacactatcgtcttttctctccctactctattcttccctgttcaatagtctgcatatttgagcttcctgctaaatatgttatagaggttaaataactgcctttgtcttgcatcccacttcctctttagctgtagagtagaaccccatgcacataaccattggtctcaacaatctttttttttgtttttgtttttgttttgagaaggagtcttactctgtcgccaggctggagtgcaatgacatgatcttggctcattgcaacctccgcctcccgggttcaagtgattctcctgcctcagcctcccaagtagctgggattacaggcacgcgccaccatgcccagctaatttttgtgtttttagtagagatggggtttcgccatgttggccaggctggtctggaactcctgacctcaggtgatccacccgcctcagcctcccagagtgctgggattacaggtgtgagccaccgcgcccggctggtctcaacaatcttacattgtagcttaagtggctctttgggattgttgtgtcatgtccactggggccacttagagccaaggggtgtgtgtctccacagaagggagtaaggccctggctttaaaggacagtaggtactgttctccagtgctcttagaactgttgtgaagtctgtgagtcacatgtagtagcactttagggcctagaggatgctggacttgagtggttgctcctgtcatggtgtcaggaaggaacacagggcagcatgacttgttaaagaagttgctgcatgatcctgacaacagtcaggcagctctgcctagcgcttgtgttctgaaaatgccgactttattgggtgtattgttttttctttttaaccatttaggtatcttctcctctgtttatattttttattttgtataatgaattatcacatactttgtggcctaaagcagcatatattttttaatcgtatggtttctgtgggtcaggtgtccacacacacctggatcctccatgtagggtctcataaagctctcgtcaaggtgtcagctgggctgtgttctcgtatggaaatccggggaagaagccacttcccagctcgcttgggccactgaaagaatttatctccttgcatcagtaggactcagggccctggcttcttgccggctcttggctgaagtctacccacagttcctggagaccacccacagttccttctcaggtagggctttccccacatgaccatgtactttattaagtcagcaagaagagcttctagtgaagatctgatggcaagatggagttttatgaaatgtaattggcaggagtgacatatacctttgccatattctgttagaagcaagtcacagatcatgcccatacataaggggcaaggcgaggggattgtacaaaggcctgcacaccccaaggaggtagctaggtgtcttaggggaggggccaacttaaagtttgtcttctcagcttttttttttttcttaaacagaggggagacggaaagggacatcgacatacatgagagtaacccaggagatttgttcctgggtttcacattcacagcacttgtgggcctccaggccgacctgaggcattgaaaatcccagttgttggtttggtctgtgctgagctccttactcaccttttaaagttggctgtttgcagttgtactcccttcctcatttctgttttctttgtacctttttatttaaataaactttaagtatatactttgggtattaacaaatatgtatgccatgaatataatatacgatgattatcatggcaatgaagatacagaactttccgtgaccccaaaagttgccatatgtccctttggtatcaatcctcctacacgtctggctgcagcaaccactgatctgctttgtatctatagatgacttttgtctgttttgaattttgaagaaatggaactgtacgttatagactgtggtctgactcttttcacttagcataatgattctgaggttcatccatgtcgtttgtgtcagtagtttgttcctctttattactgagcggtggtctgtattgggataacacaatttgtttatccattcacctgctgatgaacatctgtgttgtctcccctgattaggtattgtgaataaagctgctgtgaatattcatgtatgagtctttgggtggacatgtggtttatttcccttggataaataccagtagtgagattgctgggtcatataagagcatttttgttgttgttgttggtggtggtggtggtggtgtttgcttgtttttacatgttaaaataagatacagccaaactattttccaaagtgatgatgcattccagtcagcagttgctccgcaccttcaccagcatttgatgtagtctctttttaattttagccattgtaacagtgtgcaaggacgttatattgtggttttagttggcatttccttgataaatgatgttgagcgttttatatataggcttattggtcatttgtacatcttcttttctgaaaccttgcactttttttttttgaaacaaggttgcctaagctgaatgcattatttcaactatttacaagttcacaaaataacacctttttaatgtatatttgctcacatattaatgtagtaaacatattatt

SEQ ID NO: 59413 - DNA, 2266 bp, Homo sapiens
gaaaagaattagaaacctcagagaatggaaattttgctcatgtttcatggtattgagagaattcacgttgctgacctggtaaccctgaagtgtttaagtgctgcagatggtcaaaggaaagctgaaagatttcggagcctgctgctttctttgttctgcgtttgcaacacattaccagatgctagatgcagaagtactgcagcacttgcctgttgggaaagcttaatctaactgctcaagtagctgatatgcagcatctgacagcctgctatgccgttttgcagcatactcaccggtgcttttgatattggctctgaggaagtacttttggttgcaagtgacatggcatgtacctctccagcaagacttcgtttctgagaaattcatgtagttcttctttcatgagtaatttaccttgtttgatttttctactggttgatatgctattttagtcaaatattaatgtgctacatttaaatgcttgacttccttttgttattttgaaatcagttattagggtgaatggtgtacctgaaggttgtgtgtaactcacagttgtcatgggctgtgaaagctggcaagtgctgcagtttttgtttatgactcggttgtgtcagtgggagacagaaattctaaaagatactgcaagcagatcctggtcgatttctgtgagtgctataagttctgggagaaatgatcttgggctttagatgttatcgctgtggcaattatatttcttctggtctcacagaagcaagtgtcattaagagctttaaatatttgaaattagaaccatatgagttattttgagacctctagttactgtaattaaacatacacaggtatatatgaatgaggacgttatttatgcatgagcaagggaagcttttccatggctctgattattggcaggcaggggtggtgaggaaggaaagcaagatggacacatctgacacatttaaagcccagtttagccagagtaaggattttgaggtcctttctctttgttcagattgcgagtcgatggtaggactttgggagggatgtagcaaaggggatgtaataatggcaatagctcatgctcatgaaacacataggttccaggtaaaatgctaagctctgtgcatatgatcactcactgttacactcttggcaatgttattatctctggcttaggaaagtagatgacatgcccaagattacatttgtagaactgtggtgtgaacccaagccaccctgagtccagatcccaaaagcttgaccactgttttattttctatggggggttacatgctccctcagtaagttttagatttttaaggtgccattgttgagcagaagaacctttagagctccttatttcttttgtggcttttcctgtctcagggaaggtgcaggcagaggaagttaaattccgatcactctgaaggaagaagtttgcagcagtggtaggatgatatagaaagtattgacagtgctgagaatctgggattatttattcttgtttggagtgagagactggatcttcagtttactttagataattaacaactgcaacaaaccaggttgatttattacattttctagttagattttgttgactgttcagttattctagtcatgaataaatttttatcatttttccccataacatatgttgaagcagaagtctcatctgctagaagcaacatttaaagtgcttgcataacaatattgttgatacagaagattttttgtatccaaacaaagaagttaactactgtgcttcatttatcttcatctgtctgaagtaccaagaaaagagatgtggaaaaataatgataggtaagcaaaagaaaagaaaaatacatgcagctttttttttttggaacaaataattttattttttaaaattattattaatttttttgagacagggtcttgccctgttgcctaggctgcagcacagtgacgccaccttggcccacagctcactgcagccccgacctcctgggatcaagcgatccttccatctcagccttttgagtagctgggcctacaggtgggcaacaccacccccagctaatttttttgctttttttttttttttttttttttttttttttttttgtagagatgagggtcttgccatgttgcccaggctggtctcaaactcctgggctcaagcagtcctcctggcttggcctcccaaagtgctaggattacgggcatgaaccactgcacctgaccaggaaacaatttttagacctctacattatatttgttt

SEQ ID NO: 59414 - DNA, 1026 bp, Homo sapiens
ctggccaacatggtgaaaccctgtctttactaaaaatacaaaaaattagccggtcctggtggcgcacaactgtaatcccagctactcgggaggctgagacatgagaactgcttgaacctagggggcggaggttgcaatagccgagattccgtcactgcactccaacatggatgatagagcaagactgtctcaaaaaaaaaaacaaaaaaaaagatttttttattatatcttgaggtcatatattttccaaagatataccactacagttttataatgatggtcaatggagaaaatttctccacttgaaatttagaattcaaaagtctgattatcaaatatttgagaggcagcagacctacgtactctttagttaataaatattgagtgtctggtatgtgccatgccctatactaggtggatatacaaagatgaacaaaaacagtgtctctgtattacatttatattggcaagtcattactacatacaaatttctaaaaatttttaaaaagaccttcagggagtctgtagaaaactagcactaattttctgagagtttgagtacagaactaatgtcagtcttgtgttatactcaggaattttcattgagtgaaaacttgaggaaataatttgtatgatgaattttaaagaaattgggacttccctaagacagtggaaaatatttgtttttaagaggcattgatgggagctgtgtggtgatttgtgatttgtcagattaaaaaaaaagtgctgtgtttacctatgtaacaaatctgcacatcctgcgcatgtatcctggaacttaaaaacaaaaatttaaacaaaagtgctggcaaagcaaggttttgttattatcctttattaagctttttgtgggatggaggttttactttagaatcagaaacctcaagtgtctttctcatataatgacttcttttcctctgggtagataccgagtagtgggattgctggatggtagttctactttagttctttaaggaatctccacactgttttccatagtggttg

SEQ ID NO: 59415 - DNA, 1967 bp, Homo sapiens
acagatacatttacccaccaaatatggtggtttggaatgattctttgtgatcttccttgatttcatcagcaatttttcccaacccatgtttcagttttcagtcttaatacttagcattaactaaaattatgttcttgaacatggctatatgttgaccctttccttatgttttttcagtgtctgccatgctccctgcctaagcttcctgttgtttgctcagccctttgtgttccttttgcagagactccaatttcagcatgactcttttgcccccaaatgctctcaagtaataggttggcaatacgtgttcatggtcttctgtttaagggaagcttgtaatgtgtcattccttttactgtgtcacatggtttactgcagcatatccctacaaaatttatattgtgctgtgctggagtgactggtatgttggagtggatttttattagcaatatatttatccatatagtgatcatatctgctttaatacttgacagtgatagtaagtctaagatactggtgtattggatagtaagtctaaggtactggtgtattggatagtaagtctaagatgctggtgtgttggatagtaagtctaaggtactggtgtgttggatagtaagtctaagatgctggtgtgtaggatagtaagtctaagatgctggtgtgttggatagtaagtctaatgtactggtgtattggatagtaagtctaagatgctggtgtgttggatagtaagtctaaggtactggtgtgttggatagtaagtctaaggcactggtgttttggatagtaagtctaagatgctggtgtgttggatagtaagtctaagatgctggtgtgttggatagtaagtctaagatgctggtgtgttggatagtaagtctaagatgctggtgtgttggatagtaagtctaagatgcttgtgtgttggatagtaagtctaagatgctggtgtgttggatagtaagtctaatgtactggtgtgttggatagtaagtctaaggtactggtgtgttggatagtaagtctaagatgctggtgtgttggatagtaagtctaagatgctggtgtgttggatagtaagtctaagatgctggtgtattggatagtaagtctaagatgctggtgtgttggatagtaagtctaagatgctggtgtattgcattggtcatgggaggtagaaatggctcctttactacctacctgtgtgatcgtcaaattcatattttcccaaggctaatattttcttctttctactgtaattagcttcctcattctgcaagttaactatgattataaatactgaatacctggcatgttttctcaagtatgaaaataaaagcttatacttaatgtgtaaattacagttgaacataggtccagacatatggttattagtgttgcttaaattactggtttttcttgtcattgctattgcaagtgttctcaaagtgacggcaaatcacttcctttcctgtactgtgtaagtaaaataaatatattttaaaatgtatgaatgtgtaatgtagatattactctatttgaccttttatttggaggttaacatataaataaatagcaacaactagtattgagaagtccagatgcactgggcttgcttaggtgcctcgtggtctccataaacatttggtctagtgtttctggctaaaagccagcagcaaattatactttccatgcaactcttagctcactctcttccttctcagagcatgatctgcaaaatgcactcataagacatcaaatttgaattgcaaatttgtatgcgaatattattttacaagtagtcgggaaagaaaccagaggggaacgtttccctaatttgttagcaagctgtatacataatttgtaactgatgcttgtcttgaccatctagtcatcagtattctgtaggttatggaaataccaatgttttcaaatctttgctttgtttttatcaagactacttt

SEQ ID NO: 59416 - DNA, 1501 bp, Homo sapiens
cctgtctagaatcagttcattttcaatatgtccttctaacattttctagatgaaagcagcaagttaaaaacatccaagaatgtcctggagtgcaaaacctacctccgcatgcatacatgcatacatacaacagcagaacaaaacacccaaatcaaacctttgaattttctgtgagaaatttagtctttataattcatacctcccttggggattgattttgttctccttctgatgaattttgactttcttgtcccatgcctgtcatctcaattgtttaacgatttatttttcttgctcagaggattcagatttccagatcatatggctatagcttgtactggtgtcaaggtcaaaatcttttaattttattgatggaactggtattgtaacctgagggtctcttgctgtatatttaaatcctgtcatattgcctaaaaacagtcatatcttggttttggtccaacagatacttttattaaattccttggctacatctagtttactttttccttgagagaaatataacagaataccaccagcatcttgattgcaaatagattgttaccgtggcaacctgacagtttttaatattagaatcttcttgttaaatcaaaacttatgaaattggagacctttccctgactgaaaacattatgctgcctcttatagttggaattacactgtgtccaagcagaaaactgtttttctttattaagaaaacaaacactttgtttgctcatcaactcctcggctactatcttaggacctttggcttctcaactgtagacccttttctgggtaggatcttttatgctgctgggcagcagtgggatctgtaagagatactaagtaaagagaatcacagtttggtctctgacactaaagaacgttaccacctagggactgcgtgagtgggcttggggagattgcttaggttctggtgctgctattagaatactaatagaattagtattctgagtgggaatactaattcctgccttaacttgtcttataagcttgttttaacaaaggagtacataaaatatttattattacatattattcacagtgaataacagacataagtaatatgcaacatattagatttatgtattatctcatgtaacctccacagtaaccctgtaaaatagatatattattctcaccttatatatgaagacatttgtaggcagaaaggctaattgggtcgggcacgatggctcatgcctgtaatcccaacactttgggaggctgaggtgggcagatcacttgaggtcaggagttccagaccagcttggccaacatggtgaaaccatgtctctactaaaaatacaaaaattagctgggcgaggtggtgggtgcctgtaattccagttacttgggagactgaggcaggagaatcatgtgaacctgggaggtggaggttgcagtgagccgagattgcaccactgcacgccaacatgggcaacagagtaagactctgtcttaaaaaaaaaaagga

SEQ ID NO: 59417 - DNA, 1055 bp, Homo sapiens
ataattcataaataacattggcaattaaattcaagatgtcctgttaacagaaaccaaagagtaaagctgtctacctctaaaatatgaagatcattgtcctatgagacaaggatgaatggagataacacatatttagaactgaaatggaagtcttagaaggaaaaattgcttaatttaattgaaaagtattgtgaatcttgggtagattcatagcattctctggtcaatacagtgaatctctggtatttatacatcagaataattgaatatttgacatttgatgcatcagaaaaatattctagtcaagaaatttattcttgtttagggttaaaaacgttttcattacaagccagtaatttcaggttctgtccttattgaacaaatgctcttgtccttttaacttaggaagggttatgatgtaagcctgaatcacttacctttgttcgttgagggttcttgatcttagaatataagacaaattcttggatgcgttgtttccctgctaactcattaacccattgtaggctagctgctgcctctactaccgtactgaagtgaattcactcacgtaactagttacatcctaaatgttgaatacagtattttgttctctttctgtgtcctgtttgactcctctgaggcatatattgttgactgtttccttaatgaaactcctcttttatgactttgaagatacctctgtcaccttgtttgtttcacctccatggatctttaaatgttggcatctctcaaagatggtccttgtttctctttcttactttctttttcacattgtttttctaaatagattcaactattacttaattgtgaatgagtaaatttttgtctctgtgtcagagccccctcctgagttccaactctatttctaactgctggccatttatgtccctgaatcattgcccaaactatttaaagtctggatgattatctagcactttcctcaaatctctatcactcatgagtttcctttattgtattcatcgattgttagcttcctctacctaagttcctcaacctagaagcattttcagaat

SEQ ID NO: 59418 - DNA, 1024 bp, Homo sapiens
gcttgcttactcacagccttgctagtacgggatactgttactctttttcatccttgccaatcttaaaagtgatataagtaatgcctctttgtaattttcattttcattttttagttatttgattctggtgggtttgaaatcatgaagttttgcataataaaaccatgagactttgactcttttttttccccatgaaatttttaaggccatgacagttctaggcagacctagacattttctctggcttttaaaagtagagctgttccttctttatatgatgaagtataatatacagggagtgttgcatattcttgatggtccagtcatcatcattatataaagatagcttttggtacaatcttatttttaaagctgttaggtccagaaagtttttacctggtggaagtataccttttactttattagtacaaaacctccatcttgtctctgatattttatgaagggatacttgggaacaaatgtggcagctcctataataacacttaaattgtattgaaaacacaagatagcctctttatattcagctttcttttacattcatgtactttgaacttaaatgagttcattaggcattaggttgggtttgtaagctttaatatgattttggtcatagaaaaaaattaatattcagtatttagattatttcaatttgccacctttgtagttcttgatattagtatgcacttatgttttattctttttttcctgctgtaatagcttctatttattattattatttttttacctcagtgtgctcttgctctttatgaatgtttccccttctgaagttcttttcttatttctctttagctgttgacaagtggcactgtctgtgaacctgcaggtttatatagacaaaggaaaaagcttatgttgtttattgtctttccagaagagggtgtagcaagagaggaaaagagcagctagactgtcccatcccccttcattttaagcatctcataaaaattaaagatgatggaatattcatcatactgaaaagcac

SEQ ID NO: 59419 - DNA, 3512 bp, Homo sapiens
gcactcatttattatacagagtgtgtactccaggggtgcaggaatcttggggccaccttaaaattctgccaaccacaataagtatcaactcatgcactcctcacagcaactctgtgaagcaggcactattattagcagaattttatacttgaggacacttggtcaaaggagtcacagaacaacaaagtaggagagcctgggtaggaactcaggcagcctgacttgagagcatagactctgtctgctcttcagctattgttgtgttaggagctcagtgctgtagctattcattccattgctttttctgtatatccgcaattctctcttctttctcttgtcatatagtgttccgtagaagacccacatatttgtggtgtttaggaaacctttacttgggtccacataccttttgtatggatttgattttactttcttggccatttaagtaacctctgagtcacaaagctaactgctggatcctgcctcatagacttgcttattggttctgtatgttgctataaactcattcttttgctattaactcctgccagttcttgtaaagtctagattgagctttttgttggaaaattgggagttgtggccatattgggtcagtttccacatcgcagtaattttcttgagctgggtagcagccaccccttcgtgaagcatgaactgtccaatttgctatactcagcctacttagctaaccctaacccattctattcagtcttcatctgaacttaaacttgaaatatatatatataaatcattgtaacagaagtagtcttctgttttcttacttcacttattgtttatacagtttttttcacctgaattccttctgtatttaaaaacccactgcagttttcagtgatgaaatctaattcagtcttttcatgaaaacagtttcacatgacagaaaaatccagcccacattgaatgaagcacaaaaggaatttgttggctatgactgaaaaatgcttccttttagcattgctaaggccaggggctcaaacaacattattagggtctggtctccccccattgctaggctttccttctgtgagttgcttcgattctctgatagcctttcttcttagggtggcaagacagtggccaaaagttctaggttttcatcctctcagctccaaattcaacaggaaaagtaacttattattttgttgcttaagcataatccccaagattagtggtgattgtatttcactggtggggcttggggcaggtatgcactcttgaagcaattgctataaccagggaaacgcggtatttctatgtgcttgccttagctcgcatgtcctccctgggagtctgttccaaggaatcacagagacagataatgaggaagggatgattttcagaggaatatgaggagtgagtgctagatgacagaaatagtgcagcttccttgcttactttctgtccctctcttaaacttctctaatacggattatcagtgacacgtataatattctgctttgtattatagtcacttatttatttattcatttgccagacatttagtgccagtgatgttgcagggattgtgcaagaggatgggaatagaaagataaaaaagacacatcagttgcccttggggaattcacaatacaatatgcataatttgctccccagctggattgtaaagcttaggagatgtcagaaatgttattgtgttcccttatagcacgtaacattatatttcttataaaacagactctcaatagacagtataaaatgtgtgcatgcagtttattaaaacatattctcattacttcagacttgctaggtgaatcaatcttaatttgtggccatcttgtttgtactcatacctgaaaaccattcccactgtagctttattgttttcccttgtccctgcaggaagtgtactacctccctttcgggcacctatggaatttttccagcactcatctcatcctgtcttttatcacagttacttattggtttgtcttggctcctgcacgagaattgaacattcttgagagcagtgaattgcttaataaatgtttgctgatttgaatctgtcgaatggtggaagtgtcctggggactagtttcaatatttttttcattgtctatttatattttatttgttcattagactttgttcagattttcccttaagttcccatttatgcttaataggcagatttgggttttgctcttcattagtcttccatgtgcacatttggtactggtagtattttaatacttttcacacagtcagagggttggtattgataatcagtgacgacttctatctctacaaagctgaactacccttaggacgggtagcattattctagaaagaaaatgaacttcactgacaggctgggtgttttctattatctgatctgaagttaatatcccttgtttctattttgcttgcaataaaatccagactttgatttcctgaggtctttgtaatcagtaatgaaaaagcaaacttgatgtgctttgagaaggataagagccaacattgaatactggctgtattccaggcactgtggcttgcatatattatattttaaatcttcacaacagttctatgggggtacgtactattattatccctgtattccaggagacaagactgaggcctaggaagatgaaggaacttgcccagagccacatagctagtcagtggtagaactgatccttaacctaggtgtctgtaattttagagttcatgtttttagtacctggaaagcacagaggcatttgaaaattccagattcataccttggcgtcccacaccaccacaaagatcaatagcattctcattcaggtaatactttaaacattgctggccgctttcctcacccgtacacctaagaaggcaattttgggtattttagaaatctctttggtaataacaacagcagactatagacagccatcacattacctttaatacatctaagtccccttgatccttcaacacaacaaaagccattgtctataatacatgcaaatgtgcattttcaactgtgctaatacattttatcactcatttgaaatgtttattggggtctataaaaaaactatgtgcattatgaaaagttaaagtaagtaaaagcacaaatgagaaatccaagtaccctagaaaccttacttcttagagaccaacactgttaacagttgggtccacatttatatctttatttagtatatacacagctacatgcataccacgtataattttttaatggttgtatactattccattgtatgaacatgttaaactttgttaactttttttttttttaaactttaattttaagttcaggggtacatgtgcaggactgttttataggtaaactcgtatcatgagggtttgtcgtacagattattttgtcaccaggtgttaagcctagtacctagtagtcatttttcagcctagtacccagtagtcgtttttcctgatcctctccctcctcccatcctccaccttcaagtgcgccccagtgt

SEQ ID NO: 59420 - DNA, 2870 bp, Homo sapiens
ccaccacgccctgctaatttttgtattttcagtagagataggatttcgtcatgttgtcctggctggtctcaaactcctgacctcaagtgatccgcctcccaatgtgctgggatcctgttgaatatttttaatgcagcttaaatttgtataagccttcaattttgatttgtaatgaagacaggagcagaaatatattttgtggtgccaccaagagagttcagcaaatccactgtaagttgtgtgagtacatggctcacctatcaacaatagctctttctaaacttgaaggtgagaactttagtaattttgctttgtcatggttgaacgctgccattagacatcaagagcaaattaaagaggagagttgggctgttaaatatcatactcatttattaagataagataatgactgaaaattgtaggacaagctaactttgtgtactttttgaagaaaggaaccttaaaatgtttttttattccttcatgttagattttgtaattaagaattctgtggtaattaatacaaagtctgactttagttagaatgtttctctaaatatgactatggaagcccatgtgttatttcaaataatcttcttcaaatagctatatttcctttatcatccttatttgtttatttgacatggtgtcacgttatccctctttaatattcatttttaagcagatttatgagaaaataccccttatctgtacattataaaatggatgcagcctgaattgaccattaacttttttttctaatgtaacaaagctgtgaaattagcatgattcctaatattttatgttaaaaagatgatttgtgttacattgaagataacaaggaagctcttctgctgaggcttgtgttgaaatgagattttctataattctattaaattgttgttggagttcaacatttttctggaagcgattctgtatcttcttgtaagattttagaataaaatatgaaacagaatctttaatcattgtttcactgaatgaggtctgtgctcctcaaaatgagtgctccgaaccctttcggattcagcattactgtgagagatttaggacaccttctcatgtaagcttatggcaacctcaggaaaagggacttatgttaggcaatagattgtaaagtaacacatgctccttattccaagtaatcgtatgagaatttagcttctatcttctgtgcctgttgcagggtgtaagaccaagcaggtatatgttagttgttcctggtgggctgtagcaagcaaggctgctcttaatgatggagtgcaggaacataaaaaatctcaacaaagatgaaagtttcatgtctcattggtagtttttaaaaacaaacaagccgcagcccacagaggtttatcatggggcttttcctctttacatatgaagttattaatttgtagcctatggctcagaaagcagcagaggcattgacagaacattaagttcaaacttaatgtcaagagttgtacagcgattaggctgcagggggtgtattttaaagataatggtgactgtgtggctaatgggataaatgcttgggataaagagaaaactccaaactctagcagtgctagtaagtggattttcatgctttgggcttgctttacttggctttgaggctaaacatcaaaatctttatgatacctttttcctctctattttttttcctgcttatgtattcattgaagtctatttttatcatattttcagttgctggtcatttactaatgttcagagaaatatgtacttttatggcatatgtacacattacattgaaagtctttcatgtttattatttttacaatgtgctttgaactagttttttaaactgaaataaatttctatatgtattatggctatgtccatgggaatgacttcaagttcattatattttgctgcctgctttatacagatttatactatttgttttgtacgtgtgctatataggagttcatgcaaatgtattttgtattatggcttgttttcttagttacgagcatctgaaatatagtatctttatttaatactatcacatacataaaactataatttcatttaccagtaaaattattatgctttgttctctgctaagtatttgttgacccaatatgtattacaaataactttgtgatgttatattttgtttttaggttagtagactatcattgaatatcctgaacttatttccaactggattccagtctaaagtagatgaacacaataattagtttccttctacaaaatcactttaaaatcactctcaatacacgtgttgtagaaagtattttttagtcaattgcctgccctagttctttgtatcactgggatgcatctgtctgcctgtgcatcttctgtgctagcaaacatgatatggacaaactgaatttttgtaattagaatgctattttaaatgtaccagaatgtacacttaaatagaatccaataataatagctgatatttattgagggcttcctatgtgtcaagctgtgttctaagtactttatcgctgtacacatttttctattgctgcataataaattactacagtcagccatctgtatctttgggttcttcatagattcaatcaccacaaataaaatatgtttgaaatgaaaaataacagtacaataaaaataatataaaatttaaaaaagagtataacaactaatttatatagtgtttacattatattaggtattataagtgtatagatttaaagtatacaggaggataggtacaggctatatgcacatagtatgccatgtaatctaagggacttgagcacctgtggattttggtatccacaggggtgctagagtcaatactgagggaggaatgtatgatcttagtggct

SEQ ID NO: 59421 - DNA, 1005 bp, Homo sapiens
gttttagccgggatggtctcgatctcctgacctcatgatccgcccgcctcggcctcccaaagtgctgggactacaggcgtgagccaccgcgcccggccaaattaggggattcttatcaggaagagaaagcagcacgaggagggctcacaaagggaagtgaggctcactagaacagccccaggcataaattgcaggggaaacctgaaatcaactgctcctaacccaaaacaggcacgtccgtcaagcatgaaccagcagcaagaagctccttggcatccagtcacaaggatctaatctcaactccaggtacctcggtagcctatttgcaatggtgactgttaaattctaggaagtcagcactgactcttccacctacagtatcttccattaaaggccaaatcaaatgatctccccactccaaatctccatcttaggtctccgcatcaccattatcgcagtctgctggagaatactgtgagcacctccatgtactgaacgtggaaagcaagatttacaaaaagaaggcagcacagttttgctttcaacgaatcttcaatataactatatttatttatatatttctttcatttatcctaccagacagggcggaaatgaagtcttaattatccttatttctccacatggtgctgtgaatagagtcagtacaaatttgttgaactgaaatttattaaactggttctttctgacctaaaagagccaagtaagaatcccactgctttgttttggccctatttgtccactttttcaatatgccatagaaataaaaggatgacaagtcaaaccaattttcccccacttctttactgcaaacaaataatactaaatattataataatataatactaaatatcacagtgatatagagaatgagggagagagtttcgtcccagaagaaggccctcctagccgactacaacagcaatctctagaaaaaccccctaccaaactgacaaattcaaaacagcaataccatatgatacttaa

SEQ ID NO: 59422 - DNA, 1419 bp, Homo sapiens
gtaaaattacttatgtgcctaagatagtaagattttattatccatctaaaaaatgaaaattacttatgtgcctaagatactaagattttaaaagcttatttgcactaaaagtttttaagaagcatccgttctgtattaatataattagtagaacatcaaaggtgcctccaaaaccaatatgtattttttaattgtgaaaaaaagtttaatactagcaatactaaaaaaaagttaaaaaaagcttaattgttaaaaaaaagtttaattctcatttaattttcatttcacagactaggctacaattctagcaaaacaatgcatttatcaaaatacatgatcacattatgccatggatgggaaaacagaaatataaaatacatgcagacaagaaaataaaagcaggcacttggattatcatactcctccagccagacgaaggtatagtgaactagagagttcaccacaaacaggaatagaataaccaaaaactccaatacatcaaacatgtcagaactgaatggctgcctgaaaatgaatgcccctgaaaacactatccttacttcctctgtttaccaggtagaaagtttgaggattctattttgtttctcatactctgtgtctactgtggtcaatcaaaaaaatctactgaagttaccgggctttgaaattacattcagaaaaaagcaagctggactgtgggataggtatttatcaatgaaatgctcccaaggacactaatgaggttttagaaaagaggaagccacttgctgagacattgccttcacggccaagagtctttactagccaattccatagcactcttcctatgaattataatttagaaaggcagatcccacccaattctagaaatataagttcaaataggccctaagaatctggtgaactccatttaaaaaatgatttgtctctgcaaaagaaaaaagaaaaagatttaactgactgcaaatgagctttactttatggaataccagacactacatgaggaaatctaggtttttaagacagagcaatgagcttgccaaaataaatcttcttccacaaaaaggttcataatagaaccctgttaaactctaaattttcctagttaatataacctggtatattatttataaacattataagcaatgttttcaggaaaaaaatttgctgtacaatacagcactgaattctatgtttatcattttgctataaagataattagaagtaattagtaacttggcagctccaatgaacaagacctgcttttttcagaaaccattaatcctttgattcttcatagaggacaagagaaatcggaggcaagtctacctgaaaagagagaatgacacgaatagactggaagaaaagagctccaaaatgtctggaggtgagacactgacattcattttcagcagccat

SEQ ID NO: 59423 - DNA, 1597 bp, Homo sapiens
gactgcaagcagcttgagggtcgtaaccattttcctagcacctggtgtagtgacaagtagattgcggagattcagtgagtgtatgcttttcctccatggcttgcattatgctttcagtccttcccattgttgcattgcctttatgcctccattccttcacgttgcattgtcacttacattacgttttagctccttcccattgttgcattgccagtgtgtttcttcaagccaccaaagcttgacgatgcctgccgcactgttgctatgacattagcaaactaatgtccatagggtatttctctagatatagatgtctgtagggtatttttctagatagggaattatttttgaaaggctgggtatttttgaaccaattcgtaaagctgctcatatacacgaaggagggtcatgaaagcaaatgacaattcagcaaggcctagttatggctggggtgtgtgtgcgtgtgtgtgcgcgcgtgcgcgtgtgtgtatgcgtgtcacgcgtgtgcgtgtgcgtgtgagtgttcaaggagggtggttcctaaggctaatgagcttctacctgtaagttattctgatttggtagaaatgtagctttgaataataatcattagcagtagctgagtgggcttgtgctttgtcaacactgctgagtttgataattagatgattacaaggatgtgatgacattttgtaaatcctttcctggagatatctatatgagtttgctaatcattatggcaggcttctagcttttctttagagcaatgatgatgctacaaagattttttttgtgctgaaaatattttccttgtatcagtaagatttggatgatatttgtcactttctgccacctcagagtcagcaaggagaatcttgcaaagtatttagcattttgtggaaacaagacattatgttctgtatagttaaaaattatcttttagtttattggagtggaagggcattttctccatgacaaggaaggtttaaacttgcatcatcttggtatttaaaagttcttttgaaaacaactcatgttttcaattacaaaataatatagagctctcagtcagtgtgatcattctatagagtgtgatcattccataggtcacatatttactaacagtcttcagtattagttgagtaggctctttaaagccttactgttaggccaggtgtggtgggtcacgcctgtaatcccagcactttgggaggccgaggtgggtggatcacgaggtcaggagttcgagaccagcctggccaacatggtgaaaccccgtctctactaaaaatacaaaagtcagccaggcgtggtggcacatgcctgtagacccagctactcgggagactgagacaggagaattgcttgaacttgggaggcagaggttgcagtgagccaagatcgcgccactgcactccagcctgggtgacagaggtagactccctctcagaaaaaaaaaaaaaaaaaaaaaaaagccttactctttgtcctttcccctaaaactcaggattccttttcttcttccaagctttgctcgtacagtttcttcagctctgcctggcaaatttcgtttaaacatggtgccttttctaggaaa

SEQ ID NO: 59424 - DNA, 4319 bp, Homo sapiens
caaaaaaaaaaaaaaaaaaaaccaaaacaacaaaaattagctgggcgtggtggctcatgcctgtaatcccagctactcagaatgctgaggcatgagactcccttgaacctgggagggggaggttgcagcgagctgagattgtgccattgcactccagcctgggcgacaagagtgaaactctctcaaaaaaaaaaaaaaaaacccatgaagacagggtcttagtatgttgcccaggctgacctcaaactcctgggctcaagcaatcttcctgcctcagtctcctgagtagctgagactacagacatgtgctatcatgcttttggttcttaattaaaggtgttatattttgttattttgttttgaaatgaaacataaagataaaattttctattagaaatattgtggttatgtaactcaggttcaaagtttttgtttgatttttcttagattgtggattattgccctcaaactttaaattatgatttggctgtttctattgcaaataagaaggacctttcatgggaggaaaaaacaaatatgttttagagatataatattaagagtgatgaaaaactgtgataaactgctctattaaattttgtaataggcagaaacagagtgttttttttaggggcaaaaatcagacattgccatttgatgtggaaaataagatgacttggtatatcataaaggtaagcaggcgagtttggggatggcttcgccaaaccagattcttttaaagcatcttaatcaaagaggaagagtcttccttctatcttcaaaagttgattttcattacagtttctgtgtttagtacctaatgttacatgtttaaagagacatattcaaataaatgtctatttacaaagcatgatgaagaaaggacaaaaatactgttttattatctagaagagctttataaccagagcgttccaacaacgtatcagcgtgtcctggtacagctggaagctacttcttcctggaagagtttcactgaggattagaattacgtgtcaggatgggttgtctctataaggtaggcctagatgatatgtaaactgctctttgaatttgtgagtttgtgatatttctggtgcatcatggaagggtgtagtttatcttccctcgccctctctattgaggtcctgcttattcttaaggtttctactcagatctttggtgaaatctacttggttaggattgagctttcccttttgtaaaatcagtagtcactgttattttctatgccaagcatttgacaactgtgactatcccctactttctaagttgtctgtccttttttcttaggttcccacttagactataaatttcatgaaaataggtcatgtgtccccattttcttccttaagcaaaataaaattatacaactttagggctgaagagatcacagaaactctctgataccatagccttcccattttttctcctctccctttctccagaatacatcagttgtggcttagagagggggaagtagtcacccagtgacaggaagaaagctagaactgaagtcttctgagttctgtctaatgccctttctgttagttgatgcccaagtgctcaagaacttagctgctaagttgaagtgaaaatgtgatacagcaaacagaagttaaattacagacaacctttcagcaatatctgtttcttatattgaagcctatctgtgtaaaggcagaaaattaaaaataagttacagaatagtatcgttcgacatttgaaactagattagcttgtctaatgatgagtttcaattcagagattctgtatgtccgtgtttaaatgattttggcttcccaaaccagctgtctgccttcccttcagataactcagttataaacagaactgctgtattacatatttgagtatgtggatttgtcttgtatttcccattttttggcccatactttccaggaagcaaatgagtattagacactggtacctgtcttacatcaacagatcaagggacaattggcggattgatcacaagtttcctagtgccgcactcctttgttttaattttttattctaccaagtactttaatgtgtactttcacattatcttctatagtagccctctgagttatgggtatcgtgcctttgtagatgagaaagtgcgtaaggtcacactatatttaagtaaaagagacagagctttaacatggctttcttcattccagagttcttattttctgcattccaccatactgcattctgtgttatattagttctctgttagagccctaattatggaccattataagccttagcaaaatccagaatgatggaaataagaatatttgataatattctctaatactaaagtattgctctaggcaaaactgtaaattatttaatcaggatttctgctatttttatccaggtggtacatcatgccttacatacctctgtccttcatatattcaaatctaaataaatgctggtagtttgagtgggaggagggtggattattcatgtcaaatgattctgtgctgatgttgccacaactgtatgtgaaaataaagataattgacatggaatttgcatggagttaaggtaccttttgaaatctgcattctacaatcttttagtactgcatattaaaacattaattattcaggagccctccagattgagtctttatcattttcaagccattattgggtgtgcttttccctatgattctatagatacatgcatttatagatttaaacattttctatgctataaactatatatgcagtgtataagaaaatactctttggccttattaacacctctttttcttttagtgatatttatttgaccttaacatttatacttgatattaatgacataggcaaataattttaaaatgttgtttttgaataaatacttgtcaagtaaaagaaaagcattagagctacatgtgaccagacttggcagtcatgggcgctatttcaagttttgattgacatttggttttcgttttgatgcttataggaaaaatttatcaagacactgtttatgcagagctgtttaattaggatcacctgaattaggatcagaattaaaaatatccttaatagaatttcctttccttccccgatgggtggcagcattttcttcagccaatacagcatctgcagaggcgtgtgtgacttgctggttggtgtcctagggtctgtttttcctccttcacaatcattcagtggctgtgggtctttcaggttagagcagaagttggtaaggtatattgtttgggggcctcaaaagtcttctgtaataagaagtgactatactgtgggttttcttgtttcccatttggccaagattttatggaacaatacccactttgcccaggtgcagtggctcacacatgtaatcccagtcctttgggaggccgaggtgggcagatcgcttgagctcaggagttggagaccagcctgggcaacatgacaaaacccatctctacaaaaaatacaaaaattgtggtggctcatgcctgtggtcccagctacttgggaggctgaggtgggaggatcgctcgagcctgggaggtagaggttgcagtgagccgagaacgtgccactgcattgcagcctgggtaatagagcgagactcggtctcaaaaaaacgaaaaacaaacaaaccaaaaccaacaatacccacttaaatctcaaggtatgcagatttgaggtgtgatagtgtttaaccttcggaagtcttttaacctgctcatcattgtccttctgcctgtctcaccagtttgttttaaaagttatttgctgatttgtctctggttacctgttgaatgacaatatggtgctgccatggctttacttgcctgcctgtgtttctgagctcatcccatattttctatataccaacaaaaatcttcatctatgtgacctggttttacttcagattcgtcgtgtgcagtgcctaaactctgccttttcttccgcacagcatactgcttctccacctttgctgtcttctctcttgacgttgcaatctcctgagccagccgtgccaggaatatcaggaatacctctgattcttcccccaaacttctgtatgccctgcttatgctgcttttaaagatctcttgactctattgttttatttttatattgttttgtcactgtcccagttattattaaaatccttccgatctcacctaaatggcctctaactcatatccttgcctctcactgtttccctgagtctcaattcatttttatattttgccattagagataattgaaaaaaaacccagatttgatcatttaatctcttgcaaaaagatgtctgtt

SEQ ID NO: 59425 - DNA, 1107 bp, Homo sapiens
ctcctaccttggcctcccagagggctaggatgacagacatgagccactacagctggcccagataatgtatttttaaaaattaatacataatataaatatatgagacttgacaaaaagaaacactaatatcatgataagattcaagaaatctagtaattacttgatagctctgactcatagagactgccattatactaagttcttcaaggaatgatgaataactatattaattattccaggtttgaagaacatttttctctaaaagctcacattgtaaatatttaggctttccaggcaggagacaaaagtgagtcacaactgcctcatgacaatttgtagtgtgtaaagagagtgctacttatggtctctgtggtagctgcttctttaaaaaaattattttaaattggcaaataaaaattatatatatcatgtacaacatgattttttgaaatacgtatatattgtggagtggctaaatggagcaaattaacatatgcattacctcacatgcttatcgtggcaactcaactctgccattgtagcctgaaaggccccgtgtacaatacgtgaatgaatgggtgtggctgtataccaaagaaacattgacactgaacactgatttttcatgtaattttcacatattcaaaaatactctttctatttctccccaaccatttaaaaatgtaagaaaacatccttagcttgcagactgagcaggtggtgggccagatttggcctctgggcctttatttgccaacccctgaattaacatttgtaagctggaaggttttttgcacacaattggaaataggatgtgctgggagaaaattctctacttaaaaaaggatcggaaatactttgttattttctaaaaagccattggttctgtcggtttacattgctggtcacatttctgagcacagtacacacacagtaattgttttttgagtcaatttttgttttactctaaagccaatttaattcaataatttaaaaatgttttatctcaatggtatagtaagaaaactgcaattattttactaaagagagaaagaaattataaaatagaaaaagcagggactttattgtcttaatattttaaactgt

SEQ ID NO: 59426 - DNA, 2613 bp, Homo sapiens
gagaagaaattttgcaaacaggcaatggtgtcttttcttgaggcttagtttcagtcatagccattgtggacagaaatcatgtactgttgccaacattcttagaaactccatggtatcaaagtagtttcttggaatttcacgtgggaaatgtaaaagtaggcttcccttgatgatggaaatctttctcacacatgcatcttaaaaggatggaattaagcgtgcttcagttgtcatgttctaattaattgaaacgccatggaatgtattgtatttctctattctatcccttaaaatgtccattgataattattggcaatggttattgatagtctcaacgtaatttcagtagaatttgttttgagattttttttatgcacataaaagatttctttagggattattgtacagagttctagaaaaatatataatttttttttctgggcttataactttcttttctaaaaatttatttggcagcctgattagaaatgtggtaaaatctgaacaataaaatagaaaatagactagttgcatagaatgtttcaaaaacaggcattagattggcggcaacaagaataaaagtgaccttcctgaccacagaacatatgccattgttagtgtttccggagctctgcaaagtactgctgaactttataatgttgtgcaactgccacagaatttttttgattagaaattccacatctgtttgagaagatgttctctccttctttctttcaaattaataattctcctggtagcatgttatttttgttctttagggcacgtatgtgacctccggagcttgcttttccaaaatctaatttttaattatattagctgtagctggttttgcaatatgtactggttgcatagattggaaagtgagtattttagagggtgtttttggtactatgatatttaaattttacagtttcattctgagtaaattattttttattggaggattcttttttttttaaattggagaagctgtgaaggtgttaaaacgagaatcttaccaattcacaatacgataagaaatcgcgatttaatattttgtggtatgttagaaataaagcaagagaaaatcgtgatactatattcaagattacatgcttgtgtttggccggtatgtgcctttacatttagagtgatcataaataatggatgtgatattctgctataacctccctcataattttagtgaagtatataaatcagcatggagggaaaattactaaatgacttttttgtgtatccttttcatcctctggtgaacagtgtacctcaataaaaagcgagaacaaagttgatcatgttatattcagcttttaagcttaaattttcagttctgttaaccatctcattctggatacactggtgctctgttacttcattgttgttggtgggctaatttgtgggaagagtattacctctgttgttttgaaaggtcaggagtgtgtatatgtttgtcacttgagggtttcaagttcatgtaggaccagattttagagccttttttgttgatgagctctgttgggtttcactgctgtagcctgctataaggtagtaaagaaagcaatcttttgaattaataaagtgatggattatctaattacaaagttgatgtgaaatggcagtatgataactttgactgcattactaaatgatcccagtgactgatcagatgtgcctgggttccattaaggaaaaatatgccattaaatatttaacactaaaagcgagcaggcacaccaggattgctaacctccagtcaccggggtgcttgtgtgtttacgtgtggtggtgactgctacatgccacatctctctactctgctcacaacagctgctagaatacttagctgttgggattatacttctcttctggtgttaagtaaagcaggcaaacagctaggatgcttaactgcatgcagatcctggcattctaattatgaaacggtgtcatgcatctatgatttatatatgttgtctttattacaacagattgaatctcgaagttgattcaggagacaattattctcagaaatatttctctaccttcaaataaagtgatgtttgtaggacacttgggctttcaaagaaaacaactcattgtttggatttttaatgatgatatttgtttatcgtgttcttcattcgtagccatttggttaaatatttcttttcacttatgtgttaataacctatgatgagttggtgtatatttatcatagttaaaaaccagatgccagctaaacttctgaagttgggaaggataattagtaagttcttaatcagcatttttgtttatacccgtgttggtcaaggttaattgcttatgtaaggctaatgctttgcttgaaagtattgatggataaatgtgtttgtcaagccttgttgctttatctatttaagtgtataacttgccattaatgcagacagaggtgatattttttaaatgtctgtatgacattatgaaatggcaaaggttactgtcattgctttggcttttcctttagtgacaacaatctactggaatactgtgtctctctactagaatgcaattacgtggagccaggaattacatcttatttattttgaattcctagca

SEQ ID NO: 59427 - DNA, 1449 bp, Homo sapiens
gaaagggctcagggaggatgagaaagttcttaatcccgagagcatatttcgtcgtctggtgagctgatggctttttctaatggaagctcatgattattgcctgaaaagttggcagtttgtattttgaacactggagtttctggcggaaaaatggtgtgtctttcctgtcggaccgggttctcaatgctgaacgtgcatctgctgcgtaagccttaattttacctggaaaatttcttctgttacttgtaattttcccggtcatattcccagatattcctccttttcaccccacttcttagcaccagtgttagtctgactctgactcttagcaccagtgttaatacacacacaccctaatagcaattggagtttgattgtggagttttctatatagatatatcctgtccacttatgaatttgttgcctggctgtaaaaactgagtaacatgagccataggaaggaggaatttttctaggggtgggtgtcaaggaggacctcatatcagaagtggaaactgacgtaaatttcaaaagcgaggctggtgttgggaaacagtgatatacagtggtctagaaatgctgttggggagtgagggtgttgattcctccaacctcctgagggaaatatatcaacctcctccggagaaggttttcaaaggaagttgttacctgtggaatacagatttcagttatatttagtaattacagtagagttagaataagagcttgatgtttaaaatgtttgttttgcactaaatgtaatagaaagtgagggtagggatactcccagaatttctctagaggaggggatgctgagtgataatctgttggatggagaggctagagcaaattacttgcagctttatttggatagttttgttttttttaaaaaacttagattgtatgttccctggggagtgtgtggctgaacggagataaaagtgtaaagtgtgagcaatgaaaggtgttaatttccacagacagcaatgaaggtgttgaaaggataggaagtgcaccggggatatacagatgaacacaggagatgtgattatttatatgcatataaaaaataaaggccaatttcatctctgctggctctttttcacattgtttagagaagagaagatgtatgtctccatctctacaagctgtttctcctctctaccacacacttttttttttttttaaatctccacttccattttcaaacaaaatttcctttgagatttttttccccctctttgggaatagggtctcaccctgttgcccaggctggagtgcagtagcgtgatctcggctcactgcacctctgcctcctggctttcaagttgagtcttgtgcctcagcctcctgagtagctgggattacaggcatgcgccaccacaccgggctaatttttgtatttttagtagagatgggcttttgtcatgttggccaggctggtctcaa

SEQ ID NO: 59428 - DNA, 1077 bp, Homo sapiens
aggcgcgaactgccacgcccggcctcctgaagtattttttttttttttaaatgattccgagggtttatcttggcctagggaggaagagtgcgatgattgatttttttttttcttcactagcccataggcatgaaatgattgcttcttgatatttaccctgggatagggatgacagaaacaccccctcactgctatggatctgctgtcctcgctttctcacattgtgtgtttgcatttgttttaatgttgatcacaatttaataacaagtaaaactttacttttgacaattttgccacttattttgtaatttgtaagcacacgtttgaagatatatttatgccattaatattttaaggcatgttttaaaatttactgttttctgaaaaattaaatgtaattggtttgattgctggagatttattccagtttttctcaaatgtatttttattctgtatggtacatttttatgattttctgattaatgtcatcttagcattatattctggttatctataatttaaaattgatttcaaaatttactgatttcttacagtgcatctgaaaactttctcatctatttcatatgcttctgaaaattataacctgtagtagtatcgtgtgccgtgcccaaggctgttttcatgttcaacactataaacacgaacacctactgaaagataaaaatataccttatgatgattattacctcattcctagtgttaagtttgtggctattctgtggtaattatttctattgttggaaaatgttccagtgataattactgatgttattaatatccatgaaaaatattttaaaatactttctgttgctacatgtaaaatgtgaattactatcctagttcttctttctttctgaagattttagtctcatgtattttataatgaaattatctccatgttgtatagggggaaaattctgttgctatgattaagtgtaccaatttttaatataatgcttacccttctccccacataatatttgttattgctagaaaatacacagttttgagatttttgggcataattggccttagtgtgtcacttctgcattaaaa

SEQ ID NO: 59429 - DNA, 1048 bp, Homo sapiens
tttactgacttaataagaactgataattgtttgtatgtgtgtacagaatgatgtagaaaatctggtaacacacaatctcagtgattttggttttaatgctttttcatatatgtgcgtacttatgttttgataggtgtttgatcttacattgcagacaaaatttggcagaatttaattgataacatatgcatcatatttagttgtcaaaagataaaacaatatgtatttgctctttgtcaaaatccaatgtaaggtaggaaatatctggtttaacagccagcattgaacacttgaaaattatccttcagaagtttactttgagattgtgctatttattttctctttaaaaaagatattaacaaactgactgaagataagaaagagggcctcaggcaactcgtaatgacatttcaacatttcatgagagaagaaatacaggatgcctctcagctgccacctgcctttgacctttttgaagcctttgcaaaagtaagtgttaagtttgctctttgctaattccatacatcaaccatttgctccttattttgttgttagttacaaaaatgtcgagaatcttgacaggaaattcaagacccttaatgccttatattacttccttatcatagtgagtagagcatgagagaatgtattgtgtgcattgagaagggtatgaatttttctgtttgattaatattcttgttattgcctgagtatgttcattgtgaattctcaaagtgtacccttggaagaaagagtatgctttcttttctcagaagaaaatagcatatcccattattttttgtgaatggacttgtttgccgttgcattgcattcattgagttttatggtggttgtttaagcatagagcctgtctttgaaatgaaaaatttattgaaatccatttcttttcttttcttttttgtttttagacagagtctcgttctgtcacccaggcttgagtgtagtggtgcgatctcggctcactgcaatctccgcctcccagaatcaagcgagtctcatgcctcagcattctgagtagctgggatta

SEQ ID NO: 59430 - DNA, 1034 bp, Homo sapiens
atgtagcacgaattagaacgtacatgaatttgaattttacataaatgtaaaaatgtaaaatgaattttacctatgagccatatatttttggaaccctgcagtagatgatgattgacttactttgggggcactgttgttattattgtctcatattataggttcctcacttaacaggagaccgtaattcccatttgcccaagaaatggtcatttattcacgttctttttttcctcttgtcaaccttatgccctaagaccattttcatggcacattccttctttatatttagctctattcatctaatttgattaagactagtgagaagatgctcttgctctacatttgatacagcattcagtaagcttttaaagtgagaagtctcatatctatcactaatctctagtgtgctctaaagagatttttttgcaagatcttaatcaatacctgtcagtcaactgtagctgttagacaacctgcttagccttccagttttcttttcccagattccagcttttcagatctgcctgcatctgacaatctgtaattcaatattggactacatttcaaggataaaggaggaggcattatttatttgctatcaagcaaactggatgtaaatggaaaactgtcgagtatcttttatttcctgcaagttgcgtggcagctcaactatcctaagttttgcccataggaaacctctgtagatgattgtttgtgagtggagtaagtcctgaatatgtaggaaaaaaatcactgtgatatttcacgtagaagatgtttagttaatattatatgaaactgttgaataagtgggctcaaaaaattcattttcttttctatatttttaaagacagcttcttcatccttaatgaccaaatagctgaggaaaatactgttgcaaattttcaatgattgtaagcctaacccaagcaggtttcaaacctattttgacataattcagatatttgttaggaatggatgttacagactcagaattttatcattggaagactgccttgcagatctttgaatct

SEQ ID NO: 59431 - DNA, 1047 bp, Homo sapiens
ctttctaattaaaataggataggaaatttcaaaacaataatattatttctacctcattttttaaacaaaagttttgtcgaagctagaaagatccctgatttatgtaagattgttaccaacaagagtaactaaaagcaaaaagtgaaacattaatactgctttttatacagtattcgttccagaaagcttggtttatggtgatgttctaggtgttttattcacgtgaagctcagctatttgtttctaggaacttcagattaaacagagtacatagagaagcgacagattatcatattatttgacacaagtctaggcaaacttgctttctaatctcaatgacctaaacagtttattaataaaacacttaataaacagtttacttaataaaacatttttttcccctgttttgtgactatttttcctctagtgccacatcatccttttgtagtacactcagggaagagaaaagccattatctgattagaatgagtagcaggagtttggtgggtgggtatgtcattttgattacctgtagtgcatgtgtttttactacatatattagctgtttactgtggcatcaataacaatgtcactgtcagatatactgtggaaggtaacaggaaaacagctagcaagatgaaggatatatgtaataacagctagagtatgtgtttgtgtgtgtggagggggagttaaagattggccagaacatatgcgtttaaactgctgtgtttatctcaaccttaaaatacaacattaaacattgtaattattgtggatacccacaaaactacgcaaaattaaatgacatactgaactgtgaacagtgatgaacagaacgcaaaagcacttggaatggaaattgaaacagaggatgtaaatctgtagtataaaatccataatatgtataccccagggggacatgattttggttcactagcttagcatttgatgtgtgggaccatggcatcaagttgtctgagagaggctattggggtattgcaggtgtaacatgtaccttgtgcccacaggatggtgtcagtgcta

SEQ ID NO: 59432 - DNA, 1011 bp, Homo sapiens
ttattcaagtactctgaattatcttgttagttagtttaccaaacttctgtgtcaacatttattatagcgtttttttggtagctatgggagggaggaggaaatgaaggattgatatttgctaggtgttcatcacctgagcttcttaggtatcttgattctgctcgttattttttaaaatcaagaacaaacattttgtatgtacttgtggatctttatttttagccaacagacatagcctctgattaacttagacaagagagagggaagtgagaaaatctgaggagccaggtctagggaaggcagggttcagagcagccctggggaattcatcttaaagaggtttgctaaagaaagaaccctctcccagttttggctgcggttctcagattggcttggcattctatgctggacagcttttggcgatttggggcctccttgtttacaggtctgttggaagttaagttgccttgtttcctacaataaagatactgatttaattctgctctcagaaccactcatagttttttccacccagtcatattttgaggtttgttattgatgttttccagggtggggagtggtgattaggttttactgtcctactttttttttatggggagagtcgaggagattaaaaaattacatcactgccatcatttccccagaattcccttgtttttaacccgactgaatcttgagtaatattcttatattcctaattttttttttttttttttttttttagacagggtctcactctgttgctcaggctggagtgcagtggtgtgatcacagctcactgtagcctcagtctctcgggctcaagccatcctcccacctcagcctcccaagtagctgggaccacaggcttgtgacaccatgcctggctaattttttaattttttttttttttgtagaaatgagggctcactatgttgcccagactggtcttattcttatcttctttatctacttattctttatcttctagatctatgaatttctgaaaga

SEQ ID NO: 59433 - DNA, 1055 bp, Homo sapiens
tgtaatccagctacttggtaggctgaggcaggaggatatcttaaatctgaggggcagagtttgcagtgagccgagattgcaccactgcactccagcctgggccacagagcaagactgtgtctcaaaaaaaaaaaagtttaaatagagatggggtcttgctgtgttgcccaggctggtcttgaactcatgggctcaagagatactcctgccttggcctcccaaagtgctgagatttagaggtgtgagccaccatgcctgggccttattttttagagtttaatatcatcagcttttttccatttgaaagactctccttggttacctagaaattttattttagctttcataaaaagctttgctttgaaagtgatcactgaattaatctaaggaaatatgagtcttaagatactgtgatgatgttcagctgcctcgaatactttttaaaaagttagtatagtgttcatgatgtatgaacagtttcttttgatttatgagcttcagattttgtgaattttatgaattttgagtgtgtctgaaaaagacagtggtaggaataaagtaatttctttccacatgaatctgtttttcagtgttttccgaagaaaacatatttgtatactgtataattcatagtggttttttttttatttgcctaggataatgaaataaagtacattgggtattttattacatggctgatattgtttctcttggctgctttgtttgttttgttttctcttagaaaaatatctcaagtcttgtatctcaactacagtagcctgaaaggggcaaggaattttctattggaaatggccaggaaactatactgcatcaaaagattgaagtcataaaatagcacaattaatgaccgataccaatcataatattgtttcttaaagttgtcttaacactgaaataattttaaaaaaatggttttggatccagacacagtggcatgtgccggtaatcccagttacttgggaggctcgggcgggaggactgcttgagcccaggagtttgagaccagcctgggcaacctaacaagacaccatttc

SEQ ID NO: 59434 - DNA, 1133 bp, Homo sapiens
atgagcagatcacttgagtccaggagtttgagaccagcctgggcaacatgttgaaaccccatctctgcaaaaaatataaaaattagccaggtgtggtcgtgcacacctgtagtcccagctacttgggaggctgaggtgggaggatgacttgagtctgggaggttgaggttgtagtgagccgtgattgcactattgcacttcagcctgagtgacaaagtaagatcccgtctaaaaaaagaatcatgctgtacctcataaatgtttacaattattatgagtcaatataataagagtaaaaaagtggattagtgtctaagtcaggactgcccaaagcactttctgtaatgaaagaaaggttttatacttgctctgtccaatatggtaatcagccagtagtcacatgtggttattgatcacttgaaatgtggctaatgtgaccgaggaagttgattttcaattttattgaattttcattaactagccaaatgtggccagtattggagagcacaagtctagatcacgtaaagagggcacagagatcaagtaaagaggacgcagagatcaagtgcttgcaggggctttctaaatgctgcagttttgttgacttagttctgtctctttaacttgcaaactcctcactgtactttttagcagaagcaggagtctgcaagcagatatagacataatacatatagatgatgggacttctgtctttttggatatggaggcctcgtggccatgtcttcatgtctgtctttgtctagcaggtgggtgccgtatgtgaagtcttctagtgtgctcacaggttatcagtctcagcatcctgggttcagctgaactgactcaaggaagctctaattattgcggcatatgtttcagttttcaggctggaggaaatgtgttcccttcagtctgaagtcagcacagatgggatcttgagccaaggcctcaacacacaaaaacaaaactgctaacctttcacagctgccgtggtgctgctgacctcagcagcggtggccaccagggtatgtgtaaagcttttataacgaaaagcaaaaaatttccacttacagctatcattgtgattcgaatttaagataggtcaatgaagggtgatatgctggctggcttta

SEQ ID NO: 59435 - DNA, 1105 bp, Homo sapiens
tccctgcaggccccacctccaaccctggggattacaattcagcgtgagatttggtggggacgtatattcaaactatatcatgcatcctcatgaacatagctattgttaaatcattctgttgggaatagcgctgttgtgatttcctcagtaatctttactgataaaaattagctatttactcattttttgcctggtggattttaattctatccgagagtgccgcctaatgattaagggcataggttctggagtcaggttcctggatttgaatataagctggactatttactgtgtgactttgggcaacctgactttctttctgtgcccaattttctcatttgtaaaatgaagctaaatttggtacctacgtcatagggttattataaagactaaatgagatacttagcacagttcttggtatgaagttagcactaattataattactgtagagtggtagcatgatgtaatagaattagacaaattgggttgtaatcctagcactggttgagggtgagggtggaggtgtctatacatgaccttgagcaaactgtttaacctctctgccttgatttcttcaacctataaattatgggtaaccttccttatcaggtaattaggaagatctggtacataccaacatttaaaaactgctactatattaatctcttctccctttcttcccacttctttttttttttttttttgagacggagtctcactcttgttgctgaggctggagtgcaatggtgcgatctcggctcacagcaacctccgcctcccgagttcaagccattctcctgcatcagcctcccaagtagctgggattacaggcaccggccaccacacccagctaattttttgtacttttagtagagatggagtttcacaatgttggccaggctggtcttgaactcctgacctcatgatccgcctgcctcggctgcccaaagtgtctctccacttcttacttcaatttaagaatgctgcaaattcaggaagctttttagtttactgaaaaaaaaaaatcaggtagtattctttttaacacattaaatagttgtcattcaatatgttttattggaatctatttttttcaatggctga

SEQ ID NO: 59436 - DNA, 1051 bp, Homo sapiens
tgtctggtcttggcaatgacttattatagattcttttcttctcaggttaatctttcctggtaatttaatgagatttctggggaggaggtttaagagaattgtatttcttaaggaaaaagtttccttagtctgataaggaaattccagagagagcccctctctgtgctttgggagttggagagatacaggagaaggttacagagtccttggttctgaggcagcttctaaggtcttctgtttttttaaaattcggaagtgcccagcatatgaaagcaccatacttcaggatatcattttctgagccccaataatagtcatagtaattttctgctgaaaacgtttgtatgattttcaatgcaaaaatgaattctttattttccccctttactttcattttatatgaccttagtaaaagttttttttttttttttttacttttcccagtggacactgttctaattgtgggcttgttgattcatgctgatgaatagtaatttcttgcaagttattctggcacatagggttcatttttcatgtgatctgcataaaaataatggtggtgaatactaatcaagtaagaatgcagatttgaatactaagcttcaaagaaaaaaacttaattagaacctttaagtcacagtagtggtccctctgcagggaaagtatgctttattagttctgtaatgtaaaacttttttcttgttccaacctataaattgattagtgacaccgcatgggtaagaaattgggagtgggttgggcagaactgctgtctcatatgatgttcttaaggattgtttattattaccagtagcatagtttaaactaaaactatttaccccaggataaaaatttatttgaacagttaaatcaagtttatttctcaaaaaatttatttgtgaatgcattgtactgtatgcaacataggagatattaattacttttaatggcaaaacccacagttccttttgcaccaacctaatacaaagaatataagttctctaagaacttccagtctagtgtacttacgtgtgggagtttctacgtacat

SEQ ID NO: 59437 - DNA, 1097 bp, Homo sapiens
taattcatgagcatggaatgtttttccacttgtttgtgacatctctgatttctttcagcagtgttttgtagttttccttgtagagatcttttacctctttgattagatgtattcctagatattggtgtgtgtgtctattgtaagtgagattgtgatcttaatttgaccctcagcttgaatgttataggggtatagaaatgctgatttttgtataccaattttgtatcctgaaactttactgaagtcatttatcagttccaggagtcttttggcagagtctttagggttttataggtatagaatcatattgtctgcaaagagagagagtttgacttcttttcctgtttggatgccttttatttcttcctcttgcctgattgctctggctaggacttccagaaatgcattcttaagcttatctattgatctaggatagatccattgaacctgctttggccaaaaattaagtatcaacttaaccttgattatttcttatcatattagtaattaatttgagggagtgatcatgataattcaaacactgaaaacttattaaaaaaagctttcggaatgttttgtaatgatgagtgtgactgtgaagtatacagcaagatcactgtaaaatagaaggctgcctttagagtaggaatatgctttagataatagtctgccatcagttaggcagtcaagaccaagcgagcgagtggagtcttacagtctgttacacagagaagtcttccagtatatttaaaactcaacctcacatcgtgaactgaagattttcttttaaagtgaacatgagtaaactcattaaagagaatctcctgctgtttcttgacactgtgcagattacatattttggatttttgataaactttatttcctggatgatctctctttctgggtgccctctaattaacttttataaagcaccaaacaccacctctccacctcctttaaaatctttttgtgagaacaagtggaatgattaactttctaattgatgtatggtggtgtagctatctaaaatactttcattaaagcaacttaattttttaaagatagccaagttaaatatgtaatcactctctagagta

SEQ ID NO: 59438 - DNA, 1071 bp, Homo sapiens
gttacctacgatctggcctttgaccatttgtttatttagtctctcagtagatatgttggggatgggtattccctgccaacaaattgattgtataacatattcaaagttctgttttcataggataatgacagttgacttttggaaagggaagagtagaggatgaggagaagagcatttattgaacagcagttttatcttagtctctgtgcgttggttctcaaagcgtggtctccagaatagtggcttcagcatcatgtattgtgatcatgtaagagattatgttattatttttttttgagacggagtctcgctctgtttccctagctggagtgcaatggcgcgatcttggctcaatgccgcctctgccttccgggttcaagcaattctcctgcctcagcctcccgagtagttggcattacaggcatgcgccaccacgcctggctaatttgattatgttattcttaataggaatcatatgccaaaggtcttagggatgagttaaaatgtatgcaacttattttcaaatggatgagcaaaagaacgtacagatacacatatgtagagaggaagcagacgtggaaagttgttaacaaatgttgaatctggggaagggtatattagtgcttgttgtattttgatctcctcacctcttctatttgaaaaaagtgggaggaaagcaattctcttaaaaagctggaagtgaaacagtagagctcagtaatccaagtgatgattacatggcaattaattccccagaggagatggggctgcttctaactgggagaaggtgtagaatgaagaactgactaagcatagagctgacctgcctactgtgatttatggtgtgtgtgtcctgctagctctccttatgtggatacttctgtagactataagactgaaaaagaaatattggaaagacaatcatttcttgtattgagataatcttttaagactggtgagacaacttcaggtgcgtggcctctgaatcagtcagtttctgtctcgtgtatttgtgagagaaacttctggaaattttgttttcaaatgtcaaatatatttcagtattttcat

SEQ ID NO: 59439 - DNA, 1080 bp, Homo sapiens
tcaagtgtattgcatacacctgatccaggtaggtggcgaaacggtgggcctttttaaggctggtttgctttcaaccctgtggcttttacttaggtgcctgaggagcattttaagtcagttcataccttttgaatacctcgcttttggtaaatttggagtttatgttcactgataaaccagcagggttgtaattttttattcaaataggaactatctacttatttttatttctagttattttaccttttttgtcagtagtgtaaatagcatctttttatagtatattttctaagtttttattgtttacatatagaagcatcgtagttttatgtgattttgtaatccaccactgtactaaattctcacttataacaatgtttcaacttttttctcccttgaattttgcaaatgtgtcatatcatctgcatatatggatacttccgcctccttcagtccgatatcgtgtttcatatagcatagtggtgagaagcaccggctctggaactatgactgcttgtgtgttaagcctgtttctactaacttgctagctatgtgactttgcgcaagctacttatgttctctgtgccttgctctctccctctgtaaaatgagataataatagtactgccttattattatgacgattatatgaattaaatgatttagtatttgtaaagtgttcagaacagtatctgacatatagtaagcactgtaaaaatgtgtggtaaataaataaaactcacataagattttttttcccttgcattggctagtatggtacttctagatgaatattaatctagaagcccaatggtgggctttctttattcctcccagacttcaacagaaatgcttgtgtgtgtcattgttttagtgtttcagtaatgtttccagtaaaacattagaaagttatagactgatatgaaatgtatttttccattatgttaaggaaatagtcatctattgctattttgctaagcgttaaaatcaggaacggtttaaaaatttcatcatgtctatttggcatctacttagatggtcatataacttttcttttttgacctacttatatggttgctt

SEQ ID NO: 59440 - DNA, 1041 bp, Homo sapiens
tagagacggggtttcaccatgttggccaggctggtctggaactcctgacctcatggaccttattttctaagagtcacctgagagtttccaatagaggagtgatgagggagaagatttattattttattttatgtttttattttttctctattcttacccttgaacattcacctctcgaaagatttattcttctgaaatataactctgtggtcagtgttagcctgaagtggccagagatgatcagtatggacatgaattaagatgctgttttaaaagtctatacaagaaaaggaaaaaaagtctactcaagagatggaaggctccatataaggctgtagaagtgaaagcacaaaggagaacttaaattcgatattctttggggaagtagactttacaggaccattttctttaacctagagccagatttggattagtctggtccattcggtgtactaggtggaatttaataaagctaagccctgggtacaccattcccatccccttgtgtcctccttcataactttgatcttgtgtctgcctgcttaatgataccttagccatgtctccagttttccaaccttgcaatgactccttagacctgattatagatatttgatttctctttggattttggctatcactcaccttctggtcccactcatttgtgggttcttcgcatattaaaacaaagcaggacaaagaaacagtcttatggggaaaatataagttataataaatggtgctaaatgcttcaacagaggcatagacagaatactgtggaagctaggtggaaggactgcctaatgctcctggggtcagttagggcagaggagaaaatgctttagcttggtgttggtggatgagtaggtatgttacatgggaaatttgaggtgcctgtgagatattcaggtggagctgaccagtccaggagatggctggagtgatggatctagaaaagcagtgggtctcgaccttgtgtgcctattagggaaactaaacaacaaattcatgccttggtcctattcgtagagatactgattt

SEQ ID NO: 59441 - DNA, 1787 bp, Homo sapiens
gtgatgtgttttcaggtgtaactagtgcagtggtttaggtattttggttgaagtgatgtgtttttaggtgtaactagtgcagtggtttaggtattttggttgaagtgatgtgtttttaggtgtaactagtgcagtggtttaggtattttggttgaagtgatgtgtttttaggtgtaactagtgcaatggtttaggtattttggttgaagtgatgtgtttttaggtgtaactagtgcaatggtttaggtattttggttgaagtgatgtgtttttaggtgtaactagtacaatggtttaggtattttggttgaagtgatgtgtttttaggtgtaactagtgcaatggtttaggtattttggttgaagtgatgtgtttttaggtgtaactagtacaatagtttaggtattttggttgaagtgatatgtttttaggtttcacatctaaggagttgggagtggcatctgttacaattgtgaaaaagcaatggtagatttattaaaatatggaacattatttggaattaaccacaaaatgacttggattgtatttagatttgctctccttttattggaaaggtcccaaaaagcagagaggatgagagaggagaaagaatgtgaatgctcattgctggtcatttttttttcctgtgctatgccatcttaattgttcatagctcttctcttttaagaaagcttatgtgagagccacaattgtatcagagaacattattacataattatacagccttccctttcccttaaatggtcctttaaggctttacatctgcaatagagatagcttagtgaatattcttccaaataagtttttttagtttcatttttagattagccttttgtatttgcgtaaaacagtgcttttggtaaatgttgtgtatttaaggggaagaacaggatacttctgggggctgaggtaagtgttttgatgttagtctcaagacatgttttcatgctataaatgataactggagctaaactgatactctgggtgtcttaatggttgttcttttcattgccattttagtatgactcattatgtaatgctctttaatgttttgcttgaattaatgtgaatgttttatgagaatgcctgatttcaaggacttatcaacagcttaactcttaatgttcaggcacatcaattgaaatatacatatcatcgagggggaagtcatcctttacctttaacttggtcacttaaaaaggaacatttttagaggagatcgtctgggtacagtagaaaattagttttgttgttatgaacagtaaatcctttctaagtctgcagctgggctttgtttaggttcaagagaggggcaatgagctcaacctggtgctgtaaggacatatggtctaagtcagaagaaacctgaaatttgggttaactagtttcatccccttgagagatctgcatataactgtagactctggggaatcagaggctccttggtctgcccttgtctgtggagcagtgtttgcctctttctatccccaactgctggtttcccaggatcttgttggacgtttcccctactgagaagtatatggccttgatttccctgtatctgaaactggagcactttgtgttttttatcgtatcttatgtttataaaacatatggaacttgttaccttagttttattggccaaaattatatgtcttttagttcaggggctggcccttctttagaagaaagcacttgactgagattgcctagctgtttatcccgctgtatgtgcagggaggtgtactggcacctctgagtgagag

SEQ ID NO: 59442 - DNA, 1015 bp, Homo sapiens
ttacattttctttctatagatgaacacattctttgattgtctcctggttgtttagggtggtgctcactctttcaggtactcagaacattgtatcttttatcacatttaccaccttgtattttaactttttttttttccagacagagtcttgctctgttgcccaggctggagtgcagtggtgcaatctcggctcactgcaacctccacctcctgggttcaagtgattctcttgccttagcctcctgagtagctgggacgagtagctgggattacaggtgcgcaccaccatgcctggctaatttttgtattttaagtagagatggggtttggctatattggccaggctggtttcaaactcctggcttcaagtgatccactcgcttggcctcccagagtgctgggattacaggcgtgagctaccatgcccaaccatatttcaactatttgaaccagtaattattaaatactttttttacctcctctggaagctcttggatgcaggtattgtgtcttgtaccgtcaatgtctacccattctgactgttcttatttaaacaaaattcttcagtatagttctagaccatattttctattagtataggtgggtaattttatttattttgttgtcttggagaccagtggatcttttgctttccttatatgtccatgggcctacctttttgaacagtgttatgctcctctaagtcttatctcctttctttaaatgttgtatattggagaactataccattgctttgatcatcaatgagaatgagtatgatgagtgaattagtttttttgggggtggtgagattactttttttgaagatcactttttaattagtattattcatctgtttgtctacatggtatactgaaaaataggactgtacttggagaagtaagtcttaggtttgagcgctgcttccatttgctagatttgtgaccttgggcaaatcacttaatctctttgattttcattttcttcatctacagaatgaatgaaatggggttat

SEQ ID NO: 59443 - DNA, 1045 bp, Homo sapiens
tttgtttctcgcttacctttttgccccagtactttcttgggtccctttctaccctatccatcgtttgtcctttttcctcctagtcaggagccatcggcgttctctgagataccggttcttagctttagctgcacactggaatcacctggggagcttggaaaaatcctgatgcctaggctacactcagtactgatcgaatcagagcctttggaggtgggacgcaggcatcattattttttaatctctaattacctactaaatatttttctgtcatcatcttttattcagtctgaaaaacatggactaatttaactagattaaataaaaatatagattttaaatattatagattagatttataatatttcagttggatgctatccactcaagcgatgtatgagtctcaactttttctcttgaattgcctactaacagttttttttattcttacttggaaatgtcacttatattgctttctttcttctattcctactgccaccatcctagaacaggctctagctttagttcctgccgtccagccagggagcacatcggtagttgaacagagttgcgttcagacatgattacagagtggtcttgttttcgttttgatccatcacggtcacagagtggccttgtctgaggtccatgttctgtgaaattgtgtatgttcaacagaaggacaccagtgcctccctgtgagggcctggccagcttggagcaacacctgcctacctgatagtatcggtcagttcctgcagctcctctctagaggaccgatggtatcagccaggggcagctcctctctagagctgtgtcttagttgattatatctgtttgcagatcctccctactgcaatctgttctatgaagtgttgccatattagtagtcttccttaaatatgcctttaatgactgattcttatttctctctcttttttttttttttttatttgagacgaagtttcgctcttgttgccgaggctggagtgcaatggtgcgatctcggctcactgccacctccacctcctgggttcaagcgatt

SEQ ID NO: 59444 - DNA, 1086 bp, Homo sapiens
aaatacctatgtggggttgtaccattttgcattcccactaatgatgtatgtgagtacttgtttcccttagctttgcagcctgaacttttgaatttttgctaagcttatgggtgagaagtgggatcttagtatagttttaatttgcatttaaattgcattatgggtgaagttaaacatcttttcatgtgtttaaaggccatatttatatctttttgtgatttgtctgtatttatcttttgctcatttttcttgttttttccttttctttttttttttcctctagagactggggtctccctgtgttacccaggctgtaatgcagtggtttgatcataggtcactgcagccttgaattcctgggctcaagtgatcctccctcctcagcctccagaattttctgagcagctgagaccacaggcgtgcaacatcatacccagctaattaaaagaaaatttttttttagagatgagatctccctaggaggctgtcctcccactcactttgagattcttttgggggttctctgatttgattttacatttaactgtatatgctaccatctgtagcacctcgtagatcaagtttcagatgattttccatttctatctgggagttccccattatctcttaatcagatgtgatgctccctctggtggacaatggagtaaaaagcatacaaatatttttcagaaaggcaacttattttttagccactaaaacactgtctctgagtggtctccttcatgaaccccctttccaaactgttcttagcctctgacatttgccattaactcttattttgaattagaccaaaaaagggcaaacaagttaaattttgtcataaatatctatataaaactcactaatgaaatttacatggtatagtggcttattgatgatgaccatgtttttcacaataagagtcgaaacctatgtttgaaactagtagttttacttggagttggtatgatctggagggaaaattgtgcttgttgatctccttacagtttattactacaagaagattctgtgtaaatgagtttttcccctagtttttgacataataattacttgttagtatagaaa

SEQ ID NO: 59445 - DNA, 1762 bp, Homo sapiens
aggtcgtaaggaaggtgatggccagtgaaatgtggccgaatcaatggattagaggtcctcatgtggtcagagaaatggtgagtggtcagataatgggttgacttgatatgtacatgcttagaagtagtgtgtgtcttgatacaacaggtacggggtgtggcagaatgtggccaaggtagggagtaagaaaagatttttggtcaggaaacccaaaggctgaggttagttgaattatctaaataatgaagttactaagaatgttagacattggcatgaatagtttcagcaaaggcagaattctcacattggctaaaataacccaaggtttaagggtcagtagagtagaagaggctagtggagacaaggaagcacttacctctgtgaaaataatgtaaaaagacgttactgggtttacggctgattttgtaaaatatggttagcaccaggcgtaagtgaattgctgcagtgttacagactcttccttggaggccctgaaggtcaagcaactagcaaaatcatttcaaagagcagaaccttgaacgatggcttgaagtaggatttgcaacttcctgggcagtggctaatgggtctaggatttgaaataaggtggaagaattgataataatgtggtttgggaaaggactttatggatgtgactacatttttctttttaagtgggagtcataattcctgtttcttctactgcttccttttcttctgtaacgaggtttgggaaagggctttatggctgagccctggtgaaaacatttggtccatgtgaatgccacagcagagggcgttcttaatcagacaggatgacctgctttgtggatagcagtaagttgttcttcagacagcctggtgcttgctcaaaaggctcaagaacagagcaaccatggggacggggatagaggctggtgcctggaactcaacaatacagacttcccctcatgatagccatgtggcttctgctggtacagagtgcccagtttgctgccagtagtaactggtcctgattccccaaatggcaacacatcttcaggaccagccagccaccttgtgtcgggttattatggtagaactttttgtcatggaggagtcagttggaatatcaatttttttcctgtacttggatttgtcttccctgtgtgtaataccaccatctctaagatccactgagaatctttgatagagctgtgatattccccacaaggttgcctctgaccttcccagaaagaattagagcaatgggctaatgcttgtggttttgactgtttatgtttgccgatttcctcattggaagactattggtgggatgtagaccaagtctgccttctatcgaaaaagccaaaaaggctaaataccttctcaacctcccttgcagctagggtgcgggcagtgacctaagttcggtcaatctaagatgctctctgaggactttgaataaaagccagtatcacaaagaagaatggttgagagaatcactctccagcaacaaccagtttcccaaggagcagcagcagcagcagggcccagtgtctgtggtgatggtagtgcagaatccagcattatcaggcaacagaagcgatacagtccccagccccagcccctgctcttaacatactctggcatttaaggcagctggtgttatagaccagtggttctcagaccttttagtctcaggacccctttatccttttacaaattatcaaaatggatttgatagggatttaaaaaacgttattgagagtgctgatgatgt

SEQ ID NO: 59446 - DNA, 1089 bp, Homo sapiens
gtccccggcctgaaatcacttatattgtccttctgccgttgcatgcatttttaatttgatggaggtagaacaggttggttgacaattgggtatgagttatgtgtatttcccgtttgctttggtgagtgcagcacataaaattccattgttatgattgtatttgtaaaccttctcactccctagtgtagtgctctaagtctaatcttttttatatccccagggcctaccacatgggagatgttaatcattcaaggattaatattttggggaacttgaagtcgctgtatgtttgtctttggttttctcaagttccaagttgcctgcagcttccatatcaagagttacttctggcaaactctaatgatagtttcttctgtagggtaaagagaatagctcatctggcattaaggctgagaatgaggcttagtgcctcccaggaggaaggaggatgacttggaagtagacgtgtcatccctttcagtcctggtggattgtgggcagcggggggacagaggtagggaaaacagattgtgagaaatatgtgttctgatctttcttggctggctaaagttctagggttagggtggggatgttaaatgggttgaggggacggtcagcagtagaaggccttttgctctgctccttatgtggaatcttgagaggagatgttatgcaggttagtgataggccaacacgggcctatagcacagcagtggtagaaggaagtggctagatagttgagtttgtggtaccaggggattctgaaatgctctcataccactgtgaaggaggtggaggagcttattggcctggtggaacagctggcgtcatgacaaaagactgtgtgactatagactgaatgtcaggatcacagactccagggatgagagccagcatgacatcctaaaagatgagatgggaccagttcagccataggacctgattacctccttgcagcagagaccagtgaggatccagagaaacaacacagatccaaggtcttcttgccactatttcttctaggatgtccgataagaccttggagggaaatctacccgaaagcagccatttaaaccagcccgggtaagg

SEQ ID NO: 59447 - DNA, 1051 bp, Homo sapiens
ctgccaagacttgactgggcatcggctgaaccaagttaggattgcactgcaaaagtagctggggctgggatctggggtgtatatcacttctgtcgcctgataatattggattctgcagtaggtaccacgaacaccatagacactggaccctggtgctgctgctgctgctgctccttgggaaactcactgttgctggagagtgattctctcaaccattcttctttgtgatactggcttttattcaaagtcctcagtgagtgtcttggattggctaaacttaggtcactgcctgcacccctagcgcgagggaggttgagacggtatttagcctttttggcttttaagatagaaggcaggctcactctacttcccaccgatagttatccagtggggaaatcagcaaacataaacatagaaaaagggatataagtaaatgctaagcatctaaacaaaacaagctaaacagattcttcataatgactgacaaatacttactagtattttacacagacacaaaatatttgcacttactttggattgccaggatacacagttcacttgtgttgtggtagtagttgctctgtttgaacactcccattttagtggttatagtgttccaaagagcctggttgggaatcactgcaacctgaaaatagtgttagggaaatgttagcgcattgtttgatgcagttttctgccactgttgaatgcctgtccttgagggataagtttctgtattacttgtcatcttgtaagtaaaatttgtttctctttattcactgtccattgtgaagtctttaagaatagtgcatctttcagtttttgtagccccagtgtctaacacatagtaagcccttagttttagtatgaatgtctggcagaattttcctcctaactgcccctgtccttctgctgccttccatctgaattaagtatggaatgaaaatgttagtttgtagcaattaacagttacatgggaaaggaaaaatcaaaatagaattaaaaaaacagatattgatgataattacagtcatgcactgcataacgacat

SEQ ID NO: 59448 - DNA, 1048 bp, Homo sapiens
ctcgccactgcactccagcctgggcgacagagcaagactccgtcctaaaacaaaaaaaagttacagtgcaaagtactagttgtgatgtcatgatgcctgcaactttgaaatagtttaacgacaatacgtgtatacatagctacaggtggggagagagtgacgagcagaaatggcaaagtgctaggttgtctgatttaggcggaggtatataggtgttcactgcactgttttcaactgttccgtatgcgttaaaatgatcgtaatacaatgttagagggagaaaaaaaaccccgcctgtcttctgcgcagtcgccatgggcacgagccgcacgcggagccttacgaccaccttcaggtcccacacactccactccagccgtccctccagactccatctgcgcatgctcttgccccaccgcgcccgccccgcccctcgggcgtacgtgtgcgcgcagggcgcaggcgcgcgggtcccggcagcccgtgagacgcccgctgctggacgcgggtagccgtctgaggtgccggagctgcgggaggatggagccgctgaaggtggaaaagttcgcaaccgccaagaggggaaacgggctgcgcgccgtgaccccgctgcgccccggagagctactcttccgctcggatcccttggcgtacacggtgtgcaaggggagtcgtggcgtcgtctgcgaccgctgccttctcgggtgcgtaaggagcgccctcgcctacctgagtcgcgagctgtgtggggtgctggggaggggggggcgtcgggcggccggcagccgcgggactcctgctggatggggctgcacaggcagcttggcggtgctgcccctgacgcgcgtgtgcccgggggcgggtcgctgctgacaggccccgcccggacacccccctaggttgccgcagcggggctgggagggggcccaggctcagccactgccccccaacctgggctgcggtggaaatgggaaagccattgggcagacttgagggggaagcgttgtgccggggataattttgctgggagacgaaaagtctgtgtgct

SEQ ID NO: 59449 - DNA, 1063 bp, Homo sapiens
cagggccagaccctcaagctgcctgcctcctcttctgctaacttggagacagaactgctgagagcccaggggcctgacctagtcccctctccattcccacctgctccctagatgagcaacactccctagatgaaccacactccctagatgggccacgctccctagatgggccacgctccctagattaaccacattccctagatgagccacactccctagatgaaccacattccctagatgggccacgctccctagatgaaccacactccctagatgggccacgctccttagatgaaccacactccctagatgagccacgctccctagatgaaccacattccctagatgggccacgctccctagatgggccatgctccctagatgaaccacgttccctagatgggccacgctccctagatgaaccatgctccctagatgagccacgctccctagatgggccatgctccctagattaaccacattccctagatgagccacactccctagatgaaccacgctccctagatgggccacgctccctagatgaaacacgctccctagatgggccacgctccctagatgggccacgctccctagatgaaccacgctccctagatgagccacgctccctagatgggccatgctccctagatgggccacgctccctagatgggccatgctccctagatgggccatgctccctagatgaaccacgcgccctagatgagccaccctccctagatgggccacgctccctagatgaaccacattccctagatgggccacgctccctagatgaaccacactccctagatgggccacgctccctagatgaaccacgctccctagatgggccacgctccctagatgggccacgctccctagatgaaccacgctccctagatgggccacgctccctagatgaaccacattccctagatgggccacactccctagatgaaccacactccctagatgggccacgctccctagatgggccacgctccctagctgaaccatgctcccttgatgggccacgctccctagctgaaccacgctccct

SEQ ID NO: 59450 - DNA, 1106 bp, Homo sapiens
aaaatgagatattttacattatttgatactaaatctataaaatctggtattttatacttacagcacatctcagtttggagaagccacatttcaagtgctcaacagtcacatgtagctaaatgttaccttactgagcagcacaaatgataggatggtcacatgatttttaagctgtcttcctacactgagagtctgattctgtggggtaaattaaaaactcctcttcctgaagtactgcggtatttaatttgagaagtttctatgcaggaagagagttctaagtctcttccttttagtgtttttgttttgttttgtttgttttgagacagattctcattctattgcccaggctggagtgcagtggcagtcccggagccctgaactcctgggatcaaatgatccacctcaacctctcaaagtgttgagattacaggcgtagccaccatgcccagcctctttctcttagtgttgactgtgttaacgttgagccccatgcttgtttaatgaggctcataagatgaatagtgttcagtcatttcctggcgtgtcattgttactagttatttacatctgcacgtcaacagtgtgtcaaggcacagtatgagtttctgtcgactaaattgtagggagaacttgaggaccttcaagaagattgaactttattgtgaacaggtagagtacctgttgttgcagagttattttctgagtcagtttcaggtaaggctaagagttttataaatgtgcttctttatatcatggtgtttcttaccaagggaaagatcaaatctttgagcaaaatttagaaaggaagagagtaggttttatggctgtagaatgctgggagcctgagtaaagtaaaagattaacttgtgtatggtggtttaggggaatttaaaaggaaagatggcagtttttatataaagcaactgacatactgtctccatacgtgcttcaagttgtttttgcaacaagggtggtgatttacgtagaaccgtcagtggttcagagctgctgtaacaaaggtaactctaaagccagttaacctccatggggatcagtcagacccatcattgttcctgtcttgacctctgtgctctaataaactt

SEQ ID NO: 59451 - DNA, 1083 bp, Homo sapiens
ctgccattcaagaacagtggggtaagtacagaccaacatggaatgtggaattagcagtaatccaacaagtcactatctacaaaattaacatatttgacctggttttataaatcagaaaatagatgtttccataaacaagttaatgttgcaaagaaagtagcatttttaccacaagtctattatattgtgagaagacttttttctttgtattttgctcttcatatcaatgccaagaaaagaatacttgcaactatttgcatttttcctaatcacatttcatgccctactggctaatttagtctctaggatgatatttacttatattgaaaagtaataagttagttatttctaactgttgggttgtttgaaaagataattttgcatgcaaatctttatgagtggtgctagttaactgtttgtttgtttttttgctcctaaatatgttttataagagccagtgactaacaaatactttaaatttagaaacaaaatggaaaactgtgcaaccacatacagttacggctctaaggaattcagaaaagggatttaatggtgaagattttgaacggcttacgaaaatttgtgcaacacatcaagagtaagtatatcagaatttcgttagaatgagttggagtagaatattgaagaagcattatagcattgagtatccatttctttgttttatgttttcaactggagaaattaagatggatataatataattattgcaaggctctagtattggttcgaaccccgggagcgcgccaacagacagcacaaggcggtgtggagcatcacgctgttttaatgagcacctgggtgcagacgggctgaggcctaaaatggcgtcagcgccacgtgaggacggggcaggggttttacagtctcctgtaaacaggaagtgtccctgtctgatgtaacggctacgtggtacctggatggcctctctgtctatcctcggtggtgcgtgtcttccggccggggtgcgtgtcttccggccggccctcttcctgcttctgcttctcgctgacgcgcgctgctggtgcaagtggcctcgcgccttgggactgggtctgaggaggg

SEQ ID NO: 59452 - DNA, 1064 bp, Homo sapiens
ctccacattttagacatctattagtagataccataaaatctaagttcttataaaaacataaaattcttatgttttcagtaggtggttatatatatctaacagaataagaaaaggttgtacaaaatgctctgaaatagaattggtgttggtacattcatacattgttttctgtttaaaaaccaacagttattgtatacactttaccagaaatttgttctgtaaatttagatattttaaactctatatcttgataatttatagcaatttaatttctccccttttctgtttactaacatatgatatactttagtttgtatgtatacatttctaaagcatttatgatgtatttcataccaccttgtgccttacgtcaaaagattttaagaggctttcttctaaatgtttggcatgttgctcattataaaagctttagaaaataaaaataaataaatatgttttagggtttttttcccttgatacctaattttactattaatatatatttctaggctttatgttcctgggcctgagagccctaatattgaagaggaagtatcaggtgttttggatgagttgccctgaagtgatatgatgatggtgatgatggtggtgatggatggtgatgatgatgatggtgttgatgatgtcataattagccttttgccttttttccccccttttttgtttgagacagggtctcacgctgttgcccaggctggagtgcagtggcaccatcacggctcattgcagcgatctcctgggctcaagtaatcctcccgcctcagtctctccagtagctgagattataggcacacaccacggcgccccagttaatttttaaaaatttttgtgggtatggaggtctcactatgttgctcaggctggtctggaagtcctgagctcaagcgatcctctcacctcagccccacaaagtcctggaattacaggcatgagccaccatgcccggccagccttttactctttacaaagtatatttttattctttcaaatcttactttatctccttttcacttctgaaacaagctagggatattgcctggggt

SEQ ID NO: 59453 - DNA, 1030 bp, Homo sapiens
caagtgaagatgggaggctagcactaagcagtagtcgcttatgaaatcacattggtagctgctctatggatccggaacaaaagagggtcttagaaacagcaatcatggttgttctgcccagaatggctcttttgagaggagcaggggaagtccagcctcctcacaatagaagaaatgcagtcttccaataatgtaagaggttttagaaacaatggttggcccagaatttatgtagatatctaaagagcgcccaaaggaaaacccaggaattacctgttttccaaatggcctcgtccttgccttttgtttttatcatgacctctacattttctaattaattaatgcttctcttgatagccatgtctcttgcgcaaagctctttttcttttcctttttaatcactcttttaatttatatttgtactgctcttcctggacttttgcagtagttacttaataagtttccctgtcccttgtttcatcttctcccctccaaattggtcttacgttagcactctataaacttggggtctcaaactggtacccaaggagccagtcaggtattagaagtcaatgaaatgagttaggtgtagagtgataggaagaaggtttccacgccttgtctggaagtatacagcttttttaaactccacagattaaaccaaccacagctgagggttcttgatcgaacacacggactgtgagtttaaactcctgctatgaaacacttttaaactatcattcctttcccacggctctctttacctgcaggataaaggctgtactactcgacattcaggactcctgtcatctggcccactctgtctccccaacgtcatcttctgtcctggggtctcagactataccgtagtcagactggccccctcgccacctcccagatacaccttgcatgtcgtcacgtttgctcttttccctctgtgtatgtcagctccaccctgaggtgagcaaccttctttccacatacctatctcttcccagccctccacatctaggtcatggctttttagcat

SEQ ID NO: 59454 - DNA, 1138 bp, Homo sapiens
ttaatcttgttttaattgtaatatatattatagcatatggcataaagcaacattttaatagtcatagaaaataagatattttcacattaaggaactggcaagaggtttgatactgaatttgttttcaaactctaccagctactggcactgcaagcttaagcaagttactcaagcccttgaagcttggcctcttcgtctgcaaaatggggctgataaggcttctaaaagagagttgtgaaaattaaatatgatatagtatgtaaatatcgttacataaaatgtacacatttactaaattatagttgttattatggaacccaacactaaagaagcgggcagagaatatcacttgtttctgtagttaggaatagtagcagtaaatttgacatgtgccactatagtgaaattgctggcacttaagttatttgtcatatactataataatatgatttatgaatgttaattctcaaatcagttggaagccaactgtgtgttcttgttcagaattgaccaacctagaggttctgaattgagtgaaacctatatcattaaaagaatgtgacttggtatctgttttcttctttaattttgtgaggaggcacttccaacagcagtgtgtctctgaatatttttcttgtcacattaggattcactattccagaagagttgcgaataattttgttttcacaactagttcattctgaaaatgctatttaaggtggtcactgatatttgaggggaagtgtgggaagaactatttatttgcaaatacagaagactgggccagatggaattttttttaattctgcatttattcatagagcaccacccgtaacaattacattaattatagctcagacattctttttggtctcaatagaagggcttggtatatttgtttgggtaagaatttggcaattgaagtgggaaactaaatttagttttaaggctttattttttgagatttaaaaattcttcaccttttaatactgacactatagttttaaaaacaatggaaatatttttaagaatagtctggggccgggcacagtggcgcaaatctgtaatcctggtgctttgggttgcttgagcccaggagttcgagaccagcctgggcaacacagcaaaaccctgtctc

SEQ ID NO: 59455 - DNA, 1193 bp, Homo sapiens
tctttcaggaattctgtagcattcccccttccctctgttaggaaccaaggacatcagaaatagcaactttaagtggcaagccggaggaactctgttagaataatccacacagtgaggcaaatatcaatctaagcattgtggatggaaggaatggtctttggagagagcatatccatctcctcctcactgcctcctaatgtcatgaggtacactgagcagaattaaacagggtagtcttaaccacactatttttagctaccttgtcaagctaatggttaaagaacacttttggtttacacttgttgggtcatagaagttgctttccgccatcacgcaataagtttgtgtgtaatcagaaggagttaccttatggtttcagtgtcattctttagttaacttgggagctgtgtaatttaggctttgcgtattatttcacttctgttctccacttatgaagtgattgtgtgtttgcgtgtgtgtgcgtgcgcatgtgcttccggcagttaacataagcaaatacccaacatcacaaagatgatctttcttcttttaacttgatgatgatgtgcaggcacaaatctttggagaaggcttaactgtggaatagatgaattctagaactcttgaccctgcaatgagaaactgtgacagatctgtgtcaattaacttgattagccagaaattaatcacaggcctagagaccaaagaaaaagctcccctgagtctcaggcaacagttttgtcacggatgcaaagcttcctgaaatcatgaatgctggactcagtttggcaaacgcttacacctattatgttctgagattctgagaaccagaatgcaaacttaagtaagatacagttcccactgtaggtgttttaatcctggtcttatatagaataaaccagtactttgctgagtgaaatcaccatatagaattcagtattaacagatcatgcattcagatgcttgaatgtgcattcttgttgtgggcttgatttagatcctattgcggggtcattacgcaaaaattcaatcataccttccatagacaaatgtctgatttttgtttaaatctgtccgttaggtggcctttccttatctgaggtgtagtggtctaacatttaggaagccttgctttgactttatcgggcagcattaaaaaaaaaacaacaaagaaaaaccaaacatgaattata

SEQ ID NO: 59456 - DNA, 1200 bp, Homo sapiens
cttggaaggaacagaaagaaactgtcttcctatccaaagcaaattttacgcagaaaaatgctgtaatttcttgggaagattttaatgtacacctatttgtaaagtcatcagaatagtgtggattattaaatatctagtttggaagaaaataatttatataaattattgtaaatttttatgtaaacagaaggtcttcaataagtaaagtaactccatatggagtgattgtttcagtccaggcaatttttctattttatattaagacttcatacatttatatatgtaaatatggcttattaatggaatgttaaataaaatgtatacttcacagtcgtttgtgtcttggatttttgaaagggaggggatatctgtttaaatagttttatatgctcattggtctcattttctctataattaaaatactagaccagtcttaaaatggggatgattgaagtattgatatttctttttacagttactattttataatttatgcactttgattctgtgattcagatttctaatcagaaaatgtatttttttgtttttggctgttactatgttaaaattgaattatgggcatgtcattttgccatctttgtagtttcacaaattttgtgtaatctacctcaaatgaataatccaagtattggttaactataatgttggcatctcttattcggcaagcttaaaggctctttaaagtcttaattagtcaaagactaatccaggttagattgaccggttcactgctcacttgcaaccttatcaaagggtttgacaaagggaaatgtaaaataaatctgtttatggatattgagtgcatcttgtatgtgcctaatattgataggatgagatgtctgaacaaatttttataatattgctgtgaaggagcttgctattgaaccacagaaatcccttaatattcaggttttaaaactggcaaattctcacaggacctcaggcacagattattgaggttgggagagagtgagtagatgtagaaaaggagaaaaacaacacacgccctgttctctacagtacaactgtgtgcaattaagcaatggtacttgatgtaggctctaacactcatcaataaataagtgttgtaaaataatttataacaggtaatcgatagtgtgtaatgaatggactattaataattgattatctagaaacgaactgctttcgtgggctttt

SEQ ID NO: 59457 - DNA, 1037 bp, Homo sapiens
gcattcctcccaacagagtaaatggcagacgcaaaggctcagagcatggcaatggcaggcagatgaggagtgttcattgtgaatagccatgtgtgtattacaggtagtctctatgaaagatgaaatgtgggtaggaaacaatagtctctggttgtctacttcttagaaagtgagagcctggatctggacaaagggagtgggtacagaagggcagtagacagtggaaacattcaaaaataaaactgatgataacttggagattagttgaattgtaggaatgaggaataaagaacaggcctgcataactaaggtttctactaaaaggtatgagaaaaggagtcaattttgcatttggcgagtttgaattcatcagtgtttggctctagtattccttgtctcaggatagaagttttaaaattggattcgtgtttaatacttaaccttttaaaatgtttaacccatagaaagatgatgcacaatcagtagaaactctgggaaagccaaaagcgaaacgaatcaggacgtcaaaaacaaaacaagcaagcaagtatgactttctgttctgttcttgattgattgattgattgagacagtctcgctctgtccccaccctactatcctccttttattattttattttatttttatttattttttttgagacagagtctcggtctgtcaccaaggctggagtgcagtggtgtgatttcggctcactgcaacctctgcctcccaggttcaggtgattctcatgcctcagcctcccaagtagctgggactacaggtgcccaccaccacacctggctaatttttgtatttttagtagagacggcattttatcatgttggccaggctggtctcaaactcctggtctcaagtgatccgcctgccttggcctcccatagtgcttggatgacaggtgtgagccactgcacccagccttgttctgtaatttttatccatttttttctcaaaattagatttgagaagacccttaattttacgaaaaggaaattaagctcatcagaaaagattat

SEQ ID NO: 59458 - DNA, 2872 bp, Homo sapiens
gcaggagaggtactgaacttgaaagccttaggaatttcatggtttatgcagccccagcaaagggaagaggattgagtctagcccaagggagcttatgtaggtgaattgttcttcaaccttacggggatcgtgctatttagaaaagtgtggatagttaggtaatttggggaataccattaaaacacagtttgggggttgtttctgttttttccggttaattttttttcttgggtgagaatagaataagtccttaaatgttttcagaactgttagcatcataattttcaagcttttgttgactgtctttttagctagggaaatgtagaatttctagttaaatttcagtcataatctcaaaatgtagttattttgactgaatgagaaagtctgattgcttaaagggataattttgtaaagtaaacccataagtatatgccatattaaatataatttatgttttaaaaggcacacagccaagggtcatcaaaaacctgtgtgcttcaagttaaaacatgtattaaaattctttaaccagtctcttatctttaattcatttaggtgattgaacaagaaaagcttgaagctcaagattcaggagaagaggctaggaatctttcatttaatgagttatatccctctggaacacttaagcttcagtacaattttgatactattgaccaacagttttgtgacttagctgataacaaagacactgctgaatgtgacattgctgaagtagatggggaactttttgtggctcaaagcaactttaccttgatattggaaggtgaagaaggagaagttgagccaggtgattttgcatcatctgatgtgttacctaaagcagctaacacagcaactgaagaaaaacttgtatgcagtggggaaaatgataatcatggacaaattgcaaatttgccatctgccgtaactagtgaccaaaagtcccaaaaagtagacactttaccatatgtgcctgaacctattaaagtagcaattgcagaaaatttactagatgtaattaaagacacaagaagtaaagaaattacttcagatacaatggaacagtccattcatgaaacaatacctttagtgagccaaaacataatgtgtcccactaaattggtcaaatctgcatttaagactgctcaggaaacaagcacaatgactatgaatgtcagccaggttgatgacgtggtttcctccaaaactcgtacgagaggtcaacgtatccaaaacgtgaatgtcaaatcagcacaacaggaagcatcagcagatgttgctactcctaagatgccagggcagtcagtcaggaagaaaactaggaaggcaaaagaaatttctgaagcttctgaaaacatctattctgatgtcagaggactatctcagaaccagcaaatacctcaaaattctgttacgcctaggagaggaaggagaaagaaagaagttaatcaggacatactagaaaacaccagttctgtggaacaagaattacagatcactacaggtagggaatcaaaaagattaaaatcatctcagctgttggaaccagcagttgaagaaactactaaaaaagaagttaaggtttcatctgttacaaaaaggactcctagaagaattaaaagatctgtagaaaatcaggaaagtgttgaaattataaatgatctaaaagttagtacggtaacaagtcctagcagaatgatcagaaaattgagaagtactaatttagatgcttctgaaaatacaggaaataagcaagatgataaatccagtgacaagcagctgcgtattaaacatgttagaagggtcagagggagagaagttagtccatcagatgtgagagaagactccaaccttgagtcatctcagttgactgttcaagcagaatttgatatgtctgccatacctagaaaacgtggtagaccaagaaaaatcaatccatctgaagatgtaggatctaaggctgttaaggaagagagaagccccaagaagaaagaagctcccagcattagaaggagatctacaagaaataccccagctaaaagtgaaaatgttgatgttggaaaaccagctttaggaaaatccattttagtgccaaacgaggaactttcgatggtgatgagctctaagaaaaaacttacaaaaaagactgaaagtcaaagccaaaaacgttcattgcactcagtatcagaagaacgcacagatgaaatgacacataaagaaacaaatgagcaggaagaaagattgctcgccacagcttccttcactaaatcatcccgcagcagcaggactcggtctagcaaggccatcttgttgccggacctttctgaaccaaacaatgagcctttattttctccagcgtcagaagttccaaggaaagcaaaaggtacttttctttctctgcaaaacagtttttcatctcagtcactcttcagcttaaaatttggttatttgtcctaaaaatggttttatagggaatttttccccttcccccctcaaaccaaaattgatcttttagtagtaaagtttaaaggtttcatgtttcaaagtttgagttcagttattcagtatggttaacatgacttaaatcctgtaactcacgtaacagatttattttttagaatagtgtaatttctcttctgtgagttttataaattataagtgacttttaattaagtttcttccaaaatagtcaatatttttaatctcccatgtactgctgcatttggctcacaccccagtgatatccacaacccgaaattgttttgaagggaaacaccagtagctttttactaagatacagaaattatttcaatccatattcactattgcccacaaactggcgcatctacatgccctcatcttcagtgag

SEQ ID NO: 59459 - DNA, 1079 bp, Homo sapiens
cctgatactcaagaaattcatgtaaaaaaaattaattttttacttctttatcagtctttcagttttggtttagttgtttcaagacacagtagttcaaatctaacacgttcatttatttgactgctatataaaaacttatttataaaaatatgggttcaaaaaataagtgtataaatcttttgtggaatataaaaacacatcctttaataaatcaaccttggaggtgggtgctgtggcgggtgcccatagtcccagctacttgggagtttgaggagggaggatccttgagcccaagagtttgagaccagcctgggcaacataacaaaatcctgtctcagggaaaaaataaataaataaataaactggttttcatgaaagccaaaaggaagtgttaaagaagccatagttttatcaagttaatttttgctgatctggttcaaatgaaaggtttttttagtcataagatcatatatttgaaaatatatggatacagttacacaggattgacacccccgccccatgcatccttgtgggagaatgatagtcaactggctggtgttgaacatctgtacactctgaaaataactttttgctacttaataagacttagtttttttaaaaaaaaaattctattataccaaatcttttattaccagcaggcaacttttatgtaataaattttaagataaaaaaccaactcttctaattatttatagaaatttggataaaaaaccaactcttctaattatttatagaaatttgtttaggatttgggaagtttcttaactcataaaaatgtcatcgttatccatactcatcttaatgagtattcccactgccaaatagatgagtaaagttccagttcttttagttgggaagctaataagagttgtgggtatggtgtaagtgggaatcctaatttctaggttatttccaatctgtcatctcactgaatgtttggggagtgggaaaatgtcattgtctaggtgggtggtaatgttctaccttcttggtcaggagatctctctgttactttctacctcctcctttttctccccttcccttaccaaaaggtaatt

SEQ ID NO: 59460 - DNA, 2141 bp, Homo sapiens
gccagtatgaaaggattatccaaattattttttcattgtaatgttttttgaattttaatgaaaactaatgttatttattgcaatggctttcatggataattgcaaagcaaagagcagtcgcatgagaaggaatcacatgagagttaccagcatgagaaggaatcacatgagagttaccagtgagaacctgggtgcatattcactatcttggctaactagttccttttaaaatataagcttatttgatattttgtggtgatgtatcactgttacttttatggtaaaatctataaatgtttcaaatacctttttattgaatttactttcaaatactatttgttgtaattttcaaaattagcatgctttaattgggttttgagaaaggtcagattagaatattaaaggaacactgtcatcatattccaggatttattttcatgtggattaatacaggtttcattggtctcttattctgagtcatttatcatactttttctaggtagcattaaaatattgaaccttgcctctactgagttcatagaaaatattccagaatacttgacagacttatttgaagactggccacagattattaaaaattggcttaaatataatgtatactgacaggcattttaaaatcatttcatttctactttaaggccatgccattgttgccaaaagagtaaaacattagaaaatgggtaaaacaagtacagcattgtttctgaattcacttttaaattttatattattgttcagaatgagcttgagttgtattgaattctctgaacctcagtttacatcaccaaaatgacaggttaggtggtaggactaaagcaggttaaagcagatgggatcttcttacacactaaggtatgtatttctttttctaaaggaaaatcttcacccagaagtccaaggtaccagtgttggacgaaggattaacatctgttgaaacctacacccctgcaattagagcaaatgacaataaatgtatgtataataattttgacttcaggattattccatttttgtgttttgagtgaagagttttctgttcttagaacaaaataatctattgtgttattcagatttttcctcctcagttattcctctctctggtcagctttcctggtgtagaagtattctaaggagatatataagctgtcagacagtgggttgcttgtaaggcattctgtggctctaatattcaaagtcttagattactagtccacagccaaatgcatccctgccgtttgatcttcttggactcagaagagttatttcgtgtttgtttgtgataacttaaggccaaggttgacttttcattattagaaaataatcacaaatgactgaatattctccagggaaattaacaaatatatggaattttttttttaatccaatgagcatttttgtgaaggcctattctcagttaggccctggctatacagagatgaggaagataggattttcttaaggagcttacagttggattcaggggaagcagacaccttgaatgtctatgcccagaattggtctgatcatcttgtgtctattaactcatttaatcctcacagcactatactatgacatagttgttatctgactctagagcccatgctctcaactgttatgcctttgttcctggtacattatgaatggggtatacggcaagcttcagcagactagtttttgtcccatgattaaggtaatacatgattatggagtaatccagagagaattgtctaacatgtaaaaagccgatcacccattttaggggtccataattaaccatttaaagtgtctttcctgaatttttgttttctgtgcccatttctcccgatatgttggaagaggagacaagacggtgcctgaagagtgcagggggctgaacccgaatgtgtgggttcctaacccagttctgcacttcccagttctgcacttaagggctgtgtctctatttttttttgttggtaaaatattaatagttttaaatgggaatattaataagacccatttcctagagttgtcaggattaagccccttgcatgtaaagtgttttgtgtagcgcttggtacctgaagtttagtaaatgttagctgttagaaatgatcattatcaaaaaagcaactttcttt

SEQ ID NO: 59461 - DNA, 2210 bp, Homo sapiens
tttggttaacaagagggccaggggaacactagtaaatgggagagacttcacctagaattggtgggtcagaaaactgaacctatttgtatgtttcttaccctacacacgtttttaacaaggttatttaaaggtaactcctaactctaaagctgtaaaactacatacttacataaaaatctgcatcttaagtagtttaagatgagagtccactgaagtttggactacgatatctttacttagtaagcatgggcattattaattactctaagaactttaggaccatgcccataaatagcatatgtctagaaatttacactgccttacttatttgagacagagtcttgctctgtcgcccaggatggagtacagtggggctatttcagctcctgcaacctcttctcttgcctcagcctcccaagtagctggattacaggcatgcgccaccggtcctggcctacattgctcttttgatgtgccttgttctactaacatgtttaaatggtagctgttaaaagaatgttcatagcattatcttcactgattattcttacaatattaggcagtctcaaatagaaatttgtatttatttttttttttttttgagacagagtttcgctcttgttgcccaggctggagtgcagtggtgtgatctcggctcaccgcaacctctgcctcagcctcccgagtagctgggattacaggcacgtgccaccatgcccagccaatttttgtattattagaggcggggtttcaccatgttggccaggctggtctcgaactcctgacctcgtgatctgcctgcctcagcctcccagagtgctgggattacaggtatgagcctccgtgcctggccagaaatctttattgtgtttgtggtgggtggggtttcatacaacacaaactctatagtgaagctagatttgaatcctagctcagctacttactgagtatgcgtcatgagctgggatacgcagtataaccttaggcttcagttttcttatctactttttttgaatgttgaggattaagtaagttaatgtatataaaacagttgcattagtgcctgttcagcaaaaagtgaaaagcgagaggttaaggggggctcttgagctaggttcagagaattagaagaagaaggtgttggccgggtgcagtggctcatgcctgtaatcccagcactttgggaggcccaggtgggtggatcacgaggtcaggagatcgagaccatcctggctaaaacagtgaaaccccgtctctactaaaaatacaaaaaatcagcagggcatggtggcgggcatctgtagtgccagctactcggggggcggaggcaggagaatggcgtgaacctgggaggcagagcttgcagtgagccaagatagcgccactgcactccagcctgggcgacacagcaagactccatctcaaaaaaaaaaaaagaagaaagtgttagcagtctgataacacagcagcaaacctaaaagaacaaaaaagcagacccaacaactttttaaaaagtaataatgcaagactatcagtaatcactaaatatttagcataaataatattcttatttgtatgacttataggcaatttagaagatgcagaaacaaaggatctcttagttgcagcagaggcattttcagaattgaatcacttaagcccggttcaaggaactgaagcttctctttgtgcaccatcagtctatgaagggtaagttaatggagagaaattcaaatacttttagaaagaagtttaatgaaattatgaaccagaagtaaaatattctgtgcatgttagatttcacttagatctttaacatctccattttggtaatgttggctgttttaaaagaagtttagttgtgcagttatatgtcatttagtagttactataaagtttcggaaatatacagagacacggtaaattgaggcagaactctggtgattctgtttttgttgaagaccaagatttcgctcacagctgtgcatacctccatgccctctgctttccagtggtttcaggatgatcaggcacaagactcttgtaggtagacacagtagagcacaggggagatgacagacagttttatttccttccatttgttcaatacatgactctaagtttgtgttttttaacgaccatttgaaacatactcccaaataattttcattgacactttaccagatgacgtattcaaagtatggtcaagc

SEQ ID NO: 59462 - DNA, 2196 bp, Homo sapiens
tgaatttaagttggaaataatgcttttagaaagatggatgcagttttatgtttcgtagacttacgtataaaaagctctggaagaattttgtattttctttgcagaaatctggaataaatatttctattgatatgtttattggagatgagatgagaatataaccactattgtgactcagttgaccccatctgtttttatataagcacttttttttttttttgagacggagtcttgctctgtcgcccaggctggagtgcagtggcgcaatctcggctcactgcaagctccacctcccgggttcatgccattctcctgcctcagcctcccaagtagctgggactacaggcgcccgccaccccgcctgcctaattttttgtatttttagtagagacggggtttcaccgtgttagccaggatggtctcgatctcctgacctggtgatccgcctgcctctgcctcccaaagtgcagggattacaggcgtgagccaccgcgcccggcctataagcacttttaatggtgtaattccatttgctctttactatagaaagctaaaagtttggccatgtcagttactacttctggattttctgagttcactcctcagtccatcctgaggtctactcttcgatcaacacctttagcatctccctctccatcacctggaaggtctcctcaacgacttaaagaaactagaatttcatttgtggaagaagatgtccacccaaaatggattcctggggtaagtttgataataattgggagaaaagacattttttaataagaatgtattagctctgacaagtaaaaagttagataaatcaagtttttaaataccactatagatttttgtatataatcttgtagctagtaatgaaataagaaaaggttagttctgaaagaaacactagggccattggctaagccaaacccatcatcttacagataaataggactcggaagcaccaagtaagttggctgtagtcagctagatgtatggtggtagaattgggagtaggattcaaacctcctaatttttagtccttcttttatctttgtttttaccttatattgtgttgtttctaactagttatatgtttttgagggtgtgtcttgaggtccactgtaggttaataggaacctttcagtgattattggtcatctagcctgttctgtgttgtagtcttctgaaaatactggtatattaccaattagggaaacattagccaccattaacttttacgtactagaagagaatggatttagaataaatgaatttttattaaggagagaatttgggtaaaaacaacaaagaaagtatgggtatgattgggatgggtagcttaggactagacttaactgtgatatttactaatttttttcttttcaaaatcttactttacaggctgcagatgatagcaaattagaagtatttactacacctaaaaaatgtgcagttccagtggaaactgaatggctgaagagcaaagataggaccacatcttttttcctgaacagccctgaaaaggagcatcaagaaatggatgaggggtcacaaagtttagagaaactggatgtgagcaaaggaaacagcagtgtttcaatcacatccgatgagactaccttagagtatcaggatgcaccgtcaccggaagaccttgaagagactgttttcacggcctctaagcccaaaagctcttccactgcactaactactaatgtaactgaacaaactgaaaaggatggagataaagatgtatttgcatcagaagtaactccttcagacctacagaaacaaatgggtaagaactcatttctgaatactcaaaattgttattaatgtccctcaataaagtttataatagaattttttccaccataagaaaagcatcctagccaggtactgtggctcatgctagttaatctcagcactttgggaggctgaggctggaggattgcttgagcccaggagttcaagaccagcctggtcaacatagcgaggccctgtctttacaaaatagaaatttaaaaattagccaggcatggtgggagtgttcagaagtttgaaacctcagtgagtcatgattgcaccactgtactttagcctgcgtgacagagcaagaccctatctcagaaggaaagcatgagagttaaatattatatgctcacagtatactagttcctagacataatgcac

SEQ ID NO: 59463 - DNA, 2418 bp, Homo sapiens
catatgcttttattaaattcccgtttgttagagatgcacttaattccagcgttcttcattttacagtttctagacccaaaccattatcagcagttccaaagcaagttgtaacaggaactgtgttgacaagatctgttttcatcaacaatgtgttatctaaaattggagaagtttgggcaagcaaagaacctataaatagcaccacacctttcaataggtatgttttcttacacgtttcatagtcatgctgcttgttaatctttactggacatcaacagcgttcatcaacaatccactctctttgcctaagtttattagtgtatgtaaaaaagaaaaactctttatgttggctatgtttctgagaagaatttttaaaaacctttaaaagtgaaatgttcattattatttgtaagcaatgcagaactgtacaaagtaaaacgaatgaaaaccctctgttctcccatctcatccacttgttatcagtgctccttgtgatacatcagaagttaaatttttattttcatagttctaaaatagaagaaccatctcctatagtgtattcgctcccagctccagagctgcctgaggcattttttggaacaccaatttcaaaagcatcacaaaaaatttctaggtaagagtttattaaatcattcttagagacacaatgttagatgatagttacaattgtaatttttaattatctttaacattttatagacttttaaattattaaatgaatattttaatgtttgctttttattatactttgggcagcagtaattttaggaaattttacatcaggtagtagtatacttaaaatttttgttcaataatttcagactgcttagtggacaggagtgaagtttgtctcatgagcaaactattaacttactttccttgttacctgcttgttagtagacctctaaatgagggttgtttttatacttaattacagattaatcttgggtagctcattgaagctttcttctgttgaacagtgcctactaaaatgtcttgtgttgcttcagatgcagcacgtttacatcttacctgtggtgttaagttgaagttttgtatccaagatgaaattgtgattgcaagtatttacttacgagcattggttagttgaaaagtgttcataattatgtaccacagagaacagagtatgtctcttcatgtattgattctttgtccttaatatgcccaggatctttggaaatttttgattgttttatcaaagacaaaattacattgtttaaagtatttataatgattataaataatcattacaagactctgaatttttgatgctaagaaaaagatacttgagataaggtcatacaaacaactgaggccagaagtacagagtgtagtttaatggacatatgttaaaccttgaaaggatttttctttttttggactaaatttagttaggttgtttccctttatttactctggtaagatggtattttaaatggaaagaagatattttaaatgaaagtcgttattaccgacattctttttttctaccaatagttcggatttttttttctgcaagtccccttttcttggtctttttgtaatttaatggctctgaggttgcggggagcaataatagaagttgaaaggcctttgattaatggcctgaggcccttaaagaagtattatgagcattttttaaagccagtgttaactcagatgtaagagagccagttgagttttgaatatttaccttctgtgtttttcatgctgagtttgcattactgggtagacagtatagcctgcaatgaaataaggcagaatagataacatccgtgggtacatcatatagtaaggctgaagtgctaatttatgtaattgatgttttatttttatgtgatataggatgcattctttatatggattatggtaaaaaaaaattagctctaacaagtaaaaagttacataaatcaattttttaaataccactatagatttttgaaaataaccttgcagatagtaatgaaatcagaaaaggttagttctgaaagaatatttggtctcagggttgaagacctgagacctaatgcaatatttaacatttcatttagaaaataccttaaaaagatttctcagaacctttaaactattaagtcttgatgatacagaagttttgctttgacttggtaggtagcttttgttgcacagtccttgcttttgagaagcattcattcataaataggtgccttaaacataaatattaacacaatgcaaaacatttaacagtgttcctttgggatagctcagtataaaagtgagcaaactgttttccaagtttggatcgaatccaagtacagaatttaaatgcaaacaagatagagaaagaagagaatctagaagaaaagaaatgtctagcagcctgattggatattcttg

SEQ ID NO: 59464 - DNA, 2792 bp, Homo sapiens
aagttttattggttaatgttttgtcattttcatactgtttttaacttgctttttaaaaaactaatgattttccaagttaatacatattttccttatatagggctacatcgtaattcattgtttcactgtatttttttttttttttttttttttttttttgagacagaatcttgctctgtctgccaggctggagtgcagtagcatgatcatagctcactgcagccttgacctcctaggatcaagcaatcctcccaccttagcctactgaatagctgggactacaggcacacaccaccatgcccagctaatttttgtatttttttgtagttagggtctcaccacgttgcccaggttggtcttgaactcctaggctcaagtgatctgcccaccctggcctcccaaagtgttgggattacaggcatgagccattatgcctggctcttactgtatattcttatacttaatcttttgcaatttttgctggtgtttctgtagactgtattctttgcattgggatcattgggtcaagacctatatttaattataatttttatagatatgctcaagtgaaccttcaagataatcctgtcggtggggtatgagttgaacactggcattaaaaaaaataaaaataaataaataacagtaaaaaaattctcctacctgattctggaagacttctgtgtaagaaacactccttcatttaaatgatcttatggcccacaaaggacatcttagcacctctgcatggtgtctgagactgccaaatttaactcaggttctccaatctgatcttgctgcaaatcaaccaaaaaacatctactaccaagctctactcttcccttcctcatggacacagcgtgcttgtttccatctatagatctcagtctttcgcacgcttcccactgagtgtcacttcttaaaaacctgatgttcctctgtcacaccacaccaaccattcagctctatccaggccacattagttttttgtcttctttgaatttttgtctactttgcttttttattattttatatctaaaaagcagcataaaattctttaaacgtgtcattttactgacattcttagcaagattattatgcagtacttagtattcaacaaatttttaaagtacttttcaattatttataaagatactttacaaagtatctttgaaattctacatgtagatttcttgttttgtacatttaaatagctttttctaaaactaaactttgataaatactgctttcaggtgtatggttgaagcctggaattttttgcggcaacattgcaataggttgaatatagaggagttactgaagcacatgtatgaagtctgtcaggaaatgggcttgatggaagatttactgaagttaccatttacagacactgagcaggtaattacttaccgatgtaaacttgtcagaaattcaagataaattggtagtttacaatctattttgttctttttaggaatgtttagtgaaatttttgcagtccagtgccagcgttcagaatcatgaattccttttagtgcaccatttgcagcgtgccaattatgtgcctgccttgaagctgaaccaaactctgaagattaatgttatggtacgattaaagttgtcttattatgggggataagagaataaggaaaactggaggcttttttggttgttatataagagcttacagtttggtaaccactgtgcctagcattaccttgaacttggagaatcctcagttcatctctgtaacagaattgggaacagggtattaccacgtaattcttttacgtatgccatttatgttctgatgtctgcctacaatattgccatttcactcagggaaaacaagaggaagatgtagaggccagcagtaggagttacatagtacaaagatcattgtgtggtagaggaagacgtagaggccagcagtaagggttatatagtacaaagatcattggacttcaagggtcagactaattcttcatttactctgtgtgcttgggacacactctgagtcttgcttttatcaactgtaaaatgataaaatctccttgtgaggttgttttgaggatgcacagagatgtgtgtgaagtagaatgttgcctgacacatggatgcttaataaccattgtttttattaattgtgaagaatcaaggcttggtagcgagatttggaatttattgatgggtaaggattgataaaaaaattagatatgtggatgaagttcttggtttggaaaaatggatatgtaggtagggggaagattttttggatattcatagttttattttaaatggtaaatatagaattacagcacctaacattttgaaggttaaattttttaccaattttgatgtttaatagaatgatcgtgatcctcgtttgcgggagagatcactggctcgaaattctatattagaccagtatggaaaaatccttcctagagtccatcgaaaattagccattgaacgagctaagccttatcatctgtcaacatcatcagtttttcgattaggtaagaatttcattgaagaatatcataatctattggatcaaaaaagatactgaatgattacttttctgaaaccaccttaaatttagctactttcgctaacacatacaggcatgccttggagatattgctggtttggttccagatcactgcaatgaagtgactatcacgagaaagctagtcctctgaagttttggtttcccattgcataatgtttacactatacttctaagtgtgcagtagcattattcttaaaaccagtgtacataccttaat

SEQ ID NO: 59465 - DNA, 1023 bp, Homo sapiens
acttagtctaaaaatgtataattccatttataatttataagctagatgatgtttgattaagctgccatcttttgctagatctttagaaatttgcgtatatctttgtttcttgtatttactgagctactgacttcataaaaatacgctttatctcctttgtggtgctgataataaaatactgagaatgaatgaagttggtgcgggactggttgtacccacatttactaaaactatcttctcattgctgactctccatgatggctttctaaacactaaaaacaggcatttcaagtctcttttaatgctacattttgttgctacctattgtaaatatatacgtaggaggtttttgttgttgtattttattgtccttaatccgctttttaaaagaccatttatttgctacttgatattatgtattcctttcccaacaaaacagacactcccattgaatctttcccaactgtatttgccatttcttggggccaagttaaacttattcaggggttttggttgatagatcataatgactatgaggtaagtctattcacttacagcataaactttcatgaattactagaattttagaaaatacacataatttaaatttggtattaaaagatatgatacagtctactaaaaatagttgaggaaggacccagtttaatcagtacctttaccaagcactattttagaaggcaagaatataaagataattcagaaccccaggtttcttactgtttaaagaaggaaactaataagtaagtaattacgatagttcagatacagtgatcgttaatattagagagatgtttggggtgttgggggaaccatggaaggcaagatttggccttgatatatgaaattggtgatgggaagatcttataaaatagtgtgatagggtcttagaggtatcaggttttttataaagcttttattctttaaaatacagttatcattcagtatctgtgtggaattggttccaggatccagaaacataccaaaatttacagaggctcatgt

SEQ ID NO: 59466 - DNA, 1026 bp, Homo sapiens
gcccaggctgcagtgcagtggcatgtgtatagctcactttaaactcctgggctccaacgatcctccttccttatcctcctgagtggctaggactacaggtgcacaccaccatgcccagctagtttttatattttctttagaactggggtcttgctgtattgcccaggctggtctcgaactcctgaccttgagttgatcctcctgccttggcctcccaaatcactgggattacagacataagccaccatgcccagcctcttctctctttgatagttgggattattacttttaatattttgatgctggttgctttgatattaattaacagtgatattaaataagtcttaatttttccctgattgcagagggaagtggaatcccgattgcttgatgattgatggactggtttctcagttaggagagcgaattgagaagttgtggaaacgagatgaaggaggcacaggaaaatatcctcctgctagtctgcatgtaggtttgcagtaatgtgctatcatttagagtctacaaagctggggagggaggagacatgcttagctgtgtgtctggcacaaacttgggaaaacaagaagcatgaatgaatgaatgactgtataagatccactgaaggttttatccctttgttttataggcagtacttgatatgtacctattagacggcgttactgaagcagccaaacactctattgtatccttttaagttttatccagtgtttcatgtattactaaaattataaaatttcaagagtagtggaaacctgacatatctaattgcaaggttgaattttggttttgttttcttaagaagaggtgttaacccaggatctgttgtttgggctcagatggcctgtgatcaacctaaaactatatgaaaaattttgttttttatttgtttttctaggtatagggtacttggcttttatcagacacttaaatgtgtccaagacactcaaaaagttaacaacagttgctctaaaatactaccaccaagtggtcactatcaatggc

SEQ ID NO: 59467 - DNA, 1067 bp, Homo sapiens
tgtaaataaaaagatgtgtagtaatcttttattacctaaatatacccaccctgtgggttaaccaggggttgctgtaaatattaaattacagtaaaatattaatatgtattgttgagatatttggggattattaccagctttttttccaactcttaaaaatctagatgattctgtgcagttgtcaaggttatgctacaactaccctgtaattcagaactactacaccagtcgtcgacagaagtttgagcgtttatcaaggtatagtaaaacaattttagaaattacatctgtaagaagtcaaagtttctcagaatagtgttcatcgttttacaaagtgattaaatgggtagaattctcagttaagtatcagaatttgctattaccattactattttatttctcttttttaaaaaagtacacgaataacctacttagttcctttgaaatgaagtaaaggtaatagacaaagaaagtggtgttgagagtcttgaccacacttctggaaatagtcgtcttcctcgagttgcagtgacaaaattacaaagcatataacatttagagcagtgccacaaacgttgattccaggtttcttacacctgaatcacctgggaatcagtactttaaaatctgtgccggctgtaattctgatgcatggcaattgtgggaaccagtgctttagaatgaccaatttaggagagtgaacattagcttgggagattgactaggcatattttaaaattctagatctgttatttcctaagtgtatatccttggcagctttgttatgctttctaatcctgcttgttatataagttataaagtcagtataaagctaaataaaatagtatgtgcaggacatctagtgcagtgcctggctcattggacaaccgcaaagagtagtaagtgctgccgctattcacaattagaaaaggaaatcaggggaaaaaagaagagaaaagaaaaggaaatagggaccatacctgcacgttgcatcataggcactcagcaatagatattcgagtgaaggaatcactgaggataaaagactaacccaagtgatgaaacag

SEQ ID NO: 59468 - DNA, 1040 bp, Homo sapiens
gaaaattaagacttttatctaacctagagaccttattgaaatcccagtaatgtcctttatttcaatttagagggtagagagagctcagaatcatgctttgtattttgttttttggaaaagagatctagaatagtttgtatgtaattgtttttataatttcccttaatcttgtacattttgtcactttgtctttcaaaaaattgacctttttttttttaaaggaattaggccttattttatagactgcattttagtttgtgcttgccgtcgctcctcatgattaaatgacagtttttgcatttttggcggcagcattacctgaaatgacgtgctccgtggtgtggtgcactgagaaagtccattttcccaagttgcctccctgaagtgttgatgttcactcggttagggtgctgtctgccatgcttctccaccaacaatttagaactctgtttgtaattaataatctttattttttcccttttgtatttacaaataagaacaaccaaattctgccactaatttgcgctttgttcttgaatggacgtggaataaagtggttctcacaaaagaggaatttgacagactatgtaagtattagaggtctagatgtaggacagaatttaatattaaaatactaaccttggtttatgtcttaagtacataatttttaatcattttgaagttgtaaactcttttctttttttgagactgagtcttgctctgtcgccaggctatagtgcagtggcgcgatcttggctcactgcaggctccacctcccgggttcaaacgccattctcctgcccgccactacgctcggctaatttttttgtattttttagtagagacggggtttcaccgtgttagccaggatggtctcgatctcctgacgttgtgatccgcccgcctctgcctcccagagtgctgggattacaggcgtgagccaccgcgcctggcctgaagttttaaactcttaaaatttgaagatgtcccaaaagaaaattatttctttttacattaaagtgataaaagtaatttttttt

SEQ ID NO: 59469 - DNA, 1007 bp, Homo sapiens
tctgttgtatgagcataccataatttgtttatctacaattaatgggcatttgtgttgtttccactttatggctattaataatggtgctgtgaaccttcatgtgaaatttttgtttgggcgtgtatttttgtttctttttggtatatacctaggtgtggaattggagggtcgtgtggtaagtctatgtttagcatactgagaaaccgccaaactgctttgcagagtggctgttccattttacattcccaccagcagtgtatgagagttccagttttaacacgtccttaccatgcttgttattgtcttttgattatagcccttcttatgggtcatactgatttttttagccttaaaatttttaaattctaaaccagaacttgcctatgatctcacaccctctttctttccatttctttcctttctgtaatgcatggtttaggaagaacagttagaagctatattgtcagcagcaattcagactagttccctgggacttttgactggttatatccgaagatggataacagaaggtaagattctgataacaagtaaaatgtttggtatttttaaagttatcaacttgctatttgttatatttttttcttagttattttaattttgatataattgaagatccacatgcagttgttaagatgcaatagagagatcccaccccctttagcacgtttgcccacagtatgatgatctgacaaacctttagtacagtcagcaccaccaggatccctcatgctgccgttacagccatacctaccttctttctgccccatccttaacccctggcaagaattttgtcattttaaacatgttcataaatggaattatgcagtatgtaacctttttggattaccttttttactcagcaaaattctctaggaattcatccaaattgttgtgtgtatcactgttactcttcacacacatacacacacacaccccaaacgcatattgtctgttcagaaccatttgagaatagttttttttctgaa

SEQ ID NO: 59470 - DNA, 1063 bp, Homo sapiens
gcctcccgaagtgttgggattatgagcgtgagccaccgtgcctggcctgaaaaatgcttttctagggaagtatgatgtggcagaccttttcattgataatcgtccagatgtggatgaatgctgtatttatacttaatatcaaatctctttcacattagataaagaggagtagactgcaggagttttcctgtgtgtgtgtgtgtgtgtgtgtgtgtgtgtgtgtgtgtgtgttttgtcaagatgtcaccaaatctgtcagctttagagaagacagcagggttatacagttcataaaaatatataagctaccttttgctaatagtagtattcacaactagcaagcattggttaagcttaagaacctataaactctgtttcttgcaggaaatatagtctttcataatttccacttgctatctttaaattttacttaaattttaagtgtaattaattaatcttaaatttgattattcaaattgagcattgattgatgccttactaatttatctgttacagactttgacttttttaaagaaatcaggtccatcactcaatgaactcattcctgatggttataatcgatgtcttgtagctggccttctttccccaagatttgttgatgttcagccttccagtttaagccaagtgagatgatttttaactctattgtttcttttggttggatcacgttattagctttctattacagtaaaaatgtattagataatttctgcaaaaataggtgaagtagtgtaatgctgactctgggtgatcagcagttgtggtcttaggtttggtttaaaattcctattcctaatacccaataggccataacttggcagcaggttgacttagctgtatagaaggatacaggacaggaaacacctcatggctgcctcaggctggaatgcagtggcatggtcatggctcactgtagcctcaacctcttgggcttaagcgatcttcccaccccagcccccgcaagtagctaggactacagacaggcacaactatgcttagccctttttttttttggtagagacagggtctcgctatgttgcct

SEQ ID NO: 59471 - DNA, 4111 bp, Homo sapiens
ggtatagtattgctggtctgagatatatgcatatataattttgatggttattccagtttacataccaaccagtagtgcatgagggcttctgtgttaaataactttagaagacttgttggtaattatttttgagagactaaatctcactttttatttgttttaaagtatgtaaaattttagagcctttttccatgattggttctcttcagtctaaattgttttctttgtattgtgtgaacaatctttaaatttggagaatatttaattttagagtgactttttgcctagaatcagattaatatttgcgtgtattttatgttacaggggttagaatactgtgaagaaagatacaccctggacctgacaggtggcatgttccctttgaggggacagacgagtaataccaaattgttgggatgccagagtatagagaaatttcgatctcatggtgacagggaggaaggcgtgaatgaaggttagttaaagtacttgaaatatgtcatgtgaaggctggatttaaaatttatgacaggtgttattttctagatttcatactcctggcagttcagaaaattggaatagtaattaacggaatttattcagttctatatgagatactagatatttcttgctctccagattgctatgtataactaaacaataaaatagattagggtaatgaaggacccttttattttaatctagttctcaaaacaggcgatccctagtctgaactagtgtgagtagtctttgaatgaagtttacccgtgtattttttgagccatgtatggcatacatgccttggttgtcttgaatgttttctctgtcttctttagtgtcatcgctttttcctggcagttttttttgcatcggttttttaagccaagattatcgtaatccagccctatcactagtgatgacctttgacaaattgcttaacatttcagagctctgtttctccatctgtaagtgggatcctagttagaccttttgcaaagggtagttgtgaggattaaatcacacagcgaacttacccatcccagaaatgccctttttgctagggcctgtatctgtatttctgatccaggtttcagatccagttaaatatgtgaaaagcacatgttgtcatgagctcacgtctttttaaagtttttatttgtttatttatttagagacaggggtctcactctgatgcccaggccagtccaggccagagtgtggtggcatgatcttggctggttgcagccttgaccttctgggctcaaccaattctcccatctcggtctcccaagtaactgggactgccggcacacaccaccacacctggctaatttttgtattttttgtagtgacagggtgttttgtttttttttgttttgtttttttgagatggagtctcgctctgtccagtgcagttgcacgatctcagctcactgcaagctccgcctccggggttcatgccattctcctgcttcagccccctaagtagctggggctacaagcacccgccaccatgcccagctaattttttgtatatttagtagagacagggtttcaccgtgttagccatctcctgacctcatgatccacccgcctcggcctccccaagtgctgggattacaggcgtgagccaccgcacctggcctgtttttgtttttttagagacagggtctcactgtcgcccaggctggagtgcacttgcacgatctcgtctcactgcaacctctgcttcccaggttcaagcgatcctcccacctcagcctcctgagtagctgggactacaggtgcatgccacaatgcccggctaatttttgtatttttttgtagagatgaggtttttgctgtgttgcctgggctggtctcgaatttctgggctcaattgatctgcccacctggccttccaaagtgctgggattacaagtgtgagccactgcacctggccatgctctctcttattccccattcttcctatttccttatagtagtgtttcagatttttactttcttcttctcctgttgatgtctcttactctattcctgtctttccattccacaggcaccatccaagcacttttctttttctctctttaccttataactggataagtccttctcagctaaggttcatcataataaagccttaatgcccaaaagcatccgttttaggtagtgaattaacttctctagtactagctccgtaccgtccttgcgagagagactgttcattcaaatcattttgtactttctgcctctaatacctcaacgttgctcaagtattaactgaaaacaagcaaggatataacttctgatgagtgactactttttaataaggccttaaaattgagaaacagtcaaaatgcaagtgaatgaatctggtcttacatacaaatgatagaaatgcgttttgatgaatcaagtgaaatatgaattaaaccgcttaatttatgagaaaatcttgctataattctgttgaggtgattttactttgagattctttattctgtttttaaaaattatctttttcttccagctctatcgcctgacactagtgtttcagtctttacctggcaggtgaatatatatggacagggaaagccttctgtatatttggggctttttgatataaatcgttggtatcatgcacaaatgccagattcgttaaggtatgattctttttttttctctctcctttctctttgtatttgtatgtgtagctgaccaatgacttagtaatgttttaaattttcttttaggtcaggagaatatctacataattgctcttattttgcactgtggtcattggagtctgttgtaagtaggacttctccacatggcatcttggatatattagtacatgagagaagtttaaatagaggagtccctccttcatatccacctcccgagcagttttttaatccaagcacttataattttggtatgtatttccttaacattacctcttaagaaaagtaatgcacaaaagtatgtaaatgtatacgttgtgtagtttattcatttagtgttatctgtttgtatctcactgttagttaacatatggataacttaggaaattaatatatacacacaagaaacttagtatttatatgttttataaaggaattatgacttggagatatttagtatttatatgttttataaaggaattatgacttattttgaacttgctaggaaagatattaactgtttcacatctggtgcattttatagtagcttttattttttttgctgtgtttctcagctgtgcttggagttttttgggttttgttttttgcttttttcttgttttgctgtgtaataggtttgttatctattcttaggatgaaaatacctagaaaagtttatttaaagatttattacatgtaataatttgacaccttgccttgcagtctgttattggataaattttgttctattaatgccattttaaatatatgtaagtggattattttttaaatcttttttttagatgccacttgtttgttaaactcgggagttgttcatttaacttgtactggctttcagaaggaggtaggtaacaactagtgatttcttaattgaactgaagtcagatcttagaatatagttgatttatggatttaagttttacttagtgatattgacagttgtttcagcttaaatggtagcttctgctaggtttatgagattatcaactagtagtatcagttactaatgacagcctgccggaagacgtattgtatgtttttagcaactaatttatgtagatgctagctacgtgaacctcaagctttctgtctcctcagaaagcttatgaggaaatgaagtaatgcaaagaaggcacctagcacagtggtatagtgcctggcacaggaaaaaaaaaaagaattttgaaaaatacttttctctttttgagacggagtttcgctcttgttgcgcaggctggggtgcagtgacaccatctcggctcattgcaacctctgccacccaggttcaagtgattcttctgcctccgccacctgaatagctaggattacaggtgctcaccaccacgcccggctaatattttgtatttttagtagagatggggtttcaccatgttggccaggctggt

SEQ ID NO: 59472 - DNA, 1108 bp, Homo sapiens
agtgaatagtgtggtatgaggaatattaggaaggtgtggtgtgttagaagccaagtaaaagaaataagaactagtaataggaattattaaaagggatcaactagtagtaaaattcagattcagatgatgtggctctggaatctatgctcttaacacttactgcatgcttcgtgcttgagttcactacagggttgatttagtatcttcactttgtgtcttgataggcctctcatggtcgagggcaacatccatattttaaaaaaattttttccccacccttcccccaactgcccgttctccttcccatactccccattgtcctttgaacctctacattttaagtaaaaatagcaagatggaggaagagaccaggatgaaggcataaaggatattttgtttattaaggaaggttctgtgaggttactatgggataattctgtttacatcctggccacaactttaccacagggtactgcacttagctgcaaaggaagctgggagatgttatagaactttaggcaaccatgtgtttaagtagagtataaccattgaggaaggaatatttgagaaagaatattgagtaatcagtctttgctacataagatatctcctacagtatgcaaacagcatcgatttagttgattagaatcaataataaatatcaattattatttcaaaggactacatttttataaaaattaccgaaaactaaatttttcacagtgattttagttttgtcacatgcactcaacattgcaagcaaactaaacttacttggacagtaagagatgtttaatgtattaatatatttagcgtgtcttcgttaatttctgtttcagtgaaggggatgttttgagtttgcatctgctgcagctggcctttggtaatagaaagtgtttggcatcaggacaaatcttatatgaggtaaatggtcattggactatgggtttatattaccattttgttgttttctattttaaatatgttgtctttgttttaagatattgaaaagtgattctttttttttttttttttgagacagagtctcgctctgtcgcccaggctggagtgcagtggtgcaatcttggctcactgcaacctccgccac

SEQ ID NO: 59473 - DNA, 1047 bp, Homo sapiens
tctcgtggcagtatctcgtctctttgtagggcatcttttatggttgagcagtatgtaggagtgtacatcaaatatgactcttaggaccagtttacacagacatgaatgcatccacttgagtaattctaacactccccagttctacctcttgggcattgaatatgactcttaggaccagttacacgcacacataaatgcatccgcttgactgcatctgagtcttcccagttctgtctctgggggatgggtgccatgaccatagtcttgatgtcttgtgccgtgtgtatttttgcagataagatgacttggccatggcccacagatcacttattctggggaagtgtaggaacagtggttgcctaacccaagttcttacatgatgtacctttttcctttctaaaaaataacttaaaaatatgaaatatactaatttgtttcagatattacatacaattggaaagtggacaagttcctgtatatgctgtcacttttcaagaacctgagaatgatcctcggaattgctgttacttgtgggctgttcagtctacacaagataggtaggtctcatacaaactttgttttgttttgttttgtttttttggagacagagtctcgctctgttgtccaggctggagtgcagtggcgtgatttcggctcactgcaacctccgcctcccggattcatgccattctctcgctcagcctcccgagtagctgggactacaggtgcctgtcaccatgcctggctaatttttatattttcagtagagacggggtttcaccatgttggccaggctggtcttgaactcctgacctcatgatctgcccgcctcagcctcccaaagtgctgggattacaggtgtgagtcaccacgactggcctgatacatacaatctttaaaaattagtcaaaaatagaacaggtagtctatgtagttatgtagtcttttttagtgaaggcaacacaattctttcagtgaattagtgagtagtagttgaaattattttaaaagttaaatggttgtttctacatgcttgaataattctga

SEQ ID NO: 59474 - DNA, 1026 bp, Homo sapiens
aaaatgagaacaatttaggtttgcgttttatgcgtaatgattttatggcttgaataactagactgactttctaagcctcaggttatttcatctttaaagagaagtactcacacatagtctactatcaaagcattgtcatgaacattgaatgagccaggtaacacaatgcctggcgtatcagtaagctctcagtcaacatcaattgttagtccaactgcgtgatttttctatgtattgagtaatggtgtaattcctagtatagctgaagatttcattattcagatcacaagtatcaaatgcaaatttactctatagtcttaaatctattataactgataacctgctttaacttaaatttattgtgttaattatattttcttactttgcagaagaaaagcaaatcacgtattatgttttctaggtaacagctattgaacctataattaatcatggaggagccagtgcaagcactcagcatttacatccaagtctgcgatggctttttggagtggcagctgtggtcactgatgttggacagatccttcttgttgacctatgtttggatgacttgtcatgcaatcaaaatgaagttgaagcatcaggtaatcagttctttacttgaaaccaaaaatggagcacctggatattctgatgcaatattttttaaagtagccaaatttttttatagcagctggagtaaaataaaagatatcttcctatctataaaaaaaaaaaaggtattttaaaatcttttttattgtctggacctgagcacagtggatacttcttgcataagatactgttttgttgatcaggtgttcatatgttctcaagtaggccttgagaaaggtagtgataattgattttatttgttttcatttacatacctgaataagatctattcttaagtaaatgctggaataagggctaaatataagaaatcttgagccttatcagccaatatgaaattacccagcaatgtaggatctaacatagtgttcttggcatattgtttatgtttgtgtg

SEQ ID NO: 59475 - DNA, 1212 bp, Homo sapiens
ggtttagctgccttatctctacattgaggtgtgataaggaataaatgagataacattcaagcacataccatggtggtggcttttactgaatgactattattattattatttgagatgaagtcttgctctgtcacgcaggctggagtgcagtggcatgatctcggcttactccaagctccacctcccaggttcacgccactgaatgactattattattgtaatgatagttgcttgattaaaagatttcaatgtggagataatatgtaaagttttatgtaatgaacatatagttgtatgtaaatgagctaaccgttattgcatgttttgtgtatatacaatattaaaataggcaatttttttttcttctagggaaaaatggacttgcttgcttggcttgtggtccacaacttgaggtagtaaactctataacaggagagcgattgtctgcttacagattcagtggagtcaatgaacagcctcctgtagttttagctgtgaaagaattctcttggcagaagagaactggattattaataggattggaagaaacagaagggagtgttctctgtctttatgaccttggaatatcaaaagtagttaaagcagttgttcttcctggaagggtaggtactgtttaagatacctggacatttctctttcaaaactgaacccctgctggttatataggtgtgttactttttgaaatttcactgacccgcaacatttacaatttgtatacttttatgtaaatgtgttactcttaggtaaagtgtttagaataaaaatgaggttaaagatgatatgttattcaaggaacttaacatttaaaatgtaactttcttattggttaaaacgttccagagtaaaaatagcaatgacatgtaatgttctgatactctttttttgtgaaaagtatcatctaaatcttgttcttatctccagttgtgttctatgaggacactcgaagtttataaaaatgtattcattactattcaatttttaaaatgtttttaccttttaaatttgcgacaatagtcttggattggagcattatggaaaatatatgttagattcccaggatgaataaattgaacttggtctgtgcttttagagagcttatagtctagtgggagaagacaaatgaataagactagcataaatatagtgaatactttaataaatttaagcacttggaacatgtagaatgggtaa

SEQ ID NO: 59476 - DNA, 1112 bp, Homo sapiens
accctatgaatgtaagcactgtgggaaagccttccgttactccaattgccttcattaccatgaaagaactcacactggagagaaaccttatgtgtgcatggaatgtggcaaagctttcagttgtctcagttccttgcaaggacatataaaggctcatgctggtgaagaaccctatccatgtaagcaatgtgggaaagccttcagatacgccagttcccttcagaaacacgagaaaactcatattgcacagaaaccctatgtatgtaacaattgtggtaaaggcttcagatgttccagttcccttcgtgaccatgaaaggactcatactggagagaaaccctatgaatgtcagaaatgtggcaaagcctttagtcgtgctagtaccctttggaagcataaaaaaactcatactggagaaaagccctataaatgtaaaaaaatgtaaaggctttaatcactacagtttttgtcaaaaacatgaacagtcacatacttgagagaaactgtgaatgtaaggtgtaggaaagtacttaattttcccagatttcctcaaatacatgaaacgaatcaaactggagataaaccctatgactataagcaataaggtaaagcattcaatttttccatttctttttgaaaacttgaaaggactcactgaagaaaatccatatgaatgtttaaaatgtggtaaggcctgcagttgttccagtggtatttgatggtataacataactcattctagagaaaaactttatgaaggtatcgaatgtgagaatgccttcatttatcctataactcactcagagacacatggtaacacatactccagattgaccttataaataaaagaatgcccaccagattgaaatcctagaaatacagaaaattctgaattttaacaattactttaaaggtcatgtgaaaactcccactggaaataaatcctgtaaatgtaaatattatggaaaaccttatggaaaataattatagtacaattctcaagaaaattcactatgtgaatgagatgttttaggagctataaataaattgaatatattggttgctcatttttgaagagagtctctagaatatagattttcacttcttttgaa

SEQ ID NO: 59477 - DNA, 1034 bp, Homo sapiens
ggcacataacttgtttcatttcacaggttcacagctggagagaattttgtgtcaggtagaattgtgccttgagtttcaaccgtaactgatttagatgatatttaaatgagatgttggactccggacttttgagttgatgctggaatgaattaagactttgagggttattgggatagaatgaatttgtttggcatgtgaaaaggatatgaatttgggggaaccaggggcagaatgctatggtttcagtgtttatatctccccaaaatttgtgttgaaattgtaatccccaagatgatggtattaggaagtggagacttttggggagatgatctggtaacaagggcaaagtcctcatgagtgggattagtccctcctaaaagaggccccagagaactcccttgccctctccatcatgtaaggacacagaagacacctgtcttttgaccaagaagtgggccctcaccaggcacccagcctgctggcaccttgatcttggacgtccagcctccagaactgtgaggaacagatttctgttgtatagaaactgcccgtcctacagcgttgtgttgtcacagcctcagtggactaagactgagacacctagctcgtcccggactgaggcatccctgttctcctgtgctttcagagtcgggtttctccattcaaggacatgattttatgcttctctgaagaggattggtcccttctagatcctgcccagactggcttctatggagagttcatcattggggaggattacggggtctcaatgcctccaagtaagacttaacttccccccacacctcaagaccagggaactgggcaggggagttctcacttggagtaagagtcaacttcgtcccataggatcagggaagcggggcctgcatcagatctctctgttcacccccaacctggacaggaggtcatttgcacacagcggccctacaggcagtgtgtccgattgaccatcacctgctgtctcgccacatcaggcttatcagaaccaaatagaacatgtgctgtatgtccat

SEQ ID NO: 59478 - DNA, 1047 bp, Homo sapiens
cccagggcttctccaaagggctggtctctgagggcattgacagtttccttgtcactgtcccccagaaatgaccacaggagaccagaacactgaagccagtgatttctgtttggaaatagggtcgtcttctgctgctgacccccatcaaatcccatcatgcccacagccctgtgcccccgagtcttggctccgaaggaaagtgaggagcccaggaaaatgaggagcccacctggagagaaccctagcccccagggggagcttcccagccccgagtcctctcggcgtctcttccgccgtttccgctaccaggaggcggcgggcccccgggaggccctgcagcgcctctgggacctgtgcgggggctggctgcggcctgagaggcacaccaaggagcagattctggagctgctggtgctggagcagttcctggccatcctgccccgggagatccagagctgggtgcgggcgcaggagcctgagagcggagagcaggctgtggccgcggtggaggcactggaacgggagcccgggagaccctggcagtgggtgagtagaagaggtggggctgggacgggtagagatctggtacttagacactttggctgggccatgcatgtgctggctggggaatgaggagttccatcgagagccatttactttggttaggtccagactagagtttcctaagaaagccagttttactccctgaaggctctaatttgggcatgatagtgtcgtgcccctttacagcccagtccaaggcctaagttgagcctttgatggtcagctgtggagtggatggtcaccaggcccagggagagatgggacctcttcccctagccctgaaaagctgtctctgggattgcagctcaagcactgtgaagaccctgtggtgattgatgatggggacagccctctggaccaggagcaggagcagctgccggtagagccccacagcgaccttgcaaagaaccaggatgcccagcccataaccctggcacagtgcctggggctcccaagcagaccaccaagccagctcagcgggga

SEQ ID NO: 59479 - DNA, 1035 bp, Homo sapiens
tgcgttccttagaccccgtgcggaccctgctgagccctcagcatctgtgagtgagtccctccgcgtcaccttggcctcccgtgtagctagatcagtcttccgaccccttgttctacttgcacagatttctgattaacctcttctgctcctccagagatgagtcagggctccgtatcagctccccaaggcatttgctggcttctgacatttacttggaggactttgggctgcgaaagggcaaagtttgccgttctcatctctttttttggtgcctgcccccgggtcttgacctttctctggagtcttctctcctggttctttacccacctctttggtttctcctgtggttctttgtcaaggtgtcccctagatgtcacactctgaggctcagttgtggctgagtcttgcattgcaagtgtttttgcaggtgtctctgcgaagcgtggatatgggatggtgaaagtggcagtgtgcacagagtgtttgggattagatgggcaggtggaagggcgtctaggtaggacccctttgtcctggtgtgaggtaatgaggttctagagtgtgctgtcaaggtgaaactaaaaggaaaggatagacaggagactttgtgaaagacgaaattatggtagtttggtaacaaatggatgcagggactggtgggtgggtgtagaagaaggcagaaaatcttgccaaggacattgcaagtcctgaatcagaccaggaaaattaaggttcaattaacagaaataagtccagagggggagctaattttggaggaagtgtggtgataaatttgcttttctatgtggtccagctggtggagagacatcaagaagcacttagagaaatacaggaaatagagaggtgggtgacctaagtcctacttcctatcctgtctatgtatatataacaaaggccaaatgaattcatgtgttgaggtctgctttcctatttctaatagcaatggcataaaatgaattctagccaattctaaagtcactagtagatagtaatattcacgaagtagccacaaat

SEQ ID NO: 59480 - DNA, 1406 bp, Homo sapiens
ctctccccttacacacacgcccccaacttttgaggagtcttgagaatctccttaacgtccttgacagttgatcaatgaaagacatgtagggagatccagattgcaatgaatattgtattatttgcttaagaatttgaagagttattgcttcgtagtaaatgaagatgagcatattgaggtttataagggaggctgaggttcacttggccagagattcagatgttcactttattttataatcatcctttttaaaaaacaaaatagactgacatgggcaactttctcaagatttcatatggcacattgcatgtagggataaacagtaccaacattatttgcttggagtgctttaggatcgaggaatggggaagcctaagcaaaacccccaaatcttggcaagctcaggaggagggagcagatagcactgctggggtgatctgtgctgcttgaatgctcttttggagaatcacttccctgtagataggccacagattacagtttaccaaaagcattgactgtcagacccacatagctggtttccattaacatggttttgctctaggtctttttcaagtcctctttttttgtttgtttgttttttcttttttctttttttttgagacggagtttcgctcttgttgctcaggctggagtgcaatggcgtgatctcggctcactgcaacctctgccttcagggttcaagcgattctcctgcctcagcctcccgagtacctgggattacaggcgcctgccagcacgcctggctaattttgtatttttagtagagatgggatttcaccacgttggccaggctggtcttgaactcctgaccacaggtcatccacctgcctcggcctcccaaagtgctgggattacaggcatgaaccaccatgcccggcctcaagtcctcttttaaacgtggaaacttcttcctgcattacacagttcttttctcaccctcttcctgcctcccttcctttcactataccttagctatactgaattggacatataattcttagctcatgcatggctttcttttaataattagctaaacaatagcatggtcatatatgatgatatcacccaaccagagaataacaacattgtccgtatttacctctgtacattttctctgcagcctgtatgcctgtctctcttacctctttgtgctgattgttctgttgccttttttgtagttttcatagtttcgtcagtgtgcatgtatttatacatttatgtatgtatgtatatgtgttgtttgtgtatatatgttcacatgtatgtgtagcctaaatatagcacctaaacaatattctatttacttttagtcatttatgaacttcataagaagcttattattctgtatagagcaacttggagctagcttatttcactcagtagta

SEQ ID NO: 59481 - DNA, 1652 bp, Homo sapiens
acaccgataccctgagtctgctgagcctgcgcacggtggcttcagacctgcagaagtgcgactccgtggagcacttgcgaggcctctcggaccacgtcagtctggacggccaagagctgggaacgcggagtggagggcgccggggcagcgacggcggagcccgtgggggtcggcaccagcgcagcgtcagcctgtagccgaggggccagggttcctggcttgaatctgccaccacgggccggttggggcccacagtcttctcacgccctctcctctggggcctcgtcttcccgaaggtccccttctccagtgcttccctgggagaggccagctgtgttcgagtcctctgtgcctgccctggcgttctcacagcctcccccttcccctcagcaggcggctctctttgccttacccattcagaaggctcgccctcggcgctctgtctgcctctgcctgccagctcatcacgatctgcagggcattgaccctttgctttccctttctgctccctctctttccatctgtttggctttttccctcagggaacttggtctagaaggcactgggaagctcatcagagaaaatgggtgctgggcctgagtactcccgtcggaggggatggacagtcacccctcccgttggtttccagccccgccccccttcccaaggcaactctggagggtaccctaggtatgctgctgagccctgccccccgtcctgctccagcctgcccgtgtgtaacctgtaagatgtactgtgtgcctccggaagacaccacctttcccttcagcattccctttcatgacctgaggcactctgcgatgtgtgccccaaagcagaacttacagggcctgcaggaagctggtgtcagggagagaaacccaaccccactgtcaacatagggagcatcaccaactccagactggctcctgtgggtatggtgtttccgctgggctgggtcctcaacattgccaaggtgctagtgggtccctaagagggcccatgttgggggtgaagtcatgaggtcctgaaggcttaggcccctgtcattcccaccctcactcttgctgcacagttgtgtttactttttctgggtagaggatgctgaactgactcagcaccctcctgcaggacggggttagggaatttggtgctcaattgctctcccttgctcttccccaaactgaaaatacctactgcaggatccctcggggcacactgaagcttggctgccaaccctcttacttcctttgttacagggaggggttggcttggggtgaaaagttctgccctccgcagggagcagctccagctgcctggcagtgctcccagtttgtagggaagccacaccagatctgggtgccttgggagaaccagtccttccttttgacccaccccaggaagatggagtgctcttttctaggcccatgttctgccagcaaccgggatgcgtgggcaactggactctgcacgggggtctacaggttgagggaggttggtcacaatgagaacctcggggtttgaggtggccatgggcagacagccgaaagggagggagggtgtgggtgtgcgtgtgtgcatgtgctggtgtgtaagggggaaagggtctttcctggttttatttaaataaagtagtttatgtaacagttaac

SEQ ID NO: 59482 - DNA, 1050 bp, Homo sapiens
gtttgggacaggtgggatatgcaagcctaaataggtggtagatgattccaggtgccagggtctgtccttgggccttgagcttcaatcctaattcccatcgctgactccaaggttctgcttggctgctgcccactgccttcaattcatacataaggacccagctctccattccatgtgtctcctttgagaaagaaccagcctagaggctgaggtggggtggtgcacttccatcaggagttcattggtttgagtgggattggcgggcaggggctggggtggacaataatgaagtcttttagctgggttcgtatcttacttggttgtcatgacccatcaggtaagggaggtccagacgggctccatgatttggataacaactaattagaacctgagcctcctgacctccaatacggtgcactctggtgagggacagtgggtggggtgggccaaggaggggccacagggtgggggcagatgctggagtgtccctcatatgcctgcagacacccgggactacatctgtgagttctgcgcccggtctttccgcactagcagcaaccttgtcatccacagacgtatccacactggagaaaaacccctgcagtgagtgctggggtggggtctgagggccaggggctagaagggaggaggtggagtctggaagctaggcatataggacacctaggcagtggggagcaggaggaaccccctagggaagtcatgatggcctgaggccttgttccttccctcttctgtccctgactccaggtgtgagatatgcgggtttacctgccgccagaaggcttccctgaactggcaccagcgcaagcatgcagagacggtggctgccttgcgcttcccctgtgaattctgcggcaagcgctttgagaagccagacagtgttgcagcccaccgtagcaaaagtcacccagccctgcttctagcccctcaagagtcacccagtggtcccctagagccctgtcccagcatctctgcccctgggcctctgggatccagcgaggggtccaggccctctgcatctcctcaggc

SEQ ID NO: 59483 - DNA, 1526 bp, Homo sapiens
caaggggtccaatccctacagtcaaccagagcacttggcacagcaggtaccaaggctggggagggccacagacactgggatggtgaggtgagggtagacagacaggggagaatgccgcccacagaagatgacagagaggaatcaagtgaaaagggaaaatgacccgggatgacagggaagctctaggctgagaagagcattcggcagggcatgtcagacattctggagtctgctgtggagaagatcaaagcagcccctggaagtttaactgtggaaaaatgggattctaaagaaggggacagcccatgcaatttagtgagccaggatgccaacttaggtcagtgaaaagagaaatactttgatatttaggagttaaggttgaagagcctgttacccttaatagtgttctaggttgagagtgtgtgtgtgtgtgtttccaaagcagatttagaagaaaatcatatatatacccatggtgaactattaaaaagcaagcagttggggagatactgttgtacgtgaatactgacatcaagtaggatgatcatacttacccaaactgctttcccctctgcagcagatagtgcattcatgattaggtgaaccaggggtgtcacccagagtgatactttgtacagggaacattgcaggacattgcagggtgagagtgtgacaaggaggtgagataatggaagtaaagcacagaattgggtgacaggagagttgagtggtcaggatgggatgggtgtggtactcatggtgtaggtgaggactgagcctcaaggaaacgagcaggccatgacagggagaactgctggggcacaggggccaggaaggggacagaggagcatgcctgccgggtcagctcagttcatctctccgtggaaggtggctatccttttgcctcttctctccctaccacccacttccttctctagcaccacaaaaagtaccagcacatccaccagaagtctttctcctgcccagagccagcctgtgggaagtctttcaactttaagaaacacctgaaggagcacatgaagctgcacagtggtgagtggtggaactccaccttcctctgtgggaccttttaccttcctttgtgggtcccgtcaccctgggctctgtgggtttcttcacctccccctctacggggtcctgtcacctcccgctctgtgggtttcttcacctccctccgagggatgactctccctcatcctgtatgccctgtgtgttgagcacctgcttgttttaaactgttttgggtactgggtacagcaatgaacagagcaggcagcgctaaccctcttgagacatccactttagtgatacagggctatgaagaaatgtggaagcaagggaaaggaggagagcataaggaggagttgctattgtagaaagagaagatgctttgagcaaagacttaagtgaggaatggaaacctgtaccttacagactatggacagcgcgtgtggaagggcccttaggtggtatctgggtgacatgttccaggaatagggaagagg

SEQ ID NO: 59484 - DNA, 1318 bp, Homo sapiens
ttgactgtatagttttgtgaactatgtgaatatcatctctgaaacagaacaactcctcctactcagatagcctctgctccctcctcctccttcttaaaagtctctgcctgggtgcagtggttcacacctataatcctagcactctgggaggctgaggcaagaggattgcttgagcccaggggtttgagaccagcctgggcaacatagtgagaccccgtctctatttaaaaaaaaaagaggagtctcccatcacttcagaccttagaactttatgtgtcctcatcccttgagtccagagttccttctcttttgactttgcctgtcccacagatttggaatctgagcatgatgagaggactcaagaggccaggttgcccaggtgaggatgtggataggagagaaaaggcggaattgcataggtgggaggatgagggagcaggacctcaggcttgccttctttgggcctgcaggagggtgggacccccaccagagaccttcccacctccaggagaggaagagggtgaggaagaagaggacaatgatgaggatgaagaggagatgctcagtgatgccagcttatggacctacagctcctccccagatgagcaagttggggttgagggagaatgagcagagcaagagagggaggcagctggcctggcagttcatggctttgcagactagagggaagggcttgttagtgtggagggaagggtgggttttggggaaggcaaaaagaactagaggctttgaactgagggggtgaaaaggggtgaagtcaggtgcagggagattgagggctgaaagcagatatgaatggggagcctagggtgggggtagggttgtttcaagtttgagatcttttcagtttaggggctagggtcgggcaggggatggctgactgcccagaaagttaatgccatcttcctctttgttctcctttcagtagtgagcctgatgcccccagactactgccttcccctgtcacctgcacacctaaagagggggagacaccaccagcccctgcagcactctccagtcctcttgctgtgccggccttgtcagcatcctcattgagttccagagctcctccacctgcagaagtcagggtgcagccacagctcagcaggacccctcaagcggcccagcagactgaggccctggccaggtaacctgatggctgagacagaaagggcaggggcgtcctgggatgtggccctccctcgaggccctctgctccctctttgctgcccgtagcactgggagtcaggcccagtctgctccaaccccggcctgggatgaggacactgcacaaatt

SEQ ID NO: 59485 - DNA, 1061 bp, Homo sapiens
agcccttggtcctcctcacttaggtgttctgcatcccacagtaagctgagtcatatggaggcaagaacattcttaaaaataatttaatctgtttgtccaaaagcagaaagtaaatgtttacttgttttcctgtaaactgagaaatatagtaattttagcttagtaattatggtgtgcacaacgttttcagatttttgaggttgattttaattaatggttggatgttatcagggagatagtgttggttgtactttgaaagttgaaaagttagagtgctttctggtaggcagggtcatctttgtagtttttctgaatgtctttttacaagcaggagaaaaaatatgaatgtctgtagaggcatttaatttgccttgtctttgactaactggcacaggttacattatagttgttatttttggttgactcatctttataagatgaccaggctagagaatcagagatcagaggatatgggatgtgattatgacagaatcaaaatatttgtcttgcttgactctgttacttaaaggatttctgtatttcacatggtgcttttcccccatagagattgctcatatgaaaaccaactcttccttttacagtctctaaattggacaatttatttttgcaattaccatttgtgaggtgtttaaataaatgtacatgtacgagcttccagcttcacaaaaagaaatcaattaaaatgttaaaatttagttctttcattcatactgaataccattctgttggcgtttttttttttttttttgagatggagtcttgctctgtcgctcaggctggagtgcagtggtgtgatctcggcttactgcaacccctgcctcccaggcttaagcgattctcatgcctcagcctcccgggtagctcgtactacaggcatgtgccaccacacctggataattttttgtatttttagtagggggccggggtgggggtggtttgccatgttggccaggtctcagactcctggcctcaaatgatccacctgccttggcctcccaaagtgctgagattacagatgtgagccaccgcacccggccctg

SEQ ID NO: 59486 - DNA, 1054 bp, Homo sapiens
ctggcctatcattactttgatgaatgatattattattcatctattttaattcatttgaataatacaaataactaaaatacacagtgtgagagttcttattttaaccattggttttatgttaatatttttctgtttttcatatctggcactctgtccataactgcttcaggttgcattttctatatttccttgaagcagatagactttctgaataaaggaaaactggtgttttctcttcattagatcttcattaaaccctcaccaacatttctactaggaattcagcatatgtgagtttatttctaccaatatctcttacatactttcagttacttgcagtgccattatcaagttttcaaaacaaatgtaaatctgctttgatacagtgatttgtgcagatgttagtgacctggaggttgttcatcaggttttcagtgttttgtcttctcttagtctccacttttgaaatgtttagtagctacaattttataacataaatgaggaccataataataatatatcatgtattgtctgtctactgtatatcagccactgtgcaaagttacttacacgtacactgtccaacttaaacttacacatggtccttttttttttttttttttttttttggagatagggtcttgctctgttgcccaggctggagtgcagtggtgccatcttggctcactacaacctccacctcctgggttcaagtgattctcatgccttagcctgccaagtagctgggactacaggcaggagccaccacgcctggctaatttttgtatttttagtagagttggggttttgccatgttggccaggctcttctcaaacgtgtaggtgatctgcccatcttggcctcccaaagtgcagggattacaggcatgagccaccgtgcctggccacacattgtcatcttaaaagcatagcagtcagtcttccttttaattatggaaagttcaccttgtagcacactcttataattgcatcctatcccagacacacacacacacacatacacacgcagaaacagaagagaagtgggtgagata

SEQ ID NO: 59487 - DNA, 1053 bp, Homo sapiens
acataaaagtttgagagtctctgggataagaggtcaatgatagaaatgaagataatgtgagggagataagaacccaaatcaaaatacccaatacaatagtccttttgaataatcatggcttagctgtggttttaaaaacatatgcagaaatgatttattgcttaaggaaagatttgtgtgtgggcacctgctgttactgtttttccattagaaaatccatagagttatttagtttgtatcatggaaatgctatacaagttttagtatcaaaattatttgcaaatgcaaagaaatctgtaaaataaaaaatatttttagtgtttgtgttatccattattaggtcttaggagagaaatttggcaaattattagacataaatatttaactcaattcaaaaaataacctaattagatatttaatctttcattgcatatatatttttcctgttcagcagtaatttcctgatttttatctcaggtttcttttaaagagaatttagcacattggaaaatattttcataattaaagtgctgggtaaattcttttaaaatgtgttcaatcagatagaagtagaaatacccttacgtgcacatacttaagctattcacactattaggtaattgtgaagttacagttgcattgagtatgtggcacatttcatttaatgttggtaacatctgcaaatgtccagagtgtttgcttcataaatgtctaaaagtttgcccacttttatgtaaaactaaagaagtagaaatgacaaaagtaatagaatactactgtatcagagttttaaaggaatcatatggactcttcgatctgtttgtttttcagagatgagagggatatgtttacagaccacattagcttacacattaattggaaaatgtgtttcgctgaaatacacacagtattttcatttttctgtaaacttaatatttaggtatagtaggtaaactagttttacatcagtgtgtttatagttcaagttacttcataatttgtttcataagatcacactaaaatattgtctattttcatataaggagaatatat

SEQ ID NO: 59488 - DNA, 1003 bp, Homo sapiens
ggatttcaggtgattattggtattcctccaggctgggggtaatatttccatgtacaggtggttctacaggtttggcagtctacaggagtagattagagtctttaaactgagtgtcctaacttcctttgctctgggaagaagtcctaacttcctttgctctgggaagaagtcctaacttcctttgctctgggaagaagtcctaacttcctttgctctgggaagaagtcctaacttcctttgctctgggaagaagtcctaacttcctttgctctgggaagaagtcctaacttcctttgctctgggaagaagtcttaacttcctttgctctgggaagaagtcctaacttcctttgctcagggaagaagtccttgaggtgtaagactcactgtggctccaacccctaccgtccaatatttgcattcactccttagtaattttattactcacactagtgttttgaggcttcacaggtatcccagtacctaggcagtgcctgataatttccacaggtttattttctctttaacatagtgttcataattcttcactgattccacaaaggccaagatgcatggcaggtggaattttagggagtgaccaggtaagcctccctgggcttggtgctgactgttgacagggtgctcaccagggccccatcagggctcttcgtttgctcttctcacgggacagcacagcctcatccaccattgattttccactgctgtcagtgtccttactgtcttccgggttagaccttaggtgataacatacaacgtctgtgtttttaaagtgtgctaagtcaaattttcttaaatatacataattttgtcagttttaaattaccagatacattcaagaattatattaattgctgctgagttagaattgcattttaaagagaatagttttatgaaatttgaacttgaagaatagagtaggaaatgttagatggttaccctaaacattgtaaataatagggagggaagaggatccgatgtctgac

SEQ ID NO: 59489 - DNA, 1030 bp, Homo sapiens
tctccaccccaaatcaacagaatatgcattcttctcagcaccacgttgcacttattccaaaattgaccacatagttggaagtaaagcactcctcagcaaatgtaaaagaacagaaattataacaaactgtctctcagaccacagtgcaatcaaactagaactcaggattaagaactcactcaaaaccgctcaactacatggaaactgaacaacctgctcctgaatgactactgggtacatagcgaaatgaaggcagaagtaaattcattcctttattaagcaagatgtgtaacttttggtgtaagctgtttgtattggaacagattgaaaattcctattgtctctctgcccttgaatacctttagccgtggtactgatgtactgatatgttctctaggtaattcacattccaccagttttgaagtacagaattgttatttgctatttttatcagatatgaagtctactgttatacaacctacaaattatgacaaatctctcaaaaaatttgagaaatgaaacattctcgttaaatttagcatggactagtgtgattcctatataattgaataaccaattaaaatgaatattaataaaaatgttaacatatcatctgtttcttcaatttttaagttcctagtagacagtgattgtgtcattgtaattaacttgttaggaaatattatagcagatgacaggatcacagtaatccctgatctaccatgctggtaattactcaaagttggctgtctcaaactagaaatataacgaagagtttccttttcttttttaaatttacctcttttattggcatacattctatttatatcagtaacatctacagaatgtttattgtatgttatagaaatggcaattcaaagcatttaaaaagcaaagattacatactttattatatttgagtctcattattcatcatagttatgcagtgaattgatgaatgctgacctgttgtcctaggggaaatagagtttggtccctgtgagcctctggtcacaacacttttataaac

SEQ ID NO: 59490 - DNA, 1066 bp, Homo sapiens
ttttataaactgttttgtcaaattgaaaagtcctgaaatatccttttgctttactagtataactaaaaaagtaattaaaaaattttttaaaaggtgaatagagagttcataatgacctgttttgctatcaggaaccttgatcaatgtgttacatagcagtatttcccattcttaatctaatgtactttgatccaaacaaacaaaaagctaccaggagatccattctaagggctctgtattgccagttatccatgttctatgcctgccacatatggaaagcatacagcagattgattatcttgggggctcttggggcagtattattgatctttacttttcttaatacctggtagttaaccatttattattatagactagattaatttctcctcctatttttaaagttttttttaatgtggcaaatacacataacatataatttattatctttatcatttttaggagtacagtttagtgtatttaaatgcatttataatgtgcaattctcaccatcatccatctctgtgattctttttattttgtaaaacttaaactctatacccattaaacagtaactcttgataccccctggcaaccaacaactaattttttaacatctcaggtttggctggggagagtgttgaatcagtaagtatttatttagcatctactttatggtaaaagttattaggggcatgaagaaggtttaaaatatgggatgctttaaaaaactgacaatactgctgggcagacaatactacatatgcaataattgtataggaatcaatgataacatggaatttattataattataccttgtatatatgtagcttatacatgcaagttataatgaaaattgtggggcaccaataaaagaccaaacacattaaaaaaaactaatgctagtattgataagaatttaatatataatgccaggcatggtggtatgtgtacctgtggtccctcgggaggctgaggtaggaggattacctgagcccaggagaatggagtccagcctgggcaacatagtaagactctgtctcttaaaagaaaatttaacatatg

SEQ ID NO: 59491 - DNA, 2011 bp, Homo sapiens
ttcaggtagttctcaaaatctttgatttttaacttcacacctgtttttctgagatgtagcattgcttcattctttaatcttgattttaatcatttctgggaatctgtgacatcacttttagagtttctgctacttagtccccactacattcttctggttatgttatataaatagttacatttactatttattatggtattattttaaaatgttagctttgctgttaaatttaacattttacattttacagctttgctgtattttttatagttctgagcaaattattcatattcttacatatcatgaattgtgaaaaaaaatttacaagttgacttgttacctatacctatatgtattattcttcagtgtttgctctagaaattataatatgcatccttaatttacaatagcctcccttgaattaatatactactacttgcgtaaaatataggaaatttataataatatatttctgcttactcccacttcccttcctttgtgctttggttgttatatattttatttctacgtgtgttataagcctaatgacatctatcaattatttttatctttgctttaaactgccaattatcttttaaagaaattaagaaagggaaaaattggcttttacattttcctacatatttaccattttgcagagttcctcatctctttctgctgaaattttacctcagcgagaagtagtgtctcccttgtctgaatttttatagcacatattgtggaccatttatatgtcatatatgaccttacagttagttccatgtatatgtcaaatttcctctgccagttttagattattttcttggcaagggtcgccgtttatacagttttaactacttcattgtgtctagcacagtgccttagataaagtggacacctgtatatatttttaactatgtaagaatgagtgaaactttgttcatttatctgagtatttatataatctcacaggattgagttgtattattacagttcaccattagatgtcactttctgacatatgttaaatccttaccaatgaattccttccattaaggcatattggattctgaaagttggtgctccaacacaagtgcacttaaacagataaatttttgtacatttaaaagtgattactgtctaaaatggaagtgttcctaagttataatttttatattttcattatgtataaatttatacagaactaactgattttcctaaagttttctttagaacttgaatactggtattgtttttgaattatttgctctgtggagcagcttggaactattagaagtaatagtgtgagaatattcaggaatacctttaaacatgttcaaaatgtattctgatggtggtgtaattctgaaagacatcttattttaggagcctgactgacccagttttctcaggttttgatagcaactatatagtttatttgtgtttgcctgagaaaggaggggaactgagtaggctgtgaagaaacacagaggtagagaaaaaggagattcctgtggctgtcttggccagtcatggaacacagcaaagtgcttccctccctcattctctaaacttaaaagataggaaagggcaggtcaaggagatttcagcaatctcagaaggcttaatgttcactgtatatttaagaacctagattttaaactcagcatgataacatgtatgatctagagagatgtttcagtgcgtccccaatgctaggattcatgacaaacgcttaccagattcctacaagcacgtctctccatgctgagttaagagaatcctctctgtgataccactgctctccggacatccagggtttaacctcttttctttccccatcttgccaggagacagcaggaaaattattgggaggtgggaggtgtggtggcagttttcttcaattcatctggaatactaaaatttgagtaaaataacaatgctgtttcctaatagtgtaataaatacccccaaaacttacacctaatccaagaatgttaccattcttcat

SEQ ID NO: 59492 - DNA, 1353 bp, Homo sapiens
taaatgatggatcatttgcagataaagcatatcaaataatgtcgtttgcaattgaggcggttagtgttaatttggtgacttccaactttattgacagcccttggcacaaagctagaatattatttgacagatacttttgatctcacatttaataatttagtcaagagtgttgaggatgacttaaaatattaaaaagtgatctttgctgtaaaactacttctccctttacttacctaccaggtttggtctcacagcctcatttccttgtcatagttaatgccaggacaaaaataatatatgagtttaaaatattaaaaagtgatgtttgctgtaaaactacttctccctttacttacctaccaggtttggtctcacagcctcatttccttgtcacagttaatgccaggacaaaaataatgtatgagtttaggaaccacgttgatacttttggttaaagtccttctaccggtatgttttgctgcttgtgactcaagagcaactgcacgcatgatattatactacttttaaataggcctagggggcatctttgttttttgttttttttttttttgagacagggtctccctttgtcacccagcctggagtacagtggcgcaatcatggttcactacagccttgacctcctggcctcaagcaatcctcctgcctcaccctccgaagtagctgggactacaggcatgcactaccacacccagctaattttctcattttttgtagagacagggtcttgctatgttgcctaggatggtcttgaactcctggcttcaagtgatcctcctgcctcagtgacccaaagtgctggaattgcaggcatgagccaccatgcctacacctttttaaatgaaaaggtagaattctgtgtcttttgctttttctcatttaaggcttttgacacatattaaaacagcataattaatgaaaatatatattttctggcttcttaaagagattaacctattggggataaacaagcttaaatcttaatttacagaggggcaagatagacccttcttttctgtcatcatctgttcctcccacctcaaaatgcccagtctaaaaaaagttttgggttatatttctcttgaaatttagcttagctcacatcttttagataggagataggaatggaattgatggctttattcttcagaactaccaccgtaggcagccatggcaagcaggggcgcccttgcgttgttcttgaggaaaatattaagtgaggctaaattcaaactgagcctgactccccaacccccacaacccttttatatatatatggcatattacagtgagaatttctttttaaagttttaggtctttgtctttttcttg

SEQ ID NO: 59493 - DNA, 1027 bp, Homo sapiens
ctgttctgtgcactgagtagataataataacaacacttcctgggtgctcacattgtgccaggcactcccgtaaggactgtctgcgtattgactcatgtgattcatagaaaaaccgtgtagactgcgtactatcattttgttcattatataggtagaaaatgacacatagagaagctaagcattctgcctgagattatacagctgcgaatgccagggccaggatttgaatcaatcgagctccagagtcttaaccaaatgctatgtgaatgacagagacttagatcaataggctgctgctagaggtggatttttctactagattctgaggacagcctgtataaatttcatgttatggtgaggtattgagttgaccacactcatattcatcatttccgatttttagagaatccagtgtgaaccagttttaaattaataagacatacattcatgtcttacgcaagtttataatggcactgaatttatttattagcaaaatatttttctaatatcattatagttttcacggtacattggcgggagattttctctatgtccatttgtagcttttgtgtttgttagttgaaacgtttcctctacaactagtaatgactcttatgtttgcatgcttctgtcttttcgttattaattagcacattgatagattaccagttaatatcatctgtaaaatagtataagtcatataggaaataataaacagtttggccctgtgtgaaatccctttagccctgtgtattgcctgacatttagcaaagttaagtagcgagaccaagattattttgtttttattttgaaaggcctatagtatgcagcctttctccaggacagcagccccaaacaaggtgaactaattttgcactatgttattttactataattctgctttattttttgtattgtagtttctcttttaccttaggctagcttagttaactcttgctagatttgtttgttaaaaccatactatctttacatggcttctaattttgaatttcatgctagtaggttt

SEQ ID NO: 59494 - DNA, 1070 bp, Homo sapiens
agtccagacaagtatttttactggtaactcttttcgtcattctgttttttgccctctgcagaaagtgaatgaagggaaataccgaagttatgaagagttcaaagctgatgcccaattgcttctccacaataccgtgattttctatggaggttgaatatttttgttttttttgtatgcatttttaaacacaccatttacattccatgttgaacactatcttttataaaacattactttcaaagaattaataccttaatgatctacaagtttagagtataaggttaggaatatctggtgatatagattatagaatggactggccaaaaacaaaatcatagtatactaaatgatgaaaacacaattactctttacagttttatatgtatttgttttagctgagaggtttttaataagcactatgattaattctgatcatttccccactagtaccacatcatccaaaggtaaggtcattctctataccctgagaattagtggttgtattggatggaaaacaaaagctgcctgtgtaattttattttgctatcgttattttaaatggacattttggtttgaaatggtagatgtctacttttgcaaactgaaagaaaaggatagtaactttgagtcttgtatttgcagactattgcttataggtaatatctatttttaattacagcagacagtgagcaagctgacattgcgaggatgctatataaagacacatgtcatgaggtactattcattgcccaatagttatactctttctataactgaaattaatttatttcaggattccactcttatctacattttagttgtgccatttcctttaaatgtcttttattgccgggcgtgggggctcacgcctgtaatcccagcactttgggaggccaagttgggcggatcacgagatcaagagatcgagaccatcctggccaacatggtgaaaccctgtctctactaaaaatacaaaaattagctgggtgtggtggtgtacgcctgtagtcccagctactcgggaggctgaggcaggagaatcgcttgaacgtggaaggtggaggttgcag

SEQ ID NO: 59495 - DNA, 3640 bp, Homo sapiens
tcaaatgaggcaatgaaactcaagatcacgtagaccccattcacttttccattcttcttagtgccttcccctggtacacagtaaacatctgttgaacacaacatttgggatggatacaaatttaagccgagaaagagaccaatgcccaggaaaaagtgttctttccaacagaagcaaatgtagttgtcctgctctagttttagatatgtatcgcacttatgttcacagctaagtacactgtggctaaataatcagtggctctgtgtgttcatctggtttctctaatgagtagaggcatgatacaaatatgacttactggataatatttttagatcttcccattttatatgaatatatgtatgtatcttatgaaaatttttgggcattttcaagtgattctttagtgctaacggcaaatagctagatgggttatattagtttacagtattcagaacaacaaataactttaaaaggacttatgaagaatacagatatgaactaggacaagctaagctgattgaattgtgaacaattgggaggcatttgtgaatccagttctgagaacttttgtcgactgtgaaagacaaaacaaatctcatttattttccgcttggtaacagtttatttattcaagccatgacgaagcctaagtgattgtggttttcgcaattaaaagtaacggcagaacccacaattgcttttgcaccaagctaacagacgagaactgccacaggtcgcactttatggcaggcagggtccactgaagccctcttttaccacccttcctgccatttgggatgtttctaactatacctttatgtgtttttcctagggcctggattccttctgaaaacattcaagatatcacagtcaacattcatcggctgcacgtgaagcgcagtatgggttggaaaaaggcctgtgatgagctggagctgcatcagcgtttcctacgagaagggagattttggaaatctaagaatgaggaccgaggtgaggaagaggcagaatccagtatctcctccaccagtaatgagcaggtgagtgtgtctccggaaggaagtgcctattcattattacttttaaatgcagaaatcttagtgcacactcctcactgtaatgaacagattttgacgttctccttcccttttttacatttgtaaagtgctctgcaaaactaaaccaaaagcagttcaaatgaatacatagatgtaacaatcaatgaccttgaccctgccagtaccaagagagttaagtacaagtgctcctctctgaaggtgcgctggctctttcaagcctacagttaccagaacagtaaattaagtcagtggtaactgagtggatggaaggatgcaaaaggtagaaatgtattcacttctcacctgtgggtccactatgagtgttttcagcagagaagtattttctagtgtctggaataatatattacttttataatgcccacagctaaaggtcactcaagaaccaagagcaaagaaaggacgacgtaatcaaagtgtggagcccaaaaaggaagtaagttgcccacctcgcagtatccaggtggcaaatgaaacaggaaatattttcaaagtattttgtattttcaaagtatttcaaagacagtcactcttggtggatacttgtgaaattcagctgctgtcagtcaaatcatatccatcaagttgaaaccagtcttctgacttccctgtcattatctgttaccctggaatagcgtacatgctccaagtctccatcttaattaagcagccgctgaccaaagcttggctaagtaggaagggcacattgctattaatacatttcctgggagctctgatatttttcctaagtatgattaaaaacaacacatttatccagtatatcagttgtgccaacatttaaaaacttgaaggagactgtggttgagctcagccgttttaagtgatataagccctgcatgttttaaaactgtaaatctgggcacatttcaaacacatattcagtgagaagtggtttaggatttgaggaaatgtgttaatgaatctagtccaatgaagtaattataagttgacaataatttttatattctataaatttctgtgtttagtttattttaaaaacaaaacttatagtattgataagtaaaattataaatgaagcttatgtttataattattgtagctgttaattgcatgttcttttcattcactaattgggggagatttgtttatttttaaattgtggcaaaatatacgtgacatctaccaccctaactacatttttcaacagcagtttattctatggctattatgtatatcactgaatttttatccgaatggggtagttcttgaactggtgaattatgtggcttcgtttggcgtctaaactcttgtctcaccttttaggaaccagagcctgaaacagaagcagtaagttctagccaggaaatacccacgatgcctcagcccatcgaaaaagtctccgtgtcaactcagacaaagaagttaagtgcctcttcaccaagaatgctgcatcggagcacccagaccacaaacgacggcgtgtgtcagagcatgtgccatgacaaatacaccaagatcttcaatgacttcaaagaccggatgaagtcggaccacaagcgggagacagagcgtgttgtccgagaagctctggagaaggtaatgcttgtcgccactgtgggtgccctgctgcagccggcactcctgtcatggttaggctcctttcactcatgcatcaacccagtagcagcttttacatgtagccatataatgacaccagtatcttttacagcatttcaagtaataatgatactttcctcacctaaattttttacacatgtaatgaaggggaaaaaaggtacctcatgcaagttgtgttaagtttctgttccagtgtagatggtctgtgttaagttgtgtgctgacgcactgtgggttgtcttttcattccagctgcgttctgaaatggaagaagaaaagagacaagctgtaaataaagctgtagccaacatgcagggtgagatggacagaaaatgtaagcaagtaaaggaaaagtgtaaggaagaatttgtagaagaaatcaagaagctggcaacacagcacaagcaactgatttctcagaccaagaagaagcagtgggtaaataccagtcttttttagacccttatttctgaaaatgtaccacaggtatgatgcccgttaattcagaaggtagctgtggcacatgcagaagatgtttctgaaataagatcaaatgtgaaatggtcagctttagttttaaaaattttattaaaagtcctatgatctctcaaccccagatcccatattactgtgtactgctcaggattattttgttaaattgagattataataccttagtacatatttattacaattaacttatataatttctccatctatgcatatattttatttgggcaaagtggctggccctgacttttacctggtgatttcagatgggtaacatccaaatggtgaaattataaatgtaattatcacaataaatagtttcagatttccctgcacttaacatttatacattagattttgttaaagaaatcagttacttttactttatagtagtgacatctcattggtctcta

SEQ ID NO: 59496 - DNA, 1034 bp, Homo sapiens
cttccatctccacaaaccatttgattcttgaaatattgtttgacctcattgctgtgtgtgaatatttctccacatgcttcagatgcacattcctagtctctgcttcctaaggggggaaccaccacacattggggggaaaaaagacattttcctacacccacccaccttgttgaaagggaggtaggtttggggcttcaggccaggcactgactatgaaacattagctgcagtgtgcaggacagctttgaggtccagctgaagtcaggaagcaaaacaaatgtagatgtcacttcaaacataatttcaactgtcaccagatcaactctacattcaaggagtgtggacgctgcagtgcagttgtgagggcagttagcagccgcctcttctgcatcctgtcaactctgattagttagagtttaggctcaaaagagttggtggactgagattgaaatttggttgtgcaagagaaaggaaaggagacacttagtaccaccagtttcagcaataaagaagggtcattctgtattcaaaattgtactgtagataaatcattcatgagattgtaaaaaatgtttgtcttgtgaccttgtgcttttgaagtcagacaaaaccgtgtaatcaacttgcacaaaaagagggtacacagtgaacatataaacacagacctaatcaaacaggagcagattcctcatggtgcttgtttattatatatatttaatcctgcttgacactttacccaagggagatggtcccttttatcagttgaatgttagcagcgttatttcagagtgtggtgactggttagagaaactcatgtactcaaccagccacagtttcaaacaaaatttttatgtgcaaaggacagcaaccttcttgtatgttaaaccaccagtacgctttgtacatctgtgataacgcctgttttatattcaaatgaacaaataaaagcttttatttttgttgctctgaaaatagcagtttcttaattggtcccctggaaagatgtctgggacagctttaatcccgggaaggaa

SEQ ID NO: 59497 - DNA, 1050 bp, Homo sapiens
tatacacagaattagtagcacagagaagcatgtgtgggatagagtcacagagctggtctgactgtggctgcactgtatcccgtgtgatcttgggcagacgaggcctcagccgatgggtccacggaactcagaccgctgggtgccgacttcgcccctcagttgctcccgatgaacatgcaatcaggcagttgactggatatcgaagctgagccaggaaagatcttctcccaaagcacaagtgtagagggcgcatggcggctttgcagccagcctgtggggtactggcacacgagccgagcacttgccaaggagctccgtggcagaaggaaacaaacgtccctggatccgtgagccccttcctttgcatccctgtctcacttgggggtcgtttttaatctttttttaagaaaagaaggaaacggcttgagcggcattatggggaagcttacgcaggctgtcattactccacagagcgccatgatgccctctacgtggtaggggcactggacgaagccatggagctgcggggcatgcggtaccacccaatcgacattgagacctcggtcatcagagcccataaaagcgttacggaatggtaagtcgtgagcttgcagcttgtacccaaatcaggagcagagtttgtgaagcattgagaatgtggagagcacggcggtggaggagagttttgttaaggtagggaagggggtgcgattcaacatttgactataaatctttatcttttggggttaaagcaacaaaagaacatgccacatgtagagttaatgtaccatatattacctgaaaacgatagacttctattgccgtgaaaactacttgacaacattttccaggaagccaaattgtttggtttttaatttacaaaatcatgatataggaagaaaacaaacctcacacatatgtaggcacagaaaatacttttatgactgttgacttgggaactggaagtaacatgagacatgggaaaacttcagtgagaaggagaggcagcgtttgtccagaccccagaagagacttccaaaggaagaattg

SEQ ID NO: 59498 - DNA, 1048 bp, Homo sapiens
aaatctcaaagcttttcagcattgttcttgctctttagaaataatcattcgttaaagtgtaaggaatctagtgtgactttgttcatttgatgtgtatatttttaaaacctatttgttaaatcttcaactaatctgctttaattcagttccccatagggatgccttggctggttgcttggccacaaacttggtagactgcctttatttcagtatcctctgtgtgtctctcgagaaacccgaatgagattaacatcatcttggttattcagtccaaggaaacgtttactatcactgaatataatgtactgaattgtcaaagtagttgtagtctcatttccctggagataaaataatgtcatccacagtgacatttccctccgtttgcagatttgggttcacagtgcccacaatgccagcggttatttcactatttacggagacgaatccctccagtcagatcacttcaactcaagactaagttttggagacacccagaccatctgggcacgcacaggctacttggggttcctgcggagaactgagctcacagatgcaaatggaggtgagagtccaggctggcggcccccccccaacagatgggcagagaggttaggctcctgtagatacagaagcctttcccaaggtttacagcagccaaagccaggagggcacgtgtgctagctacaacccagtgtgaaaagaaccgagtttaagagcaagaggaaagcaaaatgcaaatgtgtccaacaagctgagctgtgcatcacataccctgtcctgtcctgagaaccaagagctgactgaaaaccggagaggggcatggctgctgagcatgggctgcagtgtcacccacagcaaagtgctcagagtctcagaccacagagtctcctcagcaagcctgaaggctgcctgctcccacggggtccatctgagacagaagctgtcccagtggctgcaggaacgtgcatgctgctgcttctaggactgggtctgcccctgtcagggaagaggaggccgcgaggctctcgggccctggtggccagctgtc

SEQ ID NO: 59499 - DNA, 1025 bp, Homo sapiens
cttggaatagtcacactgttaaatctcacttaagtctgaagtgagatttcagggctctggattctgctgctgactatggtccgccagactgttaggatggatggtgagcacattcctactgttggaaccaactctgtgaagcattctaacttgcagccatgcaggcaactttataatagaagcaacatgagatgctcttagaattatgtcaatggagaaggaatctgacaactggggccgaaacggaaaaaaaaaaaaaaaaaagagtctttatttaggtgtttaaatatctttcttgccctttagttctagtaaaaaaacaaaaaaacaaaaacagaaacaaaaaacacacccactgtggcagaaactactggttgtctcttgttaaccattcttttctactttcatagtaatagataccctgatttttaggtaggcctttacatattcagaattgatatctcaatagttcccaacctttagctaggtgtggccatgtgaccacattctgatcaatggaatttcagtgtaggacagcttgggaaccttctctatggtctgcatgctttgttctcttctttttctgtttctcctcctgctggctggaatgtggaaatgatggctggagcggaagcagccgcttcagctcctgaggggcccctggtaattgggctccaatgcgcagaacgaggctgaaggcaccagggcctctgctggcttcatggaggaggagatgcctatttcctaacttttacctgaggaaaaaagtctaacttgtttaaaacactgttattttgagtttctatactcactgatatgttactttcaagaaattgttttggaaaaaacattctaaaaaatacatttcctaaaatttcaaagcccatacagtcagaagcgaacggatacagaaatgcgtgcctcttcctataatacttacctttcccgattccatcaggggcagactatgaggggatcctctttccactaagcggactctgcaaacagaaagagaaaatattcct

SEQ ID NO: 59500 - DNA, 1093 bp, Homo sapiens
ttttcaccctggctgtcagttttctaaaccaggtataggcctgctctttattaaattgctgtttggtaaatattttaggttctgtggtctctgaccactcagctcaaagccactggagacaatatttaaacaaatgagtggtggtggccctgttccaataaaactttatttacaaaaacaggaagtgtctgtggtttgccagctcctgttctgaagctggactttttttttttaaaccgaaatttgatccctgtgttttctactaagaaagaggatccagtttgctgatgtcgcaggtctgagagacatcacagcatcacagcgtttagtagtcttaaatgtgtgttcaaagtggtaggaactgccccatgattctgtagtacgtatttgcttttcagaaggctttcgtgaacatggttgcagtttgcagcgttggctttactgtgcccttctacagatggcagcacgggctgttccaagtcctccttttccttggagtcagtgctgccctgagccctccagccttgctgagctccagccttgctgagctcccgccctgacagcctcttctttctctgcagtgtgtattctgggcaccagtccatcctgatcccgccctctgagctggaaaccaaccccgccttgtggcttcttgccgtgagtcagtacaaagtccgagacacgttttgctcctactccgtgatggagctgtgcaccaaggggctgggctcgcaaacagagtccctcaaggtaagcagctcccttggcagctcagtgccctgtgagcccacagggactcctttctaagaaggcacatctgtgatggggtgaagttaaaacagtcctccaaaacaaagcctgggtttaatctaacgtcacctgaagcttacaaactgcctttatatgaaaatctttttaacgtgaatatttccccacgaccacagacagtaacgaaccagaatgtaaaatattttcaatgcctgtcattccactgggtctacttgaaagatcctaaatttgattttttgttgggtggattcagtgttctgaagtgttcagtgttcagaagatcttaggtgatgttaactttatt

SEQ ID NO: 59501 - DNA, 1040 bp, Homo sapiens
agcatccctgggcgcctcccacagttcttcccgtactgatgagtgtggggaaattcggaagtacagcggccgttttgaagtcgtagttggagctgtgtcactcactagtgatggttatggagcccctgatggcggagggagggctgcatgagcgtccccggcgcgtgctcaccatgctcctgtgtccccgcaggatagccgtgttctcggtgaccgtgctgcacgacgagaggatcgtgatcgtggctgagcagaggcctgactccacggaagaggacagtttccagtggatgagccgtgtgctgcaggttgccctccctcgccctgggcactggtcccctgtgtcttgtttctggcctccttacttcattcagatcatggtgtgaccagctgttgctttgcccatggggtggccctttttcccttcccttcatttgatcaggaactacatcaagtgtccagaaactagctcagcagatcgagggtgtagggaccaggaatttgcacagctggttcctaccggacaccttggggaggtcgaagtaagctttttgtttgatcttgagaacatgttatcttttctccaaagttccttttttactgtgtatggtcttccacaagccctgggtaacattattcagctttggtgagtttagtaggaaaatcctttctcttaccttggcatttttatgctgggaacagtgcttatactgcacagacttctgtgtattgtggatcatattttgcataatataaatacgtactgtttatacttcctcttataacatgatttcctctttattaactttctaggcgattgacagtatacatcaagttggagtttattgcctggccttggtgccagcaaacaccctccccaaaaccccgcttggtgggatccatttatcagaaacaaaacagctttttctggagggctctctgcacccctgcaatgtcctaatgtgcccccacacctgcgtcacaaacttgcctaagcctcgacagaagcagccaggtatgtgcaccacttgggcagcttg

SEQ ID NO: 59502 - DNA, 1067 bp, Homo sapiens
gttcagtgctgcaactcagaactcttatctttttaccaagtaggtcctggccttagaagtagcacaacatttaagttatatgtaagaaaatataaattgtttggggatacatttcctaaatgtttagaacttttggttgttgttgagacagggtcttgctctgtcactcaggctggagggcagtggcacgttcacagctcactgcagcttcaaactcctgggctcaagccatcttcctgcctcagcctccgagtcactgggagtacaggcgtgtgccaccacacctgaataattaaaaaaaaaattcttgtgtacatatggggtctcatgctgttgtccaggctgatctcaaactcctggcctcaagcaatcctcccatcttagcctcctaaagtgccgggattacaggcatgagccactgttgctggtctaaatgttgagaactttggatgtggctgaacagatgttacagtacctgtctatgatagctttcttgagtgtgaattcaactttctaaaatatccctcgaaactgagctggatacaaatctaaataaaaactccatctccgtttctctggtttatctgcaagggtggaggaaaaaagagggttagagtttgaactgatctgatttgcttccttaatatttttcttttcagcatacttccaacaagggcaaataacattttatgaatgaagagagattactttaaaactaacagacgttgtttaaaatgtaccttgactcttcactcgtcttttacattgtggttttgtaaaccaagtaatcagttactgctgattggcctcctgtgagacttctgggtgttatctgttcagggttcagaggcaggaggctccagcaggtgagtggaggtgcaggaacggatggggtcctgctgaggtgggcaggaagtgcttttctgcctcgaagactgttggccaccagcggtcactgtgacctcggccctagggcagggttgctggggtgaaaggcagagcttaagcaaagcaggtgccgtgctcccaggagtagcggcgaggattaaaaccagctgaccacatga

SEQ ID NO: 59503 - DNA, 1021 bp, Homo sapiens
tctggacacggcccaccatgggttacagcagcccctctccagagccacctccctggagctggcttcagtggtcttctctggtgtgccacttttctgattggcgtgattgggctcaacacaccgaaggaccgaaaaggattaaaggtacaattttagcattccaggttgaattagaaatgacagtgtcctgaaaactagaagcagcccgcagtgtccccatgccggttctccctgcccctccatcactcagtctcattaagactgtctttttatgtcgttatcatgcatatgatgcatatttaaaccgttcagtgctgatgctgtaagaaagaataatctgtataattggccattgcagttggactccctaatttcctgagatgaattaggcagcaactctatctcagtggtgaaaatctttaggagagaagccaatgctggtccttagaacctgtacctttcgttaccctgatgtttaagttacttttgaataaatttgatgaaagcagcactcgtacttgcgtttccaccaacacatccctctctgcattgttttctgaatgtgtgaacagaagggaaacttccctctgtgcgggggtttcagttgtgtgccacagaaaggttgggacagatgcgtgtttttggaaaatgagccagtgcctgtgaactcaagtgtattctgtcttaaaacttgaggtgaatttcccatgtaggagtggtcagaggccaggttattaagtgaaaaacggctttcgtacattccgtaaagctgtactaagtgaggtctggcaaggcttccctgtaggttttggcatgagaacaaaatgaatgccttcttaaaggtcgtcacgtccaatgtgggaggcagtacagcgatctcattttatttactccttatgttttttaaagaagaaagacaagtgttcggctgctacattcccctgttttgttgcagagaagggtctgtagaggacggattatgcctgtttggatgggttcgaggatggccgtttcctctgtg

SEQ ID NO: 59504 - DNA, 1071 bp, Homo sapiens
aggaaaaaaatgaaaaaaaccatttcttttttctctctcagaactgttgtgagtataaaggagaaaatagaaatactctgtaaaagtttgtaaagtaatactcaaatgcaaagcagtattaaacttcagtttaacacagtttcaggaacatgtacactggtttatgtgaattaataacctgtacttgaaatcacagtacgttaaacaatgaacaggaatgtgtgactgttatttttttttgtaataaaattccatgtgtatattggatcccaggatagtggctgaggctctgccagctttatcgggcacctgaacggggaggccaaacaccatctctgccacttgggggaagcatttgtatcctcggattttattcaattttaaggaaatgggcagaatcttaccaaggaaaacacatatttttgaacaagtgaatcacggcacttggcctccctttgcgggtttacccttgcagtactggaggaagttttagtacaaagaatgtatccaaactatgaggggctcataactcatgtacatcaaggctcagtgtgacccaaatgtaactctcgggtgaccacattccggtaatttctaattaggcacaaagataatcttcctagactatctggaaattttctgtaactttgaaatttttttggaaaaaaagcagtggcaaaataatgaaacttaatcagaaaaggaaaaatattttctgtggcaaaacaaaagaagtaaaaagtcagatttgcacttgaccttgtgagataatcagaagcctacaaacaggaaagtagcgtgtgtgatcgtgcgtctgcgtgcgcgtgagtgtcctaaggagtccaagcacaacagatggctgagtcacactggccgatccctccggcaagggacagaagtggaggctgcagaggctgcttgtgtccgaggggagaaaagcccagggctgcagactcaggtcacggagtctctcagagctggccacgcttctacttgctgttgaagcaaaatctcaagtcctttgtggattttttccaccaatttaattatgccggcaattaagtagggaca

SEQ ID NO: 59505 - DNA, 1056 bp, Homo sapiens
tcaaggctgtgtcaattttacttttatagaaattgtgtaagttttcttaaaaggcagagtgggccaggagcggtggctcaggcctgtaatctcagcactttgggaggctgaggcaggtaaatcacgaggtcaggagttcgagaccagcctggccagcatggtgaaaccccatctctactaaaaatacaaaaattagccggtcatagtggtaggtgcctgtaatctcagctacctgggaggctgaggcaggagaatctcttgaaccagggagtgagaggttattgtgagctgagatcgcgccactgctctccagcctgggcaacagaggaagactctgtctcaaaaaaaaaaaaaaaaaaaaaaaaaaaacccaaggtgatagagaattttcaggctcttaacattgttgcttttctaacaagtaaacttttaaaaaaattcccagacagcataagtcatgtgacagtgataataagtgtgtatattgtttgcaattattatcttttaaaaaacaaacccgtgtcttaagattatttgccgtgacttctcctctcacccgatggctggagctgctcacctgagctggcgtctctcataactcacctggaggtaggattctgagtgtcattcttaaattgaagtttaaataacaaatacaccaacaatttattcccaaaaaccttggtactgcatgaaaagttattaaatgaaaaatattctcataaattatagtgaaaaaattgatgtattttgttataatccaagatatccaatctgcacagatagaaaaatcaataatgagaatgtataagaaacaaatactgtaaaggtgaattgatttgagtgtaaaatgtgacgtgatgaaggtttgtcgtgtgccccggaggaaaacggggaggtggaggggctgctccgcgtgaggcacgttctgctttctctcctgttaccatcatcagtgtcttgatccttaaggaactgtatgggtatctaacacacacacaccgacgtagaaataaatcagctgcatggttatctaacacaccaacgcacaaatca

SEQ ID NO: 59506 - DNA, 1032 bp, Homo sapiens
tgatgtttttatccccgaatatctcattgcaataatgacatcaagcatagatggtgcatttgtatactacctctttctctgaggggtttgataggtgctgatgcttttatccctgaatatctcattgcaataatgacatcaagcatacagggtgcatttgtatactacctctttctctgaggggtttgaggggtgctgacatttttatcccctttttagtactttatccctttttagtatttttagtattttatccctttttagtactttaagaaacgctgttaaatgtattttagttaaccaatttatctaacactataaatgtaagtagtaccaacaaactcttcactagcaatagtgatttattcaatgctgcatgaagctgatcctgaataagcccttctcttaatagatgggtgcttctgggttcttagagtgaaaggcctaaagggaatgaactgttagcagccacagcagaaaaaacgagaaagatctgcctcttttggagtcaccaaatgcacctctatcaatttattgcctctcagctccaaattcaccctttattgccttcttcagaaaccatggatctgagtcctgcaaattctgttgagttgtgtttgtgaagtgtgacagaggcatgtgaggacagtggtttcacttcttagtctcagggctgtgcacagaggctctagcaggtcctgctgctgctggggtctctggcctctgtgttgcatggcagccagcagctcacccccagctccgacagctttgtaggagcttctccagcaatatccctccctgcctgagatggctgcaggcagcgtggtctccttggagcccctgtgctgtgtttgccctgacagccctgagtccagctgtacctgttacattccctcattcctttctcattcagtatttatgcatctgcttcttttctctttgctttgataacacgttaatgctgctttaggatcccaaactagaatcatcttccatttacgtgaaattttaagccgtcacttcctagcctct

SEQ ID NO: 59507 - DNA, 1019 bp, Homo sapiens
aatttacgtttctgatccccttggttcccctgacatgggcacaggtggcgtgactgctcactacacctctctctgagctttcctttctcatgctgcatattgactggttgagcagcctcctcattacacctctctctgagctttgctttctcatgctgcatattgactggttgagcagcctcttggattgctttgactcttggtagctttgacttaaaaaggcaactgagcagaaagccgtagctactatgcagctgcttaaatgattctgcagagacttaaagtcagactctgggtgagggagtgtgtgcttctaaaataggaagataatgcttgatgtgttgtggaaagttgaggctctgttggccccggtgctgaggtcactgcgcgcctctgactctggtgtgaacacacagtgaccatggagctctgttgacagagatgtcctcctcctggggtttaggactctggactgcatgcgcttttgtgtttactgaggttagcccacttctttctgctgtcaaagtgattccatctttgatagccttagcagttctcttgtttctccaaaagcactttctgatgaagaagggggtcacatagtgtgtgttcatgaccatcccctgtggcccagcactcgggatagaccactctgccactcacctcggggtggtccagcgtgacttttcagatcctggaagtgacgtggattttgtttattccagttgtcctcctcccccttcagcagggctgtgatattctccctgctggggcatctgaagtgtctcctgtagttggaggtaggacggcggcactgggccaggcggttctgcacgatgactttgttgccaccagtctggcccttggccagatgccttgggcatctcggacttgctgagactgtcatctgtgaaacaaggatgatagtgcttgtggagtgtttaaatgacatagttgtctgtaaagttggcagtaagaccccgactttgtaggtggataatcggcctccatcctttctc

SEQ ID NO: 59508 - DNA, 1066 bp, Homo sapiens
gtgtattgagcatggcaagaaagacttacgtgtgtcttaaacctcttgaacaaagcacgtcgatgtttcaactgcatctcgaaggctaatagactttgctgtggtcaatattcaggagaaaataggttttaatgagataaagacatgagtggcaagtgacatgtttgtgcccccgtatgactaagtgatgtcctggctgtcccacaccaccagctctgagcagccagcatgcagatattgggtcaatttagatatccctgatctttacggaggtttgatcaggcagctcaagagcagataaacacaaatgctgactggaaaccccggcacacggaggcgctggaaacagcaggctgctgttaacgtcacagtgagatgcagtcagctgctctctcaggggtgtcagcttcttttgcttctagatttccgtctgtgctgcaatagagttttgttcagcttatccccattgctctgctgtcttcgctgttaaaatctcagccagcacttggctctgaccctgcagtaatttcactgtgcggctgcccaggcctgcctggcacggctgtaaagcaggcgagagctttccggaaggtggtcacgagaaccccaggcgggaaagagcgttgctggtccacatacggcagtgcacctgcagctgagcatgtacgtgcacgttcaggctaaatataggtgcaggagagaagaaaactgcctatgattagtcacttaaaatgccgaatacccagcccctgagaccctaggacacagagcaggggtcttggagacggcaaggtgtgttgaagtctggttttatcatttagtttctccaagcagcattttcctcatctctaaactggggctaacaactgccccacatagatttgtgaatggaaccaatgagtgtaaagtggggtagcccccaggacctagaagggactcagtcagtttcagtggtcatgcgtgttgtacgggtcccccaggaaggcgattgctacagataactccctccgttcgatgtcactgaatgttaaagtgggaccttggcttctgatgtgtctggtttgct

SEQ ID NO: 59509 - DNA, 1018 bp, Homo sapiens
cacgccaggcgttgcagaaggaggtggtgtgcgggggttccactgcctgtgtgagccatgactggtgagggcctctgggcagcagctcacctgggctacttggaaatgcagattcctgggcacagacctgctgggacaaaacctgagaggccctgggttgactaccctccagggattccatccaggcttggccatcatgtctcttggcaggtcactcaggcccggctgtctcattgagatgcctggccatcgcagggttagctgagtcacctgcacagctggtgtgggtgtgctgatgggtgtacggggctggcctgtcttcctttctccacctacgaagcattcaaaggcctgttatcctaccctgttctctccctgtcctcagtgggcaagcaggaggttcattttcacttgcagatgaggaaaattctgaagtcttgtaaagcagccaagatcatattcagaatcttctttgttccaatcagctcgaatttttacagttagaaagacttttcctcaaacactttgtatttgttctgtatgagaagtgccgtagactttgctgttgttttactaattagtatctgtactgtgttctgctgtccatcacaaatgtatgtattttcattctgagatacgctgagtctcagcctttgcaatccagagggatttcatgtgtgttcataaaagcttctatcagaaaccacattccgaatagctgtggacatacaacctgcttgtgacttggaaattgctgaagtcaaattctatctcggtttgaggcgttaggagctttagaaattttgaaattataaaatgaaaatgtgataaaattaagtacatttaaacaaaagagatatgctgtgggttttaagggctgtgatgcatttaagaatgcttttctgtattttagatttggttgtctttaaggatgtcatgttccatccaaactacaaatacatgagataatttaaatgtaagttgaacccttcagaatatcctggatttggtcttgatc

SEQ ID NO: 59510 - DNA, 1049 bp, Homo sapiens
gtaacagtctttttttttttttttttttttaagagatagggtcttgctgtattgcccaggctaatcttgaactcctggcctcaagcaaccctcccacctcagcctcccaaagtgctgggcttacaggcttgagccactgcaccagcctacagccatgtttttaaaagtcagcagtttaaaaaccctactcctctcaccccctcaagcaggctggttggccttgtacaaactggggtgtcacgaccttggccccccttttatttttccctttctttggcctcaagttctgataagaacagcagttacaaaatgggcattaggtgattcttccattaataaagccagaattctcatcagttagagatgtttgtccccaggagtccagaaagctgttttgaatcaagcccatagcaaataaggaacaaaacccttggtcctctgcttaatatctgggaaatgtgttagttgctgacaccctttgatctgtgctcacgtgctgcatctcctcacgggaagcaaagtcgccctgtggaataaagcccggctcacggtggcatgtccgggatgctccgggctgtcagtcacttagacggcggcaggcgtggagactcggcatcgtgtgcagagctcgggcaaccggagtgcatccaccttagagaccacacagccggtcggcaaggtggacgtccaggcagatggcctgatgggcccgccacgtggtggcgaattaggaatttgttagcaaagaaatgaaacttgcctgttggtcccagcttctttgggaggctgaggcaggaggattgcttgagccagaaagtcaaggccgcgatgagccatgatcgcaatactgcactccggcctgggtgacagagtgagactccacctaaaaaaataaaagcaagctaaacctttccatagcaggaggggagaatttatcaaagtaactgcaacaaaaatcttagatgatgtaatttcagtggctaagtgagctatccagcccatgtggctggctcacaaagatgcaacggagccaggtgctgctgcagctg

SEQ ID NO: 59511 - DNA, 1113 bp, Homo sapiens
aacttaaaataatcaatatttaccagaaataattgatggcgagatgggaattattggtgattccctgacataggcggcctgtatagataagcatgttacagtgtctgatttccgagatgttggtccacaccttctcagaaacacactttcaggcttagattcctgtgcaggagaagctgcctttccccgagacgcgatggtgggcccccgcactggcatggcagggtggttgtgtgactgggctgggctggacgtgctcctgtccccctgcgctgggcgcccgcctccaccccccgtatctacatcgagggtgcctgcctttgttcccccagctcgtggtgatacaactgcaccttcctttacgcatttctgaatagagatgattaggtctgggggtcgaatctcaatccgtgagatgcatccaggtaaattattcacacacatgactcgagtcctcccatcctggttcagggtcaggaagcgggaggtgggtttggagacagctgtgtggcctcaggaaggttctctcagaacctgtttctttctctagcaaagtaaggattcctacctcactgggcttgacgcatgctcagtactcagatgctgtctagtctttatcatagttagtatttggggaacagcgtggctggtaagacaatgcgttatctttccaatttatagaatgtcatatgaggcaagcgtgaaaccaggacactaccctaatctgaagatgctgttgcttactcttcttaagcattttattataattctgtcatgtgtccgccctgtcatgtgacggcaccctgtgaggttgccagggagcatccctcctgcctccagccctccagggtttcgccctctggggtttcccccttccccgcccccttccccgcctgcccctgccccctccccctgcctgcctgcctgcccctgccccctcccccttcctgcctgcctgcctgccttcctgccccctccccctgcctgcctgcctgcccctgcccccgccccctccccgcccatcctccccctcccccttcccacccatcctctcccccttcccctcccctgccctgcccatcccctcccccgcccccacccccacccccaccc

SEQ ID NO: 59512 - DNA, 1081 bp, Homo sapiens
catgagacatcaatcaaataaatgtaagatgtacattggtttgatctggaaacgcggggacaactggaagcaggggtgtccaggtcataggtagattcaaaaatttcctgattgacagttggttgagagagttgtacgattaaggggttgtgtggagaccaaggctttgtcatgtggagggatgcctccaggtagctttgaagagaatagattgtgaatgtttcccgtcaggctaagagtctaagttctgtctaattccagaagggaggcggggtgataaggcaagtcccaccccccaccgatcatggcctggactagtttttcaggttagctttggaatgcccttgccaagagtaggggctgttgagatggccaggggggcctagaattttaatgcttttacaaccagaaagtgattacgttgtttctgtggatgatagcccgtgtggtaattaatattttattagcagattaatttgaaagtcaatgtgttttcaagtatgttaattattaagttatcagcaaacagaaagcttactttgaaaccagcctgagaatcaagaggcctatcaaaacaatggacttgggagaactgattcacgtgttcactgccgcgagtttcaggcattatgagaagtctgtgtgctgatacattaagtgactcgagaacttaaatcctgatggactcctacttaacagtgacacttttttctttttttttttaaatggttgtgtttagcttgtctcttgtgttgtgcagcttttgtcttccagccgctgagcactttagctttgtgttcacatggcctcattctccgaacctcccctctttgtgactcctccatcctgtccaccttgatcgcgtgtcttctccacccctgtgggttttatcccgaggactgctctctgctgtgcgtggagggatgatcagtggacactggctttattgactcattttacacctagctcccagtttctaaaatcatgattgtcttggtttccctgtgaaactgggagtcaggccttgggcgcagtgctgggtgtctgtgacagggcaggagggagaggtgagaaccggagg

SEQ ID NO: 59513 - DNA, 1031 bp, Homo sapiens
gttttttctggtgagtttggaatccgcccctctctgtcagggttctgacagtgtctgaatgccggcctttgcaggagtccaaggtgctgcctccagcaggagagtgggtgacgtggatctgaaacagcaaatcaaagccgggagcccacatggccctgcctgcttcccaacgtgtgaagtgctggtcagtggtttccttccacccttggactcagttattaggctgttacatacctcggagaagggcgccagcctgagagggtaactcctgctttagtctccttgctgcgctcgactccgttacgcgactgtaagcacatatttttatgcttgggttttgggcaactgcaggagtttgaaatttaagtgcatttgatgatatacctttaaaaatgaagcttacatgtagcaaacgggaaacacaccattttacatccttattcctttagcatgtgtgaattccatggttttaaattctaggtgaagttgggttagtagtctgtggaaaatgcctctcttacgattggaaaaactgattgttcatcatatgccttgtttaaaaagagctaagatggaaaaagggatcttctgggctgactgtagttgctgacagtttcactgcatgtgagatgtgtggttttgaaagtttgactctgcattatggggttgtgtgtgtttgtctaggtctttttttttttttttttagaatgcaggtactgtttcatatttttaggagtcacatggtttcctcagctgaatttaaacttgtggaagggcggtactcttaaggttcttaaatgctgtgtatgtacaaatgccagcatgatgctttgtacagagaggacattcacgcttagtctattgatggaatggacgtgttctcttgcctgtgctcactcgaggccctgatactgactaggggtggtccaggctccatggaaagcttcctaaccaattaggggagtgatggaaccgccctctcctacagcacctggtttgccattgaatagaggaagggaaattgctggtag

SEQ ID NO: 59514 - DNA, 1988 bp, Homo sapiens
cctgtgcttggcctctttaaaactgtttcctgatccataaaatgggcacgacaaaatccaccttgtgacactgtgaagtttaaatgagatgatctacatagtgtcttccttcccttcctgacacgtcatagactcacagctatggtggcaatgacaggctggatggaatgctggagctgctttgtgcctgatgaagccacatggatttgtgcagtgctatgactatctctgaaagcctttggtcgtggcagtggcagccttgagtggctcttggcatacttcagtctgtggagtgcaaggttggctggagctctgaggccattgatactatccaggggtgagctgataggaccctaaaacatgggggaaggctgagaggacttggctgccagaagcactgtagatttctggcttccagaacttgctgacttatggacataggaaggtaaacccagatggcttcaaaattttaagtcaggaggaaaggtgtgcgagggtagaattgctgactaggtcatggttgccatgtccttgtggccatcctctctcctccctacccctgcctttgtgggtaggagggcctgagcctgcacagccgtctatttcatggtgacgatggctgattattaccctgcagtaagaagtctctccattttattttgcagcagtagttaaataaatttaaggagtgatggtgtagtggtatttgttttgtttttgcttttttttaaaaaagaatataaaacaaatgagtatcatttaaccgaatgttattcccaatttcactgatcactttaagaggccacacatgctttggtttgttattttgcgtttgagtttgagctagttcattttctcacgggaatgccaattcgttattctgttgtcacacatcattatgtatctcaaattgtattactataatacttagctgaattgcctcccttgttttggcttttacaaaactcaaatctgtgttaaacacaggatggtgcatctccattgagggttgttcaaaagtgtgacttttcctggcatgcttgagaatcaatgacattattttatagaaacactttgtagctgacagcaaagctagaagcttctgtaaagggcagggtaggcaatgtgttatgccttgtgggccacggaagtctctgcatattctttttcttttgttaaaactttgaagtgtaaaaatcacttctggttccctggccaaggctcggggattgtggtttgcagacccttgaccgcaccttacctgaaagctgatctcccatgcagtgagcaggagcccacttcattggttcagccaggaagccgctgccctcatgctggaatttacttcaaacaaactttgaaagctctggcacagctgttcatttcctccttgttgcaggccatctaaaatacggagcgtgccttggcatttttgattttgttactcttgaacggctctgagatggctcattgcaggtagacatttgcagaaacgatcaggcagagccacagccatcttgcagatcaagtgaaggtttttttttttttttttttttttttttttttttgagacggagtttccctctgtcgcccaggctggagcgcagtggcgcgatctcgactcactgcaagctccgcctcccgggttcacgccattctcctgcctcagcctcccgagtagctgggactacaggcgcgtgccaccatgcctggctaatttttgtatttttagtagagacggggtttcaccgtgtcagccaggatggtctcgatctcctgacctcatgatccgcccgtctcggcctcccaaagtgctgggattacaggcgtgagccaccgcgcccggcctcaagtgaagttttttccgaaagcttgttacaggcttaaatttctgatccctttccttctactgatcttggatgattcgtttctttttgctctcatttgggtctatgaaacttgttgaacagcgtctcaccccacggtag

SEQ ID NO: 59515 - DNA, 1068 bp, Homo sapiens
tgtggtgatataacatccgctgctacggaggcaacatgagccctcattacagccacacaaactgtcacgccttgttaccaatacacagaaccattttcttcagttgaaacacagcagaacctgaagtcatctgaatgggtcctccgattattacacttggaattcactttatattaatatgcttcctaattagcagaaatatcaattatacagaaatgtgagaatgtctaattatacgtttataacagaaaaaaacctcttgttgaataccccagaacacatggctatgaatgtgtctccctcatgccctaccactgttttcttcgcttgaaatgtgaaatgacacttgaatatggttttctggcgacttagactcgcatcgttcttcagagacaagatgtaaagcacatggagactttctgctgtttgtggaatgtgatttcctggtcgcctcattcaggccgccgctgtcttcccctctggctgcctgcactgtgggacgtctgaggagaggtccctgtttcatcctgtggaagttctgaaaaggaaggagaggagggtgtggggtgtggtacctttgtgttggtcccttgagcttttatttggagtctcggttaccttggtggttcctgccttcatgtccctagctggtggcttcgtccttgtgtctaactcaccggcaggcagatgaaaagggaagttgtatttagccaacagcttgatcttattctcaaggctcaaatcgactgggtatttgtaaacttctgtgcaaattggcatttttggtttttaaacatgatgttttatttgtacttcaaatgggtaactggttctcttggaaaaaatatagccatataactggtttttaacaaaataggggagtgggtgtgagagagtggcttagaaattacaccagtaatggcagggcatggtggctcacacctgtaatcccggcactttgagaggccgaggcaggtggatcacctgaggtcaggagtttgagaccagcctggccaacatggtgaaaccctgtctctactgaaaatatgaatattagccaggcgtggt

SEQ ID NO: 59516 - DNA, 1024 bp, Homo sapiens
tcttcatggtttcacaaaaggttgtggtcatattttattcagttgaaccataggaaactgccaatatttggctgtttttggcctacaaaatggcaagtttgtatattaaaaccaaaggcttcctggatggggaaaataggaactaataagaacctgaagttttctgtcatggcccacgagtcacaggtgagtaaacctgcgtgaggggacgttggctgtacagtattttctttgttttgagactgtcagaaaaaggtcagtttgattccgtgtgggccctgcgcctcgcctttgctgcagaggggatttgccattttacctcttgtcccgagtgcccaggaggctgatgccatgtagaagacctgcgggtcggtggatgtgaacgggcatcggacacactgcaccttgggacacatctgagaagtgcgtgctttgcaccaggtctgcggtgagggcgtgttctgtctcctctcccttctctggctttgcaggccttggaagttggtcctgggaagtgaaattagctaatgctaattagctcaaggtcaaagcccgaatcaggctcatcatttcctgcagtgtccacagcagcaggtcgtaaattcgacatgatctgaacccggagagtcgagattccgccctggtttgcggctcggttgtgtgtggtcttgagaaagtgaacatgggttttcttgactctgagggggccgacgagacctgcccttcactaggggtgttgaagcattgggccttcctgtcaggaagcagccagggactcgagaaagcaccacgtgccctccagttcccttacgttgaaatggtttatactcagccacgttcccttatgttaaaatgatttgtactcagccatgttctcttacgttgaaatggtctgtactcggccatgttcccttacgttgaaatggtttgtactcggccatgttcccttacgttgaaatggtttgtactcggccatgttcccttatgttgaaatggtttgtactcggccatgttcccttatgtt

SEQ ID NO: 59517 - DNA, 1073 bp, Homo sapiens
actctgcaggtccagcggtggttagaggaggccctcctaaacgtttaatgatggcgctgctgagtgcatgaagccacgtcagccccagagtccaggtagggaaccgtggggtagagggaagagtggacagatgggtgctttccttggcccctgggggcatggccaggtccacgttcagacctcctggtttctcccgtatttccataaatagccaggaaaggactcaggacccctaggacctcatgggtgtaagctgtgtcctcgtgtggccccagctgtggccagtgacgttattctctttaacctcaagcttattttgtataaaaacatgaagggacagaagtagttcaggagcctctgaagacttacgtaattgttagtaggcctacttttatgatttcttacgtattaagagcaaatcatgaaacaaactcatttctgtttgaaggaatctttactgttctcatttttgtggcaagtgacattgattctttgcatagtgacagcgttagtgcactcctgcccagccctgctgcccagcgtgtcctcggcacacacctctgtccattggtctccattcaccaggtctccattcacctttccacctagaattgtaggggggcactgggatattggggctagaaggaaactctgaagaccacttctaggggcagcttagtcagggctctccagagagacagagccagcccggtgtgtgtgtgtccagggggaggcttgctgcaggggctacggaggccaagaagccccaggacccactgcctgcaacctggaggcctgggagggtgtggctcaaaggcttgagaagcggagggtgcagatcccacccaggtctgaggagctgagacccaggagcaccgggggcagaagacggatgccactggcctgcagccagacaggtggagcgagcccagccttccccgccttgctgttttactcgagccctggagccctgggtggacagggtggtgccccctacactggcgaggatgggtctccacttagtctccactcagtccagaggcaaacacacatctcacacagaaataatgcag

SEQ ID NO: 59518 - DNA, 1001 bp, Homo sapiens
aggaacttaagggctttgagaactgacactttaggactgcaggagttttcttcagactgtaaaaaccttggtgtgtgacaatactgaacgttgcctgagtcctgaaatcctgtaaacagtgatggttaagacattccccgcccccaccccgaccttatttactgcaaaaagccccttcccatgtggcttaggctgacttgcaggtgaccctttaccaaggacaaggccagagtcaggacttcaaacacccattctctgcctcataagtgattagctaaactgccggttcccactgatcaatcagaacaaaacgcgtgttagccaaatcttggttcctcccgttctctccttacccgagcctgaggcccctctggagaacaggcagcctctgaggaaacctctgatccccgatcagccaccccatcgcctgcgtccccagccgcttcctcctggccttgttcccccttccctgtgaaggagagaacagtttcggctggccctgagatgctggcaggcctgcagtcagggcagtgggcgcctcccaccttgaaatggtccttcgtggtgcagttctgcttacggggtagactttgttgccttccacagaggacagttagggtgggcaggaaggaagtctctgccacaagtctgcattccaggctgtttccagaagtgggaattctctcgtgccctggagtctgggaatgcatttttagtttcccagcttcaggtagaattgaaattgagtgagccaacccaccacatccatctggagccaggaactagtgccgttttaaagcggcagtttctccgtaagattacaaaaaatgcacttagcacgtttcttactttgacatatgcatttggacatctaaaatgggaatggtggtttttgaagcatggatgtagttttaaattttgagtgttgtaaaccttaatgtagcttcctaaaatttttgcctgattatctagagatttactgaacctttggagtggtaatg

SEQ ID NO: 59519 - DNA, 2381 bp, Homo sapiens
tagattgacaaatgtcttttaggggaaaattaatttaattagagaactttttggataaaaactataatcaagagaagctgttttgtaataagatctagttaaatactaaagttgaaagctccttatatttgatcttaaacttgggcccagggtgcgtgtccgcacgcttgcgctcatgacgccaggctcagctgtgaactacaggcacactgtacttactttctggttgcttttttgaaagtcttattgcttggcctctccgactcagatgttgagttacattgattctgttccgaatgtgttcatccctccatctagggtccactcgtctttcagggagcaactgccttcctcatctttgtctcctatggtattgtatatttaatagtcaaatatttataggttgcatgggtgactgatgtgttcattaggaggaaaacaatgccaatttttacgtcattataatggacttgttaaatgcttgttagtgtaatgaagtttacatggcaaaagaggctttggagatgtgactgcgtaacagacagtgagatgggggaggaccctggattgtccaggtgggtccagtgtcctcacacacatgccttgatgagagggagtacgagggtctgcctcagaggagacctgaggatgaggtagaggccagagggggtgtggggctgagggcagggctggggggtggggtggtgttgtggggctgatgagggagctggggccggaggggcttggggccaagggtggggcagtggttggaggggtgccgggccggaggggtgtggggctgaggctggggcagtggtcggaggggtgtggggctgtgagccaagctgcatggtggcctctgatttgggagactccaggcaggaatgcagcctactgaccccttgacttcagccctgggactcctgactttcagggctgtgagaggaggtctgcgtgtgtggtaatttgttgcagcagcaataggaagttaatgcattgtatctattcacctccagacctttgaaaagtaaccctgttgtatcagccttttgtgtgccctaaattataatgagatggtttgtgggaaatagacacaaacgatggcagaacagatagttggacagaaacagtgtcttctgtggttctatgatttgggtctttaaagttagatttcgatcacagtatggtcttgttccaggtatacctgatatacttgttcagagctcctgggggagtggtctttaacacatgacgtgttaggattaaaacttcaagcacatcagagacagaggtcctgagtcagtgttaggcgacctttgaataagggttggggtatagaatctgcccacattactagtatgaagcagcaaaatctcatggttggtttttttttttttttttttttttttttttttttttgagatggagtctcattctgtcacccagattggagtacagtggcgcagcctcggctcactgcaacccccgcccccctgtgctcaagtgattctcctgcctcagcctccaaattgcatgatttattttcctgttttatatacttagtatatgaaaactctgcagactttattaacacaaatgacatgccagaacttacatatgataatccagcattttcccgtgcaaattagtggtgatgtggaattcctgggctggtttggttttataagacgtagggtggattctttgcctaatttctatggagctaacaattgttaatcacccagcactcttgcctcccccaacggctccggtgaggggtgttatcaccactgttgtgttgagaggcgggagactgaagcttagacgagcaggtgacatgttgctgtccggcctcacccaccctgtagtttcctgccatggcccagctatctttctgcgaaaaaggatcgacaccctggttctgggtagaattccttgtgaaccccgtttccattctccagggagttcttgctttatggtggtggctcacgggaggcctctggcccactgagaaagtggctaatgttgtaacatgactgtctgggctgctgtagattgggtgatctgtagctcacagctctggaggctgggaagtccgaggtcaaggtgcctgcagatctggtgccccaggacctgttgctcacagacggcaacatctcactgggcctcacgtggcggaggagcaggagggctccttcaggccttccaacaaggacaccaaccccggtcctgagagcgaggcctcccaaaggccacaccttttaacgtatcccatcggagattgcttcagtgtgcgtgaggttttggggacagacattcaggccagagccattgctctgctgtggtgttagggctgcgatggtatcattactgccacagag

SEQ ID NO: 59520 - DNA, 1438 bp, Homo sapiens
agttagtgtttttgatattggaaaggtgatgtattttattttctaagaaggaaagaaacacaagttatcctgttaaatactctaaccacagactaaatcacatcaaggaaagaggaactattttggggggaaattagcccttcatgtcaaagataaaggagatgacttacattgttttttaattgagttaattatgaaatcttaagtgggtttgagaagatgagctgtggatgctgaaaggagagactgatgctgattgaatgttagtcagccctgataggatgtggctagtatttcaagcttgctccagtattgtttgatagattgtaagtgaatgtaaagatctatttgatgcttttattttacaaaatactattgagaaaaagtttctgacagccagggaacagccttcaaccaatttcttcctaatttccatcaccagaaaaaacttgtcctgttaattccagaatttacttttggaaagttcctgtaaggagagcagaggtattggtggttgaatggtgacttgaatttaggtgaagatcattaaatatttttgtagtcatgtttgtcttggtggttttagcaatttcatattaaatttagaactgcgagtcataaaaaccaaacgtggtcttaccctttgcttttgtgatactccttttgtttatatgactatactggtaaagtgatgacaaaatcatgcttatagggttttcttctgtgtagatattaggatttttaggggaacaaattcttctaatagacattgtgccatgtgttggggtcctttgtatattagtcaaatcactgtaatgagaaccacttgcaagtatatttctatacaagatcttttatatgctgactcgtggtatgtaaaatccttcatcctctaagaagactaagcaatgggttggaggagaggtttatcccccattaggtctattccgaatgcccagaattgaatgcaagtacgaattgtttttgaagtggtgtgtgtgtggggggatgtgtgtgtgtgggggggatgtgtgtgtgtggggggggatgtgtgtgtgtggggggggatgtgtgtgtgtggggggggatgtgtgtgtgtggggggggatgtgtgtgtgtggggggggatgtgtgtgtggggggggggatgtgtgtgtggggggggggggggggtgtgtgtgggggggtgtgtgtgggggggtgtgtgggggggtgtgtgtgtggggggggtgggggggtgtgtgggtgtgtgtgtgggtgtggggggatgggtgtggggggggtgtgtgtggggggggctgggggtgtgtgtggggggctgtgggggtgtgtgtgtggggggctgtgtgtggggggggctgtgggggggtgtgtgggggggctgtgtgtgtgtaggggctgtgtgtgtgtgtgtgtgtgtaggggctgtgtgtgtgtg

SEQ ID NO: 59521 - DNA, 1053 bp, Homo sapiens
gtcctctgcaggccgagacggatcccaccacagagccggcactgttagacttgggtactgtgtgcagacaaagaggtgcatgtccaggcctggcgggggctggggtgactctggcctccttggccaggctcccgtctccgagtctccaggggaaatgcacccatcatccacaccatacactggaggaaaactgcaggcttctctgtgtggatggtgaattgagatcaccaagtgtgactcggcttgggctcctagccaccgtggaacccagtgataccttttaggtggaacctgacatgcctccatgtgtgcatggcaaagagaatgcagcgttgtcagcttgaatccagatgtgtgcctgttttgaggtggaaggttctgggagcgttggctgttggtgactgtcctgccatggaggacgttgaatgcaggcactggtttaggataatgcctggtttcctggtcctgtatgtgggtatccctgaatatcctgggctggaggaaggcagggcagatgggagggtgacaagaggtcaggtgtttccagctgtggggagtgatgccatcagatggccgagatcaggagggtggccggggaaccaaagcaggggtgtgtggaaacgccatgtttcccggggcacagggaagacctgttgagatcaggagggtggctgggggaccaaagcaggtgtgcgaaatgccatgtttaccagggtgtggagaggatctgttgaactccattcctgggcaacagttcttccattctcaggaatctgccattgtaattcagtagcaaattctgcaattgctctaattacctgctgttaagtccccatcccaattaccatgaattagaaacagtgacaattattgagaggtaaggaatcgcatatttccagggtggagacgaatgcagttgtttgcctggtcaagccttgccaagaaaaaccagtggaaccagttttaggtgccttgagttccctccaaatcggattccttagtgggcttgtgtccacagctgctgcagttcctcccgggcctggcaggcacgtt

SEQ ID NO: 59522 - DNA, 1052 bp, Homo sapiens
ttagctttaaattttgtatcggattgcggtccagattacaaacggctgcttgataatctaattgataaaatcgaggaatttagtacttggaacccagagtgaagagaacagaattgcttttgtttctcaagtgtgtgtgactgagggatgacctgggtgaagagaagtgcctggagtcattacactcaaggaggagatctgccccagcctttctcagcgtcttcaggataaaacaaaagggtgataaatgtggaaaaatgcagcactgagtttgtctatggtctgagcttctcatgtggtcattaatgtgagcgggctgtatctgtggagcctccctacaggcacaaaggaatcaggctagagtaagacggccggcaaactctggcatctgggctgcgtgtcgtttcctaaagcccttttgggtgaagtgacacaggcgcaatgtctgtttggaggagtgtaatctcacgcatgagacgcagattttaaacactaaagtcaagaagcttggtgggagtggctgtcttccaagtgggtttctgtgttgccatggatgaggcatggatgtgtcatctgtcggtgaaatgcgctggtgaagaggctaagcaaaccctgtgtgtgtgtgtggggcgggtgtgtgtgtgtatatgaacctacatctcttctggcatccgaagtaaatagacgttttgtaaaactggtgaatttgatgactctgaccctaaccctgagagttgaagtctggtgcagtgtcttgagccctcttctgcattgagggtgagtgactgtaaatgactgattcctcagtggcgaaagttcaaatttagcgtccctgaggaagccagacctcatagtcacctgtgtctccattgtaaacaccgtggcccctatgcgggtggctgcgagtttccaggccctccttgcagaagcagccatgcagtgcttggtgatttgataacatcagccaccttctgtcttctgtctaatcacggtacaaatgattttcctacagggaaacagatctcatttcttccccgatcgttgggagaagc

SEQ ID NO: 59523 - DNA, 1705 bp, Homo sapiens
tgacttgtccaggtgttcacagtggcgttagggggacggcatcagtgttctgggaactgcagttttactgaaggaagggggctcaccgtgcctttcctcacataactgaaggtatgtccgcctgccacacagctcaggagacagcgactagaattctgattttatttcttatgggaagcaggccacagtcagaacacagtgagggctgaaatgagcttcctgcagcctcagctggaaagaagaattggaagtatttttgatgtttttctacacagacctgtcctttcaggttttgttaagttctggaaaaagggagaagccaggcataccttggcgagggacagtgtttctggcgatcgtgcggcttcagcctgaacgtggccgtgtggctgagcagtgcgggagggctctggtctgcacgtgtctgtgtggaccgaggtcacggggtattgtcccaagcacttatcctgatctggcagaggctctgttcccaaataattattccacggtttcagaggctgtagctgagtgatagtcttttaactttgttgcataaaagcaaacaaagtctgtcatgagagtctaaaaatcattatttagtagtcatgactaaattcatacatggagctttgggatggagtgaaagccaccgtcacctggcgtggacgctgtgtggtatttttagcatggtgggcgcctgctcgtgccttgagctctgtctgcagtgcgagcgacagctgtgcatttgagaaatgtgggcaggtcagcttgctcctccaggggcctgcgggcgtccggctcaggggcctgggacgaggccatgtcagtgggaaggagcttggttgtgtttcagcagatatgtctgcctctccaggcctgcaagccagccagaacccagttttcctttggtcatctaatgccagaaaaaaacctgtttcttagagattcttgtaatttatattaatgaaccatttgaccatacataagaaaatattatcagaaaaatgcatgaggctttacaacttggcagatgtgtaactcacatgattgaatcaaactgttgaagatacttgtttcacttgagggtttttagcattttatgtgcagaccaaatgccaatagcattctgaaagagtattttggaattttaaacacacaatcacagagtgggacagtactgggtcctgggatgctggtgaggtggacgtgacctcaagctcttggagctcacaagcaagcaggattcctaaattgtcacacctgcagtgcagggaagtcaaagtggatttctgtaaacgaggtattagtgcaataaggaacagatgagtgcccttggagggcagtttttgagcctcccagacacctggggctgggggggcggttacccaccagagcctggatggtggagctgggtttgctggttgccctgtgtggcaggtcattacgtgcaacaaggagcaggtgagcgcccttgagggtggtttctcagcctccttcggaaccgcaagtggaagacgccccaagcaggggtgggggtgggggggtggtatccacaggagcctggacagtggggctgggtttgctggtggccgctacgtggcaggtcactgcgtggagcaatgggaggtgggtggagtgggaatagaggacacaccctccacagctactgttgggagttggccctggtggcagagggtgcatagaa

SEQ ID NO: 59524 - DNA, 1048 bp, Homo sapiens
gtccccatgtgtggaccgtgagccggacagcactctcccgacctgacacatccccatgtgtggaccgtgagccgggcagcaccctcccgacctgacacatccccacgtgtggaccgtgagccgggcagcaccctcccgacctgacgcgtccccacgtgtggaccgtgagccgggcagcaccccccgacctgacgcgtccccatgtgtggaccgtgagccgggcagcaccctgatggcctgacgcgtccacatgtgtggaccgggagccgggcagcaccctcccgacctgacgcgtccccatgtgtggactgtgagccgggcagcatcctcccgacctgacgggtccccttgtgcccattgtgggacctccatcatgcaggcaggtgacatgcatcaaactgaatgcaaggaggagggtccaggattgtgtgcgggctccgtgtctcgtccttctgaggccttctgggaagccaggagggcagtggggtcttttgtgtgtttcctcctggtggccgtgggtttgtagaaatggctttttgcaaaagggcccggaggcggaattagagcctgtcctggaaaggatgatgccttcgcgggcacctctttccattactccagtgctcccgtgattttaaatatgtgcaccctgcagacttcagccttctagtgtcctgggtgaataaatgccaggattgctccaatgctggcaaacctgaaacaggaatttctctgcattaagtttgtcaccaaaatgggaggtaaggggagaggggaaggaacttcttggcctcgtcagcccttttcttgaaactcacagtcaaactttgtcaagttctaggtgatagtgcttgaggcgatgcacttatttatgttatgtcttgttttctgagtacggtgcttcgagaatttaaatatttaggtgaaattgccatgcacagttgaattggcaccataatttgactctctgtaaagccttttggtttcctgttagagtgaccattttttgagtcaactgaagcaaaccctgctgtcagcacgaaggagccac

SEQ ID NO: 59525 - DNA, 1055 bp, Homo sapiens
ccggccctcggcaggtggaaggtgctgcctggcagcccctgcaaactgaaggggcccacgtccctcctggctctgcatcccattctcagggacacggctgtcatggggggaccagctggggcaggggaagagtatagggaacccagtagaagtggccgtggactctcttaggaacgataaccgggtcacctaccatagatgaagatgttgtcggcctgcgttcttctcgtgttggtctggggcgtgtggctgccgtgggctggcgttatccacagccccggtctggggcttgcagtggctgtgggctggcgtggtccacagccccgggcaccatggtccctggccctgaaatcgcatccagtgctgtgtcacctcgggccagctgtctcctgaggggaagggaacagggaacagccctccccgtgtggcctccccagcaccacccaccccgcaggacctccagtgttgactctgctggggtcttctctctcctggggggtccttgtcccaacgggaggactccatgggccgcaggaggtgtcaagctattttctctcctggaactgggttgctggcagctcccagatgcaggaggaaaggctcagaattgccttcctaataaggaattgttgatgtgaactttggacggcaaacactgcttacatttccttttccgttttgatgtgttaatggtgtgcggcaacgccgtgacgcacggggacgcaggtgacgggcacccccccacaaggggaccatgcacctgtttgataataaggcatgcttctcttactgcaaataaaaacttcaatggttttctgccagaaagaccctgtcttttatgtaggatacatagaggatcatttggcaagtgattggggattttgggttaaactaaaaataaattaatttcattttatagcactctgaacacatttgagttaattattcatcgagaatttgaatagcacacactgttctgacttccgacttcccccaatgaatggcatttgctgtaacgtgacaaaaccctgagtcttagaattattgggtaatgt

SEQ ID NO: 59526 - DNA, 1044 bp, Homo sapiens
tccagcatcaggtccagggagaggtccagcatcaggtccagcgtcaggtccagtggcaggtccagtggcaggtccagcggcaggtccgggggcaggtccagtgtcaagtccagtggcaagtccagcagcatgtccagtgtcaggtccagtggcaggtccagccaactttccacatggcccatgtgaaaatgtacccactcccttgcattttttaaagcagtagttattagtagagcctactgccatttctccttgagttcctcacagtggatgttaagcatttgctttattaaagcaaagttccatgctctttgtgctaagtcacctctgcctttctgtgagaggctagaattgggatcgaccctcagctgtgccagagccttggtacctgtctcagttctggaatctactctgtccttgttgccttccattcaccgacagccgtctgtcttcctgtcactccttcaacacggagtccagcagtgtgcacacaggtgagcctgtgtggatgctggtttcgtaggatcttatcgggacctcactcatcttttcactaggaaatcagacactgcaaaggacttacagaaaagcccaaagaagccgtattgatagaatcatagagacagaattctataaccataggaaacggcattgattatcatgaaatgtgcacttacgtgtggcatagtaaaacatcacatttgaataccgcactgggtaagagcttggaaaagagattatgaaagtataactggctctgctcttatgtagtgggacatggtaaagcgatgcctgatactgtatagaatggaacaaacaggatagaattatacagagtagtgcagaatagaacaaatagtagagtgttcgataaggtagcatagagtagaagaaacagtgtaacatatagtatagtatacaataggagaaatggtatagcgttatatagggtagcatagaaggaacagtgtaacattatatagtatagtgtacaataggacaaatagtatagcgttatatagggtaacatagaatagaagaaac

SEQ ID NO: 59527 - DNA, 1626 bp, Homo sapiens
tgaaacagggacaagggctagaatctctgtttcatacacagagcttgaaacagggacaagggctagaatctctgtttcatacacagagcttgaaacagggacaagggctagaatctctgtttcatacacagagctgaactgggctgagcgacctgctctgctgacgtctgtttctgtcatgagagggaacctaggcctcttgacatttccttttgtacattttcaaaaagattattttttcctctctctggtccgttccactgtgagattctctcctaaggctgtttctttgccttccattttgacaactatgatttagtttccgagatgatgaaagggtagtaaaaaggcctgggaaagagaaagcaggaagggaaggaattatctcatgattttagtcagaaggaaatcactcagacagaaacgcttttacaagtggtcagatcccgggaagtgggattgaataagtggcatcgtatcacacaaccctgttttacattcttgctgttgccaggggtaacgaaaagaacgagtatattcattccgaggtcaaatatatatctttgctgactctgactataattagcagaattcgttcaattcaagtttgagaatacctttacagaagagggtcttcaggcatgtgtgcctatttctattcgtatgttcacatgtatttgagtatgaatgtgtgtatgtgtgctgtgtgtgagacctcattatttgaaatcaagaaatgtgcagtaaagtagagtttattaattacaagaagttacatttgggggataaaccattttgtatagaattgaataatggggtctttgaggggtgtatatatgtatgtgtgtttgcatttatgtgtatgaaagtgtgtattgcatgtatatgtgttgtgcatgtatgtgtcttggtactgtacagatgcatgcatgtgtatatgtgtgcatgtgtatttgtgttgtatgtatgtgtgtgcatgtgttacatgtttaggcatgacatcgcacacatgtgcaagtatgcatgcgtggatgctcctgtgtatatagttataaatgtatatgtgtgcatgttatgtgtatgcatttacatatgtttgtgtgtgccagaatgtatatgcatgaacatgtatgtatatgcatgtgtgtttgagtgttgtatgtgcatgtatgtgttacatgttggtattatgaatgtgattatgtgaatgtgtgtgcatgtgtgaatgtgtgtattgcatgtatgtgtgtgtgcgcatgtgtgtgtgtgagatatgtgtctgtgcatgcatgcatatgcacatttgatttgtgagtcctctctgggagggccatgttcctggagagagtgcatgggatcctccgctgtcctctcagggagagagatattttaaaggtttgagccattaggtaaacacgcctgatgctctataaaatatatatttacatataccattggggttaaatatatgttaaatgggtgcaaagctgttatattgcattaaaagtcatgttaatacttccttgttaaaggctttgtgaatgatttcctgcacatgaaacataatacaccacacagaattacagtgggtcagtggtgatatttgccaggaggtctggctaatga

SEQ ID NO: 59528 - DNA, 1476 bp, Homo sapiens
tttcccggtaggtgctgaaggaataattaataataataaggccagttcggagaaaacaaaaactcacaattacatatgtcacccggactcgtattattccagatagcccttctttcccacgaactcacagctgctcttcgttcctccaccgtagccacgcgtggagggagagctgcgggacctgggcctttccagggtgctgccggcctgcgttggtgacggccagcgctgagaagttagagcaccccataagtgccacggcaaagacttcggcgtctgttgggggaggaaagcgcttctttgagtgatttccacttgattatttacctcttatcagcagattgtgtggaaggatgagtgaattcagtgtaagatttatggagtgttcctgtaagagataagcctggctcttgttttcctttcgatctcgtatatttcatcgggttcgtttgattgatgtgttttgttttgggaaagcggctgaggaggagtcacgtgagtctttgctcagggattttccagtgtgggaatctggcgctgtggtttcgcgtagcgtttggttctggagggtggaggacgatgtcccagtccgcgtgtgcctcgtcacgtggcggcgaaagcatggattccacgagtcttttgctagagaaaatccaggcgctcccaaccaactgtgtgtgctttccttttggaaatgtctctaactcatatactgaacttagaatttatttagtgtttcttatgtgaagtttcctggaactactgaaaatattttccatgctagatgatcgcgttactggactcacacaattaaaactttttctttagattacataattatttattacctatcccccgtttttcttttcagttaaaaaagcaccacctagaacaatgtcctaatgatgccaccatgattagtgttagaatttagctgtagagtgaggttaataatgaattaacaatcactagtatataatataaagcacggttaaggtatatatgtatattttatgaaccatccaaagcaaaaaataaattagggtcaagagaactcacaggtgcagaagtgttatttttattttctgttttattcaggaaatttaaatctttaaagctgtttttgttttgttttgttttgtttttttaaatttcaaggtcaactccaacagaattgatctgttcctcagcagacctaggggagagtacaggtgctgaacagacctgggtatctgctagtcgcgattcagtagatattttcttgttagttggtaattaaaacatcgttataaaggttttaatgtactttttgagctttattactatatattccttcaggagtctgtgagaactctctactttgttttttcccgtctatttagtattaagttaggagttttaattccttctaccctgatatttatttaaaaattccctatatatttgtagatatatatttggttcattttaaaatgc

SEQ ID NO: 59529 - DNA, 1716 bp, Homo sapiens
atgcatgcgtgtatgtgcatgtacgtgtgtgcatatgcgtgtgcatgcatgcgtgtgcgtatgtgtgcatacatgtgcacacatgtacacacgtgtacatgttcatgcatgtgcgcacgtgcatatgtgtacacgtgtatgcgtgtacatgtatgagcatatgtacacgtgtggatgtgtgtgtatgcatgtgtgtgtgcacagatatgccttttcctttcatacaggctgttttgagtattgctgttaggcagtgacaactttccgtttcctcagtcagaaaatgggtagctcatcattaataaagatgaacattcgatatcaggaatccctaaaaacaatggaaattgtcatattaaatgaataaattccaaaacaaagatagtgttctgtactgtgtgtttacattgaactttcttataaacattggtatgaatgtttcccacttattggaaatcacatgactagtttaagctgaaacgtggaatattctgtcttcagatcacttttgcatatttatgattgatctgttctgctgttctggaagctctgaaaaccactcggtcttaccctagctggtgccacagttgtgagaattcagggaaacaaggtgtttgccagtttaagtattttagatgtcaagctgcctcttacctgcatcataaaccagtcttaaagaaagacacagtgtgacttgtagtggattatatcagttttattttctgtggctgaatcatcactctacattgtgaattaatgttatttttcggctcatcttcataatgcagggaggttctccagtgttgagtgcaggttcagtgaaagcgctaacactgttaccacgggcttaaacggacttgttttctgaggcgataaccctggagtcaggcattcagtgtctgcccatcacttggttccgagttctcggtcccctcttgctctcctccccccgcacccccttgcttctgtcttgtcttctttttgactaacaggccctctgcagatggtgtgttgggggccggggtctgctgtgagtctttgataaccttgggaaagaactttttctttggagcaagacccctctcaataaactttcagtagcccaactattgtccgttgtgtgaactatttgtggaaaatgctcagcatttttccttggattctggctgatctttctccacctgccaatttctcctcagtttgccgtgtctgtaccgtcaccaaccccgttccagccgcggttacatgtaaagtaattgaagcagagctctgcagatgagagagtgtgtgtcgccccccgagttcccttcctggcctctgagtgtgagttgtgttttgttccgagggatgactgaggctcctggcccctgttttggagcaccccacaccaaagtgggtgtaaaatgaaaaaagggtttatgctatattattgtaattcatggagcagatgataaacatgcttgaatctgaacagcagctgaaaatgaggacatgttaccagtttggatgttggatgaccttcttgaaaaaagcttttgtcatactttagaaactgtgcatgtgctgttttctatttcatacttagaatctgtacagtatgtgttgtatgaatgtgttgtatgagcgtgttgtgttgtatgtgagtggcatgggttgtatgtgtgttgtatgtgcatgttgtgttgagttgcattcattgtatgtttgagtgttatg

SEQ ID NO: 59530 - DNA, 1012 bp, Homo sapiens
ttgaaacaaagatatagaaaaaatcttataattgtagggtgccttttagttttcagccgctctcatgtggatcctttttcgtccttctgaaatgctttcccaggagacagcattgctctctttgtacagatgaggagactgggtttcaaatggttaggaattcatcgcaggcattggaatctttggtttcctggaacattttctattcaagtatagaccacgtggcctctaaaggctggctcactcttaacaccaagattggggatccagcctcacctctggggtgggcggcaggagctccacagccatcctgggtgctctggggtggggtggctgagctgtggcagcccctcccagctgagcagcaaggccggggaaagctcattccatcccccttggttctaaccaggtacaggcttacactgcacatttccttagctgggaacctttagaactttacatttaaaatctaatctgtgatccagggggttgatacatgggtattcactgtacaattcctacattttttgtacatgtaatttttttttatgtgtgtcatggatgacaaaagaaatgcaacccctccgagttagcttttctgtatagcaccttctagaatcaggaggctgggcagggtttagtttcatcagaaatctttatgtttctggtcaagagacggcactattaaattcttggttgtgtggtttctggaaaagaaatattctaaatgagttccaggaatcacctctgtggcatttctacaggaaaagtgaccactcttgaagcttcgccatcactcacaagaatgattgtgatggtttctaagcggtcgccagccaatctttagttcttttatgcagagtgctttcattcgaagtgaagtgcccttctgtttaatggtgacctccagttattacagggattgcagccgcatttgatggatgtgaacctgctcatctctggctccccagcctcgcctctggggtgggcggcaggagctccacagccatcc

SEQ ID NO: 59531 - DNA, 1105 bp, Homo sapiens
tgcggggagcatggacatggggagcagagatgggcgcggggagcacgggtgtggggagcatgggcgtggggagaacgggtgtggggagcatgggcgtggggagctgggcacagggaggacaggtgcggggagcatggacatggggagcagagatgggcacggggatcacgagtgtggggagcatggctgcagggaggacgggcgtggggagcatgggcatggggagcagagatgggcgcggggagcacgggtgtggggagcttgggtgcggggaggacgggtgctgggagcacagggtatggagagtgcgtgtgtgcttcctctgctctgacagatgctgccgaacacgtactctgtgctcagatgggtcagagcctcagtgcctcttttttaaaaaattctttctttttttaaagataggacttctctcttcctggtggccccttttagtcgatactcttttaagcctgcttttccagaggaaagctgggaaggatggcctatataggttccagtctgggcatatctggaagaatggcctgttttaggtttgagtctggtgtatctggggacatctttaaacttccactcagagttccagagccacctgtagggactccccaaatgtctgctgggactttccccactgctcggggatgatgaagagcaggacctcaccctgccacgacctctgaggtcctccttcctggagggcagtgccttggtggccagtgtgtgcaggaggctgggctggcaccttcgggctatgctctgcagcgggggctcatgacatgggcattcttgtgctctgcactgggactggtgacgtggggcatcctcatgcactggaccacgccgggtgcacatgagccagacagctcctggaattcggagcctggctctgtctcaggccacccacctgtctgtggcacttctgggggattgtggggactgtatgagtctgggtctccaccctcactggctggacacctggccaggctggggctttatgtttcaccatcccctgttccgagttgtgtgaatatttattttcattacctactctcataagctttcctttttaaataaaaaaatcagagacaga

SEQ ID NO: 59532 - DNA, 2343 bp, Homo sapiens
gattacaggcgtgagccaccgtgcctggctgtgtgtgttactgttagcacatatgaatacgtgtcaagtacagagacatggtcttcacacagcctgcacgttgctgtcgccaaagaggggatcctaaaatgatggcccagtgggaggtttgtaggttttgggggtggctttttcaggacacttggcacaaggtcacagatatttgtggctttggaatggagttctgccctcggcacccccagccctgtgcatttcttggaggttccaccctgcacagtgaggaagtcacacgcctgtgtaagagctgaccaggggaccaccttccagagcctaagagaaggtcctgaggactctgtacacattattttcattgaaaagaaatagtttactctgaaaaaacaaacgtgggaaagctgagcttcattgagcctcacggacagtttgttgtaactgagaggagggtaggagggtcagtgggttcaggagggtgaggacttcttggccaggtagcgttgttacatctatctgaaagtcacagataactaagtatcaagtcgtcacagatatttaagtatcctgaatgagatggctacctgcatgatgcattgaaaacatcattactggttgcgtgcaagatgcattgaaaacattgtgacctgcacagtggcagcactgatatgtgtgggcttttgaacgtgtggactggaatgttaagagtccttcagagttatgacaatagtttgatttgaatgttcttttcttggcgaataaatgctatacatcaaatttagccaggaagctaggaaagcgaacccacatgaagggcacaggcccataggctgctccaggtgccgttaggggcccgagccacgcgcttcccgctcagcctcctgagagccatgacggcgtctctgttctgcctcacactggacttgctagtttcatattcttgttatggttccgaggctacaagcggttggattctgtgagtcactgtcttcctcctcccagctgctttcaaatgggtcgtctctttttttagaactgattttttttaatcagtgatttatggggtgagttgtagcgctctcctgaactgcagagggagcgcactgaggaacctgggttttgatgctgtgcacattggctgagtcaccagcccagggccccgtcagtcccattattaagctcatttcttgctcttctcatcgttactcagacgcctttaaaaaagcaaactcctgcttgccgtcactggctgtttggcaaatgggtgtttaccctggaaagacgggcattttgtcctctggaacgtctatggcgccctttggtgacgtggtcggtttctgaccactctatcttgtgggtgtccttcctgcttccaccttcccttcccgaacgcctccacctccagggctttaatcttccttctgtgtgtgtgccatgcagggtttatgactattgtgccaaaaacttgctacatctcaaaagaagtaattgcatccatttgttggtgatgatcataaacagtgccctttaagggagactaattggtaaacccggctgctgtgggtagaaagacagcggtggctgcggaacgagggctccgcctcttcggagcctgcacaaccgtcctgccttctttcttcaatatccagtaggggagttaattttaataagcccttgaaagcaacaaggcaggaaagtgctaagacattgagttgtgagatttacaattacaaccagcagcctctcattttcccttcgctgggggttgctgcttcggttttgggctgcggggtatgttggtagtgacatcggccctttgtgctgcgcgactcatgaattgagataactttttactaagtgctttgtgcagtaggtatgaaaatggggaaagaaggaacactgtccagggtagagaggcgtggagagatgctgtgactgatggtaggtcttttcttttgggctcctggttttaaatcattttttgtttcgctaatagcttggaagatggtttttgtgtcttaattcaaagattgaagactgtgggccggacccaaactaattccattggcatcagagagagggattctttacatatttatctataggcacgattgattttttttttttgctgaattatctggttagtcaaatcatatattagagaagtaatataccattaaaaattaaaaaataaaaaatgtatctgtaaacatatcccccttccattccagtctttgtctctgtgtaattttagaacccttgagccatgacgtacatagagtttgtattcttttaatatcttgctacttcatcgttttaatgtttaatctttgg

SEQ ID NO: 59533 - DNA, 3021 bp, Homo sapiens
gtgggggtgggccggcgcgtctcacatttatatttggagcagtttagcatggtgaactttttttgggtaacggttttgtgagggccggcagccagaaagtaaactcattcgtgccaattttcaccggcagggaggagctggtgttgactttatgttttcctttttaacactttcagggcaaagaagggagtgagcaggggccatggtgtgcagccaactgcctttccagacttctggggacgggaaatggtactgtttttcagtttcagatgtggggttccgcgaggtgtgtcagtgtcctgtaacgtgacacagttggcggggggcagagtcttccaggcctgtgggcttggctgctgccctcctgaggagctgaggatgaggagggcatggctaggaggcgggagctgccgtgtgcagggttcggatgtaaactggtaagtagattgtgcagtgcagacagctcgtttggtgggtaaggagtgtatcatttgcaaaaggcccaccctggttatctgattgtgtcagccttgggtaggtttcccggcttgcgtctcggcccaggtgcacccctgcctgcagcaccctccgtgttcgctgtctcaggacaggggcttctgtgctgcctgcatcacactgatgtgaagtgtcagtgccccatccaggtcagcagagcgtagcgcccctgagctcagcagggcgagccccatctgagggttcccccacccactgctagcccagaagttggacccacatttgttcccagagtctgggatgtctatgggaatgggtgtcctgtgttgggcattgtggccttttgaggtgacgacacttgcctgtcagttgctcttggagggtgagtgatactgtcttgctgcccagatgatggcaaagccactttcgacgaaggtgtgctcagccgaattccctgtgaacaccttgcgtctgtacaggttttttaaaaagggcttaatgagttagtttcttattgagagaccaggcagagaaaggggtgtgtgtgtttgcatgcaggaagcctaattatatttttccttccacatgaatcttgctgagatctgagctacacatttaagaagaaagggtgagagggttgctccgtggctctattcagcctctctgcaccctccggcctgtgctggccccactgcctcatctgtttgctggatggtctttaactttgctgtgaagtgtgggtttgcccaggttgagtttatgggggtagtgctgtaaggtcatttggaattctctgtctcataaccacataaaacagttttacaggcttaaattagatgaatcaacttgttttccagtattgcttaatagaaatccaagaattgaaggatcaaaattctgtgtttctttatgttattggacttcaaaaattcctcaatgtatctgctttcagagtgaaagctgaaaacagctgttaatgctgaattatttcccatcttcaatcaaaattcaagtggagagaattctttaagttggttgtcatcattttattaaaatatcagaaaatattatagaaacatatgtggaatttccagtgctcatttcctacagaggaggatggaaaaagttccgttttaagcacataacatagactgaaggaaagagtagagcattcccctgaggttcctgtgtgggctgccagcctgcgtgggttacgcattgtgtgggtttctagaccctggtccagttctgctgtgcccgcctgctgggcgccattacatgcactgctggtgtcctgctttgcagggctgcaggggcacttcctgctgcggggccgagggctccatccttcttccactgcctgtccctgtcccgtgccctgtgccccctcacaggggaaggtgaggccagctcacaccacagagcatgcggccagcaaaacacaagggctctctgtggggagaagtgctgggcagccctcttgtgggagctgatggcctcgaatccatgtggggatacattcaggttgtgtggccaggggggtcatctcctcacatacttgggtctgagtgtgagccagggaggaggccatgcaggtaaggaggccacacggtcaggaggctgtgtgggtggggaggttgtgcgggtggggaggctgtgtgggtgcggaggctgtgcaggtggggaggccatgagggtgcggaggcccctcgggtgaggaggctgtgcaggtggggagaccacgtggggggaaggctgtgctagtggagaggccccgcaggtggagaggccgtgagggtgcggaggccctgtggctgaggaggccctgcaggtgaggaggccatgagggtggggaggcctccaggtgatctggagctccattctggggagggtcaaggaatgagagggctgtggcggctgctttctcatactcctttccccagaatattttcttctcccttctcttccctacatttttgccctttataattgggtattcttttttgtggctttaaagggcctaaaaataatttcattaataactgatactttacatggaattgccaaacaaattggagtggaagcagaaaacttccccataaagacaaactcatgtcttatttattttttaatttttgagacggtctcactctgtctcccatgctggagtgcagtggtatgagctcaactcactgcaacctccgcctcctgagttcaagtggttctcatgcctcagcttcttgagtagctgggattacaggtgcccgccacaatacctggctaatttttgtacctttgtagagatggggtttcatcatgttggctaggctggtctcgaactctttacctcaggtgatccgcccgcctcgacctcccaaagtgctgggattacaggcatgagccactgtgcccagactcatgtcttattattattattattattttaaaaaagattgcatttagctgttgattcaaattaggaagtaagtttctctgttgactggtcactgatctttttgggcagtgcatgcttcagaaggagctctt

SEQ ID NO: 59534 - DNA, 1052 bp, Homo sapiens
gggacagagtgaggctccagacccgggacagagtgaggctccagacccaggtagagtgaggcttcagacccaggtagagtgaggctccagacccgggacagagtgaggctccagacccgggacagagtgaggctccagacccggatagagtgaggcttcagacccaggtagagtgaggctccagacccggatagagtgaggctccagacccggatagagtgaggctccagacccgggacagagtgaggctccagacccgggacagagtgaggctccagacccggatagagtgaggcttcagacccgggtagagtaaggcttcagacccaggtagagtgaggctccagacccggatagagtgaggctccagacccggatagagtgaggctccagacccgggacagagtgaggctccagacccgggacagagtgaggctccagacccgggacagagtgaggctcccagacccggacagagtgaggcgccagacccggacagagtgaggctccagacccggatagagtgaggctccagacccgggacagagtgaggctccagacccgggacagagtgaggctccagacccgggacagagtgaggctccagacccgaatagagtgaggctccagacccaggtagagtgaggcttcagacccggatagagtgaggctccagacccggatagagtgaggctccagacccggatagagtgaggctccagacctggatagagtaaggcttcagacccagttagagtgaggctacagacccggatagagggaggctccagacccgggacagagggaggctccagacccggatagagggaggctccagacccagacagagggaggctccagacccgggacagagtgaggctccagacccgaatagagtgaggctccagacccggatagagtgaggctccagacccggacagagtgaggctccagacccggatagagggaggctccagacccggacagagtgaggctccagacccgggacagagtgaggctccagacccgaatagagtaaggctccagaccca

SEQ ID NO: 59535 - DNA, 3623 bp, Homo sapiens
aggtgatgcataagtctgatttttttttccaagatagaaaaagcatttatcctaacaaattggtattttttattaagcctccatgtggctctgaatgcaagctatatatagtgagtttttctaaattaagggaactctgctttttttttttttttttaagtaactggtctgtaagtgcatatctctagaacgtccccgcagatgaatgagggccagtggccttggcagaggcaggtgtggcctcgtagaggcagtgctggccgcgccagggcatcagtgctgatgtgggagctgtgcttccacctaagccgttggtaggggactgtggcatttaagaatgtagagagcgcatcctttttgatctcctgggcggagtgaacctgcaggggccaccccagaaaccttggttctgatgcactgcaagcaagtaaccagcttctcactccagtttcaagtggctattatgtaatataaattcaaagcacattgtgaatagaacctacatgaaaacatacactttgttgcccactgacatgttaccagaagttgtaccatgatgttgttttgacccctgtgagctgatggccccggccctgctctgtgcacatttctgtccgtgttccccagcactctggttggagagagtccacatcttcagctccgtgtggacatctccctgtacctctgcatcagcacatggatttaagagttatgtaatcgtgagagaatggtgtttgtggtttttccccctctttggctggtggaggataaagttcctgctcttttacctccaagacgagggcctcattgattcacttccagaagtgctgcacttctgaagaacaaggatgcactaaagttagcaagtttataataaagttaaatataaattattttgttttaaaatgcctcaaatttttctttattctaagcagcaaacattaaaataagaatatttcctgctaaatgtaaccatacactttattccacaaaatgttatttaacaagactgagggttttttttaagaaaaaattatttccatccaatatttaaagacttgaattttatttaaacttgaaaatgactttgccttaacttttgtataagacagcttagagtccatggagcccggccctgggttggcgtgagtgggtcagagttactcagttactgcgtggatctcctgtcgctagttttactgagtaagcatactgtagtacaagagctagtagtagtttttgtaatataccttaaagatcttcaacagttgatcttttttcagaatgttggaaaatcctgtaaatgcaaatagtcaatactgtattaaatacgtgcacttggagtgtgcttcgcttgtacagttgtaaataatcagaacatatgaaaaaggtaccctacagagaaaattctgatacagattattgatatattataaatgttgctgttgagcgggatgtagataaactaaatgttgtggtttgaatattattttgatttgttgagattttcttttttctcttacatcggtgtgttgaactgattctgcctctttgctgcaaaagggaattggaaagtcttattaaaagcctccagatgttttcatactcttttaaaatgtatgtaaatgcatactaatcatatctaatgtgaaagagttttaaagtatatagagagcaaaaactggcaggatcgtaagtgaaggtgactagtaatctaatttaaatcacctgcagctaagcatgattgaccctgccagaggaaaacatgcctatttgaccatttcctttaaagcagttgccattattcaaatacagagaaatagccacagggctagtgtttttcaaatgcattttaaagaacatggggatttttttttgtagttgtcagttcactgaccaaaaaaaaaaaaaaaatcagaaataattgatctgtgaaacccaaactctcaatactcagaaagctgggaggcaacctcgaggcctgggcctacgagctgcatcttcgctacggaagggccagggcgccatcagccattcccaaaacacaaggcctgcccgtccgccagtgagtccttggtttttaataatgagaagtcctttcccccaaggtgtgagcattgcagcgcagtgtgtgtgtgtggttagagccagcttagtccttcactttgtcgaccgaagtgggagctcaacagctgcatgaggagggcagcgcgtgcattagccagtcgccactggagggctctgctgccctccggtcaatacactgtagttactgcctagccagcagcagtcttctgcatcaagaactgaaacgttgctcggaggtgatttttatagcatcctttttaattaaaggtgaaatacagattgctatataatgtctgaaaaaacctgatactacttcaagagtttctgctcagaagaaaatgagagttatcataataggaagctgtggcggtccatgccaactgtgctgtgtcacatacagcgatgagagtggctttcatactttttttttttttaagttaacaccctcctttacccccagcagtatctcaggttatagaatcagagatgcagcagtgacaaatggcattttaacttgtaaaatcgtgtgatgatgcttatcattttgaaatagaagaataaaaacctggtcccgtttcaccagacatgaatttcaagtggagtcgtcgttctctgagagtgagtgtcttgacattttcacccaggccctcctgtcatcacatcaccggctgtcactggcgggtggccgtaaacgtcctgcgttgctatattaggatctctgcagttcaggcttcaaaaccagttcagtgtatccgggcgacgggtagtggtggtgcatgcctgtctgtgtgccccgctggcgagctgtagttgcggcttgcgtgcctcgcggcccactacagggctgcagacaatcgaggcgagggcgctggccgccagcagctcacagcgcgggggtcatgtggtcgctcctcgagggtttcgtttttgttctgcttcattaagactggaatcaagcttacatgtaaactattggtaatttaagtttccttttgtgtcattcagtgtaaaactgtctaatttgaaaaaaaatgtaggttatgaaaataaagatttaggcactgttcaatttttcttttgattttttttaaattaaaatttcttcaataatgcatcttttctaaacatagttttttgtctgttcccataagtgcatgagaaagaaacacgggcctcatatatgattggatcctaaagccttctcacctacgtgggggctggctgtggcacacggggctcaccctttgtgttttagtggttcagagtgagcattaacatcagatgctcatgcggagacagccattactgtgactgccaagatgtactgcaaaaatacatgttcctgtatcaggactttgattttgttaaaatggcactctctccaaagctgtgtccatgaagctgtttggagctaacgttgggtcttcatggtgatggactcatccttaggcagcagtgatgtctgcactaggaagaggctggcgggaggcggggcccctcctgtgccaggcaccgagtggatgggggactgatta

SEQ ID NO: 59536 - DNA, 1207 bp, Homo sapiens
gccaggggccctttccccagctgtgccccagagttaccacgtgtctgttccacgccacatgaccgtgctgcttgctaccccacccaggtctgcagagtcagtgtctcttccaccctgggctttagggaaggccccgcagtagatagaaccattcctcacttcctagggcagaatttaaggtggattttgatgcagtatctttacaatgaaagccaggtgacgtgtctagtccttttcatattggtagatggtcatgctcctgtttggagattgagtacattccaggattgtcacattagccttaaatttccacaccgtcatttctaaggtattagtgccttgagaagaaatgcagtttaaagatcatgaattctagttttccaactgtagcctactcccgttggtattgagtggaggagaagaggcaggtctccaaccctgcttcagaaacagcagctcctgctgtgcccagtttgagtcttgtgtaaggtttctcttgaagaaagaattgcttctttgaaaagcctgaccctgagccttatgccaccacccaggtgtagtgggctccattgctgcttcttgggagcttcttgagtcaacagcgtggcccttgggtttcaaagtggggtggaggctccagaaatgatggggttcagcccttcccctgttgacatggagctcgtgatggtcactctgacttgcttcatgacctgcagttgtggatctgcatttcatttgcattgggactgcacatatcctgaattaattagttaatttgtttatttaagatagagtcttgctctgtcacccaggctggaatgcagtggcacgaccttggctccctgcaacctccgcctcctgggttccagtgattctcctgcctcggcctaccgagtagctgggactacaggcatgcaccaccacacccggctaatttttgtattattagtagagatggggtttcaccatgttggccaggctggcctcaaacccctgacctcaggtgattcgtccacctcagcctcccaaaatgcggggattataggcgtgagccaccgtgcccggcccctaccctgaatttaaaatgagcttttacaaaaggagtcctttgccctcttgtttccaccaagctggattcctgctggtcgagcgcaggaattgcagcggattctggttctccagctggaagggctctaggtctgtcgtc

SEQ ID NO: 59537 - DNA, 1031 bp, Homo sapiens
tttttacaattatcttgtgactcacattaaaaactatgctgtagtaacacaacacttgtctgaaagtgagaaagtttaatgtctagactcaggctgccctgctttccatctggtgggctggagtcactccagagtgtctcccttgccttcagctgcccctgctgttcgtgagtgctggcagccatgggtggatagctctttggatgtcaccttagcctcactgtgtcctttgtgacacatctcttgggcagcagcatccttgagatttcagttttacagctctgctctagatggttgaagttgcttgggagaaccttcaattgagtgaggaagcccttgtctgggttgaatgatctgcttgtttctacagatattttccagacaggtgtggaaacgagaagctgcttggccttctctctccataccgtgaccctggggtgtcattctgttgcagagcagccagacacagtctccaacgccaccaaagcctccgtcgccaagcttcgagctggggctgtccagcttccctccattacctggagctgccggcaatttgaagacagaggacttgtttgaaaacaggctatctagcttgataataggaccatccaaagaaagggtaagggatatattgcatgtctaatagttgccaacagtgtctaggtacgggttccgtgtcaggcgctttgctgagctctttatacatgtttgtttttaatactcaagagaggcttggaggccacgtgattgcagaggtcacacagatttggagtaaggccagccttgaacccagggctgggccttctccttaacattgctgtctgatgaagtcagaggtagaaacgtgtgccatgatgtgccgtacacaccctttctctcacccagaaacttagattgcattgtcattgttgtagttcagacctgcctttattttataaaacaacagaatgaaatggaaacatctgaattgtattggaaatgattaaaatgtgtagtaatctacatgagacaaggagcaagaagcctgggag

SEQ ID NO: 59538 - DNA, 1070 bp, Homo sapiens
caactcctgcagcctgtttctgcgatgggttctgaagccagagctgaccttcgtaacctcctccttccctctgtcttgagaaagagcttgtgctgttttgcagggaggtgtgccaggccttgcttgccctgagaacctgatccacagcagccatgcctccacctcccctttttgggagggtttgttttgtttccattaactttctctattggaccaaagtgctaagatgtcctggagaaccccttaccagagtccagacacatgtccctacccttgcatggcggccatggcagggcacggcccagctgggttgaatggcatgaggagccccaggcgccaggtggctgccttggtggagctactgttaggatcagctgggggaagcacacctcttcagggtctcaggccttcacaccactgcattcagagtcgcgggtgtcacagtgatgtttcctctatggtgctgggaccaccctgggtcccttgctaccccttgtgagctgtaacccaccatggccctgtcactgagccttggctcagccaacctgctctctgcatgatgggcactgacagctgacagtgttctacggctgcaggtgggcttctgggtctgacacgggttacgtggagcccagtgagggtgtgggggagtgttggctgggcccactgatggtgactgggataggaccccatggcaggcaggtctgtgtcctggacaccgctgtgttccaagggatgggtgcccctgcgtcccagccggtagtgacgagcaggctgcccttggcggagggatgccctgtgccgagccctgcgggatgtcctctgcccatgtggctgctgtccctctgtccagcgctcagggcaatgcctctgggcaagcaggtgctgacaccatccgtctcacacccctcccaggtccccagggccagttgagtcctgtcccactgaagactctcatctggttgcatccctagctctgctcatgggtcattgtagccccacctttccactacttctgaatcctggcgcagcggagtaggagttcagctccctgggttttgggagcaccc

SEQ ID NO: 59539 - DNA, 1762 bp, Homo sapiens
aaggccctgtcaggctgtggttggatgaagccgagtgagcagcagtgggtgtgcaggtgctcctaagattgagaatgttgatgagttgtattaaagccatcaggaatcaagaactgttgacttcctgccagtgatggaggtcgtatcagactgacatgctaaaggttacaacacttgttggagcccatgcgctcttgaccacgtctttcctctcagtgcctgcttccgcatgtgtcagttctcctcgctggattgttgtaaggattggctgaaaggatgcacaaaagctccagcctacttctaaacagcacccattggtgataaaattgtaaaatacatgtctcagcatgggtcatgactctgacaacatcaagaaatgccctcagtttccacagatttgttggtattaatgaaattgaagtctgttttatggtttatttacttgtctgttttcaaatgaatctaggtaactccatttccaaatactggatttataaatgggtttacgtctccagcgttcaagcctgcggcgtctcctctgacttctctcagacagtatcctcctcgaagcaggcaagttccggggcggtcttagcagttttggtctttacgctactgcccttccggagttgggatgagagagctttgatcactagtcctgctcctcgcagacagagccacctgaagcacacagctgcattctgtaaagactaagcactacaatctggcatgggtgcccgcctcagattctctgagaggaggctttggggcaacttgtacacatcaggtgtgcctgattttaatttgggcctggactgaaaaacagctaagcagaattgtggcacattgttaatagatttgcattatcctatatgttaggagttaaccattccaaatcctatttttatactttattaaacagagagcagatttcagcttagctattccatgtcagtatgcatgttatgtaatgccttgatcattttataactcaacacataaaaccatttttatttacaggaatcctagtaaatctcatctgcggcatgcgattcctagtgcagagaggggacctgggttattagaaagtccttcaatatttaacttcactgcagatcgattaattaatggtgtccggagtccacaaacaaggcaagcaggtcaaactagaacacggattcaaaacccttcagcatatgccaagagagaggctgggcctgggcgtgtggagccaggcagtctcgaatcctctcctggtttagggaggggaaggtgagttgttgagcagttactgtgtaacatcataaactaatattttaaaaattatttaatttagatatgttttgtaattgtctttaaatatgtcacagaaaatctaactgaaggctataaacataagggttttatataattgctaagacttaaatggcttcatcttttttggaatatgaaatggttcagtgagaactgtagttgttttagatcattatttgtagaaacactggagctcaatagccatagactccatcccatgtgcctgcagtctcctcttggcagcacccctggctcaccaggcccctctgcaagggcggtgtccaggctctgccccatggctgctggcctggcgccctccagctgggtgtgcaccaggcactgcaggtggagcctggagcgggtaaccaggcagatcagcattgcagtctcatctcattggagggttgagactagccaggacgggtcttagctgtgcttcctgcccacc

SEQ ID NO: 59540 - DNA, 1830 bp, Homo sapiens
tggggtacacgttccatagctcttatgaggttattttaagggatctgtgacccagggagtgtcaagaatcattattctaggttctgttcaccataatttaattatatatttccctatttgagctattgagtgaactattggtgcctcttattcataaggttaatcgaatggaattttgtacttaattttgcccttaggcttacaaataccttcgagaagaagtcaaaacttttcaaggaaaaccaattaaggtaagcaagaccattggttatactttgtttatttgcaaattgatgttcttaagtattctaatagaaacttacatattttcaaacaggcacggataaaagcaaaggcaatagctataaacacatttttgccaaagaatggatttagacccctggacgtgagcctgtatgcccagcagcgctacgcgacgtcgttctacttccctcccatgtacagcccccagcagcagttccccctgtacagcctgatcactccccagacgtggtcagcaacgcacagctatcttgacccacccttggtacgtcatttctttactaggaatttatgttgtagacactatgctagataatttgaaggattaaaatcctcatctaataggaagccagatatgtgtgcagtctgacatactaaaacagaccttcaagttatgtgggggattttaaatgtagctgagaacagagcttatgcataaagaactttggattgctgtgagcacaatccttgcacagcccgtctcccctcttgtcatgcagctcttagcaagacgcagagggcgataagtgctgtagtgtacctggcgtcccctacacagagtacaatgcaagggggattaactgaggaggaagaggtgtttaataggcttctgacagcaaggccaaggagaaggcctgctgttttaccagccttattttactcacttctcaccagcattagagttggtcgacaggattaatttttatggattttggcctttgttaaggcctatggttggaattcataagtctgtactggatctagacattgtctctttgtgtgctgctatagatgcttgaaagatcaagtgcattctgggtgggaattagcatgagtttggtggcattggatgcacgagagtcagcaatacacggatgagcatgtccttgaagctgaagtctagttgagaagtgaagatgggttcatggcctagaggtttgcatgaggtagcaatgcaggttagttggaattggagagattgaagggtagcatacatagaaggttatggtcagaaagcagaaattgagttagtaactttgagaagagttcatgtccagggtttcgctgtggactaagggaaagactgagtggtcctcagggtcggatggctgggagccaggcaccctgatgtgcagggatgtcaccgctgacaggcagaaaaggagggtaggtgcagagcagagagaacttgagaaaacaagtgcctgtatacacggaaagtaaagatacgggtccatgaaacaactcaggctggaaaagtcaaacatgccaaggagacacgtgtacagaatgccagaacactgacaggtcttatcagggattgtgttgtcatctaggttgagcttttcaggttaagtatgagtttttcagaaggaatcaaagagaagtttcatgaacagaagatggtcgtagattcatgggtgtctgagctgaagcgtacaccgggtggcagggagttggggaacgagctggcagtttccaggcctaactgcgcaggtgcttagctgtcctgaggcatgtgggctttggcctagtgcttgtgggaag

SEQ ID NO: 59541 - DNA, 1708 bp, Homo sapiens
gtgatttttgaggagatgctcggagttttaaattttactttactgaatatttttgtattctaataaatattcttgagctttgttttgaaatgcagtgaagttacctggaaccaactttctaggtggaatcagagcagccttttctctagggctcattttccccactgcggaagcagtgcccttctgagcactgtccctgctatcctgtgtgtttaggagagttttccactgtggccggtgggaaaacaaaccattcctctcttggtgagccttccctgggcttgttccctctcatccctcaggcggttgtttcccaggctgaagatgtggggaaggccatctgcaggcttaccctgccggctctgcggcccaggcactgaaggccaactcccctgttcatgtccctctcagggatcacactcgtgttcacgctggggttcagggcctgaaactgttcttcatgtattttgtctttggttttttaattgagtcatctgggagagtaaatctagtccatcatggccagaagcaaaagtccaagcaaattttttttcttaaattgcctttaaaaaaaaaaaaaaaaaaaaagttgtgcagttatcagcccagaacatgatatgatagttttcacattaatctagcttaatggtatcttgagagtaggggaagctgtaagttgtgtgactgcttttctctatggcattgtgattctgattctggaagccctgctgaaccctcatcctttttggaagagagatttactaggcatcatggtacgtttgtttaaggatagttccttaagagaatgcatttgttaaaaaaatttttggtgaggacaaaaactgacattgttgagaattaatttctaacatctctatttcctgtaggaagtagaagcactatttaaaggagataatttaccaaaatttataaactgtgaatttgcatataatgataattggtttattacatttgaaacagaagctgatgcacaacaggtaagttctttccaccatcaccctatgaattgcatagtttaccagtttttactattagtgcatgttgggactaaacttgggcattgagattacttgtgatggtaagtttgaatataatctgcagaggaaatcaagttgtagaaacttaaatatttgagtgtatttgtatggacaatttttatagcaatataaaaagcatgtgattttactttctaaggacaacaagctaagcaacctaggaaaatcagttttgttcttctatctgggcagagaagttttactatttgcaaagtgtttggggggaaatttgaacctaatcttcatctcccagcagacttcattgtattttggaagatgcttttaatggtattgagaagtaagctctgtaaggaggcgtgaggagttagtagttttcctgcttttaagggaagcatcttatttgtgaggaaactaacgcacatattataaagtgttaaatggtataaacagtatgtggggttcagaaaagaaaacacagaaacctgaaagatgggttttaattggatggagggggaaaaggggaacggaagatagagtaaccatttttgtggagtggagtgtgagctctgccagcccgtgtggcgaatgtggtcggatgatattgaatcaggtgcagggccttcacagttttataggggtttaatgtagaattaacatggagaagaacaagg

SEQ ID NO: 59542 - DNA, 1413 bp, Homo sapiens
ttcttgtagggtgagctttggtggtttatgtcttttaaggaatgtttctgtttcatgtaatgtattagtgtgaactttttcataatattccgttgttatctttttcctgttgatagaacctgtaatgatgttgccactttcatcctgatgctggtgatttgtgtctttgtgacagtgggcacctctgagccctaattgtgatcattacttgctgtgactcgaatctgcgcattgcgtaatttcttagatgtgatgccaaaacccaatttatgtaaaaactggcgaaatctaaattaggcctattactgcagtcacatgagcatcctaatgtaaacagtgcacgaccgttaggtgagggatgatcatcagggagccagggaagggcacacagaaacaagttatgaaacaagattatctcactttaggtactggtggaaaggagaaagccgttaaccctgtattttcatctgctcttagtgcttgagctgtttagaacctttgtttcatagtgttacatacattatggctcctgcaggattttaaatgtccatattcctgagctttgaaaaatctaacgtgagattggtttactttgcccatttgcaggtttctttagcttatttagtaatatagtaatataatgtaacacattccactggcatatcatattttaatatttttgtttcaccattgatttttcttctctttgtagctttacctttagtccaagtggatgaaaagggagaaaaagtaaggccaaatcaaaatcgctgcatagtaatattgcgtgaaatatctgaatctacccccgtggaagtaagtaatttctcctctgaaggttacttggacattttcccaaaggtctttgttggttttgattttattttacttttgtgtttttttgggctgtgtgttttttagactgagtacttacattaacactgttttcccaggatttacacacagtgagttacagagtaggagggaatgataaccaaaccttttgatctcaggactccttataataagatagtgaaggtttatgcatttctatatttagaaattaaaaataacacatttaaatatttatttaaaaataagattagtaaacccataaataatgaaaaagagcacttttgtgataaaaaaaacttttcaaaacaagtatttctatgacaaaggggcatcgtgaataactccctgagccaccagtgcagcctggtccaagccagcacggccactcttagagaactggtaacttggggagtaattttttttttttttttgagatggagtcttgctctgttgcccaggctggagtgcagtggcgcaacctcggctcactgcaaactccatctcccaggctcaagcaattctcctgcctcagcctcccgagtagctgggattacaggc

SEQ ID NO: 59543 - DNA, 1067 bp, Homo sapiens
aggctggtcttaaactcctgaacccagatgatctgcctaccttggccccccaaagtgctgggattccaggcgtgagccaccgtgcccggcctaacaaaattgtatgcatttttaataaactcttaagctacttcttaggacaaaaatgacagctataaataattacatcttatttaaaaataaccatcttctcataaattttgattgtagaaagtacagtatacttttacttttgcactccctgcctctccaaggccgagattttgcaaaaatgtacctgaggctggagagacagcaaataacagatgggtcctgggctgagatttaactccaaagcaataccatgccacactcacgcctcttgtgaaactggaattacagtaggtgaaacttccttttaaagaaatactgattaaaagagattgttttctttcaacagggagaaccttgctagtgacatgtatcttatatcacagatggatagtgaccagtatgtgccaatcacaacggtggctaacctcgaccacatcaagaagctcagcactgatgtggacttgattgtggaagtgctaagatgtaagtaaatgacaatttaaattaataatacttgtccttagagtatttgtcttatcagcatgaacctttaaatctatagccatcaaacgttaaggtccttgatggcgaatcagattcttttctggccttccgttcctttctgcccaggtccaataattctggagtagcgcctgatagtccctgggaatgccagttgaacccgttatgaaacctcaaacaagttttgggacatatgaagtagaaaagaatcttgttaatggggattttaaagatagctgtttcattcatgaaaaacaaaataaaaataacatttatagttaaagtaaaatacactttagttacagttttaccactagaggtttttctttcaaattgcaacttcctgtttatgttcggatgaaataattattgcaatttttcttaaaattatgttgtgggccaggtgtggtggcttacgcgtgtaatcccagcacttttggaggtcgagttgg

SEQ ID NO: 59544 - DNA, 1878 bp, Homo sapiens
caacttcttaacttacctggctctactgtgtcatgttatagtggatgattctcttggctcctaacttcacagtatcctagtggtcttcccaccttgctggctgtgagcctgtgtcccttggccctcatgcgcttgcctcctgctgaaggtgggagtgtcccgggttcagtcctgggctgcttttcttccttcccttgtggcttcggcaccacctatcgcttggagagtcctccctagtgccctgtcctcagtgattgcattatcttccggctggtgcctgcacagtctgtctacaccatggaaccagagagatattttcaaaatgtcagccttgaattgattttctattacgtttaggttactttaacgtcctccttgatctcactcacacacaccggcctctgtgacctcatttcttactgtgtctgtcacccctcttctcagctgtgctggcctcctactgctggactctaccccttgagaggccccaccttgggacccctgtgcttgaggctccccatttagaacacacttcccaccttcctgtgtgccccacccctcctctatcagatcatatggcacttcctgtctggatggcaccaggccttgctgcccctcatcctgggttgtttcctcagtgtccgtttctctctgacatgatgtgtatagttactggttaactgtctgttatctgcctctcccaccagagtgttggcttcacgagagcacaggctttgcgttattcaggctgaattcacagagcctgcagtagtgcctggcacttggaaatatttagtaaatacctattaaacatggggagtggagtgtgaatttagatgagtgacccggagacaccttagtctagatggacagtggcatcaggttgtgttttcaattttccattttcagtctcattgagtcccatgatttggttttgtgttatggttactttagcagttttggtttctttttgctgatgggggtggatttttactaagctcattgtataacaccatacaaactctctatccctctcatttgtcctgaacgccccactttgtctttgccttttcatggtctttaactttgacttttaagatacaagtgtctcttgtgttagcatggctcttatatgattgtaccatgctaatttatataggaaggcaggaaaaacttagttcttagcatttcagtgcctgtcatcgcaacattattaaaatacctctttatgcagtgtccggagtccagcagtttatgcagtgtcttctagagctccaaattcacagccctgtgctgcctgtgaccacacacaccatgccctctggcatcttcttagaaatttcttccaggatttagaaccagcttttgtttcctcttgaagatctggtttatttatcattctcttacaggaattctgtaacatgacaattctcacttgttccttcgactctggaagttggaaggcaaattgaagcctctgttgtagaaactgtctagtcctagagcctgtttgatctccagccttggttttttgctggttatctttgttgttgttgttttaattttttcctctgtattttattattgtttagggtttgtgtttgtgtaggttacttgaaaattctttttgcagtgagacaaggcattaactaagcttacacttgtcatttctggtagaaaaagcccctgctgaactctgctaatgagacttagattatttttctaaactgtgctgtttttgttttgggggataaagggataggtttttttgcatgatttacttttttgataggtaaagtagcatttttcttacttaggatacacttacgtagttgtgtcagaacgtaagttgaaagcattagaactgctgtactgaat

SEQ ID NO: 59545 - DNA, 2389 bp, Homo sapiens
gggagcaggaacgaacaaaccacatcagctgccttctctcagtttcagaaatagtttcatgttttttactaccagccccatcacctgagccaatgtggatttattctgtcttttaaaaattgttaatgcacccatcgtttatttgacggctcatggtggtcctttccagcccttctcctgtgttctgggccgcagaaactggtgtgtctatgctgcatgctggggtagtgcagtgtaactgctcccagcttgcagcctgattccaaggggcaccggggaccagggacctgtcccttcctccagaagctttgacttcctgcactgtggtgtgaaggtgggtggcacatttgaaaaggcaaatcatgtgtaagtttgttgaaggattgtgtgtttggacatttgacttttctttaggctttggggagtgcttgtgtaagcataagaaaggcttgtatcagaaaaatcaggggagtagggagtatccacatggtgggggacttttgtgggtttattcgctgtgtcaggaaggaccaccagtccccagtctctgggcaggatgttctggacagacggacgggaagagcaaaagtgccagtgtgcccagagacagcaaggaggtcagtgtgcctggaaatggacaaggccagggagcagtgagcacaggagggcgctgtggctgcagtgggaacttcgtcttttactccaaatgagccaagctgatgcgggagggttttgagtagaggactgccctgtgggactaactgagcatgcgtgactgtcatgatggccgatgagcttggtatgtgccaggcatcatgttgttgtgctgtcttccaggtgaggtttagcccatgttccacagctgtccatggcagctttggcctcagccccagtgatctgagagtccgttgtccagaacactggactagcagcttcatggtcacctgtggattttctttcaaggtgatactgaagctctattgggaatgggaacaggtagttctgtgaaaaatatgagatattttatcttcttcctcaaaggatgcctgagctttcttatcctgtagtatccctgacagacctgttagaacaccttcattcttaggagcaattttcatcttctacaccttttgtttatgtgactttttgaagctttctttctttcttttgttttagagatggagttctgctctgtcccccaggttgggtgcagtggtgcgatctcagcttactgcaacccccgcctcctgggttcaagtgattctcctgcctcagcctctcgagtagctgggattacaggcatgcgccaccacgcccggctaattttgtatttttagtagagacaaggtttctccatgttggccaagctggtcatgaactcctggcctcaggtgatccgcccgccttggcctcccaaagtgctgggattacaggtgtgagccgccgcgccctgctgacttgtttaagctttctaattagaattttattcatctgccttgtattcaagtttgtaaaaccctgaattgtgattttattaggagtctaggaagtcaccagctattcctcaggtatagtttgtgaaacactgaatcttttggtggcaggcgtgtccttccccatctctgcaagccttggtcttgggaggaggaacttaaaacttggggggaatttaatggaattctgactgctttttttttttttttaattttgaacctgatttcattccaaaggtgtgtataaatacataggctgagcctttggagcctatatctgatgtctcttaactctgcattaatgagtaaaattgtatttggttgacatttggatacaaatgtctatcttacatttcttcctaggtaccagcaactaaggtttcagagctgaaccctaatgcagaagtgtggggggctcctgtgttacatctggaagcaagcagtgctgctgacggtgtgagtgctgcatgggaggaggtggctggccaccacgcagaccgtggcccgcagggtaagttgagcatggccgtggtgtgcagccccctgctttcaggcctgtgcttttgttgccattttaatctgtctttaagatgttgttcattcataactgtgtcatggtatgtggcagtgcttgagagcccagaggtcttttacagtctaaagaagttgagtcactgcaagtgtaagctttgttttaagagaaagttatgcttctaaccctgcctttttggggtaaactcctaattgtaggatcggatgccaatggtgatggtgaccagggccatgagaatgccgcattgccagacccgcaggagtcggacccagcagacatgaacgctctcgctctgggtccctcagaatatgactctctgcctgaaaatagcgagacaggtaaa

SEQ ID NO: 59546 - DNA, 1021 bp, Homo sapiens
tgctccttaaatagttgtggaggcaaaacagtataaaactacatctttaagataatctgcagttaatcttttacagaagtgacataattttcagttagttaccagtgtcactgcctcagacatcaacaaagagcataaatgatgcctaagtgagaggtgtgcttccagttttaaattagcttttccattatgaggtattcccaaacagtattctcatacgaagcgttaccacgtttaacgatggtgccttgcctttcagagcttcaattttcaaagtgctgttacaggtgtctttttttttttttttttttaagcaaatcttaatatagcagctattactccatttcacaaagaactggaggtagagccttgtatggttctgaagtcagcaaattgccctgaattactaagctttttagtgcatctgtaggagtggttggtgcttgcatggaatgtttctttcccctatttctcacctgctttctgtacctcaccggccagtcccccttctccagcattaattactccagttcctagtcagtaacttgtcagagagactgttctgtctcgtatcggtagttatacaagcttattaattgatacgttatttttcaaagtggagcatattgtttcgcacaggatggggtggggtggaagggtttatttaaagcatcagaactcaggcatgttcactttggaatgtggctgttaaggtcagcttgcctgtggttttaataaccattgcttagccatacatttttaatggaaaaataagacttatagtcaagcagacgacactggagttttttttttttttttttttttttcaaggatggagtcttgctctgtcacccaggctggagggcagtggtactatctcagctcactgcaacctccgcctcctgagttcaaatgattctcctgcctcagcctcccaagtagctgggattacaggtgtgtgccaccacacccagctaacttttgtattttcagtagagacggggtttcaccatgttggcca

SEQ ID NO: 59547 - DNA, 1055 bp, Homo sapiens
gtgggaaacaggtacacaaagacatgaggcagtgccaagtcaggatgtactctcctgtgttagttctagtgcaacagagaacgctgattttgaaactaatcaaatagaaaaaagttatgaaacacaccgagtatacgactgcaaatataatgttcttagtgtgttaccacatttcagtccaagtgttaatccagttatacagaagtcagaaatagtagagaattctgttagtggtggtaaaagcccaaaatggaagggaatttcctctgaatcaattgaagaagcttctggtatctttggtaataatacatcagggttgagtaaaccaaaactaacatgtaaagaagaggaagagagactttatttggagaaagatagtattgaccccagaattactgactgcctgggtccatgtgggacgagtgaacgtgcacaccatttcaaagaaggaaacgccaagtccactcttacacagtcgactttaaatggtgaaatgggttttatgggaaatgctaaggtgagttttgagaaaatagagtcacgtgacactcccagtggcaatttctttctggttggtgttgatcccaccctagcggacagatacacaggtgccccctgcgatgcagcgcaggggattcccgctgtccccgtggacagcaaagacacgattgtaccaagtagtggccacattttatcactcacagaaggtgtcctaaatagatgtgaacatccctcaaaagtggattggcagagtttcccagaaggagtctcccgttttttgagtgaattttcctattacccgatgggagggttaggaaacccagcattttctgaaagactggccagtggttgtggtggatatcaaatgggctatctctggactaatacagtcacaaaaggtgctctagaaggtgaaacaatatttagtgaggatctgcaccataagccacaggccttggaaattgctttgttttcagaaaacactcctcagctaccggtgtcagaggacggtgttgtttggggatggcatgatagagacggacagttcgtaagta

SEQ ID NO: 59548 - DNA, 1548 bp, Homo sapiens
gtcattaggatttgggtttgagtggcaggaacatgtgaccgctgtgcaaggggttatttttggtctctgggtgttggcttctcctcagaaattatagcaagttactgtgaggtgcgtctgtggaggcttgggaccagcacgcctgtcgtgtgcttgtgagctctcaaacatgggctgctgcttcagcagagaactaagtagtgacaatgacagtgaaaaaactggcctgttacaaaaatctgtggaggaaaaggaaccagaaaacaagataagtaaaactttgtcttcattatttgataccgtcaaaggtgaggaggttcaccgtactggcagtggagccagcagtgtagctggcgttagcgcgcggacaaggattttcgcagggtctgggcacaaacagggtcatagacccaagcagtcattgaaccctctttcctcttttatatatacattctcaacaaggtatgaaaacttgggtgagaatgacaagaattcagatattgttgttaatgagcagaattctgagggggtctgtgatctactgtgtgtgggtaacggcagccgacaaggttgttgggaagatgaggagcttttctcatgtgtgctggtgccttctgaccgaggcctgcaggaggaagcctttgtgagtggccatctgcactgttacccagctacttgtaaaaactctttagtagagaaagaaatggtggtcagcgttcacctcagcagtggtgatgagagtaagtctttagacctatccgatagggagaggaaagatggaaaccctgttggtattgatgatcagcaatgtcaggattcaggagagtgcaagtttcacagcatttgtgttgccgactctgcctgcccaagcgtggcagaggagctgggcacctgggtagacacagtagctgcaagaggagagtgttgctcttcagtgccttcagcctcgcgtgccatgtcaggggcgggcgagccagagccacggcaggaagaactctcgccttgggacacgctgggtccaggtgaaaggacaggggaatgcagtgggaaagccaagccttgccctgagcctgtggcgttcagccatgcaccttgtgaagcaaacactgataacgtgcagatggaggctttacaggcagaagcttgcactgaattccctaaaaattacgcagaaagtagtgcactacatggtattgacctactccctgaattaaataacaacatggacagtgactcactaagtcatgcgtgtgtcctgggagaaagtgagagctgtaactcaggagtaggaagtgagatggatcatccacctggtggcttccgtactgacactgcacattcacctggtagcttttgtactgacactgcatgtgttgcagggagtgatgacccggaggtggtaacagttgttgtcgaccagagtttacattctaaaaaggagagagaaaataactctatcacaccactaagagacaacgatgatttctacttggacgttaacaaagcagatagtatccttcctgttggtctagatagaattgatttaag

SEQ ID NO: 59549 - DNA, 1006 bp, Homo sapiens
ctactgattttgaagtatatcgtaccaatagttatgattacagtactttgcattaagtttacctgagttccaggcagggacagtgatgaaactctcgattccctcaatatatcagaaacaggaaggaatctaggacgcggagtggtcagagggatgggaggaaaaccagaggacagtgtggggtggagatagaggcagggaggctgactcaagtgaagtgtagtaaggtaacaaagcgaggggtcagttgtgaccttagcaagagtatttcccaggactgataggagcaaaagccagattgcagtgggtgagagacaggagtggtagacacaacttagacggtgacattcctcctaagatcttggctttgaaggtaaggtgatagaaggcgagaggggattgaaagggttttgagggtgtttatgatgaagagtgaccactggcagtgggccacagcgatgggttctccttcttgaggaagaaaaaatatctgaccactggtattcagcaacagtgtcgtttggttaaaggttctttaccttccctgttagcgccacaaacttcatctatagcaaacatcattctcagcggctttttgcccctcctgaagcccactcagggactccagttcttactcctgtgtgcgaccagccaagtacctgcttttcccttggagacactacatcagcctggaaaccattttctgttgaaatgatcctcttgtgttttatcataaatcaacagcaggtttgagagaggaatgtgagtgaatgatgatgtttaagggacaggtaatattaggtagaagtgtttatgttaaattacctcctcagaagaaagatgcaaagtcacagcaagtcttttctaatcatagtgtgaaactggaaatctgaaattggaaatctaactcatcctcatactaaactctatgtacaattcagcaaaacatctatatcagaatgatttttttttttttgagtcagcctcactctgttactcaggctgg

SEQ ID NO: 59550 - DNA, 1088 bp, Homo sapiens
ttccccaataattagtgatgccgagcaccttttcgtatttctattgccatttttctgttgtcttgggaaaaatgcctgttcatgcctttgatcattttttaaccaggttatttatttatttatttattttgctatcgagtggtgtgagttccttatatatcttggatattaagccttcaattttctgttttttaaaagacttgagtttccaggcacaaatgggtttatttgtgtcagcacatgagtttccaagttttagagtgtggccatcttcaccaaaatggtgtgaagaagaaacttacttatttaaaaaattaagtatcacttcttggtgagtaaggtatgcatatgggaagacttctttaaacttttttgaattcagagggataaacgtgtgtcctggaaaacttgaggattttaattttatttaaataatcatactgtgcccttcaaatgacctgtttaatgtctttgccattttacagcatcctgaggttagcattacacttctcccagtggagcccatgacttctgatcaggacgctaaggttgtggctgaaccgcagacgcagagagtccaggagggcaaggacagcgctcatctggtgggtgctgtcgaatggggtggtggggagtccattgctttttttgataaaggactctatattggagttagtaaggagttctaaacaggaacactggcacatcttaggatctgcatacagatattagagtctcgtaggggagaaaagatttcttacccatctgaggatcatggctgagacccctgcaacaaaagacagatgaacaagagaaaagcatacacatttatttagtaataagttgtatgtgacatgggagcctccacaaaggaagaaccaaagaaacagggaaaactgtattttttttttgcgaagtctaatgcagatgttgacagttgtggagaagcatgattggacaaaagggatgtgacctagagctaataaactggagaagcttagcaaggctgttgtgttcaggtttttcttgacatccctgtgtgttactgctcctggtacagagcagggcccctctggaagggtcttcag

SEQ ID NO: 59551 - DNA, 1047 bp, Homo sapiens
gttaaggctttttaattctgtggcaataaaaatagctctccttttaaatatcttttatttgctatagaaatgaggtcgtctttcttgcctacattttggatttagatgatggctttgtgctggtgtgatttaacatgtatttccctagaattccctttaaattgggagtaagatctagaggtatgattaaatacaggctctttttttggcacgactactttgtggatggtagtctttgatcatgtcaaaaataaaatgcctagaggcccagttttaatgataatactgaaaaatagcttcagtcaatgtctcacttaaccatttggaaacctcccatcacgttcttcacttgataatttcagcagacatcaatgattattgactttattattgtattagatattgggatattttgatttttccgatcctgtcattcactccccattgactgtggttcttgccctgatcagctttttggttattcagaaatgcagttcatcgaggaacagcagcttgaaataactgttgtcctttagtgatcttgggaataataagtgggtgtcctgtagtcccaaggcgagcactgtggtggtggtagctctcatgattgctgccgacttgttttccgttcattcttcctgatcctgatgtggctccgtgcatggctattgggaatccctcccttagtttgctgtggcctctgtgtcttcctgatgggaccagttgtcttcatggcttcctgcttcatggtaagatgtcccaggctcatctcaaattgaggaacattctacaaagtaattaactagtgctctggaaaagcgtagatgaataaggcaagactgaggaactgctgcagtttaaaggagactcaacggaaggacagctaagtacagcatgaggtccaagatcagagcccagaataggaaaaggatatcagtggtaatagtggtgtattgcaaaggaagcctgtactgtagtttaaaaagttacacttccaattttaaaaaatgaccacgtggagtttacttagcttctttaattttgtat

SEQ ID NO: 59552 - DNA, 1232 bp, Homo sapiens
tttttttatttttattttttgagatggagttttgttcttgttgccaggctggagtgcaatggtgcgatcttggctcactgcaaccttcttctcccaggttcaagcaattctcctgcctcagcctccccagtagctgagattacaggcgcatgccaccattcctggctaagttttgtattttttaggagagacggggtttcatcatgttggccaggcttgtctcaaactcctgacctcagatgatccacccgcctcggcctcccaaagtggtgggattataggcgtgagccactgtgcctggccatgattgtgcttctgatgatttgatttagcttctgtgatcatttttttttttttctgatcaatttatgtagcttcaaagggatcaaagtctgggtggtaaactgttttctacaaattttgtttggacattgaaagtaacacattttgattttttctaattgattcccaaggagattatatagtacttaattaaggcaatctctaaagttcttagccctttttccttatttaggtaaatttctgtttacttatctagttgaatattcatttactgatttttgtaaaatggtctgtaaaataaaattatgttggagttcttggaacacatgtctgtctaggagcatcttgtgctgtccatctctgttcatgcgtcatcccttaactcattgttcctaatcatagacaattagagttagaaggtaacttagcaaactttacaaataaagaaatggagtacttagacaacactgtagtaaaactgcatatatttgaatgttactaacaaaaggaagaagatcaaggtaagttgtaatatatcattggtgggatatgtatttctgtcctgttctcagtatcactgtgtgtagatagaagataaaacacagggatacctgtgttccaggaaaaggcaatagaatgtgcagaacatggcaaatagaacagggagtaatctgttgtgagtagggagttcctgacttcagaataatgtttttagattcaggagagaggttttatatttggctcccatacagcacactctcatgggaaatgtctgttctaaggtcaacccataatgcaaaaatcatcaatatacttgaagatccccgtgtaaggtacaatgtatttaatattatcactgatacaattgatccaataccagttttagtctggcattgaatcaaatcactgtttttgttgtataaaaagag

SEQ ID NO: 59553 - DNA, 1015 bp, Homo sapiens
gtttttttcagtagaagcaccgatgtacacatataaaggacattttacaaaattagtcttgaaatttattggcaacatctccttaggaatactccagtgctgagtgccagtttaaatgtataaacaactactctactgagattggacgcatttcttttatccgtcagtatctttgagtgacacacttactataagaacatgaaacgaaaagaatggaatatcatagagatactgaatcttgaaaaaaacaaaagactaaaataacagttttgttggaagcagcagtctgttgctctgtaaatgttcccactattcaagcttacagattcacttgagtatatgatgtgtataaggtacatggaaggaacataaaataatctgccctaaggtgctctcacattattctattgtaagataaaaatgtgcatttcaaatattacagagtggtgctggcagccgtgagataaaccatatcatccaactaacagcacaaggcagatggatgaggaactagaattcctattgtattttattttctgcacttctctatttagatatgcacgtgggaatcataatgaaaatttctgttaagaaatatatccttctgctgggtgcggtggctcactcctgtaatcccagcactttgggaggccgaggcgggtggatcaggaggtcaggagttcgaaaccaggccaacatggtgaaacctcgtctctactaacaatacaaaaaattagccgggcgtggtggcaggtgcctgtaatcccagctactcatgaggctgaagcaggagaatcgcttgaacccaggaggcagaggttgcagttagccgagattgtgccattgcactccagcctgggcaaaaagagcaagactccgtctcaaaaaaaaaaaaaaaaagaggccaggcgctggtggctcacacctgtaatcccagcactttgggaggctgaggcaggcagatcatgaggtcaggagttcgagaccagcctggccagtgtggtgaaacatcgtc

SEQ ID NO: 59554 - DNA, 1061 bp, Homo sapiens
atatattctaaacagactagacaaaagagacaactagcttttcaaccaggtaatttaacatctgtattaaaaagattttatgccaggcaccgtggctcacaccggtaatcccagcacttttcgaggccgaggtgggcgggatcacttgaggtcaggttgagaccagcctggccaatatggtgaaaccctgtctctactaaaaatacaaaaactagctgagtgtggtggtgcacacctgcaatcctaggtacttgggagactgaggcaggagaatcacttgaacctgggatgtggaggttgcagtgagctgagatggcaccattgcgctccagcctgggcaacagagtgagactctatctcaaaattaaaaaaaaaaaaaaaaaagattttatgtttctgcttcaacttgaggttaaatgaagtgaacgtgctgcagctgtgccctgcttagactgcagattttggttttgatgcttcttggtagtccagtatttgacaaaggaagctgtgtgaattagctaagcttgtgtcctaaaaagatactcctaatgtagttgtcaacttttccatttgcttttccctttgtgaaagtgtgtgaaaaggtgtggaaacccttcctaagaagctctttactgggaaaggtgtagcacgggataaaagcaagaagtggtactccgagggccatgattcgcactgctgcagcttagggcttgtgcaaaacaatgttctgtgcatttggttcagatactttatttcagcttctttacaaccaagtattagagtggtggtttttgagttcgtcaaaggtttaatgagtaaaatgctctcctagccagagggttaatgagatgatctaaactccagtttcggtggttgttttgtattatgttttagtaagaatcctagctaaaatggtcttttcaaaagattgtactctccagaagataatgtcgtagacccagtcacaggctttaacggtggaggggaccgttgtcctttttttgtgtgtcgacttagtagacacgttctaaatttaaaatcaggaagattttgaaagtata

SEQ ID NO: 59555 - DNA, 2848 bp, Homo sapiens
aatacaaataattgtttcagtatgtgtttgccacttcggaacttctttagtgatttgttttgataatacaataaaaatttttagtcatcactttgtatttaactcctttgtatgtttagatcccaggtgcacacttaaacggacatgcatgtatgcatatacaaagtctagagaataaaataaaatgaaaatgaaaattaactcaaagtaattttgccctcagctgtgaatattgccttttcccttattacaccacttggaatgtgcaccagcagaggccgttctttggactcatcccattttctgggcttcatattttaaatgctagttaatttttcccacatttgttgccacaagataataaattattaatgtatttactgagattttactcgtttaggtactgtgttagggatacaacagtgaacagggtagacatatttctgacctccgagtgataaaacttttgtgttggagtgaggatgataatttgatatgctgtattcctgggtgtaaaggtttgcaggagtacatagaataaccaaccaaggctttgtgggaggatggggagagcatctcagtagctgtggttcttttcactttatcctggtgcagcctgtcagaaggtttcagttgcgagtccctcgctttagggagggcagtctggaagaatctgtggagtttggggaggtgggaagaagggagatgctttaagaaactgggtggtaattcagttcagttggtggttttctgcacagtttcatgacagggatagaaacttgagcagaagttaaagctgtatttgcaagtttctgccttgggcacctgagtcaatgatatgtccttcaataagagagattggttatcagttcgtatttgttttaaatgagaagtagggaattgattttgagaactctgcaggatcataaggtgttcactgggcattcacttagataattttgtgctgaaactgagcatatggttgtgaacagaagccatgagaaactgggagcacaggagcataactcaaggagacaaggaggtagactcctttgcacacataccgtggcctgtcaccaggatcaacgctgtctgtggatccatgcatacctgtgggttgcaccacactggcgctgggcttctcttcagcagggctgttccctcttcccaccagtggagttgtgtgcttaccaaagccaggtcagcttccaaacttgttcatcgatcatactcattcgtgcagctgtgtgatttaattaatataaattgatcaaaatagtgtaaaagcagttactcatttgaaaactttggagtatctcaaaaacaaatcacagagaaactgctgatgaattagatatgaaaataaggataaaaactgaagaagagtcatagaagcattgtactattcagagggttttcctgtctctcagctgcactttaaaaaacaatgaagatctttgttgatgcattatggatatagtttatgtgggaaagaaataatatctaattgaccaagtctcagaaaaaggcccgtgtgaatgaagatgtataaaatagctaaagatttatgtattcatctttatgattgcccatttgatttactatttcttttgattgcacagggcaagagagcttttgccctacttagtgcagaagagcattcccaagaggctgagaaagcaggtgacgaagtggaagagggtagagtgggcttcaagggaaaggctggtctgttccactgtgctgtgagaggtcctccctgtccaccagcaagcaggaggctggttcttgtagaaggaaagttttctgggaggttggagatagaaacagttgagagctgcctcttcagcaggaggccaggaggacgtccagtcctgctgattctgccctccttccctgctcctcagctcctcccttgctcctcagctcctcccttgctcctcagctcctcccctccccacgttcactttcttttttttgcgacagaataagctgttgaaacagtgacagggaaggattgaacataatggaaaaaaacataattgcaaagacaggagtaaatgggatctagactgggcatggagggactaatgaagataggatcctgacttcggtcaagtgttttatgtctgctctatttagattccttgtcttgacttctgaggtgtgattttcaagagctatataggattataattgttatggaatatttccctttcactgaaatgctaagaaatacgtatatattaggaatattaaattcaagaaaggaggacttcacattaatgcatgtgtaaaataaggtgtattttatcaccacttataacactgttaaatggcatttaattattaaggaaggtaatttgcaggttcagataataagactttagggagtgcctccagggctgtattaataacttgaggaagacatttttataactatagattgagtatcccttatttgaaatgcttgaggccagaagtgttttatatttcagttatttttggagtttgggatatttgcatatacataatgaggtatcttggggatgggatccgagtctaaacacagaattgttttgtatacaccttatacacatagcctgaaggtacttttatacaatgttttaaataaatttagcgtgaaatgaggtctgtacattgaaccatcagaaagcaaagatgtcaccatcccagccacccatgtggacagtctggttgcttaatgccaccatcgtgcctggttctggatttatatgctaccaagtggcagtcatcttcttacccttgctcgcatgggagtactcagcagtaaagaacatgacatagcattaatacagtgaggaaa

SEQ ID NO: 59556 - DNA, 1070 bp, Homo sapiens
gtctcactttgtcccccaggctgaagtgcagtggctgtatcttggctcactgcaatcatcacctcctgggttcaagtgattctcgtgcttcaacctccagagtagccaggactacaggcacgtcaccatgcccagcttatttttatagttttagtagagacagggtttctccatattggccaggctggtctgcaactcctggcctcaagtgatctgcctgccttggcctcccaaagtgctgggattacaggcctgagccactgtgtctggcctgattaattcttaattcataaaatgttaggtgtgaattaaatagtacttttgaagtaagatgtttatattctaagactgtgagttttgttctacgttattttgtcaactgagatttggtaactagtttgtgaaaataattgtcagaaaaacagtgtaatattgcagttgcagtcttaggattttagatctctgaagactcagaaactgaagcccatgaggtaaaattaattagagatacagctggctagttggtgacagagctaggactgtaacgagcctcctctttaagtccagcatcccgttgcactgtaattgcagagtttactgtggtcgctgttaaggcgcaccctccgctgtggtatatcaaaagaaattggtgaaagcattaattttatgtatgttagataatttaaataagtgttttaactttttgaggtagatttttaaagcagttattagactgtgctttttaaaagattgaaatatatttactccaggaaaattaagtgttttgtcattttagataatccattaaccttaatccaaatagggaggtgctaattggtgttctggttaacaccctccggtttgtatcgtgtaatcagactgcagcttacagttcatctttgagaaatagtctaagagaaattcatgtaaattaaatggttttcttcctaaagcattcagggagagttgttcattttaacgtccacgctgttaacacaggagtctgtgtgcagtcttggatccaacttcaacacctgtgttcatacccgtcacctttgtgtagaggaact

SEQ ID NO: 59557 - DNA, 1018 bp, Homo sapiens
tcctctcagatgagcagttgcgctagattctcataagagctcaaatcctactgtgcactgcacatgcaagggatctaggtcgcatgctccttatgagaatctagtgcctgatgatctgaggtggaacagtttcatcctgaaagcatcctcctcaccaccccccaccccctgacccctccgctctgtctgtggaaaaattgtcttgcatgaaacctgtcagtccctggtgccaaaaaagattggttaccgctgacttggagtactgaccattgtgaaaatgagtaactgatgaatcagcaatagttgcttcttcacgctgtcagtgaagaccaaagaatgaatatgggaagcagtattaccagtgttgctgcgtgtgcacgtggccttcagtttttccctgctcttcccatttctttgtacacaccgatgaatttaatctcttctgctgaaatcattattctttagggctcagtacaggagagttaaacctaagcatgaaaggactggaaatgggatgtagaattgccaaataaactgtagaagcattgaggcacttaaaaatctccatgacctggagaaattccagtgaagagtaaacttttgcagtgtgccttaggattccgagtgaccacaagttttattatctttcaggcaaggccacacagattcttggcatactatttcctgtaagttcagaattttggaagtgtgttggtcattgtggtagtcctccccctccccgcgtccccctgccaaccttacaggaaagaaagaagtggtagttttattctgttattgagaataggtttttcatgaaatcacatgaagttacagctcaacataaataactgtagactagatgttttcccaaaatcgttatatggccacaaattgtgttagataattatatgagcaaggcaaataaatgctggatcattaacttccagttttctttctttctttttctttttttttttgagatggagtttcactcttgttgcccaggctggagtgcaat

SEQ ID NO: 59558 - DNA, 1136 bp, Homo sapiens
gatcacaccactgcactccagcctgggcgacagagtgaggctctgtctgaaaaaaaatgaaataaaataaaataaatgcccccttttagatagccatagaatttcttacctttattttgctttaaaataaaaacatcatgttaacccaaaatgaaacaattgcaatattgaaaatgtatcttttaaactttagtggatgtttttccattttttattttctgttaagtattgctaaagggcctggcataaaggagggccactgagattacggtaagaaaagggttcattttcttcctgtggcaggtgttctgaccagttgaacactagggatgcaaagatgaaaggcaacaggatttttctgtaaggcccgtcatccagcaggaataggaaagtgcattgttctatgtaaagccatagagactggcctctggaagtggctggctctcagctgcatgcttctttggatagtctgctacaacagtcacatatattatggtgtatcctgccctgcactctccttgtctccccttcttgctgtacttttttcatagtatttatgacactataacataccatataatttacttactaatttatgtatggcccgtcttctcatacttgaatgtaaactcttatgagatcaagatttatattttgctcctcagtatgaacctaagccttagaacaatatctggtaggtagcatgcgctaaatagttgatgagtagatcccagtatggtgaacaagagggatagattgccatctcttggagtttggtgtccattgagacaggtggacaatcacataatccaataagaaagtgcagtgcactgacatccggcctggatgggagggatcagaaggcttccctgaggttgtgatggtggcaccgaggttggagggatggtggtggagtgagaggtcagcagagagaattacctgtgtagtgccccaagtgggaaaggtgcagagtgctttgaaggaactagtgtgaacaaggctgaaggaagagaacgcggctgggaggtaggtggagagttttattttacagagcttgggaggtcccatataggttgattattttgccctttatcctaagaccagtgggaagcagttggaggattttatgtcataga

SEQ ID NO: 59559 - DNA, 1602 bp, Homo sapiens
tgttgtctatgttagggcctctcaaagttgtaaaaaagctgtatagatgtgttaccatcaatcgatttcatttgtttttatcctagtgttaaaggtacaagtttttttttttttttctttcctgaggcggactttcactcttgtcgcccaagctggagtgcaatggtgcgttcttggctcactgcatcctccgcctctcgggttcaggtgattctcctgcctcagcctcccgagtagctgggattacaggtgccctccaccacacctggctaattttttttttttttgtatttttagtagagttgggatttcaccatgttggccaggctggtcttgaactcctgaccgcaggtgattcgcccgcctcggcctcccaaagtgctgggattgcaggcgtgagccacggcgtacctggccaaaggtacaagttttaaatatgcttttatcatgcatacagtactcttatagattctgtcagatttagggatattcttttcagattgataaattgcacaaaaatcttggagtatattcttgtaatttcttctacaaaattctcaaaacaacctttttccaatggggagaagacatgaacactgaagtcatgtttttggaaaataccttgttaaaaacagacactgctgtaagggtttccttgcttatgctcttttgtagaactttattgatgtgaagagttctcctttttctgtaaaagcttattttagagtacgaagtaaatgaggcactcagagagttaacctcatcaggtctgagtttagttcagtttaaactttttgctcttatgctggttgatatctttgtaactactctacttctagagttattttgattggaaaatgaattccttttttagaacatggaattgtaaggtagaaaactgctaggttctcaaaagaagggagataaattccaacttgaaagttttttcccctaacgttctaatgctttgtttttcctgtgtgtaaatgccttccttaggaacaaggaaaattattaactcagctgtgtttccttcccttctctttctcactgcccccccgccaccccataccttaataccttttgtcccttcaatgcctttataaactctgtcttctcatagtttttctggtgaagctgtcatggctcctatttcaaccataaaggatttgcagttcagtgatgctactggttttacatcttctttcccatcaaccccattgccctggttaggagacctagaccatggagtacattgcaatattgaaagtatttcatgtttaacacaatttttttttttttttttgagaccgagtctcgttctgttgcccaggctggagcgcactggcacgatcacggctcactgcaacctctgcctccagggtttaagcgattcccctgcctcagcctcctgagtagctgggactacatacaggtgcgtgccaccacgcccggctaatttttgtactttagtacaaattgggtttcactgtgttggccaggctggtcttgaacttctgacctcaagtgacccatctgccttggcctcccagagtgctgggattacaggcgtgagccactgcgcccggccatgtttaacac

SEQ ID NO: 59560 - DNA, 1225 bp, Homo sapiens
aagccggggctgaggaggaccggggccggggcaggggaaaactggggctgaggatggccgaggccggggcaggggaaggccggggccggggcttaggaggacccgttgaggcgaggcgggagtcgacggagctgggtgcccggaagaccgggccggggtcagggtcgggaggccggggttgggcgaaggccggcgaggacgggggtcgggcagggcctgggcggggccggggtcgcgggccgcgagcgcccccaggccgggcgggcgccggcacccgcagtgcggcgccagccttgccactcgctcctcggtcccgccggagcccggataggcggccgtgcgggtgcggggcgggacgggtcatcagggcatcgcattcctttagaaccaggaagttgggatcctgttgctcggtgtgtgtttggaacgctcctgttttcctgttgatagacttgagcagaggtggatctgaaggagttaaaaaaataaagtcagatgtgaagattgcctgtgttggtcttggggctgggatacatgggcggcagagaagccatcggaaagctgctgcacctgcctctcagggtgcgcttgggaacgtgaagagtctttccgtttcagtgccgttgtgcgtcgaaacttcatgcgaatgtaattttgcttttccccttatttttacgtaaaacgttcttaaaacttggctgagatgaaacttgagaaacctagctgtagaaaactacctcctatctggctttcgtttgagattctctaagtggatgcccaataacttgtcttaatagtaaattggaagtttgaagttttggataactgagaaaacaggaaggttttccttgacagggcagtggagtttgtaagtataaacagtatgcgtgaggcctttttctagagatgagagcaactccaaggtgaacattgaaggggacagacaagttattttccctttcgaaagtttttttctcttagtttcagttgtttgaatatttaaatgcacttgaaataggtgctgagttgtagtttgtgaagaccacagtggggaagagtggtgtcctcttttttcttggtggtcaggtggtgtgtgcagtgtgcaatttccatacttccccaacctgcctggcgcccctcattacagtcagggtaatttacagaagttgaaatcgttgtggcttttcagttttttctccttgtatttaatatgctgaaaggcagt

SEQ ID NO: 59561 - DNA, 1188 bp, Homo sapiens
cgtttagtaaatttttgtaatttaaaatatgtagtactgtaagatattagtgttttaagaaggtttcagggccgggcgtggtggctcacacctgtaatcccagcactttgggaggccgaggcaggtggatcacgaggtcaggatatcaagaccatcctggctaacatggtgaaaccccatctctactaaaaatgcaaaaaattagccgggtgtggtggcacgcgcctgtagtcccagctactctggaggctgaggcaggataatggcatgaacctgggaggcggagcttgcagtgagccgagatcgtgccactgcactccagcctgggcgacagagcgagactctgtctcaaaaaaaaaaaaaaaaaggaaggtttcaaataaatggctcaaaagtagacccttttgatgtaattatgttttattttctttaattgcaggacttcatagacctcacgttgtcgaagactcaacgaaagactccaaccgttattcataaacattaccaaatacatcgcattagacatttttacatgagaaaagtcaaatttactcaacagaattaccatgatagactttcacaaattctaacagatttccccaaattggatgtaagtgacttaggggacttctgtggttatgtaaatacgggctttcagagaaccagtgtttaaccagtttggtgtactcatttgacagaaaaggaaacaaaataattgacttaggttactcagtaagttagtggcaaagaactaatttgttgaatttataaaagtgagaacagaatttgggttttttgattccctagtattctttctttcctccaaccaaaacccatctaaggaggccccaagctgtcttctcaggctttctgtgtaaaccctgggcttgcaggtgccaacccaagtgttaatgatagctgtgggttatgaacacagaagctagcagctcactggttgtctgggctttatctcttccaccttctttccaagggttttttttttcctctgggctcagcttgggtcagtggtgtaagatccaccactgtttgtgatcttgttgcttcatcagctgatgacagtcagttcagcactgactgttttcttctttggcaaggagagatcacatgggagctatgacttttgaatgaagccagaaaccttgagctcctttctctgctgcacattgc

SEQ ID NO: 59562 - DNA, 1532 bp, Homo sapiens
aattctggagagagtgggttcaagagagggaggagaggagagacacagtgtgtcttgggagcaaagagagggaattggaaggattttggggctatgggaatttttgattttttttcctaaagattgagaaataacagcaaatttttaggctgatgggaatagtcaggtggagggaagaatttctagtgctgagttcctgagcaacaggaagggtacatgcagggtcgggggctggtcattgctgggtcccacagctctaccactgcactgagagcgaggtgggtgggagccgtgactgtcggcacccgcatcccttctgatgcctgttttctcagaggactaaatagacagggcccctggccaggagagggaactggggaggagacactgcaggcgtggagggagagggaaagaaattgttcttcaagtggtagggatgaaaaactgctggccccaagtgaccgtggtgtgcttttgtttgttacaggatattcatccgttctatgctgatttgatgaatattctctacgacaaggatcattacaagttggctctggggcaaataaatattgccaaaaatttagtggacaagtaaggtacttttttctgtagtgtcttttaagttatcgaaagtggaaaaaataatattttttattttttacagtgttgctaaagattatgtgcgactgatgaagtatggcgactctctctaccgctgcaaacagctgaagcgtgcggccctgggacggatgtgcacagtgatcaagaggcagaagcagagtttggagtatttggagcaaggtgcttgtcacgcatccgcgggaaccgtgctagcatcctgctgagaggatgcgtccttgttgaggacttgagatgtctgtttttcttgtattttggagatgacagggtcagttattcttcctagctttacctatgagaaacagtaataggctggtttttattgaaaataaatacttacaaatcaatagcactgataagaaaatttatatatttcatatttaataggtaaggcatacacaaaaaagtcacgagaaaatactgaaaagtataaaaactaaggtggctcatagtttattattgacttttttatttttaaaaacacttgtatttaataggactttctgaattaatgtactaggattctgttgaaacaattacttgcttattgtgtgtattcttacatgacaaattattttgactcattcggttttgttttctctcctgcatcttagaaataatttttaacaaaatttgtgatacttggatgccttgcaggtgctttgctacagatctgtgtggtcttcatgatggccggggtgccaccctggagccgtgtttgttacagacgaggtggcagagtggcagtaacccatgttgtagcccaaacggcatggcctgcaggcttcaaagtgcactggttccctaatgtcatcttgctaatgagaattgtctggacactgccagacatgctgttggccccacctgtcacctaatgaattaaaacgtgggct

SEQ ID NO: 59563 - DNA, 1159 bp, Homo sapiens
tttggctgagtttcagggactcaggaagaggcaaagcaacatttaaaatgtgaatttacaaccagcaacagctcatgtgccaagaaaatggtcaaattttatggcttactcagtgccaagatcactttatttttaattaaaaaaatttttttctttctttttgttgaaactttttctttttgagacagggtctcgctctgttgcccaggctgaagtgcagtggtgcagacatggctcgctgcagcctcaaccttccgggcccaaacagtcctcccacctcagccacccaagtagctgggaccacaggtgcacgccaccgcacctgtttaatttttttattttttgtggagatggagtctcactgtgttccccaggctgatctcaaactcccgagctcaagccatcctcctgcctcagcctcctgaagtgctgggattacaggcatgaatcactccaccctaccttaagatcacttttgctttgaaatagatttgtgagttttattttgtctacaggttgctgtgacatggtgaccagcaaagctctgcagggtccttgctgatttttcaaatgcttgtcagctctgaacctgccctgagctctgagccagtgctctgtggccgatttggtggccactgcactgggtggctttttaaattgcagtttaattcagcaaaatgaaaatttcaactcctcagtcacatgagccacatactgaaagttcattagcagtgcatgactggtggcccggtttggacagtgcagacagaacatgcctgtcatcataaagagctctgcgggcattgcaggcggtggggcaggacttgggagggtgaggggaggtggtggctgtcctccaaatgccagccctcacgctgtcctagtaccccagtccttggcctggtggtgcaaagggagaggtaccaggctcctattcgatgcagttttatcgtgtgaggtttcttctatggttatttcctacccaaaatcagtcttgttaaaacacacagatcccacgtgtacacagaggaaatgaggtgattctgaaagttctcacttgttccaggtgacgagagcagacgtggatgtccagccctatgcgttcacaaccaagtctctgtttgttgggcacatggattataagtatctacgttggcag

SEQ ID NO: 59564 - DNA, 1927 bp, Homo sapiens
ctcccttttttgatgtttaaatagtatgtacttttctgtcactggtttattttgtggtattcagtttgggagacctacttttttttttttttttttttttttgagatggagtctctgtcacccaggctggagtgcagtgtcgctatcttggctcactgcaagctccgcctccctggttcacgccattctcctacctcagcctcccgagtagctgggactacaggtgcccgccaccacgcccagctaattttttgtacttttagtagagatggggttttgccgtgtgagccaggatggtctcgatctcctgacctcgtgatccacccgcctcggcctcccagagtgctgggattacaggtgtgagccaccgcacccagccctacttttttttttttttaactacaattctgctgtaagattattaggtctggttgggtgtgtgtgagtgacttctgggatgtgctggacaagaagcttgtgggtgagtgtgctttcagtgacaaggtctggctgtgttaggttgtagacactcctgggatcctggaccaccctctggaggataggaacaccatcgagatgcaggccatcactgccctggcccacctccgtgctgcggtcctgtatgtgatggatttgtctgagcagtgtgggcatgggctgagggagcagctagaactcttccagaacatcagacctctcttcatcaacaaggtgtgtgtggtcactcatgttttgcttcatatcctgcagtacgagaataatgatttcattatttttcttccttgcctagcctctcatagttgtagccaacaaatgtgatgtgaagagaatagctgaactttctgaagatgatcaggtaaatcacgttaatattttgaatatttcttacttaccaattctgaattctcatctcagacaaccaaagtttagatgaaggaattttagcaatactagtccacaattgtattttatagttgagataatatcctcagtggtttagtgaaaagacataataaaaacttagttattggcaaactaaaacgaaaacataagtttctggattctttgttcttgagtgtgtggaagcatctgtatttgatgggttggacttttggaaaatgtgattacttaggagagaactgttggagaagggtgctcacaggtgttacttcataaaacaggttctgtgattaaatgagtttggagactaatgattgagtgaaggagaaggaggatcttggaatttgggctttctggatctggatctatgagtgagacgtgcctgctagctttctccaagaggcaggcagtattgttggacataatttttcaaactgattgaatcctacaacctttttaataggcatccttcatgataaatgcttttagaagcgtgcactggtggagtggctttcaaattgtggtcctggcccagcaatgtcagcatcaccttcttaatttcttccttaatttcctcattgatccattggtcattctgggacatgtttataattctcatgggtggtttttttttttttttttacagttttgaaagtatctcttggtattgatttctagttttattccactgtggtctgaaaagatacttggcaatttttaaaaattgatgagatttgttttgtggcctaacatatggtctatcctggagaatgtttcatggactgaggagaggaatgtgttttatgcagcggttggatgacatgttctgtagatgtttggtctacagtgcacttttttttttattttatttttgttttttttttgagatggagtctcgctctgtcactgaggctggagtgcagtggcacggtctcggctcagtgcagcctccacctctgaggttcaagtgattctcctgcctcagcctcctgagtagctgggattacaggcgtgcgccaccacaccg

SEQ ID NO: 59565 - DNA, 1072 bp, Homo sapiens
tatatttttagcagagacagggtttcaccatgttagccagggtgaccttgacctcctgacctcatgatccacccgcctcggcctcccaaaggctgggattacaggcatgagccaccgcgcctggcccctggtgttttctttgggctgtatttcatcgtcttgcgtttttctgctccccagggtgcctgttactcctgtgatgccctctggagctccccctcagttattaacatgtagttgttcgttattctgattgcctttgttgtgggggacagatgtgaggggctactagtcggccatctttttgatgtcatttgtgttttcttgatcatagaagaatatgaagaaaataactgtttttaggatatgtctgttttttaagactttgaaacaaccacagatgttcacatttgcagcctccatttgcagaactgtacagtttgttccatagggaactggaaatgaataatacatctctcgttttttctttgcattcccagaaaatatttacagatttgcagtctgaaggattccctgtaatagagaccagcaccctgactgaggaaggtgttattaaagttaaaacagaggtcagtgctgccttaagtcaggtattagtctttttactgtctcttgtttgattcaagtcagttgtggggagaaaatagttttctttctagacattgttaacacttggagccctcgcagtagcgaggcgggtggcgtgcgagagtggggcgtgaagacagacccttctaagacccactttgccccccgtggacagtgggttgtgaggggatgctttgctcttctcaccccaaacaactttaccctaaagcagctgttgtctctggccttttaatatttcggtagcaagtacagtgaaaattatttttatggaacctgttcgaagtagaagggagaaaagtctgaaaagcagaacagcttttgcaggaggcagtccgctgctggatttcacatgctgtcctaattactttgtatttcatgttgtttttatctcaaataaaaggacatttctggccaggcgcagtggctcacgcctgtaatccca

SEQ ID NO: 59566 - DNA, 1056 bp, Homo sapiens
ggcaggagaatcgtttgaacctgggaggcggaggttgctgtgagctgagatcatgccactgcactacagcctgggcagcaagagcgagataccatctcaaaaaaaaagatggcactcctgatgccatggtcgcactcaggatttaaaaagatggcactcctgatgccatggtcgcactcaggaatttgttgctcggttagagtcctgaggggcaacattgcctccggttcgtgaagggcagttggagggcaccgtctgtgcagagggtcactgtggtgggagagaggcccaggcactggagatgcaccttccctcagggccgcttccacctgggcctcagagaatgtggccccctacgtgttagttaccttgagggaaaaggctcagtggctctgatctgtggctcctcctggaacctgtagctggaggctgctggaggatgcgtttgtgactgtgccttcttttttacgttattaggcttgcgataggcttttggctcatcgagtggaaaccaaaatgaagggaaataaagtgaatgaggtgctgaatagactgcacctggctatcccaaccaggagggacgataaggtaagacggcccctgggacagccgtgggctcacagtactgtcagcaggtgctgtctgcgtgccttttccagaagcctcccatccagcttcacacactcgcaggtggatattgtgggtgggcctcagtttcaccttcttgcttacataaaggatcgagaaggtgaagaaagtgcagaacgccacatggcacccgtttcccactgcatgacgtggtcactgttagtttatccttccagaaatgtttctgatatagaagattagtttctaaaaagttctttaaacacagatggaaatctgtttcattctttaaattttcatttttttggctgggggaagtagctcacgcctgtaatcccagcactttgggaggccaaggtgggaagattgcttaagcccaggagttcttgaccagcctgggcaacatagtgggaccctgtctctataaaaaataaataaaataaattttca

SEQ ID NO: 59567 - DNA, 1323 bp, Homo sapiens
tggatcacctgaggtcaagagtctgagaccagcctggcaatcatggtgaaaccccatctctgctaaaactacgaaaattagtcgggcgcgcacctataattctacctattcaggaggctgaggcgggagaatcgtttgaacctgggaggtggaggttgcagtgagccgagatcactccactgtactccagcctgggtgacaagagtgagactctgtcaaaaaaaaaaaattatcttttatactagcattaaaaattagcttttttggatagtcttcaccgtgtcttgagttggttatgttgtgagggtggaggttgcactccgtttcaagtggtcggcatttctgacctgagtattggaaattttatgtttccattgaattcttatatgcacttgagtttatgtctaaatttctttcatctgttgatccagtgttatttcttaccactttcttcttccataatttttcatgataatcatgatttctgtttttcctggataaactttggaatcactttgtggagtcctcctggtctctgtgctcaaagtgaccctgaacccactcctctcccctaaaataatctgttggttgttaattggtctcggtatgaacccactcctctcccctaaaataatctgttggttgttcattggtctgggtatggttttctgttccccttgcacgtagggaatttgtttctactttttcggctttgtaagtttctcattcagcaggcatttcacataaatattttatatgggatcttctcaggagaggccccctttcatccctgaaggagtggtggctcgcaggaagaggatggaaactgaggagtccaggaagaagagggtatgctgccgaagctctcgcccagtgttctcatggggggaggcaggctgtgtgtgcccatcgtgggggcctggggcatcgaacaggagccgcgggtgcccagacactggccccgtcaggctgcggacacagcagtgagtccccctgcagaagcctctctcatggggctctttggcctgagggaagatggccgtgaaccaaatgcatgagtgggatagacagtccccagatggccagaaacagcctcttcctaccagaacctaaaggccggccccacagacagggagataagaaacagcctcttcctaccagaacccaaaggctggccccgcagacagggagataagaaacagccttcctaccagaaatggaaggtgaaccccactgatactgagaggattggagaaaagattgtttcaagtgacaaggggcagagcatttctggatctgaaaggcaaaatgaagctgatgata

SEQ ID NO: 59568 - DNA, 1086 bp, Homo sapiens
cagtgggcagaaattgtacctctgccctccagcctggacgacagagtgagactctgtctcaaagaaaggtgcatgctgatagcactcagtgggggttcttccattgtttcctgttgttttgggatggtggggtgatttctgtagctttctccacgtgtgggtgttgaatgaggctgatgtgttgtttcctgttgttttgggatggtggggtgatttctgtagctttctccacgtgtgggtgttgaatgaggctgatgtgttgtttcctgttgttttgggatggtggggtgatttctgtagctttctccacgtgtgggtgttgaatgaggctgatgtgttgatgctgctgcatgtggaattgcacgtcgtgctctcttctgcagtggagtcgttgatttgccgtcagtcacaactcattttgcgcacgtagtacttgaagatattaaaaactgctgtaaacgtaaccaccttttttttaactttagagtactgggatttaatgaatttgtctgaaaaacatgataagataccagaaatctgggaaggccataatatagctgattatattgatccagccatcatgaaggtttgtgtcactttttaaattgcggattgttttcctttttattatagtagtattgctggaagatagcagcatggcttcggctcagctgggcctgtccgcttcattctgcacccctccatcctgactctgccccctgtaccacttccccaccctgagactctggtggagatactggccctggctgggctctgctatgctggcctgcccccttcccgccgcctccacccacccaccccggacactctggtggagatgctgggccccttcgttatcctgcacccctccatcctgactctgcctcctgcacctcttccctgtcccgacactggtggagatgctgggccccttcattctcctgcatccctccatcctgactctgccccctacaccaccttccccaccccgagactctggtggagatgctgggcctcttcattctcctgcacccctccatcctgactgtgcctcctgcaccaccttcccccccaccctgtgtctcc

SEQ ID NO: 59569 - DNA, 1494 bp, Homo sapiens
ccatgttgccactccttggttcccacaggccctccgtcattgagttcacattttcagtctcgtggtctctgtgctccctgtgcctccatagcagattctgggatagcagattctgggggcaacaatctcaatttcgttggtgctggaggagtggcctcagggcatctgctgtcacctctgctggggccccagtccagcccgtgccctcactgtccccgcggtggccgcctgccttcccagcctcttcccctctgcagtgcgcgctcttgggcgcaagaagccttgagacttccctcctccgcacagctgtgcccgtgccatccccttccacgaggcctggcccccgtctcaccctctgcactgctggccagcatctcgtacaggcacatctgcctgctgggctcctggccgggttgcctcattggggggtgataaacgtgtgtgttttagttttcatttttgtcttatttgtagccagtgaggttgtatttggggtgacattagaacggacacgtgggatgtggcacgaaatcagtgtctcaggactgagttccttgtgtgtgtctgccgggagcattggaagtgaaggaggcggtctctgcacatttttagccttggaatttaattgttttaaaaaaaggaaatggtgcacaggggttactgacttgctggcggctggcgttcacgtggtctccattttcttcacagaaccctccctgtgaggtaaatggcacataggcagggcccaggtgggtctggaccagggcaatcgctctcctctgagtcagggaaacaaagctcccatacacactctgccacactcactgactcaggggttttctcattgttaattttgcttcattacaactccatttttaaagaaattggaagaattagaaaaagaagaagagctgagaacagctgctggagagtatgacagtgtatctgagagtgaagacgaagagatgctggaaatccgacagctggcaaagcaaattcgagagaaaaagaagttgaaaattctggagtccaaagaaaagaatacacagggacccaggatgccgcgaactgctaagaaggcaagtttgtgtctttccaaagcagtgtgatctagtttttgaaaattggattcctgtgtgatcattgctaaataacaacttttcaacccatttatggccataagattgcacattcttgttttattggtgtatggatttgcaagatcgctcacgtattgatcttttatattctttactgcgtcctttcttggtgactttcagcttcgagtttggcactactctagatccagtcattttgcagttgtacagattaaaactgtaacttatggttcacagacgttcaaggctatcagtgaacattttcctcttcttttttctctctctcttttttttaggggggagatggagtcttgctgtgtctcccaggctggagtgcaatggcgccatcttggctcactgcagcctccacctcgcg

SEQ ID NO: 59570 - DNA, 1145 bp, Homo sapiens
cgcctgtaatctcagcactttgggaggctgaggtgggtggatcacgaggtcaggagattgagaccatcctggctaaaacagtgaaaccccgtctctactaaaaatgcagaaaaattagctgggcgtggtggcgggcgcctgtagtcccagctactcgggaggctggggcaggaaaatggtgtgaacccgggaggcagagcttgcagtgagccgagattgtgccagtgcactccagcctgggcaacagagcaagactccatctcaaaaaataaaaaatttaaaaaaaaatctggactctttagcaatttacagaaacctgacgcagtctacaaaaggcaatttattggctctgtggcagggtgggactgggggaagaaagcccacatgcagggcagttaacatgtaaccagagaagtcacttgacattcaggatgcctctcagtgggtcttcctgtttgaatacactgttttcacatggtggcaagtgactggttatggcggacttggacatttttgtacttctccaggtggggctcagccatctctgggaggagagaggttggcgcactgcctttgtctgaggccacctcactaacctcagctttagtgtctcacctctgatggagacggtcactctctcccccgtgttgcggtgaagaatggacagacgtggaggatacgctgattcttcccacagcaactgctctgttaatgttagttttcgtgggatttaattgagctatccaaaaacatgaaagcggggcccaataaaaattacaacttctaaaataagtatattataattgttgcaaaatatgtatacatatatattgccttgaagtttttttcaacatttcatcaaactaatttaaagctaatatttctttttatccttctcaggttcagaggacagttttggagaaggagatgcgtagtcttggtgttgacatggacgataaagacgatgtgagtgtgggggcggttcatgtgtttatgtggctggatacacctttttaataaagaaaactggccgggcgtggtggctcatgcctgtaatcccagcactttgggaggccaaggcgggcagatcatgatgtcaggggttcgagaccagcctggccaacatggtgaaacccagtctgtac

SEQ ID NO: 59571 - DNA, 1952 bp, Homo sapiens
ccaggaggcctcaagtccagcaagccccccatgggaggaacagcagagggaactcctgggttgattggcgggtgatcctgctcatccttaggttgcaggattgttccccccaggtggagagcttgagtcacatttagtttatttgtagcgtcttttggcaaagacacttaagatggacacagtctgtcttgctgaaacgtccttttattaaacacaacaacttttagtttcagcgttgtggtaatggagatgcaggagagtctgtgtataaactgcagtctccttcatggaagcctgagcttcactcctctgtgccattgccatcttgaaacctggctgttaatattggcattgccacttgtcagtcagacctgaggaaaacaggttcatgggcctgagtccttagcttgtgtaagagggagttaaaacagatgtgtgctaaccttctaggtctaaagtgtatctagtcctgggtataaagcttgtcctgggtatgattttcatccagtctttatacaaaaatactcattgagttcctgcagataactgtgctgggcttaagagaaaagagatgtaacagggataactgtgctgggcttaagagaaaagagatgtaacaggggtaactgtgctgggcttaagagaaaagagatgtaacaggggtaactgtgctgggcttaagagaaaagagatgtaacagggataactgtgctgggcttaagagaaaagagatgtaacagggtctcttcgctgagcagacctgagccattaaacagattgttacccagtagttgaaattcagaatggaaaattggttttaagtaatgaacatactttatttttttctcctccttttagatggtgaagaaagccaagactatgatgaagaatgctcagaagaagatgaatcggttggggaagaaaggggaggcggatagacacgtgtttgatatgaagcccaagcacttgctgtctgggaagaggaaagctggtaaaaaggacaggagatagtatccgtttggttggcgtggcttcgctagagtgttgctgtttatttcctggtttggcacagtatggtttcatgaaattggagctctgtataaactgaaaaagacaaaataagtaaagcacttgttgctttgctgaaaactatggttaaccctatataggtgtgggaaatttttgtcactgcataatattacaaatattttgagtagacagtgtttccacatttaatggagtatcagttgcttcagattttcagaactgggaagatttactggtttaactaggttgtttttgatggagaaaaaccttattttcttttgtaagagctgggagcaaacacgtttatgagtgtgtcggaatcccgtgcttaaaatacgctcttaaattattttctagtcttattttacaatgtctcattgtagtctgtcttcaactattttatccaaaataaacctccagaagaaagtagttttcatttacttagctcatgttttggtttagttatagtcgctatggatttggccaaataaaaaggcaaacaacatgacatttctattttgttttaaagcaaaaatacttttgggggagtaaaatgttgctggaggcattaggcaattaaatatgggcattctcctatttctgtggcccgtccctgaagttacatgttcagtaaaacacaaaaacaccgccaatgccacctcaaaagcacctgctggggagcgttggggtgaagagctgtggggtcggagggacctgcccaggggtccgtgtgctcctggagctccaaagacacacaggggtccaagagccaccacggataagttatcaagtcacacaatcaacattatagctgaggaaaggactttagttaatcacacttctggattacatgtggcaattttaaaaatttaccagggctgggctgggcgcaggggctcaagcct

SEQ ID NO: 59572 - DNA, 1097 bp, Homo sapiens
aatccagatcccaatgagattaaaagctattgttatgtgtcaaaggaagaactaaaagaacttctgaaaaaagcagccagtggtgaaattaagataacgccatggtttaaaattattgcagcgacttttctctttaaatggtgggataacttaaatcatttgaatcagtttgttgaccatgagaaaatatacagaatgtgaatatgtaggtaaatgattacagaaaaatttatctgcttaacaaacttagaatgactttttccttttaaatttagttctatcattaatttatcattaaatttagttctatcatttggtactatcattaatgtattatatacactgatactttaaaacttgtgtggaaaaaactaacttataattttgtatcacacaccctggatatgtgttctgtttctaagcgacatttgtgagagattattgtaaaatgagagcgagcaaataaaacttaatttaatctttgcagatacatacttatgggaaatttgaacaaatgagtgaaactctgtttttagtaggctgtgataaacatttccggagcacttgcagaggacttgctatttgccaggtgctttatgtatcattaaatttttctcatagttcagaaaaatgtgcaaaggaaactattgtctcgctccttcaaaacagtcttaattaactttcatattagcagattaaactagcagagcaggttcaagggaaattaaatgatatggaccctaatttgtatcattctgagttgattgtgtggtttattcattctggaaacatgttgatacttacagtcagccactgcttttgataagtgatattgattaggttgaatcttcttgtaaatagtatttaccagttagcaaagtctgtgttttcagaattacagtgagcacagaggtgttcataaaatgggaattgagtcccactcggtaagagttgcttaaacttgacactgttgacatttgggctggataaaacccctgtggtggggtctgtgctgtgcattgcaggatggtgagcagcgtccctctcatgtgacacccacagttatgccggatgttgccagatgcccctaggggaca

SEQ ID NO: 59573 - DNA, 1032 bp, Homo sapiens
taccgtattttctcgttggttccagttcgttaaatagtgtggtcattagcatctgctttgctgtcttcctgttacagcgatttctcttcacttcatgcctgttactcggcttcttcagagttattctggattcatagaagagggactagccctgacatacagcagcagcctagcctctaatatttctagagagtggagagaggcgggcaccatgcagggaagcatgtgccttcaccactttccgagaactgaatgtccttgatagggaacttgactgccggaaaggggccaccagcatcaccatttccttcactcgacggccaacttccttgcccagtgcagagctcttcctcaccatagccatgcagagactatgcatgtggataaaccatgggaaaaagcaaaagcagcagcaagttactaatgttattctgaactgcagggagagaatttggcaaataactggtacttaaggctaaaataattgttatttcttttgctttcaggattattgcatcgagcttttagtgtcttcttattcaacaccgaaaataagcttctgctacagcaaagatcagatgctaagattacctttccaggttagtacacttttaatgtacaatattgtgtttgtacattaatttgactttttatcattctgaattcttggagccaaggtcacaaagggaaatcctgtgaatggcataattttatattctgcataaagtgagtttacacaatgagtgcaacctaatacaacagcaagaaaaaataagaactagtaagcaattgggcaatatgtataatttacatatttatctttaatctgtattatctacactttgatcttttttggttaaagaagtattaataaggaacctacctacaaatgtagtctgtttcacaacataattactgatagcccattataaccaattttaaaatccttaaaataattactgatagcccattataaccaattttaaaatccttaaaataattactgatagcccattataactgattttaaaa

SEQ ID NO: 59574 - DNA, 1019 bp, Homo sapiens
gtgcactggccacgtctcaacagcagtgtgaccttgggcaaggccttcctaagtcccgactccctgtcctctaacatggtgttcatatcagcctcattttcttactgggaaggttacgttatgtaatatatgccagccatttttgcaaagtgctgtatacaggagatcttgagtgagtgtgtttccctcctcctctttttgggtagctatgttaggctgttcactttgggcatttgccctgaactaaaatccctaagtccctttccccaaggtgaaactaagatagagttttcatatttatcctgtcttattcttttcagggaaaagattttacatctgttgaatttcatccttggtttaaagttgttcttttaactactgagatcttttgaaaatcttgatggctatttatctgattaatggtatttcctaattgattgtcatccacagaattgatggtgtatgtattccatgccttcatttcgtcaatgacaaaacattttaagcaggttaatactgatgacagatttctgaggttgcctgtagagaccattctcttcctcgatattgctcagaagttgaatttggtgtctcagcccactaggaattcgtctaacagtgttattacgataaaatgttactacaaacttgattaaacttctggtggaaattccatcacattttatgcaattttcaatttatttctccaatttatttttaatgccacatggacattatattccttaaccattcttttgcatgtgattaacatttgtgaaattaaccacttaagcaagtgtttttgctttgatgaaagaaaaatgtttaaaatcctactggatatgaaactgaaagtaatgttttgtgttttttgtttcaaatgaaagtgtaaattaagaatttgttggcagggcgtggtggctcatgcctgtaatcccagcactttgggaagccgaggtgggcagatcacctgaggtcagcagtccaagaccaccctggccaacatggtgaagtcccgt

SEQ ID NO: 59575 - DNA, 1284 bp, Homo sapiens
ggaggaagctaataaataggtacaaattagtgaaaattatgttctgagctaaagttacattttagttcattatgttcttttcctcagtttcctaagtgtgatcaggaagtgaaggtctgtctctaaggcaaatagggatgttcatggtttttgtattttcttaaagtatctcgtgctgaccttcttaaagtggaaagggtttaattgtttgggaattcatttgtctgtgatggattactatcaagtgatattttgaggtaattttgtatgcatctgtactttggcatatttcaaggatacaaagataaattgaaattttcagtgatcttgctatgatggtgtaagtagttcttgttagctttttatttttccaatttgtttccttgagtttaaagttaatttagcatgacatctatagtaagattaactgcaattaatagagcaaatttagtccttctgccgtttgtcctcacttgatagtctttggtaattctttgttattcaaaagaaaatctgaaattgttggtattttctactgtactttccttcgataacatctagaatgtaagttgctaatttatttgattttttttttggccatgtaatgtctagcttatacttacaagttttgaactttttaataaattaacttgaagctttttcttcataatgaagtgtgaaattatgttcttcctcatttaatttctttttacattatcttggattatgttgttttttctggtgtgtacagttgtatatatacaatgtatggtcttggaattccaaaactttctcattattactgaagtagaggaagaaatgattatataaagttgtcctttaccatgagcagtaaaaaataagatttggacaagggtaaggatatgtatagtaatgctttgctttaaaaaatgtattagagatatttaaagcccagtcattttaggtactagaaattcatctgaatttataagaagcatattactaatgatctttatagcctttgcacactgcccatacccattgtaaaaaataactatgaaaatataagacatctgaagattgaagaaataatttggtaacagaatatattctgattcgtactacagtgtggattcttggtgccaaagctaagcatgaatgcaacaagagaaaggctacagtctagctttattactttccctccttctgacccagagccacgaaaagcaagtaacgtgcctggtgggatagcgggaacacaaaagtgtgttacgtgaacgcagaagaggtttttccccttcc

SEQ ID NO: 59576 - DNA, 1030 bp, Homo sapiens
tttcttatcgtagcagaataatccatggcttttatgaaagttaatctttagtagacattttatgaattaaatgagaaatggataaaggaaaatacattgagcagtactttctagagacagtagtggataagcagttggatttattgtgagatgaagatggcttcacggtcttctcgaagcctttccgtacagcatcagtatgtttgctgctccccccgcagttcctgtagacggagctccttgaggccctgtggttaccattctgttcccttagattgtaggcatctgatatggaggaaaagagaaaagtagcacagagacacagcaagttgccaatgtcagcatttttacttctttctgggtaatttatctaacccgtggtagcttggatttgctataatttcagagtagttttaaaaacgtgccttccttggtcgctttttcgagggtagccttacagtactgaggacttttcctgtgagattgtcagacccccacagatccccatgatagcccagggacattggtgatgatctcgaaggatgtgtgtaggctttcagtagaccagaggtccttatgatttttctgtaaaggagtaagcagtgaatattttcatctttgcgggacattcaggctctgtcgccagtactgagttctgctcttgcagcctaaaagcagcggacagtgcactgatgagtggacatggctgtgtccacttattcacaaaagtgggcggctgtctgggtttcgcctatgggccaaattgtgctgacgcaggaatagaacactgaggttgagatgactggccccttcatgcaggtggagttgtttaagaaggagccccagcaacaggtacttccagtgtgtgggatgcagcgagtcatgcggtttggttggagtttctatgtgagagagaaatgtggtgggagggttagcctgagagtcattttgagcaggcccagaccacatagctgactttcaccttcatacgtggatgaagactaaagcagacaaggagtttacaccttac

SEQ ID NO: 59577 - DNA, 1009 bp, Homo sapiens
tgctgataggtgcctggcccattgaaaggccgcgtgtgtgttgaatggatggagatgagtgtcgctttcccgaacgtctcagagttgattgcagctgtaagttctgatatgatagggtttcttaggttagatagatggagaggaaaatctactatttgtacattttctctgaacttccaggactttctatgctaaaatgaaaggtgaaatagttttataagtaatcattatttcctcaattttggacatgtactctattttcaatagcattatgcagtctcagaaaagagttatttaagtaaaaagtacattcctctcactaagtggtcactaagctggaaaggtctgactgctgctgcttagccatagtggcggtgaagagcgcattttaccatggtctgtgccttgggtaattttccccgatttctctcttcagcttctggagatcagactgctcatatctggagatacgcggtgcagctgccgacaccccagcctgttgctgacactagtgtaagcacctttccttacctgtgaatgtgtaggatgctgatgtctgcgaatctgagaatccatttatgatatctgtcatggacggaatgtttgtgtccccccaagttcagtgttgaaggcctcacccccggtatggttgaatttggagattgggcctctaaggtagtagttaaggttcagtgaggttgcgtgaggtcctcataagaggagacagtggagagctcacctgtgttctcaatctctctgtcactctccgtgtcacgtaagagcagagccagagggcggccgtctttaaggatgagcccgcaccagaacctgaattggcttgatcttggacttccagcctccagcactgtgagaaaataaatgtctgttttttatgcgtcgcccggtctgcggccttttgttgcggcagccagagccaactgagacagatttcagtaccgcgcgcagagcgggggctgctggagaaatgccgacggtgtggacctggctt

SEQ ID NO: 59578 - DNA, 1036 bp, Homo sapiens
tttccatggctcatagatggcgtcttctcctggatccttcatccctctgggagtgtctgtgtcctcatctcttcttacaaggatgtcagtcctattggaataggatccactctcctggtctcattttaccttaattatctctttaaagcccctttctccaaacagccccattctgaggtcctggggtgaggacttcgacacaggaatttgggtccacagttctgcccatagcagccccttccactgttccctccgcagtttgttcacacagcacacaccgggcatcacatcctgccgacagccgtctggtgattttgcatcacacggaataaaacctggtgtcctttccagtctcccgggattacaggagctgttcccgactttgcctcccgtagctgttccgcacatggcgggaatgttgttcctcagcccgggcgagccttacttaacctttcctttcctcacatccgactcacgtgcgacctcatcagagagtccctcctcagtaattctgtgtgaaatagcgcccccatccagctgccccttgtcctgttttattttacttcatagaagttactaccaccttactctgtgtctccatgttgatttgtgttcccgtgctgctctgcatccatgtgatatgtgttcccgtgctgccctgggtccctgtgacgtgctttcccttgctgctgtgcgtccctgtgacgtgcgttcccttgctgctgtgcgtccatgtgacatgtttccgtgctgccgtgcgtccctgtgacgtgtgttcccgtgctgctgtgcgtccctgtgacgtgggaacccttgctgttgtgcgtccctgtgacgtgttctcgtgcggctgtgtgtccatgtgacgtgttgccgtgctgctgtgcgtccctgcgacgtgcgatcccgtgccgctgtgcgtccctgtgacgtgcgttcccgtgccgctgtgcgtccctgtgacgtgcgttcccgtgctgctgtgcgtccctgtgacgtgcattccctagtaatgtatatgtgctcatgacgtgcc

SEQ ID NO: 59579 - DNA, 1023 bp, Homo sapiens
gacacccccaccaggcccggcctccaacacaggggattccagttcagcatgagatttgggctgggacaaatttccaaattatcagttccagtactagtacttgtgtatatatgacatacctctccatactaacgggtgtgtgtgtgtgtggtctctctcttttgctagaacagaagttctctgagggcaggggctttaccaggggtcctcactccagagttcctacctgctagattgagcgtagttttgcatgtgtgcatgtcagaagccgtctgtcctcttctgcattgtgtaagcagcacctgggctgggggtggggactggcactctgtcaccccctgataaatatttgttggatgaatatacagattttcttacagagctggctgtaatgtgtttgttttagccttggcctttgacagggggcttgatgttacaaaggaaaatagactcttatgactatagcaatagaattccaagtatattttaaataggctcttgagaatgaaaatgcctttttgtaatgtgataaattactgactttcatttgtatttggttagttttatattgcatttctactagtaactgatgaaagcttaaatgttgaaaatcattttatttgccattctgttgatgcgtggaaataaatggtagttcggttgacaatgttgtggattccacttttttttctgtacgagatggtcgtagagttgatgggtgttcacgggcagcagttatgggtcagaggaggacatactcatcactgtggccagcaccaggctcctagtggtgaccatcatgatggatatgtcctcaagagattaatgagaaccatctattttgtagctatgtcagaagaaactcaagatttccaggaaatgtctttcttttctggccttccctttggcagcagatatctggggaagatgaagtagagtgctctgacaaggacgagcccgacctcgatggggatgtgtccagcgactgccccaccatccgcgtcccactgacatccctcaaga

SEQ ID NO: 59580 - DNA, 1043 bp, Homo sapiens
tagggtcagaaaatgggttatgcacctgtttggttttctgttcctttgacatggacggctgaaaggacttcagcttctgagggaaaacctgccccactgtgacccacatgctgctgagtgattccattaggtcaggttcacagtctcagagagacggcttcttgggttcttgtgctgttgaaaagcgtctctctcagcgtgctcctcaggtgatgaccttgtgttttgccatcttggttacagggcacgaccaggagttgacgcactgctgcacacaccccacccagcggctcgtggtgacctcctcccgtgacacgactttccgcctctgggatttcagggacccctccatccactcggtgaatgttttccagggacacacggagtgagttgcggtagtttagacatctgtccttagtcatgaaaaagttctgtgggttgacatgaaaacttaattctagccttaattttcagtatttccgactctactatctttcaaaaaaataactacctttcaaattctgctattctttttctaaacatttagctccattttggctatttcaaaggatgtaggagattaagagaaggcaccctccgaagttctctcaagaagtttaatgcagacagaatgggggagtgggtggagagggttagagaagagcagggctgccagagcctgtagctgagcacaggggccggccacgccaccataggagccgcgggagctgttactcctacccacggggtgtctcctggatcttttccatctagtttttgttattacacgtgtctgcgtggtatattctgggagaaggtatacacatagacgcgcaaacacagacatagaccctcaatccagtgtgtccctctctgcttgggtttctctccggcaactcaagtgtaaggtcttttttttctgagacggagtctcgctctgtcgcccaggctggagtgcagtggcgctatctcggctcactgcaagctccgcctcccgggttcacgccattctcctgcctcagcctcccgagtagctgggacta

SEQ ID NO: 59581 - DNA, 1147 bp, Homo sapiens
tcagcctcagccctcagacctccctcagcacaccccaatcccgtagagttttcctcccctccccatctcccttttttgtttttttttttttgttgttgttattttggttgctataaaaaggagctgacaggcgaggtgtcactggccattaagcctcctctgtgggtggcaggtggctctgccttgtgccgggctggcagtgtttgcaatgcggataaactttagcattgaaaaaaacaggagatcatctcaacatggatgcaatatttgaggatgcaaagttttttgttttcttcctttttaattctttgcaaacgattttaactttattcccaaaatgtggtctttggtgctttcttctaaagaaaacaaaacacacatctaaccaaacaaaattttaaaagatcagttgagaaattataatgatcactttgaagtgatgacatgtttgtgtgcttttatttccaaacacctgggggagagatttggtactaaacactgagttctagatcatgtgctcagaaaggtaaacacagttttgcagcttgtgtcatggtgttaacagttttccttatgcttttaaagggaaaagatgtttggaaatcgacatttttaactggatgatgggcagttttaattgcacctgaactttgtgcttggtcacagtcagcatgcaggtgtcagcttgggtgtgggcctctgggtgctgtccggccagctggccgcctgggaggtgcgtgttggaaaggacgcatgtggtctctaaatcagtttgctttccactttcagatctgctttctttttggtgatggcttttgagtccttgtctgtggggaaggtggagagccagccatctaccaggtggtgactttgcagacagcagggccctgtggaagggcctctggggcggaagtgacatggagatgaggacggcctgcaggctgtggggccttggaagcacacctgtgtctcctctcagtgttacatcccctacccatatgcctgaaagcttggtggttgtctttttaattagattacattagagtactttaacaaaatgttgtatgtattcatggggtgtgagtgcagttttgctaccttgatgtactccactcaggtgaggccagggccttcagcatacccctca

SEQ ID NO: 59582 - DNA, 1018 bp, Homo sapiens
cagaagcgatttctccaatgatccctcaagaaccaacactttgtaaaaaaaaagactatttcgtgtgtgtgtgtaagagagggacataccagtgctttaggagtgtgcacgcactgccacgctgtctccctgccctgatggccccgcagcctgggcgttactgtttgtctctgttgagtgttttgtttcagcttctctggaagtcagctgttgctttttgccatttttgtgctggtttctaatgctgtttctcactcaatcccactgatttctcttacttactgctcctgaacattctaaaactgataacgtagaaatgaaaatgaaccctgaataaaagactaagggccattcctatgaagaaaaaacatgagtgcatcggcgttaggaatttcttctgtataccagaaggccgtgctgcaaaacaagtcaagagcatatatttggaaaatacgtctgtacaggctcctgcagatgcagtggttgtgagaaacggtctctgtccttggtagccttgacgttctaggatgataagatcagtacacgagacagagcagagcaagagaacacagagctgagtgctgttactgagtccaggcaccacaggtcagtgtttctgtaatgggtcttctttctttgtgtcatagccaaggtgaagctcttcagctagcagaagagtgttctcactgtgcccccatagctcatggatctcatctttagaatcttatttttggccggatgaggtggtcaggttatactgaactaaatgttctctttgaatagtctgtggaaaggttcttactaattcagttagtcaaatcttagggaggctttagcatagtctgaagtcactttagaagcccttctctgtgggccatggtaaacacagatgttgcagaggcttcttgtagctttgctgtggtgcctgttggcagcacttccaggccttagggtgctgttgtgcgcctaacactgctgaccttataatattataagtggccagtcacttgcccccttc

SEQ ID NO: 59583 - DNA, 1038 bp, Homo sapiens
aacacaacacagctaccccatgtcttcccttgcgctatgaagcgccgcctccgaggggcacccgggggtcctggctggcttattggggtgtcctttggttacttactcagggcactgttttaaagtcaggactgttggcgacgcaggtgttgtacttttgtatcagcgctgtaacagaacagttgacatgccaaagtaataaagtaataaagccacagtgctgcctgtttcacagctgttcattttcaaagatctgttctcggtaccttgactgagaagcctgggttccaaggaaggggctgccgtccacaggactccctctctgtggacacacaggcgtgctcctcagatgtgaacacattaccttgaggaagctgcgttttaaaaataggaaaggaaacgatcgtcagtgtttgatgtcgtgccggaaaagcactcccatcagcgctttgtggcccagtgttttccacatcgtgtcgtcttttccttagtgaaatttcggcagattgttatgcagaagcggttctgtgtctctgtgtgactgggagacagctgttcatcctaatgaggatgccagcttcgcggcgtttccgctgatggagacccgcggagggagcggaatgttccagaccaggcagtggtgtgcggcgaggaggtgctgcactgtcagctggaggagcacgctcggctgccccacacgacaagataaatgagtttgccggagtttggcagcgtcggaaccatttccagtgcacggccgtgcgcgccagcctccccatgggacctgtgggctgagggtgccttggaaactgctgcctctttgccagttcttttttcttttgatgtccgacaatacttgtcaggattgtgatttattaaaaacctaatgtcttttagcatttcattaacatggagttaggcgatcttttgttgagccttttttcctattaatttagcagaatgttcactgaaacttaacttggccaaacctcctgaagactccagttcaaagagaagttgggggcacctctcctctca

SEQ ID NO: 59584 - DNA, 1092 bp, Homo sapiens
tatttttttagatgaagactctggaggagttactgggttgattttgcagtctctctcctctgcccatgctgctctcgtaacccgtgctgctctcgttacccaggctgggcgtttgcttgtgtcctgccccgtgtgatgccgtggtttccagttgggcagtttccccccaggagacagtgtttgttgtcacccctggggaggggtctgctctagtttctaatgtgcctgggcagggcggctgctacatccacaggccaggatgctgcaccacagggaagggccccgaccagacatcaggtcctagcgggggaataagtgtcagcaatccacaccgcagctgtgggcaccacgaccaggcctttgagaatgcagacgtgaaaacggtcgccgccgcatcatcctgactgtgttccggggtctcggtgtcagagcgtgttgccaggtgttgttgacgcaccttgattctcagtagctttgctgtactttgatgttatatttttaaaaaccttgtcttaatgcagtggaacttagacgtaattaggactcagctggtgtccactaaatgaggaggattttcataaatgggctttgtgactgcgtggtgcttctctcatccagggccgcatagagcatgaaatcccatgtcacggtacagcttcagtggctgggacaactggcatttaactggactccagagttccaagcaattttgatggactggacctcgatgagggtagatgtggaaaccaagcttttggtccacattaaattagtgatttgtgacgacaagaggacacttccttcatggataggtggaaattcacatgcttatcatctcgtaggtatctcagctgcttcagtgcggggtgaggcgggttttgagcccctgtacagagtgagtgaccccagtttttgtgccctgggagacagtgtaggggtcaagcctgtgtctctctgagaaggcactgcccctgcgtctcaggatctgcccactctgccctgaagtcagaccatgccttcctgggtgggccactcatgcccagctgcatggcgagcatggggacccaccccagccctgagccaggcaggacg

SEQ ID NO: 59585 - DNA, 1795 bp, Homo sapiens
ggtcttgtggtggggacgcctctcagtgccagtcccgccactgctgagtgagcctggtgttcttgccttcttggaaattactgctcacctggtatctgtacgttaatgtttcttgctgagttacagttttgataaagaggctctcatttcctgtgtcttgtatattcagtcctttcaatacgtccacctggaggctcaccacttggagagacacaggaaggtaatatttacagctgtcatgtgacatccccaggtctttgtgttttgccctgttttacggtgaggtaggagggaacccatctggggaccggtaggtgcaggtgcagtaggacgtgggacttttggacccgtcctttggtgcagctcgccagggatgagaggcacctccctacttgggtcttcaggagctggtccaaggagcttcgaatctaagtcatctagaatgaccctgaaatgactgacagccccgggcccaagaaaaacccataaccacctcagatggatctgacgtggctaagggacaaacagcaaatatttcagtcattttgattttacaaataaaaaatgtgttgtgtttttgtccgacattatttcctgactgcactgttctgagaatggagtccacctggtccctctggttgattagaatctcaggtttcagctcctgctgtcctgagcgaacttgcctgatgcagggctgtgctgtgtccagatgttgctggggcctcactttttctcttggctggaggtccaattgccagagcctcccacactgcacatacaaaggtctgagcccagggcagcttctggggccactgcacaggccacctgcttgggttcctcggagtttaatttgaaagtctgggtgtcttaggatgatggttaggaacattgaaaaatggctgcaaatagccaaatcaaacttaagaaccagatctctgccagattaaacatttttgaagcttttaaaagtcaatattcctagtggccactgagttccaggcacactggtgccctttactgccacagctgctcaccttgtctggcaaactggagggacctcagaaactggactcctgcatgtccttgggggcgcagccctgtggtgctcaggcagagctctcaggagccggggcaccttgctgttcgctgctgtgtcgtcttctaatgtgagctcatccactgctgctgcagcgtggtgatcaggagtcacagacaagatcggggatggtgtgtgtgtgtgtgtgtgtgtgtgtgtgcacgtgtgtgtggctaaattaagtcatactgtcaaccacacgtgatctcgtctgaaacagtgtttggaagtgggaacagttttgtcctgtatgctgatgtgtccagaatttcatttaatgatagacggaaaatgtgtggttactgaaaactgtatatgatacagaatttcataagagccatgctgttgggcaaagcaactctttttcaaccactgctcatcagtttctgtagagacaaaaactctgtacatattttggaatctgaagaatcctatgtaaatcatttgttacttaagtctgtgaaaaacatatttctttggaggaaaatgtatgcatttataagtgttccatggaatcagtttttattgtatcgatataattgtctctaagtgttgactgtcttcattgcaatatgaaattcattaaaatgtccatgttccataattactattataaaagctttgtgttattgggagtcttattatttttatagtttttcatgttttgctttggtgaaacattgtgaatgactatat

SEQ ID NO: 59586 - DNA, 1480 bp, Homo sapiens
ccctatatgattctaggtcataaccctacacgaatgggtcatattcctgtatgattctgggtcatatccctacaaaaataggtcttatccctaaaacaatcagtcatattcttatgtaattctgggtaataaccttctaataatggggcgtatccctataacaatgggtaatatcactataataaaggggtatatgcccatataacaatgggccatatccttatgttattctaggccatattcctataacaatggttcgtatctctatacgattctgggtcatatctctaaaacaatcagtcatatctttatgtaattctgggtaacagccttataataatgggtactatcactgtaataaaggttcacatgcctatataattcatggtcatatcccaataacaatgggttgtccctataaaaatgggtgatatccctacataattatggatcatatccccataacaatgggctgtatcactatataattctgggttatatccctataacaatggtttatatccctataagaatgggccacatccctataacaatgttcatacctgtaacaatgggtcatatctctgtaacaatgtatcctatcactgtaacaacatgttgcctccctataaccatgtgtcatatcattataacaatgtgtatacttgtaacaatgggtcatatctccataacaatgtatcctatccctgtaacagcacgttgcatctctataaccatgggtcgtatccctataacagtgtgcatacctgtaacagtgggtcatatctctataacaatgtatcctattcctgtaacaacgtgtggcatccctataaccattggtcatatacttataacaatgtgcatacctgtaacaatgggtcatatctctgtaacaatgtatcctatccctgtaacaacgtgttgcatccctataaccatgggtcatatccttataacgatgtgtcatatccttgtaacaatgtgtcatttccttgtaacaatgtgtcatgtccctataacaatgggtcatatccctatatgatttggggtcttatccttatatcaatgactcatagccctatactattctgagtctatttcctacaacaaagctgcttgccctcctctggcctctcaccccttggaaaacagacatggtgatgatgctcactttaaacagaggacaaaagtcattcattaagagatggcaagggagtatgacagaagaccctgggccagattatatcaggggatcagaggtggtgcctgctctgaatggcccttcttctgggctctgaaggggaaaacaaagtaaatgtatagtgttgaggattgagggattttgtatccatataatatgagtatatatgcatatatattagcctatacataatgcataaatcggtatctgaaagtgtggcattgacattacaaaacttaaaatacatgtcgtgttaagccagaatagacaaaactt

SEQ ID NO: 59587 - DNA, 1047 bp, Homo sapiens
ttgactggaaacatcactggcttcatggcccacgaactgcagcatctttagttctgacagctgtttctgaaacttaactttgcagaggaggaagcttggtgctctcaggtgtgtttgggagcaaaggcactgaaggctcaggtgttcctcatccttaagcagcagcgctgcatggctgtgggtgcggccctcgtgccttttcactcctctcccgatgggcctgagcttgttagccacgacagcaagacagaccctccaggcccagaggtggttccgagacactagtggcttcagctcccccaaatccagcggcagtggagagctaggtggaggctaacagacttatgatacattgtaagcagacttatatgatgatacattgtaagcagacttatatgatacattgtaaatagacatgatacattgtaaacagacctacatgatgatacattgtaaacagacttatatgatgatacattgtataacactgttcttctcaaggggggcctccctttatcttcatgaggtatggttatttgtaatatgctggtttattttaactttactgataataaaattgcatgacttgttttctgttgaagcccattgccttttttttttttttttttttttttttttttttacagtggtagttggtgatgtgatactccatttttcatctccttctcaaatcacacacacacagaatttggctagctgcaaataaacccctattctgtacttcgttttgcagttgaatggagtggcctacaaattcgtaccaagtccaggcagtgatgttttgaacagaaagtagcctgggcatgggggtaccttgcgttacgttggctgtttcttttagtccttaccctaatcccagaggagtgtgtgtacccatttctcatattaggaaatgaggcattgagaggttaggaaacggacccatggtcatgggtagttagtggcagagccagaattaccccgggctcttcagtgactcttgctcctgtttccactgcaggtatgaacgctgccgtccgtgccgtg

SEQ ID NO: 59588 - DNA, 1121 bp, Homo sapiens
cctgacgctgttgtgtgttgagtggaagttagttccctcacagaagtggcggcctgaacactcacagggactctgggtgcagaggaaaggaaggaaatcacttctcttatttcacagataaactgacttaccttagttcactttctccgcgtcaccactcagcatgttcagggccaggaacagagttcggtccccgacccctggcctctagccgggagtagggagtgatttacccccttaggacgtttaccagtgtttggaggcattttttgattgtgccattattgaaaggattgcccctggaatgtactggggagaggccagtgatgctaccgcacatcctacgatggacaggaccacaccccacaaagaatggtccagacccaaatgttggtagaaacaaggccgagggaccctgcactaaaccaagcgcacactgtgtttggtttgaatgttgttagctggggaggggtggggagtgaggccgaggggagtgtgagggcctaatcttggatgcagtccctggcccactttaatctctcttgatgtaagggttgtgtttttgtggcgattgtcgggtgtctgatttttattggtcactgtgtgctgtagtcgcccgtctgtttcctggtgggattcagatgtcctcagacctgtgcctgctgtctgtgtggtatgtaccagaattaaggagttggtatggaacacactgggaggcctaccccagaggccctgggctttctctgatgtttgtttgtttttgagacagagtcttgccctgtgtcgcccaggctggagtgcagtggtgtgatctcagctcactgcaacctccacctcccaggttcaagcgattctcctgcctcagcctcctgagtagctgggattacgtgcctggctaatttttgtatttttggtagagacggggtttcaacatgttggccaggctggtcttgaactgctgacctcaagtgattcacctgccttggcctcccaaagtgctgggattacaggtgtgaggcacctcacctggctcagaggccctgggctttcttgggaggtaaaacccatatgttctctctgtctcagctgggagggctggggctctgaggcccatccatgtg

SEQ ID NO: 59589 - DNA, 1355 bp, Homo sapiens
cagacaattattattcagctgtgctgtttaataatattcaacatacatcccaagtggcgcagggtgccttggcaggcggagcccctgacaaaatgctcccatgtatgtcccgtgctcgacagtgctgtgtgcctgtgagtttgtgctgaagtatgataaacacgttgggtgaaagtgacccctttcaacctctagcgaaacacgaccctttcaacctctcgggaaacgctgggccataggagaatggcttgattcctcattgcactgtgaggctgagtctaggcagacgttcccattactagggactcaaggtgaggactttcccacaattcactgcttttatccagtgctggaactgccctgtcttctgaccagtggatgctgaggaactgacattcactgtcatttttcccgttttatataatttaaggatcacttcccatttagtgaagtttatctcatttttaaaagattctccctttctcccctagggctaccagggcatggtggacggaggctcaaacatcgcagaggccgactgggagagtgtctccagcatcctgcaagtggtaggtactgggctgcgtccacagggttctctgagttagagactcttttatgtctagtaaattcccagaacacttgagctcagatcagttgcgaaatagagattatgtggacagaacagactttgtgagcagctctttacttgtggtttgatttttagaaatgcatgtgttaatctgtgagtcactttgagtacttgttaatagaaataatccaaatcggtgcctccccgctgaagacgctcatggggcccacaccttcgtgctggtccaggctctctctgcattgggcgcctcctgagctccgacacatcagaagagaggtggagggaattttgacaaccacggaagttaggtggagcaacgtttgcaaaacatcaggagagtgtgggctgaattcacacaggggagcgtttccattctgcggtcgtgattgacggaggaagataagatgtgaacggagagttgaagtgcgtatgtgtatcagtgagtctgtgtttctgtgtgtggtgtatgtggtgtgtgaatctcggtgtgtgtgtaactgtgtgagtctggtgtgtgtctgtatgtaggtgtgtgagtctgagtgtgtatgtgtggtgtgcccgtgtgtatgtgttaactgtgtgaatttctggctagcgaatgtgtatctgtgtgtggggtgtgtgtatatgtggtgtccttgtatgtgtaggtgtgtggtgtgtgtgtgtgtgtgtgtgtgtgtgtgaaagagagtgagtgagagaatgggaatggcacccactcctctgcagcccagtt

SEQ ID NO: 59590 - DNA, 1114 bp, Homo sapiens
aaaaaaaatccccctggccccaggttcctgctggttttacttgcaggtgctgtaaggggtgactggagggagaagcctggctgctggtcacaccgcttcccttgtcctggccggcatgctctggtggtcagtgggcttgtctttggttccacgtgcacctggttgagctcgttggccggtgctgaggcggctgctgtgacaccgcaggctggttcctgctccatgtatttaactgctggctgccgtgtgtctggctctgcaccctccctggctcctcctgggtgtcacgcgcctgtctttgtccatggaatgctggtctgggactaaaaacaggaaaatcacagtctttcatagctagttactaactcacaagatgaaaatgagaaaaatgtaaattctagcaccccatgtttatagtcggcctgtgtgtgccatccacctggcgctctctcagactgagaggagataaattagctggtgtctttcccagggcgggacgatcattggcagtgcgcggtgccaggccttccgcacgcgggaaggccgcctgaaggctgcttgcaacctgctgcagcgaggcatcaccaacctgtgtgtgatcggcggggacgggagcctcaccggggccaacctcttccggaaggagtggagtgggctgctggaggagctggccaggaacggtgagtggacacctgctcctctgtcctgcgggttttcgccctgtttcagagctttggaaccgacaggtttccctcttcactgtggcagaagtacctcttctcacagatcttacaggtcaccatctcaggactttttaggatctcaaaaaacaacagcaatgatcgtaagaatgctagtaatttaaccttaccatgtgccaggcacccttcgacctttcacacagatagctttatggaatcctcacgacagccatctaagccaggttttagatcatcccatttacagatgaggaatcaaacggccactcagccgtggggcgagccgggtccccagcagcctgggacactagcatccgcctttcagccctcacactgtgtccctccagctcgctggggtcctttaaaactgaagttgggccgggcgcggtggctca

SEQ ID NO: 59591 - DNA, 1025 bp, Homo sapiens
tccggttgccttgagttcggagaaaataaagaatcggccagggcagtggctcacacctataatcccagcactttggaaggccaaggcagaaggaccacttgagcccaggaatttaagacccgcctgggcaacatagagtgtgggtctacaaaaaaaattaagaaatcagccaggcatagttctagcttctcaggagactgaggcagaaggatcgcctgagcccaggagttcaaggctgcagtgggctatgatggtgccactgcactccagcctggtcaacagtgagaccctgtctcagaaaaatgataataaagaaatgataccaataacaaagagtttagaatggttgatttctctacccatggccattctgcctcacccctagtggggcaccccccgaacgcgccatggttacggcgatgagacgtgctgtttgctccccgcgcaggccagatcgataaggaggccgtgcagaagtacgcctacctcaacgtggtgggcatggtgggctccatcgacaatgatttctgcggcaccgacatgaccatcggcacggactccgccctgcacaggatcatcgaggtcgtcgacgccatcatgaccacggcccagaggtaaagcgctcagaggaaccggcgggaggccagtggggcccgacgtgtgcccagctcagacgttaccacgggctctagaacattctgcagattgggtgtcctggtgctggtctcgtaacttgacttttaggagctattgccagaacattgttctctggtctacttttcatttttaattttaaaacattccttgtttttaacctgatgatagaaaacagtttattagaatttggaaggaagaaacaaagtaattatcctctaaatgtcctacccaaacatctccagaaggagtggcaagcaggaaactgttgtgtggattttccacactactcattagaaacgcagccagcgatgtcctgccctgtgtaacctacggattcacgaagtgtcgtgggggccacagcgtttgat

SEQ ID NO: 59592 - DNA, 1021 bp, Homo sapiens
tagaaaatggaccatttttgaagcctaggtccctgcaggcctcctggctaactcggctgtcaaagccccttttctctgctttctgagctgtttccaggactgagtgggtgctccctctgtttctctgctttctgagctgtgtccggggctccctctgtttctcttccagccaccagaggaccttcgttctggaggtgatgggacgacactgtgggtacgtacctgcggtgggtccggtggacgcggttcaggtgggggaccctcagcatcatctccctgaggctgcaccccacatcctgaatgctcccgtggaaagtcctgaaggggccggcatcccgcttcatacctggcgttaggtctgcacgtctgtcgctgagcggggtgcctgggctgccctcgtgggaaggatccttctggggtgttgatgctgttgccttgtccacataggtacctggccctggtgagtgccttggcctgcggtgcggactgggtgttccttccagaatctccaccagaggaaggctgggaggagcagatgtgtgtcaaactctcggaggtaatgcgggtcccgtggccgttgatagcgggcgatgctggctgcattgctttaatcaggatcccaagtgggacggcattttaagcaagtgaaaaaatttctctgtctccagtttgtcacactttgtatttcactctatggactgtgagcgtggggcatgttttcctctatgaaggctgagactcaaggcagaagaggtttcatttaagacctgaggctgagacagagtgagcctggttagaatgccccatgcgtgcctaactccggcaggcagacttcaggcactgttggctccaggctccacacagccacccctatcattttctatgggtgggtctttaatttggggcttaatagaaagcgagtccattgaggatgagttaatccacatcatggagtggtcgctatgttcctttcatgacctctttaggctcacgtgactgccgtgagcataggaaggacgac

SEQ ID NO: 59593 - DNA, 1070 bp, Homo sapiens
ctgcctggaagcaggggaggctagcgtcatgggcaggcttggtttagaacattgaattattaactttttatccttgatatttaaaacattttcataatgactcagaagttggacggcaggggaaacacgcagctcccgctcctgggagcccattccgcttacgtcacctcttgccgagcccgtagaggttccgggactccccagcagacagagggggtcagctcgagtggccacgcgtgttctttggattagaatgttccggctcttaaacatgagctgctctgagaatgaggactgaccacttggcagccgacccgggcttctgtttgccacagtgggaaaaggcggcgtcttgctattccctgtgccctcccataacccagagcatcagctgagcacattcttacaaagccactgtgtcctcgtggccctgcctgggaacaggctttggcaggctttggcaggcttcgtgccctgggacttgctcaggccagtgcctgcctgtctggagaggactctgataccatgggctgtgcccctgctgtagacggggctgcaggctgccggggctggggatgggctgtggctccagcagccacggggcagaagacgtccccacctggctttgcaagtcggcttctttattgtgctttgttatggtcagttaaggagcaaagcatatctctggatatgaaaacagtgatggacacctgggaaagacatctgccaatatttataagtggtcatccataaagtccaggcaaagattttatttcccgcttaactgtaattaaattataggacaatggaccgagaaggaaccaaggaatttacgtagcccagccccactgtccttacagaggaataagctgagttccagagacagtcagtggcctctccagatcaccgggccggtgtgcccatgggctggggcgaggggaacgccttgattgggctggcttgtgctgttcaaatcacagctgaacaaattaaagctggttcaaggaagatgtttacattttttgtaaaatataagtaatagtttaaatgcaagctactgaaacgttact

SEQ ID NO: 59594 - DNA, 3519 bp, Homo sapiens
ctgcaaatgaacaaagggaaaagcagttccagcttttcaggcattggttcagtagtggaggtggctgtggagttagctgcatttgaagttatttaattaattaatttatttatttagagacggagtctcactgttgcccaggctagagtgcagtggcgtgatcttggctcactgcaagctccgcctcctgggttcacgccattctcctgcctcagccttccgagtagctgggactacaggtgcccaccaccacgcctggctaattttttttttttttttttttttttgtatttttagtagaggtggggtttcaccgtgttagccaggatggtctggatctcctgaccttgtgatccatccacctcggcctcccaaagtgctgggattacaggcatgagccaccacgcccagctgttgttttatttttcagagttcattcatgattcgtgactcctgttttgttgcctcttaacacacacaaagaagtcgtgaagcaatcaagtcagggacttgttgaaagtcaccttgtaaacataatttccaaaagcccaagggagaaaatagtatttgtgtgtatgtgtgtgagtgtgtgcgcaggcttgtgtctctgtgtgtatgtatgtatatgtgtgtgcatgtgtatctctgtatatgcatatacatgcaggtttatgcatatatttatgcatgtgtgtgcatgtttgtgaggtagtttgggtctgcatgtatgtgtatgtttatatgcatgagtatgcatgtttgtggtagtatgtctgcatgtatgtgtgtgcatgtttgtgtgcatgcatgtttgtacgtgtgtgcatgtttttgtgaggtagtgtgtgtgcatgttagtgtgtgtgcatgtgtgtatatgcatgtgtacatttgagtgtgaggtagtatgtttctgcatgttagtgtgtgcatgtatgtttatatgcatgtgtatatatgtgtgtgaggtaatgcatctgcatgtgtgtgcatgtatgcttatatgcatgtgtgagcatgtttgagatagtgtgtgcatgtctgtgtgtgcatgtgtttatatggatgtgtgtgtatgtttgtgagaggtagtatgtgcctgcatgtttgtgtgtgtgtgcaggtatgtttctatgcagatgtgtgcatgttggcatgagtgtgaggtagcgtgtgtctgcatgtttgtgtgtgcaggtatgcttatgtgcatatgtgtgtatgttggagtgtgaggtagtgtgtgtctgcacgttagtgtgtgcctgtgtgcatgtgagaggcagtaggcttaaaaggctcagagcactgaacgacatgcggtacgtgtattttgagcctgtgtctcatgtctctgcttgtctagagacgaccgtggtaggtgtcacttgccctgaccttgaaaccacccttgtgtggctttgtttttaaagctgagggaccactactgtgcacctgctgtttgtcaggcgtcttcctgagggtctgacatgcttgaataaccttagagatagctggaagtaggagtatttttctcatcttacagatgaggaaattgaagttcagagcgagaaagaacttgaccaagatcctgacgttgcccagggctgcctggcgtgcatcagtcccagccccgtgtcccagggcctccatccgggcccctctgctcccccgcccgctgtgacctcgctcccatcccacatcccccagtgagctggtgtgttctgttttgtttttccccaccataatcaaattgagaattccttagaaccatgcctgagagatttcatttcctctggctttgttctcttggagttaaatcttcacagtgttgtgtccacaaacagcaggtgacaccttctctttttcctcagaagcctcctgagctaagcagtcccagggctctgacctcacagccgggccgtgtggggctggctgccaaccagcattaggacacacttggcggccggtcgtctagaccattaaccctggggctgctggctgcccgggtcagactggagggggctggtgggaaggaccgagccagtctctacctaccccatccatgatgcaccaggtcctgacacattctttcttcttttcatcattgttttaaaagactcaggatgtgcagaaggcgatggacgagaggagatttcaagatgcggttcgactccgagggaggtgaggtgctttggagaaagctctgccctgtcaggaacacacacccctcaggcccagccactgcaaacgtgcttaggggttgtgcttattccatgtcactgtgaaaaatcagaaagtcaggcagtactcacagcaccgctcttgcagtagcaggccctggtgactggttagagagaaatcattttctaaatttgccattggtcctttttggtaaggtgatggttgtttaggagctaatgagattaaggcacaaggtgacttgtggccctttaacaacaaaccaaaacaaaaaaaggagtctccttctgttgcctaggctaaagtgcagtggtgccatctcagctccctgcaatctctgcctcccatgttcaagcaattctcatgtctcagcctcccaagtagctgcgactaccagctcgtaccagtgcatgtcaccacatccagctaatttttgtatttttagtacagacggggtttcaacatgttggccaggctggtctcaaattcctgacctcaaatgattcacccgcctcagcctcccaaagtgctgggattacaggcttgagccaccgcacgcatgtcttgcaagagaaagttatgaagtgtagaagcgtgcccttttctcttagtccatttccaccagacacggacagcaccgcgggtcgcggctaagggctctgccatgcacatggaaccctggggcctcctccttctgcccagatagtcgggcagacacattgagtgctggcagataagccaccttttctccacatgagccctgagttgtgtccggtattctcgactccggtccaacgacacccttttcctttaggagctttgcgggcaacctgaacacctacaagcgacttgccatcaagctgccggatgatcagatcccaaaggtaggtggccggcctcccgcgatgccccgacctctcctgcgggcctcccctcatggcctctgcctcagtgaatgaggccacctgttttcaggcctggcacggcatgagccactgccaaagtgtgcagcaaatggagctcacgtgtgcccgtgacccagcactcacctgccttctgttttgcagaccaattgcaacgtagctgtcatcaacgtgggggcacccgcggctgggatgaacgcagccgtacgctcagctgtgcgcgtgggcattgccgacggccacaggatgctcgccatctatgatggctttgacggcttcgccaagggccaggtgagtcacccaggatgccgtaggcaggcagacaccctggctgtgagcacagtggacgtggcggcgggggggtgccctccatggccctcataccttttcatgc

SEQ ID NO: 59595 - DNA, 1018 bp, Homo sapiens
atcatgttacttttcttttagttgccggtggcgggatacggtgagctgatgtatctcacacgtggctcaggatgagacacagaggccccgacaggcagggagaacgcagcccctctgctgctcttcatgagttgttaaccttggacttctgcttctcaccttgattcatccgggcatcgtgataaatgctgtctcatacgcctctcaaatctttaccggaatgcagcttgttgaaaagtacagaaagctatttttagcactttgcaacttgcctttcattgttcactttagctgtttcgttctgtgtttgcacattagatcaaagaaatcggctggacagatgtcgggggctggaccggccaaggaggctccattcttgggacaaaacggtaacttccaaatctcaactctatgacctgcttttaaggaagaaggaagagccgtgttctgggagagaatcgctgggtgccgacgccagttggattcctggaaaggcgtccctaagggaggggtgcaggcagttaccggtcctccctccagtggaactgcccgtgttccagggagctggggatgtgtcccagggcgtaagagagaagaggaggtaacttgtgaatgccttcctctaattcatatttccattcatttgaaaagccagctggcgagcctaaagcctccacttggaggtcataaagatgagtggtgtcacggagccgtggagatggcactctaagcaaaccctaaagcagcctggatagcaggtagcattggtgggaagcatagccctgagcagctgtgactcgaggctcagatttccacagccgaggaaaggacccaaggaattctagtctaaaaatctctttttcagacctacagtaagcctggcgtccctgcatccctggggacaatgggatttcctaatgtagatgaagcctgagtaattctcacctttgatcatgtcagaggtgcgaatattaatctctgtcatcactacacattacaatttcacatggaaggaagg

SEQ ID NO: 59596 - DNA, 3332 bp, Homo sapiens
gcctgtagtcccagctactcgggaggctgaggcacgagaatcacttgaacccgggaggcggagcttgcagtgagctgagattacgccactacactccagcctggtaacaaagtgagactccatcttggaaaaaaaaaattgttattaattataacttcttaattttattttttctaatggggcagtagagttctttttaggtcaaggtatgagctgaaatgctttattccattttctcatgaaaacactgttttgagatgagattcctggtcattctgccatctgccagccacaacggcatgagtgaaaaggcagacgtttaccgctccttaattaaaaccacagactggggaaggcggccgggtggggaccggcgtggcgtcctgcggaccgcgtggagtttggggtgtctgacatcgttctccacgtggctattttcagcgttctcccggggaagtacttggaagagatcgccacacagatgcgcacgcacagcatcaacgcgctgctgatcatcggtggattcgaggtacgttaccgtttctctcttgccggtcttgcaggtgtgagccgcgccctgtgttggctaaacattaagctacttgttggctactggccacgatccgagatgataggttcccagacccagcggccactggagaattgtagaacagcaggatagcaggtggtaagacgtggcctacgagtggcccagttccagtaaagcaacttaaccgagaagcaaaagcttgactccttaacccgggcctcatctattcagtgagctcttaatgtatttcaggcctgtggaagtaattctatctcttgagtccagagtccagtggctacttagagactaaggtagttatacctagaattttgtttaaaatcacatattggactgtagaccctaatattttttctattcatgaagattagtcccatggtaacctttccatttacttttagaaaaagtaaaaactggccgggcgcggtggctcacgcctgtaatctcagcactttgggaggccgaggcgggcagatcacctgaggtcaggagttcaagaccagcctgaccaacatggtgaaaccccgtctctactaaaatataaaaattagccgggtgtggtggcaggtgcctgtagtcccagctacccgggaggctgaggcaggagaatcgcttgaacccgggaggcggaggttgcagtgagacgagattgcaccacctcactccagcctgggccacaaagcgagactccgtctcaaaaaacaaaaacaaaaacaaagtaagaacctcagaaatgagactcttacccatgagaggtttagtcatctaaccgatcatgtctgtcctgcgccctttgtgcttacaacctgccgatccttgtctgtggtcttaaggcaactgtgtgttgatctcggagtgttttcgtgatgccccagtgtgctccctgcgtgctgtggtggaggtggcgctcccagcctctcccagcgagaccctctcctccccagcttccctctcgccccacaactcccacgcttgtctgacaggcctacctgggactcctggagctgtcagccgcccgggagaagcacgaggagttctgtgtccccatggtcatggttcccgctactgtgtccaacaatgtgccgggttccgatttcagcatcggggcagacaccgccctgaacactatcaccgacgtaagtccgtgtgcgccctgccaggcgggcgccggctgacgctaaccccggggccccggccctttttatctaccagtgcgctagaaatagccttttacaaataccctgaatgagagcttctcgttctttttttcccccagaaaagtatgttttaagactctgaaaatttttgatctcactcccagagagttttaccacctcttcttctgtgtggccaccagggggacgtagtgtggccgagactccaggggtgcccgtgagcacccgaggcgctgaggagggctgggtcgcagtctcctgtgattgtaccagcattaaaaatcgctgtgtgtgtgtgtgtgtgtgtgtgtgtgtgctgagcctaaattttctttgagcctccaatacccattatgatgaacccctgccttgatgctgagggtagaaattgaactgaatattttataattttattcattgccctgaatgcaccattgcatttgttatctctctggtcttggctgttgacctcattttcccctttgtaaactggggatgttaaattacctctaaggcaataattggtgctactttagtttttttgccaagagacaataataaaacatagaaatatattcttctttttttctttgtgggacggggtcttactctgtcacccaggcttgagtgcggtggtgtgatctcagctcactgcagcctcgacctcccgggctcaggtgatcctctcacctcagcctcccgagtacctgggaccacaggcatgtgccaccattcccggctaaaagaaatatacacctattcccatgtttgtgtgtcacgcttggtaattgatgtgggagtttgaagatccgtacctaacacagaaagcatttcatttttttaaaatttgatgtctaaaagtttgtagtaattctcaagttttaatttttcttgtgagacttggttctcatgaatatttttcaaagatattttttcttgtaaaaccttggcatgaaacttatttctagcactggtaaataaaaaaacaagcttttaacatacagctcatatggtaagtaatgcttagcactcgtttcttgcttttctgagcgttttaaactttcttcactttctttgcgaaggaaacctgcccaggttttcctgtgttcactggctttgggggcaactttcaccttatttttggcagttgctaatctctgacctagacgttgcttctgttctcctggtggtgggtgtcacggctttgctgctgcggggctggcccggctctggacctaccttcgcactgtgaatgtgaagatgagcctctttcacagactggattccgtcattgctttcactgctctttcgcctgctttagctagatttttgggtctgtgaaagttgggtgtgcaatgggagggactgaagcttcttttttccctaattgttacctaattggaactcgcccagagggaacgggtggagaatttgagagcggtcgctgcagttagctgagtttctttttaattccagggtcctctgctataaataactgttttttttttttttttttcagattgtaaatatgtaacaaatgcatagggtcaaatttatgaaaaccaaaatacgtggggcaaaaacacccc

SEQ ID NO: 59597 - DNA, 6751 bp, Homo sapiens
tatgttttgctgggcagggtctcccccgtattgaagcttcccttcccttttttggagactgaaggaaggaaaagaggagtgatagggaagaggggagagaggatttgcagcattgtggctgtccccacagatttcaatgtggagttaagctgccgagacccccacctgccctcctgtgtgcctcaggcccctcctggtcccaggtcacccacaccgtctggcttccagcgagcgcttctcggagaaacagccggctccccacagccagtcttggtcagtcctgagctcgggtattccacagtaaagtgagcgacatcacctgtctgaaaagcataaggagactcccacgtggcggtgctgaggggccacatcctgggcaccaggccagccagtgccccgacatgagtgttgctggctgggaagcagctggcatttggattgaagtcctgcaaaaactgccatggccagagcctgccaggcagagcctgcacagagcggcccaagagctgggcacgtgctgggcctgggtggaggtggaggctgtgccatggggtgcgggggaccctgctcacagctcaccttgtggtcacccagcactgaccccgttcacagctcgccttgtggtcacccagcactgacccacccgccccaccctcctatccaccgtgctgtgaactcacctgccacgggtctacacccactgtccgaagccctcggcccacacgggctccaggccttgggatgctttgcgttgcaccagggctgcagagcccagatcgctcactgtccgactctcccagggaggtgtgggcgccgccctgtgtcccaccagtagcatttctgcagcagatgtggggatattcacagtaagacggacacgtccaagaccataaatagttggttttgccaccacgtggatgtcaaaaacaccttgctgtgtggggccacttggaggtgggaacagtgggcgtgtggacctgtcctgctgtgactttggttaacaccctgaggtggagtctgaaaaaccccggtgtacacgggctcaagaaccgctcccctttctgataccggagcgcatttcccagtggaaccccagagcagcaactcaggttcttgctcgcctgtgcggctttgtgtgcggcttgccgagggcagaaacggcagcttccgcccggagagcagagatgtggcgtggggctgagtgtggcccaccggtaatccagctgcatgcccccttccctgcctgcacctgggcgccgcctctgcacgatgaaggcgggcatttggtgtggtccttacagccgtgtgccccatcccactgatccttgcctgcctgcagaaagctacaggattggctttgcctttaagtgtcctgactgccctggcctcccttacctaccatgacacgccgagagctgagctgtcccactcgtgactaactcgccgttgcctgcaacctgctccgttgcctgcctcacaccaccccgctgtgctgcctgcaggcaccccctttcatgaggacctgggctgtgcccaggcggccccctgtgttgctggggcctgtgctgctctcgcacggcctccagagcctccctcggccccttgacccgcatgaaccggcttcccctggtgactcagtcccctcccgtcccttcctggacctcagcacaggccctggggctggcaggtgagcacccggcacccccgctaaccgcttggccctgctgcttcaggcttacaagagtgcgtgcgacatggccgaggcacgaggccgccaccaggagctttgcatccccctgtgtgtggtgccggccacgattagcaacaatgtcccaggcacagaaataagcctgggctccgacactggcctgaatgctgttgttgaggtaagagaaccccgtttcctctcattgcttttccgtcatttattttagcaacttgtttcttctgtgctaaggatgagccggatttattcttcttcttttctcccctttgttagcttggctttatgtcacactggccagaacagggtaaaatttttttagcttctctgccttagggagagcctgtctttattgattaaaagtgagatgatatatccagtccttgggatcgtgtttctatcccacctagactaggggagccgcaggtaccattgctctggaggctgcctctcctgcccacgctgagtagtgaggctgcagggccagctgtgggagcctgcaggaaggggtgtaaatgcccggtaagtacgagctccaggacagagccgtacccactgggggccgctgcctggaaaacagccttcctggtgagacaagaggctctttagagagccgaaatcacgccctcctgggcaggcggtttcaccaacatgtgccttgggaggggtggattctgccagtcgtgggtgtggtgctgacacccacatggtggcccctccggtccctgatactctgacctacctctatggtcataagctggacatgaagacctatggtagttccacaggcctttgctgcagagacggtcctcactcagctgcagacaggacggtggccaccgtgacatgtggggtcacgtccgtgacttggccacctggtgcgagggacccacagcaaagcagaactgctggccggggtaggcctgcatcgcgtgcggggacagcagccactggcctttaccttacatcttgacgtccaagccagctccggagtttgcagtgaaaactcccagtcctgctggagactccttagttcagcttagcacagaacctcggaagacagcagttctattccgggtacttccttcagagctgagttacagtgcagggaagggagcagaggagccatgaggtcggctgcagcttcctgtgagtccgagcctcagcctcccactcgagctgaggggcgtgtcctggccatctctctcctaggcttctccctgtgttccccagtgctgtggtggtcttgcagaggctggccctggctcattcccaggacttccttgggccccgcacttgacccctgttgggtgaatgccattagggtccggccatcgctggcttcactctcctttagcaccttgtagatgtccatgcacacttccaccctcgcgccccacacgcgacgcagccctaccctggccagcagctgtgctttgctgcgggttccatgctgtagcagggacaggacccccaccccctgtcccgtctggccaccgacttcagcagaggctcggctgccgtgagggataccagtcatgggaaaactggcctccctgcagattcacagagcaaggtggttctcacagagaagtcagtggcttttttctacgttaatgctgtagcaaacgccaccttttctttcaccaccaatttatatttcttaacacccatggagcaaagtgtggtgatgtttgaactgtagcctggggctctcgctcccatgggactcctcggggaatttctcagcagcaggatcgcctctgcgtccttgcagggggtggcgtctgctgggggcacatcccatcgtgcagggggaacggctgaggtcacaggctttgcctgacaagtgccactcacagctgctgtccacgtgccagccctgggacacagccctctgccatccttccacccactcggaggccagggaggcacctccgtgccacactgcaggcaggcagggccgcgcttgggatctgccgccttcttgtcagtgctgctttgactaattgcctgaggcacggccggagtgacttgctatttttagaagctaattcaggcttcagatgccatctaggtaatgaggagagagttcaggaaagctgtatctaagctccagcaaaggcggcctcttccgtaccagctgtcgctgcgtttacactgagacgagcacacagtcgggggcgtggctcaggtgtcagggctgcgctgttccacagccccctggggcagcctggcgggaccagaactcagacacgcctgggcacaaatcagcctcttgggagagctgctttgcccgcagaattcttttgccattaagcggttgatgtcattctttgaatgagtgacagtaattccccacctcagggtgggctgcgggggagattcagttggaaaagtaacccatgaggttttgtgcctctgggggtcctgaggccccacccgtgcctgggattctctaagacaaaggagaagtcttaaagccttacagcgtcttaagtcttagatcacatttagagagacccggtacaggtggaacagtgcaaccctcagaattctgcactggcccttcaagaaggcagttgtgggctctttggacccttgacggggatctgtcctctgtcctcctaagcacaaagatgggaattcttcccattgcctgtttctctccccatctcggcttctacacaatgcaaagtggcccgctaactagagtccgtgttcagttttgaatacatcaaccaattattttgggaagaaaagaatctgccaaagaaactggaaatacagtttggaatcatttaatcaagcctgcatttattaatcaaagtgcacttttagatttcatccgaagtgctcaagtgaacatttcccaatgggtgttaaacttgggtgcacagactctcacgtggctcctagtctcaagtccacacccccacttcatgctcttactcttggctgagtcccatggaggcccattagggaatcctgcaggatcagccgttgaccaggacggacggacggctggctggggaataccatgcttatgtcattcagagacaagcatttcttgagcgcctgctgtgggggctcggccgggtgctgctgatggtgcactggtgtaagcccagcccacagttcctgtcctcatggaatttgcagcctagtgaggaagatcctcccaagtcaaataaccacaaggtaactgcagggagagacaccgggataatttctgtgaagagaggacatggggtggctccgagagcccctgacagagggaactttgtggtcctagaaaccaggtggtgttttcctgaggaaatgacattttcctctggatcagagctgaggaaggtgcctctgtgtgtcccgtggccgctgtgacactgaccacacacctggggctggaaaataatactctctcccacagctctggagcgcaggagccatgggctgaggccagaatgtttgctccaggagcgtccctcgtggcccgttcaggtgcccagagttgcgggccttgcacgccttgtacgccttgttccctggcgcctcctccttccatgtgggtgtgcagcatcccgctccagggccttcagcctctgcgcccctcatctgctgatgcaggtgatggcatttaaggcccacctgggtactcctaggattcacctttatcaccgcatgagggagcattcccaggttccagggattagggataggactgggattcctttgggggctgctctcccgcccaccactgtgccggaatgtgatgcacacagcggccagcatatccaaaggccccaggaggacctggggtggctggaacaggacctggtgccgggagcaggcggggccggggattcccgacaaaggcttgatgtgtacttgaagtgagcaaagggttttgaataaaccaagaactggatcagatttatgttttttatagatggggtcctttctgtgtgaacggattggagggtcccggggtgggagctgaggcccaggaagagggcgttgcagccggactgatgtatgggtgggaaggcggccgatgcatttctttgccatttttctccccgccgagcttgggtcctcatggagggcggatggcagacatttcactctgggatccgatgcctgtgcatctggaagacttccccaggtgcctgggtctaagaaccaccatctgcctttgagtagagtttccataaatgtaacattcgccaatggatggaagatggccgcacctctaaaatcacagggagcttttcagaagaaaatagaatagcacagcggttctcacggactaagctggcaggggacagtcccctaacatctcagctaacacctaacggtgtctgtgtccggtgaaagcggcttcagcagggacagtcacagagcagcgtggagtgagctggcttgtggggtcgtcttttccgtccccttctatggggcctgggagaagggagcggcagatggccaggcccccaaaacgggacatcgaggtcacctccaggtggctgccatggtggggttgcgggggaccacgttcacacccactccgagggcacatcctggctgctgcacacccttcacctctgcgggatgctgggaccgcatgtttgggcgcggtgggggggccttgctgcactcactcttgggggagctctgggatggtgggcgcgccccgggcctgggctggagtgactgatcgcttctctgtgaccagacctgcgaccgcatcaagcagtccgccagcggaaccaagcggcgcgtgttcatcatcgagaccatgggcggctactgtggctacctggccaacatgggggggctcgcggccggagctgatgccgcatacattttcgaagagcccttcgacatcagggatctgcaggtatgtgacggggctggcctcagggcccgtccccttgggatccactgggtgctgcggagtgaatcatcgtgtctagggtggtttgctttccaaggggcatggagatggagatgctacagaacatgccacgc

SEQ ID NO: 59598 - DNA, 1061 bp, Homo sapiens
aagactgcagtgggtgtctgaacctggggatagtacccgccccctgtatacacgaggttgcttccatctgataaccaaggtggctactgagtgactcgggcaggaggcacagacagcatggagatgcagggcacagggatgattgacgttctgggtgggacagcaagagagcacgagatttcatcacgctactcagaatggtgtgcaatttaaaacttacatatttatttctggaattttccatttaatatttgtgggcctcagttgaccactggaccatgggtaacaaactgcagaaagcaaaaccgtgaactggagggactggtgttgatgtagaatcaccatagggttgggggatgcgggagtccagcctcccagggccatctccccaagcagggagccacgtgcccactgcacgctaaacaaagtgactccttctcgctcgtttcagaaatgagagctgcagtgaaaactacaccaccgacttcatttaccagctgtattcagaagagggcaaaggcgtgtttgactgcaggaagaacgtgctgggtcacatgcagcaggtaggcccgagactgcatgaggggccacaaagcccctgtcatgtgacttttaaaagattagtgtcttattttagccattgtggggaaaaatgtataagtaaattccaagatgataaaaaacatctgaactttttgagacagagtcttgctctgttgcccaggctggagtgcagtggtacaagcttggctcactgcaacctccaccttccaggttcaagtgattctcctgcatcagcctcccgaggagatggcagtataggcacccaccaccacacccagctaatttttgtatttttagtagagatggggtttcaccacgttggccaggctggtctcaaactcctgacctcagatgattcacccacctcagcctcccaaagtggtgggaatacaggcctgagccactgtgcccagccaaaacatctgaacttttaagtgatgccaaacatcaccagctttaggattcttttgttggtgaggtttgagtaatggggattt

SEQ ID NO: 59599 - DNA, 1265 bp, Homo sapiens
gtgttatgagctgagcctgggacacagggtccaggcctcctaacttgcacacactccttcctcaccacctcctattcttatacttttaagccagagcccatgaatcccctgcaatgatgatgaaatagtaggcatatgtgtgatcttcttaaagaatccacaacggttatcagattaaagctgtgacccatccccagctcagatgagttcatgaaatcctgatttaagattttaaaataatgaagattgttagttgacttgttcggtttattaaaatcctcatcttactgagcggggggaacacttgatactttttcttaacaggccaagttcaggctacgggaatcacaggttttgttctgttccaactataaggacctagaaataaaaacatgaattctgcaaaatagaaattgtcatttctatttaacagcaaagtgttactgtataactggtatttcatataactctaaccaccaacagggtggggcaccctctccatttgatagaaactttggaaccaaaatctctgccagagctatggagtggatcactgcaaaactcaaggaggcccggggcagaggtaaggggtctggggagggaggccacagcctcgtgatgcaggccgtcctgccttggtgaaaatgctgtcctatcggggagaagtagggtgctggttccttcttcagttcagtactgagctgcacgtgatgttttactcctgatctctgagtgttgctatttaaccaaccttggattcctgggataagatcagcttgggtatgacatgttctcttttatcactgctagatgcagtctgcagttcttttgtgcaggctttttgctctagagatcctgaacgttggccagcaatttcccctcacagtttaagtggggccttctattttttgaatgtttgctaggacaacctccttgtgactatccatcaaaacttccagttttgaggaagatctgactgctgaatgaattgttcatgtttgtagaactgcatgttcgtagaactgtgcatgttcttccttaaatcagttctgtaagttacatattctaagaaatctttaaactgaagtttcaagaaacatgacttttttataatactcttgttaatggctccaacatggctgttccccactcattcctgagtggctctttgtgccagcatctttctcacccccacccccctcagctttcttaatcagtcatagcagatgtgtgcttttattccggcaaaccactatcactgccag

SEQ ID NO: 59600 - DNA, 1067 bp, Homo sapiens
gaaaaatgacagtctataaaaaccagtgatgtgaatagtttcaatgggtttgtctttttgaagaactgactttggctttgattctttctacagcgattttcttttgctaatttagctatggatgctttttgcctctcagtgtgtgtatgtgtgagcataaattagtgtcctgtaatttaagctaatttccctattccactatttagtgaaaaattctctccactgggaggaaaaaacaaaagctgctttccaggaagccctcggggcagtcccacaggagcagagctgcacgaggccaggtgctggccccactgcgcggctgttctcagtctcactgggcttccaggccgggttcagcatggttctgaggaatctcagttctcatctcgccccgtgattctgctcccccacctgcccatgttgacagggtgttattaatcttttttaaaatcttttataggaaaaaaatttaccaccgatgattccatttgtgtgctgggaataagcaaaagaaacgttatttttcaacctgtggcagagctgaagaagcaaacggattttgagtaagttggctgggttccctgaggcaataagaccccaatgtgagtacgggacaggggaatggccattgctgttgctgtcggcaactcattcaggggtttgaggaactggcttttctgaagctcagttaaaaaaatactaggtcttggctgggcgcggtggctcatgcctataatcccagcactgtgggaggccgagacaggtggatcacaaggtcaagagatcgagaccaacctggctcatatggtgaaaccccatctctactaaaaatacaaaaatgagccaggcatggtgatgcacacctgtagtcccagctactcaggaggctgaggcaggagaaatcgcttgaacccgggaggcagaggttgcagtgagctgagattgcaccactgtactcaagcctggcgacagagcgagactccaccactgggtcttcgggaataattttaaacaatggtttcatttgatcctgaaattggctttatcatctagttgattcagccgac

SEQ ID NO: 59601 - DNA, 1621 bp, Homo sapiens
attcccaaagaacagtggtggctcaagctacggcccctcatgaaaatcctggccaagtacaaggccagctatgacgtgtcggactcaggccagctggaacatgtgcagccctggagtgtctgacccagtcccgcctgcatgtgcctgcagccaccgtggactgtctgtttttgtaacacttaagttattttatcagcactttatgcacgtattattgacattaatacctaatcggcgagtgcccatctgccccacctgctccagtgcgtgctgtctgtggagtgtgtctcatgctttcagatgtgcatatgagcagaattaattaaacatttgcctatgactccaacagtcctctgttttagttttttaagtaggagattagtacctcaatctatgggtggctactaaaggttttctcagttttgtgggcaaagattagcaaaatatttttatagggatcactgaactatgcacacgtcatacaaggagaacaaagccaggagttcacacaggccaaggggaaggccacgtttactcaccattccatatctgccatgtgtcagtttccatccacagcagcaggccgggaccctgggcctcgaccccaggctcctgctctcctttgaaagtaaaacatgaatcttagttacttgtcctcttgattgcaatcctagctgcatgttaaaaccaccaaggggtgggtggggcggaggtgggttcaaaaatctgatagccagcttctcctccaggccaagccacagtcctcgctgggacctaggttggaactctccggaagactcctgccagagtagacacggctgctgggatgacagccctgctgccctggtgggcccccctcctgtagggacagcgtttctgcctcttagctctagtctgcaagagagaacagctgcgcctcagaaatgggggcagagagctgggtggagggagaggagaggccaaaaacaaactctgtttgggaaatcagagtccgacagccaagaaagagctagcgcggaggctttcctttctggctctgtaacgatgaagcaagcgcttactcaccccaacccacttgcttctcaggacggtttccatgcagccgccgcggtgaactcccgtctggtggacactcccccagggcctcggtgtgatggagtttcctgaatcagcgcaggcagacgtgggacacccttgtgcaccttttcattttacttctgtttttaaataaaggccctaaatgctgcttaaaataatgactcaagcagaggttaagtcagagttgccctttatttttagattcttaaatattctagaatgaggtaaaacgagcctgccagtacaaagtgaaaattctacatggtgcatctttggcgcttcatgcatgattatttcaatgaacctcttcctggtcactcttaagatagatctgagtttttgactcgccagtcaagggctttggcgacactcaatgacataatattcttggaaaaagcagtagcatttctgacttttcatattcagctcggaggtgtattgtctcgggctcctgtgcagtcgagcgccacggctgctcattggatgatccaggatgggtccttggcaattttcgggttctcgg

SEQ ID NO: 59602 - DNA, 1070 bp, Homo sapiens
tctggatttttctcttttctcttggaaacttgattttcagaaacctgtgcccagcagctctggtggagatgcccacgttccccatggctcccaggtcattaggaagctggtcatggtaagaaccacagcccatccgggttgccagcgggtgggtgcttccctgcatggctgtgtctgccactgatgttcgaatgttcctccgtccgcctgtctgtggggctggcgtgtccctagagttgcgagttcagtgcatcctttgtcactgccaccctgagccttttctctctcagacagtactgagtgaaggccctggtgggggtgtgtcctcctgtgccgaggagggccctggtatggggtgcgtcttccctgtgcccaggaagagggctactgctctgggtggtctcctcccgggcaactcacccttctttgaacgtagctcccgagctgagtcgatgccagtggagcggtctgacagatcctttccgcgactcagcctggtgctgatgctgtttggtttggttccttgtggagtagagtgatttaacacattcctatgatataatatgatatgaaatataaatatgtaactgtgatataaacggcgtagaatgaaatgtttttaattgaacagtatacgttaaggcatcacgtcaagattggaggacttcatgtcagttttacagtgagaaattgtgtggagtgacggaactgcagtgccttgctctcgcgccccagcacctggctgcagagtgtcacggagatgggacccctgagatggctccagtcccagtgccgtgggcagtgcgtgggagcacagccgcctctgacccctgagtgggtccagtcccagtgccgtgggcggtgcatggcagcacagccgcctctgaccataccgtgtccctcaggaacccaccttcaagccctggcagatgaagactcacttcctgatgcccttcccggtgaattacgtgggtgaatgcatccgaactgtcccctacacggacccagatcatgccaggtaggagggtgtaggtcgggacctctcaggcctgagccttacggaagagctt

SEQ ID NO: 59603 - DNA, 1045 bp, Homo sapiens
ggagaaactggggtctccctggggaagggggcacatgaactctcgagggcgaaggccagagtgcacctgcttatgaccttcgaagtgtagagaggttggcaaagccgcagttattgaattaatggaagcaacttgtaactcaagatgcacgattttaaaaatgattcagtaaagactgacttgtaatcggggcgatgcttctctgctgtgtcaggctgggctgcggccttcttgactaccgggagcaggctcagcagatagaattgaagaccggagggatgagtgcttctccccacgtgctccccgacgactcacacatggacacctacgagcaggtagcctggtaccgtcagacgactgctgcggtgggaagcttttctccagtgtctgtcactgttcgattcggccctaattcctttcttctgtgttttctttggttcagggtgtgcttttctcctctctctgcctggatcgaaacctgccagacatgatgcagctatggagtgaaatatttaacaagtaactttatttgcaagagttgtccattcttggggtgtactagagatctttgtttgaagtactttaaaggagacagttttactcgtgtgtgttgttgttttccaagtctgacttttacttgtagttcatatggacttataaaatttctttggttgttaaagtactctgaaaacttaatcaactttccatgatactgaagggacgtgaggaatgggtctccaggaattttttcttctcctttttccatagcccgtgctttgaagaagaggagcacttcaaggtgctggtgaagatgaccgcccaggagctcgccaatggaattcctgactctgggcacctgtacgcatccatcagggcaggccggaccctcacgcccgcaggggacctgcaggagaccttcagcgggatggatcaggtgggaagcttggaaggaacctctattactccggtttagccacatattccagagttactaatttctttgggaatacattaatttatgtcccagaaatgctaactttctaac

SEQ ID NO: 59604 - DNA, 1031 bp, Homo sapiens
gcgcttgtcatgtttgtatctcatttattttcatgtgtgtgtgtgtgtgggcgcatgtgagtggaactcgaggctgacatctctctgatctgttaaccctggcagtttttgtccgtgaatctcattaagtgtttgctaagagtgagaataaatcagtcatccttccgcaccttggtccctccgctggtctagggtgctctgctaggtagggacatatgaagctgaatgtccagccctccccttgaggtcaggatgggtgggtgggggacaccaggagccttgtttggggccctggggcagccttctgttgtggggccagagggtggcagggcctgttggggaagatgagcagcgctgaggacgggtgcgatgtgggcccaggggtctcgggggcacctggtcagagttccctctggttgacggggagaggttgggtaactggaactcgcagttatgagaccagaagttcgtggttccatccttccgttcccattccttggagagcacgggttgctttactattgaagacagttccagtttttagtcatgaaaatatgattgggaaatttatataaactctagtataagtcttaaacctccattcttgaaaaaacaataaatagcattgtttttaaatattacaagtggttagaattttactggcagcaataaaaattaaatcccttttgtttttctagctggagatatccctgttcagtactgcgcccagcccaccaatggcatggtgtatttccgggccttctccagcctgaacacactccccgaggagctgaggccctatgtgcccctcttctgcagcgtcctcaccaagtacgagtcgcaacatacccttgtgtgtcttattaatgtctgctttgtgtgcatatctgtattctaatgcatcagtaggaattaccttcagtgaatcacaacttacaatgttagtgtgtaagtatggtgtacaatatattggtttagaattttttatgaaagtaacattttcttactatattacattgaaatagttatga

SEQ ID NO: 59605 - DNA, 1023 bp, Homo sapiens
ctgttttgatatttatcctgccataactcaaaagtttaaattttatttttaaaaaatgatgtaaaaatgacatggatgtacacagaaccagttacttgagaacactgctttaatgagcttttcagtggaggggctggagtttaaggcgcttcgttctgatctttaaatcaagcatattacgagggcatgatgaacgtgcccggattccagtgcatcatttctggttttgtcttctagatataatggctacacgagggaggcctactttagtgtcggcctccaagggattgcggagaaagacattgagaccgtcagaagcctcatagacagaacgattgatgaagtagttgagtgagtgtagcttgtttgtaacaatctgctttcgttcctcattcctgtgtgctttttgggagaagctgagcctgatccattgtttcggccttccttctctgtcatataacatgcttttgttcatatttagttgtttaaatattatctctgctaccttctgttactaaaactcttcaacatcttaggtttttgttttgttttgagacagggtctcgctttgtcacccagcctgctgtgcagtggcgtgatctcagctcactgcattttcctcccctaccaggctcaggtgatccttccacctcagcctcccaagtagctggaactagggtgcacaccaccatgcccagctaatttttgtgtagtagagatgggctttctctgtgttgcccaagctggtcttaaatgcctggcctcaagcagtcctcctgccttggcctcccaaagtgctgggattacaagcatgagccattgtgtctggcccatctttgttcttcattgtattctttaggaaaggatttgaagatgatcgaattgaggctttacttcataaaattgaaatacagatgaaacatcagtctaccagctttgggctgatgctgacatcagtaagtgatctctcaacaattttgtttttgttttataatagacattttgtcttgttactagcttaac

SEQ ID NO: 59606 - DNA, 1077 bp, Homo sapiens
aggaatagcaccatgccctgtgaatgaacgttgaatttataaattaggcacagcgagaggttaacaacaataactaataataaaatagaacaattataacaatatactgtaataagttacatgaattttggtctctcgaagtaccgtgatatttttggaccttggttgagtaagggtgactgaaaccgaaaggcgagaccttgggtaaggggcactcctgtgctgtgtttcagtgaaacagacagcacttgatctcacatcttttaaactaaaacagactaattatattcccttaaaattttaggttcttcacgtacggtaattttccattagaacagcatctgaaacaaattcacgaggaagcactgagcaaattccagaaaattgaaccaagcaccgtggtgccagctcagacaccctgggacaagcctgtgagtgccccaccgtgtttgtgtccttcctggtaaatatgttgacatgaggacttggactgggtattgatgatgggatttcagatgctgtcatgtttggtacagagtatgggagagcttttcaagctgaaagaatggtaatttgtttgaaaggaaagttaacttagtggaaagcctgtttcgctccatttcgtgtatccagataacctagagtagttgacaaccgtcagacactgtgcctactcacaacgtcacgtcattttacagagggaattccagataacatgtggcccggattcatttgctacagatccctctaaacaaacaaccatcagcgttagcttcctcttaccggagtaagtatatgctgtcaaagctcatacaagacaaaaacatgaggaaaatgttcctattagaaggttcggaagtgagttctacaattgaatgttaattaatatacggttaggattcaggggttaagtggattttaggaatagagaacaaaatgtcgaagtttttaataacatccaaaatggtttttgaggaaaatcgtttttgatagccctccggaagaaaagtaatttacttattgtatttcaaagctttattcctacagagaaaagactgcctcagaccagcaggtgct

SEQ ID NO: 59607 - DNA, 2046 bp, Homo sapiens
gctcacccatgatgacacaggagccaggtatttacacctggccagagaagacacgaataatctgttcaggtgtgtggtgcattgtaagaacatggtcttgaatgtttttatttaaatcaggaatgtccattcttttggcttccctgtgccacaatggaagaagaacaactgtcttaggccacgcataaaatacactaacactaaggacagctgatgagctaaaaataataaataaaggacccctcaatgttttaagaaagtgtatgaatttgtgttgggctgcatttcaagccatcctgagcatgcgggctgcaggctgcgggttggacaagcttgatttaaaacatggctatacattacgtggtttaaaatatcatctcactagtatttttattgacagagcatcttgaaaaataaggaaaagtttacactgacttataatctcatcaaaatacaattttacagtctgagtcaatgatttacattatagttggaaaaccctgtgctggaggattgtggtgtcagaatgatgatttctagtagcctgaggtgatgatgcatctgggaactgtgtccgcagcactaagctgaaccttttgcgttctggtcattctccttccctagcgtgcagttccgtactactcccatggacagtactggtgttcctcacattcttgagcataccgtcctttgtgggtctcagaaatatccgtgcagagaccctttcttcaaaatgttgaaccggtccctctccacgttcatgaacgccttcacaggtaagaccagcatcctgaacagaaactgcttttgggtttgccaggcacacccactggaattcagttagtttctgagaaggaatgaggggagtgggcaattcatgttctagaaaaatttttacctctctctagttgaaggacattagaaatttaatccttcaggaaagccacatggtagcgagattgtaaaaactagcgttttaagaaaacatatgtgaacttttcccagaaaagttcaaaacaattttctcttggagatatcgctacaatgccagagttactactaatgttgatgtttgacttttagtaagactgacgatagtggatagggtgacgatgaacagtgcattctgtgggggagtgacattgaagagcgggttaaatccatgctgttacagaatgaggtcatctttgtagatgtatgaaagtctctggagaaacttgagagagtttagatattcgctgaagaaagccctggtgcccgtcgagtgcagatcctgagacgggatgggaaagccggcacttggggttatgagctgggacagctgctgaggccagggaccagagcatggggccactgccccatcccaagaatagctacagcttactgtcctaggacaaagggggaatgagtcttgagagtcaataattttagtagaaatctgttatattttacaatttcacttttcatttgtacccagctagtgattatactctgtatccattttccacacaaaatcccaaggactttcagaatctcctctcggtgtatttggatgccacctttttcccatgtttacgcgagctggatttctggtatgtcatgaatgattaactagttgatacagactttagtatttgagtcactatcagcttataatgatttgtcctcaggcaggaaggatggcggctggaacatgagaatccgagcgacccccagacgcccttggtctttaaaggagtcgtctttaatgagatgaagggagcgtttgtaagttttcttccttttttatgttgtgttcagcttacctttcccatgtacaatatcatgatatagacacatctggaagattttatttaatattctcattataggtgatacattcttgaattagctggggtcagtgctgtgagcagaagtcggggtagcagggccaggctgctgttcttcccagcaggtctcagaccatgtctggggacccctggtatgtgatctgcagcaagtctgtgagataaaagctattttcataccactaccaagacagtgtct

SEQ ID NO: 59608 - DNA, 1044 bp, Homo sapiens
cttttccaaagttattccactttgtactccctgtagcagtgtatgagagttcccggtaatattaggctttttaagttttcagcaattcggtaggcatgtaatgggatttaactgtagtgtgaatttcttggtatactgtgaaggcttttgaggattctgtgaaggaaagaagcccttttgtttaagagttgtctcttaaacaaggggaatttaaactgtaattgtattatagttatttgtgaacaagtgtaaagaaaaggtttccaacattgaagctttagttaagataaagatcattaaaatggaaaggaccttaccagaaatcagttttctggaatgtgcaagactttggaagatgcaatatttaatttttctttaataatctttattacatgagagtattttcactatgtggctgaataatgttagccagatacttttcctgcaactcatctaacttagatgacttttaatctagacatgcacaccacagagcgtggcgatggaacagtaaccgggcttgtgagagggctctgcagtataaactaggagacaagatccatggattcaccgtaaaccaggtatgggtcgtcctcggcacctccttataaatccacatacattgcaggtgcggcttctggcctatgtacggagcccttcagggcggagactagcgtttttgtccttgtgtcccaaggccctggcccagctcctgctgtgtggcagctactcggctgaacagagcttgtgagtgaaatgagccccagtcccttcctggaatcccgcaaagcctggttcttgtgagattttagagagtaacacttccagctgggtctctgtaatcagacacactagcgtttctgcagccaaacctgatgtttcactgagcatgagcatgaagactcactgccctgatctgtttagtcaggttttgccatcaaatagcttgctctaaacgtccgcagaacctttcagttttctgagccattcgggtttcagaatgataaagaagcaattgtggacctgtacttacttgggtctgta

SEQ ID NO: 59609 - DNA, 1075 bp, Homo sapiens
actagtgatgtcgagaaactcaccttcagcaagtgtgaaactcgtatgtgctctaagggacctgaggaaatgaacatttcttcaaataaaccataactcaacggatcagaatgatccattagcctgatttttgcctgcttgttgcatatttaggaagcagagctcaacctcagggaaaacaggtcgtgttaggggctgctgtaagaaatcatgtcgaatgtatttccccaggttggtgtttatggtgtagactcccgctccacatgtaatttaaaggttgatgagatttatattgggaatgacaaggcaaggtactggatcatctgaaatcattaaagggatgttggtgtgggctcactgacttctgtttatggagacaaggaataaggaaacaagctcatattttatataaagaatttcacaagccaatgggaacaattcagtaatgcttctttagccaaggcgctatgacttgaatacccggctctattaagcttataagaaatcaaagttcaggagagaagttagagctttgctgcaccacacaactctggaagctcctggaatattttcttagaagaaggagaaggaagaggaggaagaggcaaagcaaaactaaagtacagtcggtagcctttgcagtgcaggagcccacagttgtgatgtgcagatctggcttctccaggggcggggctcaggcacttatgaatgaattggcttagaagcctctactgtgaggttctgggtctgtttatcaaacccatgccggaaacgtcggagttgttaatagctttggagtgagacataccagggttcaaaccttaattacatcagctgctagctgggtaaccttggcaagttacctaaactaagctgggtaaccttggcaagttgtctaaatgaagctgacctctgtcaacctaaataacaaagaaggaaactatctaaaggacaatggtgtttattcgggcgtaggcattaagatgggcatgtgtgtgccatggtaaactaattgcttatccagagaagtaaaaagagataattttttttaagaaaatgaggattgcagaattgt

SEQ ID NO: 59610 - DNA, 1069 bp, Homo sapiens
tgttgaatgagtcaccatcgccacacagctgcttgttccagagcagctatggtggggacattgtctaggatcccaggaaaagtgaaaacattgaccggaatgtttccagcacaatgaatgtgataacagagaatgaataagtggaacagctccaacacagccaagaagatgttgctttatgagagctgactttccccagagcagtgcgctcccatcacaaggaggattaattcatacatttcaaggcctaaatgacagacgataaatgtgtgtaattatgtaagtgagcccactgtgttagtatgcaaaggtgcccacttttcctgcatcagatattgaccctcttccatgtcaaaattcagagagtgacagctgccaatctcaccccagcatcctcacctgctaaccaggtatctgtactcactcagcgtgcctgcttggcgaatctcagctgagtcagttacaacaggtcccctttcagacaggtgatgattagaaggtttgtgactcaaagagcatgacgtgttccctttcctctgcagcaggaagatactccctgatatcgtagcagtgactcagcctgccaagacaatccatttcattcttgtaccattcttgcataaatcacagtgcagaaagcttggcaagataatttttaaattttaaactcgaccaggagaactgttgagaaataagacttcatattgaagtacgtttcctctcctcggaagctttcaagaggcgatgctgggtgaagggttactccaaggtaaataaatggtactgtacttggtagtaaacaggagctgagtgctgattcagccagtcacaggccgttccttcctgaagaactcaaaagctgttagcatgtaaagtgggctcttccacaaggtgacagatcaatcaaactctgtcatctcccaaacctctttgaggcagggttccatcaacagataccatctttgttcactttacagtttggggggtgaggagaagggcagaaaaagaactctcattggaaatattatttaatgttttaaattaactcaaaagatcttatgttaatata

SEQ ID NO: 59611 - DNA, 1679 bp, Homo sapiens
tatatagataatatataaatattttttttaaggagaaactagaatgtttagctagaaaattccacagcctgtgaagaaatatttcaaaatggccataaaggaggtaaaaatgaaaaccataacctaacttttatagaggctttatctttaatttaacgatgtgcggaggactttcttgcttgaatctgttccgggctgtctgctctgtccatcaaatgggcaggtctggaatggggcaccttcggccgttcagaagtggcctgaacagaatgctggaacccaggctggactcggacacactaaggttttgattttgaatttcagccttattagaagatctaacctaagagtaagctaaccacagggattcttttgtagaacactttttatgcagatgaagctattttttccagcaagtagattcttccagtttttccaaggagtaatttccccgaattggcataccacggcgtggacagctgatatttcacccagctgctggcttgtgggtgtggctctttgctttatatatatatacacacatgtgagtctggctgggctggtattttgtttgatcttcctggaaatgagcagtgactaacgctcacataactggttttttttttatctgggctgatgaatacatttacctaagaaactcatttcgttttacttaagaggggaagtgcagttttcttttggcagttcagaatccaagcacttgatttgctgggtttggaaaactccttttttggccttctatgtgcttagccataacaattccattaagcaagaaggtaagcaaaagacaaaaaaaaaaaaaggaaaaaaaaaaacttgcactggcttgtctcacttacgaaacatgtcggagctgtttgcctgggtggggctgggtaccgtacctgtcaatgcctgtgattttcataattagcacgtacataaagaagtacattctgttcaggtgataactgagcctcaatcaagcagaaactttttgcttgaaattaaaaaaaaatttctattagtgaaatttcttttttttttttttttggaagcaccctgttatctaaagaatctttgtaagatttttgtaaaattttgttttacaagattttatttgaaattgttttttgcaagattgttatatttctgtatgaatgtattttttattggaataacataaaagaattcttatcagcatcttgagtctggttgttttttttgggggaagggggttgttggaacagattcctcctgcattcatcaccctggcttcctcctgggggcaaatcttcattgagcaaccctgagaacaactcaccgacctcagccccttcctctttccacagcctgtcctgggagctggagaggatgtcagcgagcctgacattgccctccctgaatgcatcaaatactcttctccaaggactgacaaaaacaaccccccggctgtgggcacagtagggaaccatgccggtttgatcttccattgctcaagccagggaatgcattgcagaggcacctgcacaacgacaaacttgagtgtttccctgccacttctgtgcctccacagcctgctccagttccgcagctagagctgggcctaccttccccagccagccctgccacacacctggctgaggcatgtctgggaggggtggaggaggcagagggac

SEQ ID NO: 59612 - DNA, 1592 bp, Homo sapiens
ggggccttgggaatgtgatgaccagggttgagtaggtgtgcagggcacattcgaaggaaggcatgcagtttcctatgtgtgaacatttcttttcaagcctgggactttttagaaagtttctggtgtgctcattgtccatggttaggaagaactgttccacatacacctgacattggagtcagtttattgatatgtttggagattggcctttcaacagttttcatatttgaagaattagaaatgaagtccgttcagattctccaaagaacctccagccactggtgggggacattcttaattcacattcctatcagttggtatctcctgtccctgaagacactgatgaggcttgggaggagaatcccacctttccctgcagggggttaggctgggcagggcagggaggtgagggcgctggtccagaacactggcaagggatgggaacctaacttcttctgtgcttctgatttgcccttgcaggtgtttttccaggtctgaccacctggccctgcacatgaagaggcacctctgagggagcagagaggtggatcctgtaggctaaaaggcttccaggctgagagccggccgtggaaggagggatgcgtgttccagccaaagcatgccgttctgcaccctacccagttgcctccagggcctctccttggaaggtcttttgagggctaaaaaggtcctgtaagaagcggcatagcacccgtggtgcatggtatgtgggtgaccctggactcgccactggtacccgcccttccgagcggcgcctaagcctttgccgtgagcatgcacactgagaatgctaatggttgggttgattgtatgttgaggatctattactgaccgtatgatgaggccaactttttttccttgtggttagcaagactgcaagagatggaaaaaaagtagtttgaatgttttgtgtgtaaggagtataccatgagatgagatgaccaccaatcatttccttggggggagggggtgtctgcaccttagaaaaaaaaagaaaaatcaaaaaaacaaaaaaacaaaaacaaaaaaagaaggaaaatcttggagggtgggcgtgggaactcaggaccccagagtggcgagtggtgtggggagggagagcctctctcccccttttctgtgtgagaggaactcttagtgtctggtgcagctattaaatgtgcaatgtgtcaagtagcttgttttacacgctacaacatagctcatttgtaacccattgtataagctgtgtatttacaaatataacacaacaatttaacttttccttagaatacaaaaagtcatgcatggtctggggaactatatgcttttccatttttaagtcaggactgcaatactgattccagttaatgagcagctaagatccaatctgtctaatacagtgaccccctagccatccgggcctggcaatatacaattttttttcccctccaagtttgtaacactccccttccagaaaggcattgtgcaacacaggattatttttaaatgattctgaatttgaattaactttttggagaattctgtgatgcccttagaagaaattggacacgtattgagtgtcacaaagc

SEQ ID NO: 59613 - DNA, 1107 bp, Homo sapiens
gtgggactcccagcagggccgtggagtaatttccccttgcacccttcacaatagcagatggccatgctggaattatttctgcactcctgttgttgaagttccttgtttttctctgaccactgtagaagtaattaaagttctgtgtcatgcaagggcctgcacttgggaacggcattctgtgaaaacataggcggtctgggctacacaggaaatgggtggtttttctgcagctccattcgatgcccctgaatacagacagctgctgtctcctctcccccgagtgtggccctgtgttgtcagccgtgtccccaagggggtccctcagaacacgctgtgtgccgtgcagtctttctgtcctgtgtgggtatctgtggagtgtgaagggtggatggctggggctttccttaaaacacatggttcttgacaatgtcagataatctggttgaacctgttggggaggagtatgtgtatggggccggttctcttcctctggtttcatgagaaacatcaacactggtaactacaacaaaaaaaccggcttagtgatcatcactcattgtggcccttggcccaacattgggaaagccaggagaggtttcaccctccgacttttcctctgaattcttaccattctagaaacagatttcctctaacttccgtaaggacacggatgcttaattacaaaaggttttgcccctgtagtgaccgggcagcaatgttatctgtccttcattcttgcatgtttttggaaattgcttttgcttttacttttggtcgtcatggcaatcacgtgccttctctggttcattttgcacagacctgcctagagctggaacgttacctccagagcgagccctgctatgtttcagcctcagaaatcaaatttgacagccaggaagatctgtggaccaaaatcattctggctcgggagaaaaaggaggaatccgaactgaagatatcttccagtcctccagaggacactctcatcagcccgagcttttgttacaacttagagaccaacagcctgaactcagatgtcagcagcgaatcctctgacagctccgaggaactttctcccacggccaagtttacctccgaccccattgg

SEQ ID NO: 59614 - DNA, 1918 bp, Homo sapiens
aaaaatagcctgcgaggccactttccaatcagaacgagcagagttcgaattgagccaatggtgcgggccgtgatggagagtctcggtcacgccaggcggggccgctgtgtgtcgccgcctgcgattggccggagctgacatcatcggcgcgcagcccccgggccgggagccacgggattgggccgcgcacggggcgggcgcggggcgagtcacgtggggggagggggagtggggggagccaggcgggggcggagggggaggctggcagcggagctttgaatagggaagttttgcaggggttacgtttgcagtcagtccggtgtttgcaaatattgtgtgggctccgcgcgctgcgggctgcgggagggtccggccgggcgtctctgcgagcctggagtttgcatgaaactttcacctgcgctccggggagactttcggctccggctcccaccgcgcgcctcgccgccctcgcgaccgcgggctccgtccaacccggcccgacatggacgtgctccccatgtgcagcatcttccaggagctccagatcgtgcacgagaccggctacttctcggcgctgccgtctctggaggagtactggcaacaggtaaacgcagccggccgcggttccctgcgggcgccggggcgcgggccgggtcggctgtttggggttcagacccggtgctctctgcggtccgctgggcctgggccccgcgctgtcaccgggggagcgggcgcagcgcccccgccgatcgatcctccaggctgcgatcagcgtccgcccagggaagccccaactcccggcacagcccggccgagcccctggcacgagttcggagcctgtccccgctccagacgccacagctggagcttgtcatggggaccaacttgctctgcctgccaaggtgttttttttttgtttgtttgttttttgttgtttttttttaacggattttgtttttgttttgtttcttggtgcttgtacttaacagttttttaaaaaaatcacattttgcccccagaacgtagaccagctctcttttatttttgtcttttttaaactgtagaccatttccaatgtgttttctgctctttggaatgcctaacatttcccctagatctgccttatttgtcttccctgcttctcttgttgaccaagaaaaataaaaataaaactgtgtacaccccagtgacttgtcagtcttgtgacaatgagcccgtccaaactgcttcaagtcttagtttggaaagaaggacctcggtttccgacattgtcgtagaactggaatttgggggcattggaaatttaagaaacttaccaggtccccgtgcttataggtagcatcgcccgaggggagagagactgacactcctcccattgtctctccagcgatcgcaggagggtttactgttgtctccctgccctgctgtgctgtttgtttttcgtcacaaagtgaattgccagatcaaatagaggctgtgggtttccaagcctcgaaagctttaaggaagatgaaatgcagggtgttgcaaccttcacacgcctgcttaattgttcacagtcctctcctgccttttccccctccccctcctgtttttttcctcctcaaagaagctgctccctaggacgtgattgaaattgatctaagtagtttccttcgggcgtttgggatttgggcaaacggccagacctggctcttggtcgcctttggaggcttttaaactctccgagagcttcgttcaggtcccgggtgctcatcagcgtaatggagattttaaattggccggattattaaagtttaacaagatctccataaatgtgcttttcttttttctttgttaaatcaataaaatacatcgctgctgcctctcttcagaacgctgtagtgtgcattgtaactcagacgcctggtttcggggg

SEQ ID NO: 59615 - DNA, 1065 bp, Homo sapiens
cagtgattggtggcacaggaattcaagcccgagtctgcatgcctgtccacatagaggcaggcgtcagggccgcaggtgctgccgtatggacatatgttaacttacgctaacttgcctttaggactcatctttgctgttatttgcttacgacagagctgcttctataattatgacaggattccctgccttaggaaaggtgagtctgagagaggagagaatctggagttatgctggctcaatgaacactcttcatctgattcttgaattccttgctcttcattcctgaccaggcttatcttctgttgggaaattccagcaacagggaccttgtttcagagctaccggactgtaacatctggtagcgatccctgaaagagtaatcgggagaagcactggttggagggttgaggagggggaactcaacaccccacctccaacccccaaaagaaacctctgtgtgtgtgttcctgtatgtacgcgtgcgtgtgttcctgtatgtacgcgcacgtgcgttcctgtatgtacgcgcgcgtgtgttcctgtatgtacgcgtgtgtgttcctgtatgtacgcgcgtgtgtgttcctgtatgtacatgtgtgtgtctgtggtctccgagcgtgtctgtgtgcttctgtgtctccatgtgtatatttaggtgtgtgtgaccctgtgtatgtctgcacttgcacctgtgcccgtgttcgcgtatgcttctgggggtgtgtatgtgctcgtgtgcatgtgtgtattcatgtctgtgtgtacagtacatgtgtgtctgtgtgtgctgggtgtgtatgtgtgtatatgtactgctgtgtgtctctgtgtgtatgttcatgtatatatgtgtgcatgtgtctgtgtgtatggctgtgcatgagcttatgtgtgcgtgtctttgtgagtgtgtaagtgtatagacgtgtgtccatgtgtatgtataagggtgtgtatatgtgtatctgtgtgactatgcatctgcgtgtgcacatatgtgtctgtgtgtctgtgtgtgcatgtgtctgtatacatgtgcatggccatatgtgtatctgtgta

SEQ ID NO: 59616 - DNA, 1048 bp, Homo sapiens
atttctgggcctgctggttttgagatcccttgcagcttcatgcttctacaatgttgccttggcagcttggaaaagaagcagaatggagaagagagccaaggccaggtgggggtgaggacggaatagagacactggaatgaacttccctgacccagggcatgctttcagctggaactttaggagagatgtctccactgcatggctctgtgggcagcacctcccactgcctgcctctggcccggtgaggtggcttcttgttgtgcacgtttcttcctctgtcattgcattattttgttcaggaccctacatccccctccttcttatactagactgtgagcttcctgaggcagagaatggattcatctgcattgtccctgaactggtcacacagcacaggatcaatagtgtttccgtgggctcagttgacctgtttgttctttgtattttctttttcttttgtcttctcatggttcttcttgctgacgggtgaggaaattgatggctcatggatgcagtgacctgaaggcttgcgatttctgccctgatatctttctactccataaacctgcttctcccaggcaggtgtggcccagagaggtcatatgatttagaattacagttttactagaggagtctgtgaagatcactgcttgaccctcgtttctttttagtcttcttttaatggtctttgtgtctgttctatctgtgtgttttatgtgaatccactgcaaatctttattggaagcatctgtggtacaaattaataagaagaaaatattggagtccacatagtataaatatgactggttaaatcttttcaaatatttaggtgtattttttttcctaaaccaatgctctacctaaactaatgttccacacaaaattttcttttgcaactttagaagcacttttcatgagcattatagcacaagctagcacaatctaaaaagaaaggaaatattagaattgattctttagcaattttgcacagatgtgttttgcaatgagcagtggcctgtactttatcatgcatctttaaaggaagtgg

SEQ ID NO: 59617 - DNA, 1063 bp, Homo sapiens
cctacatgtctagattgttcttagtgttggtgagacatctatgaacaaaacaaattcaaacaaaaatctctatcttcatgaggcttagatcttggtgacacagaaagacagtgagcaaatatgtaaaatctatgagatgtcagatagtgatagatgctgtagaggaaaataaaggccgggggagatgagagctatggtgtgttaacaatctttatctgagtgctcagggaaggccctgcagagcaggtggtattggaacattcagatgatgtaggtgtccccaaggccgtggactcagagaccatgacacctgctggcctcttggagattgctctgtccagactcctcacaacagaaacacttaggcctggagctgggccccatggctactcggtgacagccaagactttgacgcaggtcttctcttgtagagcttttcttgaacactagtggtctgaattttatgtaagctatgattctgttatagattgagtgccacccatatcttactcagaagaatctgatcagtttttgccaatccagagatgtgtccgtgactgcttaccgtcctcttggtggctcgtggtaaggatacctcagtggtgtgttagtcagagtccgactgggaagtagatgccaccttctcatttccttgggatgactgagggagggcttaatggaggttttgacagggtgtggagggatggtactatagggggctgtccacacctctcaagcctgggattgaaggcatggtttattattggaagccagggagtggctgtgagtgggctgccctgggagggtcaggacctcttcagggacgtaaatcagcctggagtgacccctttgctgagttccccaccagggtgtcagcccccttctgacctcctgacaaggatgctccccaggcctctccatggttggatgaggcaaagcctgctgtcatctttacccaggccctcctgcagctgtactgtgctcccaagatcagctaagagacctccagccattcagccacctaagccagaagcttggaaatcatcccttcccacatcccgag

SEQ ID NO: 59618 - DNA, 1046 bp, Homo sapiens
gagaaggaccctgttatattatacacttatatataatatatacacaattacatactatgtatacaatatagagaacagaaatcacctttgttataaaatatctagtacacagataatcaagtttttaaaaagatccagaaaaaatatctacctctaagaaatactgaattttgaaatctgaagtagcccagtttacccgtaacctcatgggagattttcttctggaagagaggtaacagaagtgcacctgctgtatttaccctgctagtcttaagaaaaagtgggaactatttaaagacttagataatctattttataattgtgaatatgcttgcacttctgtaaaataaaagcaggtttcctggaaaattaggcttttcttcattatatatgttgattcagccctatcgaataagaatttctatttccttatttgagttgtcaagttgtccatactgaacttattcccatgcaatagggttttatgggaaaagtctgcctgtctgtgactaagcaccagagtagataacgtaacaatttgttttacttcgggaatgcattttaaatcaggaagagaagtttctgtcctacttgaacccagcttcactctcctcctgggcgaaagctgagaggcctaggtgtgcccagctctcagttaactgaagtcacgtggtggtggaccccgcccccagggcccggttggctgtggccccgcccccgagccctggggtcggtgcttgctgcctgcggctctcagaagcctctgctccaccgcggcgagaggcatgggcacgtggctgccgagggtggccgagctctgggaagaaaagcccgtgtgcctctgcatagcgtcgctacagcgctgactcggtgtggattgattggaaaggtttgagggagtacttgggaagcatggtggcacatgatgagactggaggtctcctacctattaaaaggaccatacgagtcctagatgtcaataaccagtccttcagagaacaagaggtaagactttaagagaaacgttaggcaaaaggaatgttttc

SEQ ID NO: 59619 - DNA, 1025 bp, Homo sapiens
tagtctgacctggtgtgcatttttcttccatctgatgagttcattgtatgccacttttttcttcagaaggaaagaggcatgttagaatatttaaaccagtgactcattatttttaccctccttgctttgtctgagtctttttttagtctttatgaacatttatcaatataaatcaaattactttatgccattttatgtaatcttgatttaacattgtgtgatattctgtttatactatatactttaatatatactacattgtcacttatatgctaggaatagtgttcctgcattcagttaactgtgtatctcttgattgtggtagtggtttccgtctctatacacacgtcaaaacttatctaattgtgcattttaaatatgtaaagcttactgaataccccagcaaagttgcttgtcatgtgtacacatacacacaccttttggtagttaaaatagctgccgtcttcaggaagtacacttttatttggtgtggtttggctttggtttttgttcttggttttggtctttgcctatgtgtcggttttctcaaaatgtgtaagtatttcctttgagtagagcagtcatccacagtcactagtgtgaatcctgcagcttatcatctgttgggcccatagaagctggcctttgtttagtatcagcatgggctgtgtttctgccttacctttatttctaagttacaagcactaggaatgttgtcacggttttagatctagtgacacagctctaaataatttgagtatttctagaaaaggaattcatcccatgtgatcataactcgtttttatctttttaaaaataacttttattttcttttgattttaaagttttgctaaagattttaagagaagattatttaactattataacccaaaggaatagacccaggtgcatactattttttttattcagtgtcttgatatgattggttatagaagagaccctcctaaaatatgttctctaactggcatcattagaagaaaaagcctttctacagaatgctgact

SEQ ID NO: 59620 - DNA, 1021 bp, Homo sapiens
gtattctagactactgaaagaaaaccacttcaaagattttgttgaaagttttagtgttgtctgaaatgcaagagggaaggtgattggtagtgagttaaaagaaaaagagaggaaaagagagtagttttgtcttcaagtaaaatgtctggttgtgccagacatttcacaagtgtgaaaggagataggagaagctcaacttgagggcgtgtagtaagttgtagaaggctcgaggggacgtggacttatttgccttggtttgcaatacctgcaaataatgagtttgaaaagaaacaatgaaatgtgttaaaaatttgaccatattagataaattttcgtggatttagtcataagatggaaaaagactggtgaatcttttattacaaaatgtttctgttaaaatgggatcatcatctttgaaaggggggaggaggagtaaaagcccgattataatggtgatcaattcaagtcagtgttgactattctgtgaaatatatttggccagtggaaatgataatcagaaaagactgtaaatagatccatccaaatgatttctctgtacaaatgaatgatactattaaaaaaaaaaaaagcacacacataatcaccctgaaggtttcttgcctggtggctatgttgggggcatttggcaaaatatgctggtgtggcaaaggaggtagtggtaagcctcataaaagttagtaaaaattgtagttcaacctttgaaatcattgatgaatcagcgaaaggtaggtaagtcttgtgttaggaaatcttttaagaacatggtgtaatcagacacagcaattgtattgaaaataactgaacacctgttactttctggataggatagtaagggtagtagtggcaaaggatcctgattaatttcagattttaatgtaagtacctcaggttcttgtctttggaaattcacattcataagtgtatattacaccaatgattgtgatctgcaacaccagaaagcaagatttctaatcatttccagaggtgttgtatagaatag

SEQ ID NO: 59621 - DNA, 1032 bp, Homo sapiens
aagtctggggggtttcctgggaggctgggctcagtgctgacagccgcaggtagacacagggcaggggggcagcgggggagttttccctgacccattctaggtggtgccccatgtcttctgttctcacagcaagaagccggccaggcccgtttctcccactgccttgagccctccgtcctcagcggggcgcagagccgtgtcctggcttcctgagggccatgcgggtcatgaactcctccctaggttgggacgcaggcctgcctggcttccctgccctgcaccaaggatggaggctgctgcccctgccgcgtctgtgtgcttgttgtctccagtgtccgtattcaaggacattcccccccttttccatttatcttaagggagttccgaatgtgtgaggcttcttattgacgtcggggccaatctggaagcgcacgattgccattttgggacccctctgcacgttgcctgtgcccgggagcatctggactgtgtcaaagtgctgctcaatgcaggtgagtgggtgtttgcccgagcgggtgtttacctgagtgggtgtttgcccgagcgggtgtttacctgcgtgggtgtttgcccaagtgggtgtttgcccgagtgggtgtttacccgagtgggtgtttaccggagtggatgtttgcccgcgtgggtgtttaccggagtgggtgtttgcccgcgtgggtgtttaccccagtgggtgtttgcctgagtgggtgtttgcccgtgtgggtgtttacctgcgtgggtgtttacccccgggggtgtttgcccgcgtgggtgtttacccgagggggtgtttgcccgagtgggtgtttgcccgcgtgggtgtttacctgcgtggttgtttacccccgtgggtgtttacccgagggggtgtttgcctgcgtgggtgtttgcctgcgtgggtgtttacctgagtgggtgtttacctgagtaggtgtttgcccgcgtgggtgtttacccgagtgggtgtttgcccgagtgggtgtttacctgagtgggtgtttgcctgcgtgg

SEQ ID NO: 59622 - DNA, 1046 bp, Homo sapiens
ccctaacggtgcaagaatacccttctgtcgaaaaactgccttataggaatgggtgactgtatgcggtatgtcctgtactgtacatcaataaataactaagccaggccagaaaaagggtgacaaaaggtccacaattatgttaaggaagaccaagacggtatatttgaagttttgtgtatacagaacatttgcccaaatgtaactaatttttttaaagggagattataagcatctcctgtggtccaaacatagttgttaaaatgggttaaaatcggtgaagtgcctaagaacttgactgagacatggtgtttgttaaatacagtatactatctattcagtaaaaatagatcaatatggcatgtatttatcaagtgaatttcatttttctgttggtagacattcaagttattttcaagatatccctataactgacaatactgcagtgattatctcttgctgttataaacagtgcttcaggtggtcatgatagtatttctgtagaattgactccttatgagagtgctggataaccatgttgctaaattgccctgaaatgattgtacctttttatgttcactcgctcaaaagatgtgtttttatctccatgctagccagcactggatgataatggtatttttaaaatatcttagccacctagtaattgaaagtaacattctgttttaatttttatcttccttggtgaatacaaaagttaaatctttttaggcaggtcatatcatttgctgatgtttttattgagtctgagctctcttttctttcgcccatgtaactattactgtagcattttaattatcatagttttataatatattttggtactttcttttgaaaaagagctttgggtttttcttttgcattttttcttccagaagaaattaaaactatctttttaagtcctatagaaaatcttgggatattgtttgtgatggtgttgaatatataatctgagaagagacatttatttgagtttttccttctaagagaatatgtacatctcccttttctttaaaaattttttattgtga

SEQ ID NO: 59623 - DNA, 1056 bp, Homo sapiens
atggtttaatgccaaagcacaaactcataaacccagttgatgaggagccagaacaatggtcattactgtatagagatgttttaaaaagtcaccatataagctttgaaataattctaatgaaaattatatgaccttgaggctgggcgcggtggctcatgcctgtaatcccagcactttgggaggccgaggtgggtggatcacaaggtcaggagatcgagaccatcctggccaacatggtgaaaccctgtcactactaaaatacaaaaaattagccgggcatgatggtgcatgcctgtagtcccagcttcttgggaggctgaggtgggggaatcgcttgaacctgggaggcagagattgcagcgagccgagatcacgccactgcactccagcctgacgacagagtgagactccgtctcaaaaaaaaaaaaaaagaaagttatatgatcttgaatataaaaagtatggtctctaaagaatttgttgttgtttttacataatgtaggaggaaaaaaattgtggtgtttataagcatcagcctgattaccaaaaatactttttgtggtagactggattttgagaatgttaaaacaatcttcaaaaattgaatattaaatccaaaaataagcaagccacagctaaatgaaaaagtcatagtacataggtgtaatacactttactcaaggggtgtaattccaaaaaaaaagtttttaaaaaaggtaatttgtctcctactggatatactaaataccttagtgaattttttattttgaatagctctttgttaatctacataattgtttatgaatttaacttgctttataagttcaaattatcctatatgctatacaacacactaatggtaatgatgaataagatctactaattaggctttcttctgggcaatgcatgtgggtatcttagattgcttagttaaaacataatgagtaaagatgtccttagatcaggccaaacacttcatcttccccctgcacctccgtttgattaaatttttcgtaaattttgttagggctgcatggcttattgggaagggacctc

SEQ ID NO: 59624 - DNA, 1103 bp, Homo sapiens
aatcgtctgaattcaaataacacgctctgggttcttactaaaaatgacatttggcaacaagacattttgaaatttcatgcttctaaagctgtagttggaaaataaatcttctagtggacttacctgtgaccctgcttagtttggttttcctgacatttttgttgattgaaatggtaaaattctatgaaaagtttgggccattaatcaaaatacagattgctttgcataagttttctttgtgccccgaatacctacagtgagcagactatttattttaaagcttatggattaggccagatgcagttgtgcctcatgcctgtaatctcagcattttgggaggctgaggtgggaggattgcttgagcccaggaatttgagatcagcctgggcaatatagtgagaccttgtctctattgtataataaaaaataaaattaaaaaaaaaaaccttacagattatagcattttttcattgcttcaaagactgaagcaaagtaatcttttgtttaaaggcaaaattggtatgtcagtgtggactccgtgttggcagcagtgctgttaccactctgggtgatccagccaaaggtaagtccgtaaagcaaaaagaatcttaaaaaaaaatcttcttttacaagatgaagtgaggtttcattagttttataagatatgtatattaaaagccagtttcattaaatgtcaaacagttcataatgtttagatttctaactttaaacatatgaatgagatttgagtctaaaacttaacagtatttttcagtgtcaagagattggtattgtcttgagaatctcttctaaattgtcacaatggcaataagaatagaaaatagagctgaccgaacttggcaactatggaatgtgaggggtaagagaggaaataatcaaatataagcttttaaacttacactacagtgataattattaatagaaaagaggtacataagaagagaagcagattggtagagaagctgatgagttaaaaataaaaatattatctaattgtcaagaacaatgaattagcactaacttttttgaagattcagtttcttcatgtgtaaaacagattaaactactttatagagttgttg

SEQ ID NO: 59625 - DNA, 1031 bp, Homo sapiens
tgaatgagtaacacccaagatatatttctgactctaatgtgttaaatttcagggctcggtggggttgagaaaaacttggtacatatgcagttccatagtgctaccctgataatacttatttttcctctttcagtattacttttacgaactttcaggcaacaccgttattgaacgacccagacagatctgtccttatgtaattgtagcttttcgatacagggaatctaaaactatggcaccaccagctcataaaagcatgtaagtaattatgtgcatgctttgttttactgaatttgttccttttactcttgtaaacatgttctttttctttctttttctgctagacttgaacgcagtgaaaatggtaagaaatagttcattgattcttttaggttttttttttcttgagtaaatgtttcatcataaataatcagtttcttttttaccttcatttcttcagttctcatgtctccatggaaagggaaattaattgttcaagaccgtatgctatgtgatatagctctttggtccacttacggtgcaatgattccaacacagctgtaagtattaaatgttatgtcctttactaatgcttatattacaagttttggggttttttttcctcacctcatttcaagggtggcattggtgtaaaatacagcaactgttcttgattttagatgagggtatatttgggtaaatgtatagcacacagggtatgacatagtaaacctaaattctaatttattaatgggaaaatgacctcttgggataaattaaactattagatactagaaatttgaccttccccaagaaataaatcagatttgcctgatagcaaatatagcagattatagccacttaatcgtattatttttattaacatttgcagtatctgattttcaaattttaacatgattttcttagaaaaatgttagaatagctgttacatgtatttacattaaaagcaattatcatgattaatattttctcctggggaactgtgaagaacatcttaggaaatctttttg

SEQ ID NO: 59626 - DNA, 1049 bp, Homo sapiens
cccaaagttttgtttgtttgtttgtttttctttttttttcagttgttacaaagttattactctgatctttttcttcttcatctgatagggatataggcagacacttagcaagttcatattatatttatgtgagaatgtttaacttttgatttgttaaaatcttttaattaaatacctgaaacttcatagtttattccccattactaaagttactgtccccaaaataaaaacaaaacaaaacaaaaaatggaaaagctatgctaagtatctgggcccctaccccttacaaaaatgatgtcttttctacataaggtgcggaagtgctgactgcacagtttgtacagaaaaccaaattggataggaaaaaccaagaagctcctatttctaaagatgttccagtgccaacaaatgctaaaagggcaaggaaacaagagaaatctccagtcaaaactgttccaagggctaagccacctgtgaagaaatctccacaaaaacagagagtaaatatagtaaaaggcaatgagaaccccagaaacagaaagcagctacaacctggtaagaaatactcttcctataaatttaaacaccccaatacagatctaacagagagtgcaagataatttattgaaatagtgtaagagcagttgcaatgtcccaataattttttctgtgtttttcagttcagacattaaaaaaactaagtaaactggtttcctaatgtaaataaattaggaaggtacaaaagctcaaaccttcaaaaacatagagcctactttttactttgcaaaaagcctgaacatgaattgtctacaagcattaaagtataaatggccttatttatgactaaatgcagaagcaagtagtatctggcattatttttctagaccattatcaattataaaaatagaagattataagtttatctaaagggaattataaacagactgtccaaaactgtcagtaatccagaatcctgtatttagttttatttatttagagacagggtctcactttacaatcactgcaaccttgacctcctgggctcaagg

SEQ ID NO: 59627 - DNA, 1048 bp, Homo sapiens
tgtataacataagttttatctgagggttggaagagaccttaatctaatagaaaattttaatatgcaatatatgttacataagtttttctcagacatgttgaattaaccatcatagtaatatggcagagagttaattctatgacaagcaaacatctctcttttttttttcttttatactgaagtcaaaggagaaactgcttcaaagcttcaatcagaaatttcaagaggttgtcaagaagatgggattagcataaatagtgttcaaccagaaaataccacagcggctcacaatgatcttcctgaaaactccatcgtcaactatgactcccaggccctaaatatgttagccgatctagcattaagctctgctacttcttccacaccagtatctgaggctagaaatcttcactgttcctctgaattgccacaaaatgatgttttgctctctaaagaaaattctttgcgaggtacatctgaccatgaatatcatagaggagttaaaactcaaaaaggtgaattactacctaacccatcttctgataggaagagtaattctggatcagacttaacagttagccaagatgaagaaagcttggttccttgtagtcaggcccctgctaaagcccagtcagcacttactgaggaaatgctagaatcttcagatgcaagccaaagctcttctgtttctgtggaacattcatatgccctgctccttacagaacattcaaagaaacatctacaggagagagagatactaagccctctgtttcccaggaatgggacaaaaagccctgaagcagcaaccccagtggggaaagtcatgccatttcggcatcagcccggccttttgcttcagcaaaagcctcctgacgaccccgtggtgaagcccaaggatcgaccaccgtctgcccgtgtgaaaaaatcttcttgctctcgtatagtgcttagctgtgatgactccgttaagatcactttcaaatgtgaaacagaatatgcattcagtttagacagcaaatataccaacaacccactggagaaaactgtagta

SEQ ID NO: 59628 - DNA, 1051 bp, Homo sapiens
ctcctgtgatcctgggcaagtttcttgcttctggacagtgcttcttaattgtgtgtgctgctcatctagagatttcactgaactgcagattttgatgcattctccttgggagaggcctgacattctgcatttctaacaaattttcaggtgatatcaatggtggatgacagtctgtggccaacatttaattatgtagctgtgtcctgaggttacatatattgagatgcacagtgactggccagtagtagtaataaatggtaaccatcactgttagcaagcattcattagctatatgaattgacattcagctccctattaatgaactgtttcacatctgactatatggactctacagctgtcaggctttcttctatacacctgttcatatatactcataagggtcatttccttagaacttcctgtttagctattgcccaactctgcagcccccctgacttatggtactccagcgatctgccatccttttgcctgccaggtggccagaaatgttttctatttccccttactgtttcaggatattttgcagaactgtagtctgaaaatagtatagttctgttgaattgcccagagagatattttatcttcagactttctcaattattagaagagagacacaaaaatggaaaataaatgaatcagccagacttagcaaaagcatggtgatgaggatttgggtattggcgaaaccatttctataataagtattctgtgtccagagtgaatttgtatggtgtaaaagacacgtgctacccatgttcagatcatggttctgccatacaggttttgtgatttgaaagaaggcaattacatgttctgattctcagttcccgtctctgtaaaatgagtgggttagatggataattatttgttaagtcaactacatatttactcattcatgtttcatatctgtaaattttaaaaataaaaacaaaaactaaggaatattggaggcacttgcttatgataaggtaatcaactaaaataaccattttcaatgattttcatgtgttctttctgtaaactcttaggc

SEQ ID NO: 59629 - DNA, 1101 bp, Homo sapiens
taactgcttgcttcctttcattaaaacaccacttacccaaggcttggaactctgtgtacaaaatgaacagaaaaaaacttttgcaagagagtgtgatccagacacccaagaagaccagaatttcatctgttcttacaataatgaggtatgtaaagctgaataccgttaaatgttggcattatttttgaagaaaaaaatgtttatatgtaaaatcacattcaaaacaaggcatttttaaattttaggacagtgaattctcaaggtatgtaaagaactattacaccaaaaacctagttttcatgaagtgtccttgaattgtctgcaggtagagcttacctgccatcccgattgaaaaaaaccagagtagaaaaatgtcacagggtccacatgatctgggagcccagcataatttggggcaaattgcttctttgcctaatttttaaaagaggtgacttaatacctatcaagtcttatgtagaatattgtttaaggatcaaatatagcaataataaatcttagatatactttgataaaccttaaagtaaactaaaattaattgtattaaaattatttttgaagacagatgctggaatagtaaaatgccagacctgtgaaagaagacccattgcaaataactatttgtaaatatggaaaatatactttgttttgttccttgttctcaactgacattcaaccaggccagataatccaaattttacctggagcaaatctaaaagttgttaacaaaattctaagcaaatgaattgacaaaattacctaccttttaaagttttccgcccaaatttattctagaataatattgcttgggtttgggcagcatctctgattcctgtcttaagaaagagtagacagtgttcctatacccggggtcaccggggacttggaggtccttgggtgagcctcatagaacccgtgaatatcttcaagtgattgtcatcatcatgagaattaaagatttctgggtcactgtgtgccagaaagtaagagttctaagcccttcactcatattaactcagttcattctcaaataagttaaagactattaatctccccattacatagatgacgagactaaagcat

SEQ ID NO: 59630 - DNA, 1782 bp, Homo sapiens
gtgagccaagatcactccactgcactgcagcctgttcgataaagcaagacgctgtcttgaaaaaaaaaaaattaatctcatttattaaaaacaaaattgaatgctttttctctagtgctacacttctggattaagcggtgctaagtagcaaacaggctgcatttaaagtcttttaaattgtcagtggtctagttatttttcttccaaaaagcttggagctctcttctgtgtgtggttttaaagaaaacaaatcccactggggggtattttaagtctgcctttaaaagagggacttgcttgatttgtaccctgtgatattcttttagctagaaaattcagaagaacattcacaaactaaaattaatttttatcttttctgttcttcacatgtacatataatcgtataaaaaacattttatatgactgatttttttttttttttactttggccgtttcaggtaactggggaagaagctaaacaagaatcattggagacttctaatcttgtgctttcgggtattggaagtacacaaactaatggaccttctgttcctagtgaagaagaaattgttcagccactggatagcacaagagtggcttcttacagtggcactgttactcaagccacattcaccaggacttacgatgggcctggcagtcagccagtgatatgtcagagctctgtgtacggcacccttgaaaacaaagtggatattcttgatgcagcagtgcaaacaaaaacaggtactttacaggaccttatccaacatggcagccccataaacaatgaatgtcacccttccttggaaagaaaggatgataatatggggtgtgcagtgattaacccggaaccaattactctcacctttgaaaaaaatgcacatgtaccaatacagacagaaggtgtaaatactgctgatgaacgtacaacctttaagaaggagttgattaagcaagtatcacctgctgcaagccttagacatcctgtatccacctcggaaaatgcacgaacacaaggcctgagggacattccctctctagtagttgcaggacagaagggcactaagtacctttgtgcctcgtcagtaggtggagagacacttgataaagcagtgtgttcattacagaaggagacgccccttccagtctctctaccatctgataaaacaatggtcatggaggcactatcattagctaaaagttctagtcatctatcacccagtgaagaagtgagatgcactcaggatttcctttcacagactcagagtctcctcggcctatcttcagaagggcttctagaactgacacaggttgaagtggactcatcatcagcctctaccaccttgggaaggcagtgttcacttaactgcatttcgtcaggatgccacacatcaggtgactctttagaactaaggaagaatcacaagaatggtccaaacactgaaaatatgaatttggaagcgtttgattcagtatttatcaaacaaacaagcctgtctgtgagtagagaggtcagcctagagttatcagaggaagattctgacattgacttagctctaacaatatcaccacctacaagtcccagagaagaaatgccagctggtgaaatagagcaatttgaggaggccccattctcaaatttagaacttcaggatgtagctgaggaaataggtgaaccggaagaggtggctctcacagaaagcagagaagtgagttctgctgacaatgtgtcagtatatccctcagtgtcagaagaaccagtagaaaataaggagagaaagg

SEQ ID NO: 59631 - DNA, 1051 bp, Homo sapiens
gccgccttacgtccaaatccgagatctccacgggatcctcaggacttacgccaacttctctataacaaaagaactcaaagataccatgagaacttcacacggcctgaggaggcacccgagtttcagtgcaaactgtggcctgcccagctcctggacaagcacttggcaggtggcagacgacctcacccagaacactttagacctggagtatctgcgttttgcacataaactaaaacagaccataaagaatggggattctcagcattctgcctcctctgccaatgtctttccaaaggagtcaccaacccagatctccattggtgctttcccttcgacaaaaatctctgaggccccatttctgcatcctgcacctaggagcagaagcccccttctggtaacagttgtggagtcagatcccagaccacaggggcagcccaggagaggctacacagccagcagtctggacagctcttcctcttggagagagagatgtagtcataatagagatcttagaaattctcaaagaaatcacactgtttcattccacctcaacaaactgaaatacaacagtactgtgaaggaatctcggaatgatatttcacttattctcaatgagtatgctgaattcaacaaggtgatgaagaatagcaaccaattcattttccaagacaaagagctaaatgatgtttctggagaagccactgctcaagagatgtatctgcctttcccaggacggtcagcctcctatgaagacataatcatagacgtgtgcaccaatttgcacgtcaaactaagaagtgttgtgaaagaggcttgtaaaagtaccttcctgttctaccttgtcgaaacagaagacaaatcattctttgtaagaacaaaggtaaagtgccagccacgtcttacgtattattttaattgctgattttagttttagaaataataaatttagcatattagccatcaaaaagaaatcatggtatgacatagtatttaaatttcacagcttagtctttatctgcatactaaatgttttcctgcaggatctgccatt

SEQ ID NO: 59632 - DNA, 1391 bp, Homo sapiens
ccatttaagattatagtttttacaagggtggtaaaacctttaaaacagagcataatgtgcatcgtatgcctttctgacattagcatgcaaaaacaaagctatttgttaaaatagacttatttttgctccaactaagtaaacatgtaaaattatttttaataagctcaatagcttagaaggcatcttgtttaaaatgaaaataatttaaaacaatatctagcactgcaacccaaagctaacagacaactgcaatgccactgtgacatatttcagcaaaatataaaaaatgaaaactttccaagttgtagaacattggtttttcaaatgtaagactgttcacatgtgtattcacatgttcacaagttttccaaagggaaaatactaattttttattggcatcatccatatccaggcaggctgtagttgagtcacctgaagaaacacaaaattgataaagaacttcttaaaataatacgaacaagaaatattttataagcgggatgctctaatggggaaaacgcctatgcattctaaggttacattatgttctgtactgacgatccaagttaacagcaagtgaaaatgcacattagataaaataggtaattttagtagatggttacttcatttagtgataatttaggaattcctatttatgccaaatagcaattccacccctaaacaaacactttaaatttatagcatgaagtatgtaaacaacagtttcccaactgtttcccttagacacaaatgtcaatatttgccatcaacaactccaactcacatgggaaagttacataaaaagtgttcttaccaatagctactcctaaatggagctgctattttttctatgttttctataaagttatttacatctgtaacaaggattccactattttcaaagacttctctggggatagtaggcttgtctgttaaaaaaaaaaaaaaacaacttttggttaatataattaatgtacttttatataacaggacctggttttttattttaaaaaatctgtggaacttcctcgtgtgaggggtagggggagaaaaggtgttgggttccaaattaagaaaagatttgaagctttggaaatagatgcctccatcgggggtggtggttaaagtactgaaaaaaaatccctgaaaaatgataactatggttctttacgtaaatttttcttaacacttttttttttttttttttaaagatagatagggtcttgttctgccacccaggttacagtgcagtggtgtgatgacggctcactgcagcctcgagcaatccttctgccttaacccaagtagctaggactataggcacacatcaccacacctgccaacttctgtagagatgaggtctcgctaagttgcccaggctggcctcaaat

SEQ ID NO: 59633 - DNA, 1090 bp, Homo sapiens
ggaattcctaaattatcactaaatgaagtaaccatctactaaaattacctattttatctaatgtgcattttcacttgctgttaacttggatcgtcagtacagaacataatgtaaccttagaatgcataggcgttttccccattagagcatcccgcttataaaatatttcttgttcgtattattttaagaagttctttatcaattttgtgtttcttcaggtgactcaactacagcctgcctggatatggatgatgccaataaaaaattagtattttccctttggaaaacttgtgaacatgtgaatacacatgtgaacagtcttacatttgaaaaaccaatgttctacaacttggaaagttttcattttttatattttgctgaaatatgtcacagtggcattgcagttgtctgttagctttgggttgcagtgctagatattgttttaaattattttcattttaaacaagatgccttctaagctattgagcttattaaaaataattttacatgtttacttagttggagcaaaaataagtctattttaacaaatagctttgtttttgcatgctaatgtcagaaaggcatacgatgcacattatgctctgttttaaaggttttaccacccttgtaaaaactataatcttaaatggttttatttgctgttacacaaacaacactacataaaacattttttcctaaatggtacaaatttataaactatcatttttcacttacggtatttgtaaatactacactacaaaaatcagctttctgagaaagaaataatcatttatttatgatattgaaaatttctacagtaaacactcaaaaccaagcaaaaaacatttgtaagatacacggtatctatttggagcaacggtttttgtaactaatgtgtttcattttttaaataaagacaactaaaaataatctctttctgcaatgatttttatagcagaaattgacttatctggagtgttctagcaatttttaggtcatttagcagaacagtaagcttccagaggaaacctacacttctatcctttgggcctggcctgttctgtttctgggttctttccgcagtcaagta

SEQ ID NO: 59634 - DNA, 2104 bp, Homo sapiens
tagttaggtatgacagagctgttaagagatctcattccaaacttcagcagttcgctaccacttcaattcttaatctctagtaggttaaaagaaattcctattgttaaatatctgtgtactttacatccaactctgtcaccatttagaacttaagtgtagaagatcttgcctattgagagtaattttaactcacacctcatgacatatgggtgatacctgagtatgttgggtcccagatggagacacttgaggcagtgagctggtatcatttgtttctagatatctacgtctgcatgatctcctttgcgcacaatgtagcagcacaagggaagtacattgctatagttagtacaactgtggaaaccaaggagcctgagaaggaaatcagaccagctttggagctcttggaaccaattgaacagaagtgagttgtgttcttttatatctgccgagatgcaaactgaggcctttgattgtggctccatggtgggacgaatgtgagggcaaggcaggtagctgctggctgctctgtgggattcatctgtacctctcagttgacctcaggcagagccatggtcaggtgtgggaccagctcacctgactgaattctctctccctccagatttgttagcatcagtgacctcctggtaccaaaagacttgggaacagaaagccaggtgagtatggaagtgtgaaaggatatgggcaggtttcactggaagacatccctccatggtcttaagtcttcgtaatttttgttttcagatctttatttcccgcacatatgatgccaccactcattttgagacaacgtgtgatgacattaaaaacatctataagaggatgacaggatcagagtttgactttgaggaaatgaagcgcaagaagaatgacatctatggggaagactaacagcagtacatgttattatgtaattaggacacatttaaaatttggcaaataatgcatataatgaaatcaatattgtaaggcctgcttttgtaatgaaaatggagagaatgaagagcgctgtgccagtaaatactccccttcacctttctaattattaacttgttttcatggagtggctattcagcattggcagttaccacattctgttcaatttaaccaaactggctttttttttttctagtgaagttaaacaaacattgggataccgacacagacaacttgagacagtttttttaatcttttaatcagtgtagctatgtgctgctgctgctcaagagctggatccatacaggttgtgtgtcatctgtcctcttgaggttcaggagattctaaattgaatattccacggtttgggacagcatccggaagttttccctatgactttatattttgtattatgtcaaatgttatggcagggcccaaatagcatagccacaagtttggtttatgtgggcataaaattctaaccaaaccccagacatagggagtcatttggagaaagcctgtatgtggtgttttaacctaataaagttgatgagagagaaggggagaggaagcgaacataaagcgggtcaagtgtagtgcatcttttgtatctcaggcgtggcttcttcagtggaccaagctgcaatgcagtattgacttgacagagcctctacttctgtctcaaaatggctccaaatgatttctgtactgcaaaataaagccaaattctggaaactactgcccggtgttggtttgtgtgtcctgattgcaagggtcacagctgccgtgcttcctttggtagcactggagtcaatgccagtcagaatgctcagcagcggaaagcgtgggtgtcttctgatctggaaggatcacagcaggtcctgtcgtctggcttccctgtgagtagacctcgagttttattcttgacacagtaccattactagacctatcatctttgtgcagaaaaaatagtgtttaatgattttgcttgtagcagcagttataagggagtaagtgaactgtcaggtagagtaggtgctttagtaaataatttttgtgtagttgaaatgataaagtgtttacatataaggccctttcccctgacagtgatgagcctcacggcagatgctgttgtttaccacagata

SEQ ID NO: 59635 - DNA, 1116 bp, Homo sapiens
accaaaatatgttaccgtgctgagatgaatccgtacgggtctgcagcaacctcagttcttttctcctcagaagaaagaatgaccaaggggcataaggtagaaggagagactgaggcaagttttagagcaggagtggacgtttattgaaaagctttagggcaggaatgaaaggaaggaaagaaagtacacttggaggagggccgagtgggcagctcgaaagacaagtgcctggttagtgattttttttgacttcgtatttataactgattatgtttgtgtttttgactctgttttcttgctttaatcacttctaagctgacatctttctagaaggaaattgaacaaatgtatattgtctgtaactcattaagatctaagaaaggggactttaggagttgaaacaactatatattattaattgggattttaaaaattttccaggctaagtgctatttatggaggtacctatatgctgaataaacccattgaagaaatcattgtacagaatggaaaagtaattggtgtaaaatctgaaggagaagtaagtagcttttaaaatgaaaaaaattactatgttcttgtgaagaaagttgtgtattctaaatattgattttggtgtggacactgatgcatatgatttctgtatgggaagttagtatttattgtgactaaggactaattacagttgctgtgctttgttttaaaagcatcttttttgttgtcagttgttgattattttaatattgaaatatgcattatgggtgagctctaaatagtaagtattctgtatttatagagtttgggttgtgcctgtctcccaaattttcattgaaattgaactgtacttgcaggccacctacacgggtggggttttgagcagcatttctcaaatgtgaattatatataaagcatcattaatctggttctagtgcatgttctaatcagtaggtctgagaaggctctgcattttcttgaaacctcttaggtgatgtggatgctactgaaaaaaaaaatcacaaggaaaaaaagatcgtttccctttatcaccatatgaattaattcttctgccatttgacactgttactatctgcaacagttcttgcagtagaggatgca

SEQ ID NO: 59636 - DNA, 1505 bp, Homo sapiens
aagattggattgtctttctgtttttgacttgtaggagatcttggtgtatgatggtggcaagtcttttgtcatatatgtattaagaatattttctcccagtttatggctggtcttttgataagcataagtgttaactttttttttgagatagagtcttgctctgttgcccaggctagactgcactggcatgatcttggctcactacaacctctgcctcccaggttcaagcaattctcatgcctcagcctcccgagtagctgggactacaggcatgtgccaccacgcctggctaatttttgtattttgggtagacggggttttgccgttattgaacaggctggtctctaactcctgacctcaagtgatccacctgccttggcttcccaaagtgctgggattacaggcaggagccacagtgcctggcctagaagtgttacattttgatgaagtccagtatatcaaagaaaaaatttttttaatgtttatagctttttgggtcctattttagaagtcttttttttttttttttttggagacagagtctgggtgttttgcccaggccggattgcagtggcactgtctcggctcactgcaagctctgcctcctgggttcacgccattctcctgcctcagcctcctgagtagctgggactacaggcgcctgccaccgcgcccggctaattttttgtatttttagtagagacggggtttcactgttagccgggatggtgtcgatctgctgacttcatgatccgcctgccttggcctcccaaagtgctgggattacaagcgtgagccactgcgcctggccctattttagaagtcttttacttgcccccaagggcacagaaatactctcctattgtctttttttttttttttttagaagttttataattttatctgtgcatttaaatctgattcatcttgagacagtgttggtgtgtgggatgaggtaagacttgaggttcttttttttttttacatacgaatatttagttgttttagctgcatttgttggaaagacttccttttctaggtagtcgtggtgcctttgtgggagatcagttggctacatatgagtttgttttgggactcagttttgtttcagtgatttgtatttcctatgccagtactacactgtctggataattatagttttatattaagtcttgaagtaggtgataacactttcgccaactttttcttcagaatttgttttgggtgttcgcatttccatatacgtttttaaaatcaggttgtcaatttctagaaaacatgcttgttgggattttgatattgagttaaatttgtagatgagtttggagaaaatgatcatcttaattatgctgagtctgccagtccataaatatgattgttctccatgtggttttcttctcagcagtgttttacagctttcactgtagagatctatcacatttttgttcaatctctttgtactgatgccgctgttaatgtattttgtattgatgctgctgttaatg

SEQ ID NO: 59637 - DNA, 1718 bp, Homo sapiens
gaattgaagactttataagtaacctgttataatcgtgtcagtttaaggtgttgtgaaactggaagccatgctgtccaaactcccatatcttaaattgcatcctgcattttaggcgcggtggctcatgcctgtaatctcagcactttgggaggccgtggtgggcggatcacctgaggtcaggagtttgagaccagcctaacatggtgaaaccttgtttctaccaaaagtacaaaaattagctgggcgtaatggcggttgcctataatcccagctactcgggaggctgagacaggagaatcgcttgaacacgggaggcagaggttgcagtgagctgagattgcgtcattgcactccagtctaggcgacagagcaagactctgtctcaaaaaaaaaaaaaaaaaaaaaaattgcatcctgcattccgcagttgataacaaggcatgtttaaactttgctctcatacttcgttctcctcaatgtctgattgtgagtgtgctttttgaaaaattcttttttatttaggcctaatgggattgtttgaaaaacgtcgcttcaggaaattcctagtgtatgttgccaacttcgatgaaaaagatccaagaacttttgaaggcattgatcctaagaagaccacaatgcgagatgtgtataagaaatttgatttgggtcaagacgttatagattttactggtcatgctcttgcactttacagaactgatgagtaagtattttggtttttagatttgtatttttcttgaaattctcactaaatttcccaagtcttccaagtggaaattctaacaaaacaaatacttagccatattgcactatgaatgaagaggttctagttgaaattagtgttgggaccttttaagtgatttaaatataaaggtagtgggccaggtgtggtggctcacgcctgtgatcccagcactttgggaggccaagttgggtggatcatttgaggtcaggagttcaagaccagcctggccaacatggtgaaaccccctctctactaaaaatgcaaaaattagttgggcggtagtggtgcgtccctgtaattccagccacttgggaggctgaggcagaagaatcacttgagcctgggaggtggaagttgtggggagccgagattgcaccactgcactccagtctgggcgacagagtgagaccctgtctcaaaaaacaaaaaaacaaaaaagaagatagcggattgaaatcgcttcaaaaaaaattataaattgaacaccatgaatgaaaactaaagccctttcctaatactcatttcctttcttccagttacttagatcaaccgtgttatgaaaccattaatagaattaaactttacagtgaatctttggcaagatatggcaaaagcccatacctttatccactctatggccttggagaactgccccaaggatttgcaaggtaagagcctgtgtttaaaacctcagtgatccaaaacctcatcttcaacataatgtgtatatgagatatagtttaaataatgagatgagatcagtctatgagtaataagatgctttttatttttattgaaataaaattaacatataatgatatgcatggatcttcagttaaaaaaaatccagttttatacaactgtagctgatgtgctcttgtaagtgccaactcctggctggaggccagccaatacaaaaccagcgcacttaacaaaaatacaaccaaggaccttc

SEQ ID NO: 59638 - DNA, 1035 bp, Homo sapiens
aggatcacctgaggtcaggagttcaagaccagcctggccaacatggtgaaaccctgtctctgctaaaaatacaaaaaattagccgggtgtggtggcgggcacctgtaatcccacttactcaagaggctgaggcaggagaactgcttgaatccttggaggtagaggttgcaatgagctgagattgcgccattgcactcctgcctgggcaagaagagtgaaactctatctcaaaaaataaataaaaaaaaaaaattaaaaggtgactaatgtcttagtgttattatgaaacagttttaatcttgggatgcataggagcccacagaccacacctggacccctggtttcttaagggctttcttcataaattatgtcatgttgcatgaatataagtgtaattactaagagaatgtgtaatggcaggcttgaaaaaaatgatctgttttaaatatgctgtagaactttcttttcaaggtactatgctttttctataggaatgtatcctgtcaggtataatgtcagtgaatggcaagaaagttcttcatatggatcgaaacccttactacggaggagagagtgcatctataacaccattggaagatgtaagtgttagtcaaatttcatacgcctctcacactttgtgagtatttcacttgtgaatctctaccttattccttagagatggtcttaattttgttttgttaaatggaatatctggagcactgtttttcaggagcttctggtttgaagctcatagaaatttacattttgacttttgttgctatgtggagcagttatctcttagcattaacagagaatagtctaggaagggagggtagaggatcgtctgatgtgccagcgcaagtccagtgctttcctcatggctttatttattttctcagtccctcaaagattttttttttaatctccatttaacatagtctctgtggggttaaaatctgagatgggttgtaaacccaagttacatgactacaaagcttagttccttttgctatactgccttgtttcctacttttt

SEQ ID NO: 59639 - DNA, 2107 bp, Homo sapiens
gccctacccactgcaggttttgtgcttttttttttttttttttaagtgcctaattgggattccaagctgagcttagtagtttgtggtggattttgcctgttggaatgggtagtgttgctgccagcgtgttttaagagccggttagttccaccgtttttctatggttgttgctggtctttcagatttgctcacaattgaggtcagttaagcatgcacgagtgagtgcaaatccaccatcatgcaggcttccacaagcctcgttcacatcactttgtatcaaagatggtgaaagtgtttttatataacaagttaagataatgagctttgtttaaattttcattcggattgtgaactctttgatgaatggtagatgcatacttaactagaaatcagacctgtttctgctgtcattttgtagctgtgataactttaatctctgtgagccttcctaagttttctgagatgttctttgataattatatcaattcaggacaatcacattattaccatcattgataggagtagtgatgacaggatgattttgataatgagaaatcatatatccttatttttagtgttaccaggaattagatgattaaaaattagaagaagagaaaaccaaagttagcactcagaattaacttttgaatgtctggagttaattaattttcttaaaatttactttagtgcctgagacttaagaacctaaaaaaaggcaagtactttcagtgttaggaacttgttacttttaaagaagtgtaaggaagtgctggagttgctgtgttgcttagtgctgccattgtttgtatgagttgttaagtctaagctcataatcacaaatattgatagttatcttaatcaagaagatacaaaacgatttggtataaaggagtaaaatcttcattctgtgtgtaaaagaaatggaatattccacacaattgaattttctgaggaactaaaggttatctctaaagagcacagcttttggataatgcctttctaaatgctgtcacaacttctttaacaaactaagaaacataatttacttgataaccaagttttcacatagtgaagattaactattgtgttatgctgtaacatggtgaagccatgaagaccccgccagctttgtaggaacttttgccccctttactctcaggctgctatgctttttgagctcttcagtttactcttcatattttttccctctatcttactttactgttaggctggcaacatttacttttctctgctttcagcatgtgtaggcagcctctcaccacataatttgcacatagttcactatggacttggaaataaattcacgagtcttgttagacatagtagattaaaacaataagagtaactagttccacagctgtttgtgcttcccagaggtttttttcttcccattttttgttctacacagtaagaatttatgaatagaaatatatactttagtgatgtataccagatgattctcagcatcatatgtttaaaaacttgctttacatcccagatacttttcctcatttctctttatcagaattttgtgatttcagattcagagaaggttttatacttgattttaaaattctgaactaaaattcagattgcctcttggatttgcttaatctttgatttgctctttgagagttcttgcttatagctgtgttagagttctgtagacaaaggactttctattcactacagtagtgagcataggatcaatatttgcaaatgctgttacacttgggagctgtgttgtaggcagtttaaaccagcgttaagcatcctggccaaaagaaaatataagtgaaattagacatattttagcatgtagagatgacaatagtgtgacattggtttttaaagaccactggtagatgttcacatgcgtgatacactgcaattacctctgtcttccctcccatggtacctgattggagactcttactggagtaatagtttcagtttcagttatttaaacccagtgactattgtgatcagttatgggcagtaaaaaggtaaacacagaacctgtctataagtagcttgttctcgtgttggagagtaactaataagaattagtatgagaaagcattaa

SEQ ID NO: 59640 - DNA, 1010 bp, Homo sapiens
cagaacggtggtggccagcagtccccgcccgcggctccgtgcacctccaccccggcccgcgcgccgcctcccgaaccaccgtggcagaggccgcaaggggaaccggaagccaaaatggcgacgccccgcccttttcctctcgcgagaggcggggaaggaaaaaaagttgtgcgagcgacggggacgtaaccaattagagtgccgggagcgcctgattggcggccctcccggcgcctgcaggccccgccccggctgcggaggctcagtcacagccctcccctcctcgctccctcccctcctctccccgcccagttcttctcttcccgtctgaggtggcggtcggtctcgccttgtcgccagctccattttcctctctttctcttcccctttccttcgcgcccaagagcgcctcccagcctcgtagggtggtcacggagcccctgcgccttttccttgctcgggtcctgcgtccgcgcctgccccgccatgaatgaggagtacgacgtgatcgtgctgggcaccggcctgacggtgggcgccagggctgaggggccggggctgagcagccggggcgggcgcacccccggctcctgcacggcccgcgggtcgcagctcctcgggggtctcgttctgccgtcagccgtagttttcgggacgggagtcgtggctaggggcgcgggcgggttcaggggcgccccgcgtcccggggcgagcgggcggctcccagtgtgaggggcaggcggggaaatggagatgcgggccgtgaggctcggggcggggtgacggccgagcccggcctctgcgcttgcccccagcggaagcggaggggaggggagaaggccgcccgggccaagggtcccgctccccggtttgggccggtgacctcgcccggttggaaaccagcacccgaggcggaggggacggtgcaggcctcgcggttgcatttcctattccgcctcggccgctgccccgggtcagtctggctgccaaagccgagtacggggtttcct

SEQ ID NO: 59641 - DNA, 1040 bp, Homo sapiens
tgggattgcaggtgcatgccaccatacctggctaattttttatatttttggtagagacggggtttcaccacattggccaggctggtcttgaactcctgacctcaggtgatccacccacctcggcctcccaaagtgctgggattacagtcgtgagccactgtgcccagctcagacacagatgtcttaaatattttggctgtggaattgaaggatgggggtaatcaattgattatgaaggatgcaggaaaggcagtggcaaggggtggcttccaggtctctggtgcaggaagctgaagagaccaagtgctgtcaaatgggatggagaaggttagaggagcagcaggtctgctagggaagaccatcacgctcctgaaggcttagtgctcagttcggacactgagatgggggagaatagagagagctccatgctcacaggtcatttgcacacacgcagttcacctgcaggtgatcaggtgtcaactgtcccctgggtttgaggtattgaattttctcagctcttacttggggttttggctctaggtgccaatatgaaccagactacagagacaactgtggcgtcaccgccttgatggacgcaatccagtgtgggcacatcgacgtcgctaggctgctcctcgatgaacatggggtataaaaatggttgtgtttttattcttttggttcttcctataaattttaggtcacaggttaagcagagcacattgttactcagatcccaggttccattccccagcccctccaaactctctctctggaacttggtgacctctttaagcaccagtgttcccatctgtaaaatggagagaaatgtagtttcttcagaaagttttacaaggattaaataatataatgtacataaagcagttagcaaaatattcagtaaatggtagctgttttatagcaataataacaacaaactgtctctgctgatagtgcttttggcaccatagcctggaacattgaatcataaccatctttttgattagagagcccttttttgagagcagggcgtgatggct

SEQ ID NO: 59642 - DNA, 1025 bp, Homo sapiens
tttttcactttacatttgtctcagaatcattggtgcttagtaaatgttcactgaacaaacatgtagaagagattaggtaccactctaacactataaagagaattctgagtcccgactttttattttaaaaataaattaatgtgtcaccttcacaggaagaaatacaaataaaagctgggcgcaggggctcacgcctgtaatgccagcactttgcgggaggccgaggtgagtggattacttgaggtcaggagttctaggccagcctggccaacacggcgaaaccccatctctactaaaatacaaaaatgagctaggcatggtggcatacgcctgtagtcccagctacttgggaggctgaggcaggagaatcacttgaacctgggaggtggtggttgcagtgagccaagatcacaccactgcactccagcctgggcgacagagtgggattccatctaaaaaataaataaatacataaataaaaaagaaataaaaataaaagttttagcactgtcaaatgagaagagtgagattttccgaatcctgatgaccccaagcatgtgaatttctgcttaagcacatgtagacttgctgttgtagagttagtgggagcggggcactttgtgagtggcggtgtggttgtgagcagtcacctcctttttgtctgtccattcagatgttccctgtgcagcgtgtttctctgtacttgtttttactgcagggagtattgctggccatcacatcatgtgaagactggtctctgtctctttgcaaatgtgtgtctggtaatatgatagagccaaatataaatattgtttggattagttatttatataatcagttggcccataaatgtgtttttatctctttccactattaacatagataattgaaaattagtgtgtcttatatggattaacagcaggtcaacagtcatcgttcatttcttgtccatcctgtttgggttctctctacaggtcagggaagtcaaagatgcatccctgagttcttcctagcaggcaagcagc

SEQ ID NO: 59643 - DNA, 1081 bp, Homo sapiens
tggccagggtatgtgtatatgtgcgtcagcgtgtgttttgtcttctgtcgactcttcctcatacttaaggagggagatgttttgcttcactttagcaacatcattgaggttaataatgtaaattgtgtaaaactcacccatcctaagagtgtgattcagtgacattgcctgagctgtgcatcagcatcataatctagctttagaacatgtttattctcgtaaggggaggccttttttttggtcagcttttgtttatccagtttgtatgtttggtttttggactgtctatcccctggacttttcacgtctttctgtttttcttacttctcttttgtaatgattatagcaagaaaaccatccaacttacacatgaacaacagctgattctgaatcacaagatggaacctctccaggtggtgaaaattatggcctttgccggtaagggagcccacatcaggttcacgaggtggtggttttctgccttttctccctacatccccttcccgctacctgccagggcatctttgctctgatctgtcatccaactaataattcaataacagatcaaataatcaatctcaaaagcaattggccaaggaatacttacttccccggaccactccatgaacatccacagaattcctgttgagacaggtagttcacagcagttagttggtcgggcagatgcccccgggattgagcccagcattgtgatgtttgctcaggcactgattgcttctggagagggagggcatgttaatccccagcccagggtttcaggagctccccagttttatagggtgatgtctagagggcctgccttagattggcttttaacttacattcataaatatattatctacaagtgtcctgcctcagtcagccacgccgatccactcacagcctcctgaagtacttggttactctttcatcacagcctttgctcgtgctatttgctattttttttctgcctgtaatcccttcctgctccttttgtggctaaataccctgctaacaacaacaacaacattttgaatgcctgcagtgtgcttggcattgtgctgatcctgatagcattccg

SEQ ID NO: 59644 - DNA, 2447 bp, Homo sapiens
taagaacagccaaggacagagagtcatggttgagcagagtgaaaaactggtgagtgtctaagtgtctgaagtgttagggatctgaggatgggggaacaggggaagtgttagggatctgaggatggggaaacaggggaagtgttaggggtctgaggatggggaaacaggggaagtgttaggggtctgaggatggggaaacgggaagtgttagggatctgaggatggggaaatgggaagtgttaggggtctgaggatgggggatcaggggaagtgttagggatctgaggatgggggaacgggaagtgttagggatctgaggatgggcaaacagggagtgtgggacagcattatttcttctttcatttcttcagacctggtcataggaggttgaaggtgggagggtgaggctgtaggcccatggtgatggctgtgaattgttgggtattttctcctgtgaaggacactggtgaccatctcacttaagcctcggaatagtcctcccatttaacagagaaggcagacatggaacgacccgcctcagtttataagagcttgtcactggggctcctggacctcaaaactgatcttaactgaaggctggaatctctcctgattttcttgggttattggttctatggaatagattttgctagtgggaaagtctgtttctttttttcatcaagtcttttcaatcatgtgccattgtttttgtgaattaagcatcagtcataaatctagaagaacaatttggccttttctggttcacctaactgttatgatctctgtcctgtcacgggcatggcacggcccggctgcttcctgtctcagcactggagaccctctggcgtggagaggctgttgaggagacccaggaggttagggtggtgtctgcggtcccccttctgtgaggatgccctggctccactgctgtatgggagttgacagtgtgaccgcagggtgctgcctttgccagggtctcaaactctgggttaccatatgctttacttcctagaatggtgtccttgaagcgagccgcctctgggataacatgcggaagctgggggagtgcacagaagaggcgcaccagatgactcatgacggtaggcggctgccgaatggcggggactggccaatgggactgccttcctggcgttacaactcctgcgtctctccttattttaggctacttgaaactctggcagctgagcaagccttcgctggcctcttttgacgccatctttgtggatgaggcccaggactgcacaccaggtgatacactgttcaggacatcagtagtgtcaaatacgtagaaacagcgccatgattatgtaagaggacacctgtgtgaactaagttgattattattatttgtgataaagaagaggatcttcatacttaccttaggatttcaagctgccccttcccctcacccaagcagatttctctgtcaccataggttttgcttaggttgttcttaacatgttgaccaagttgtagaccagcagacgacagggacctagactcatgctctgtgggaagagatcgtccattgacagggaaaagcttgtgttgtctacttctcaagtggctaggagagaacagacagtgttatccgtctgactttgtaggtcaattttgagtgctataatattagagaagacactgcctcattttagatttgcctgtgttgttttcttatattccaacaattcatccaaggcgaaacataatctgcattcctagcaccagaaactgtttcttttgtccattataaaatggctgcttttgatggagtgtgcctgtcctacaggaaaaggcgaccgtgaggtccagtgtgccctggcttagcttcgtggaagtgtttttgtccttttctttttgctgcctggggtggaggcctcaaggtttctcacttttcctctcgttggttacagctatcatgaacatagttctgtctcagccatgtgggaaaatctttgtaggggacccgcaccagcagatctataccttccggggtgcggtcaacgccctgttcacagtgccccacacccacgtcttctatctcacgcaggtaagtgcgcactctgcatgggaggcattgcatctctctcccaatgtcttacgtgccaggccctgtgaaaggtggtatgccaggctcaccagatctagcaaatccttgcttctaagccatggttctcaaagtgtggttctcaggggtctgccaagtcacactgttttcataagaggtgtgtgcacagcggtcgtctgaggaagagctgctgcggctgaactgtgaaccgatggctgctgccgccttgtacatttgtgcttagaacagttgttagaccagcgctggttgttcagacttgtgtatttggcactttttcaaagacaagtgaaacaagctgcgacttcagggaaaataactgacagtgtttgttgtcaaa

SEQ ID NO: 59645 - DNA, 1044 bp, Homo sapiens
gaccttgaccacctggctgatgtagtgtttgtcaggtttcttcactgtagagttccactttttttcatcctttccttactggatgctttggaaggaagtccctatatgcagtccacactcaaggagtaagtgttggagaatcttcccaaattatttggaattcttctgtaaaggagatttgttttttctctcccatctatttaaatattcaatcatttatctatcttaatatgaactcatggatatttatgttataatttcggttatggttcactcagagtagttttatagcaacaaagtagtgtttgtttaaagtctagttttcgtttgactgttactgctattcaccaaagcacatgaagttgtgtgtgcatggaaaaaggctgtacacaccccgagtgtagggaagaatgatatcttgccagctggaggggcgaaggaagcagggtcttgggctgagttttgaaggttaggaagtgactttggtggatgaaagtcagacagaaaaccgcgtgggctgaggcagggcagcacggacaatgtgcaggtgctagtgcttctgccatggctggttggtgcagggcagtagttttaaaggtagtgtggagagggatctcaaaggcaaggggagaagccctccttacccgatcttcatcttttgtatgatttagacttcactagatttgatttggagaaaagggtagatttgcttaaaagaaaaatttactattggtgttgagaataatggaaaataaagactgctgagttgtgaaggaccttgaaagtgagcctgtgaagttcgctttccatgcggggggtcaggaacaacttgtagggtctggcccggccaggctgtggcagcagtgatggaaatgcacggacacaccacagggcgggctgctgactccctctgtcttgttgttttcagagttttcggtttggtgtggaaatagcttatgtgggagctactatcttggatgtttgcaagagagtcaggaaaaagactttggttggaggaaaccatcagagtaaggcttttagtta

SEQ ID NO: 59646 - DNA, 1476 bp, Homo sapiens
tcctgcttgccgcctgtgctttgggtgtcactcaagatccatttccaagaaaccatctcatttcaaaaccccatccctgcatttgctttattttgttttgttaaagcaacaacaaacaaaacaaaacaaaaaacaacaaaaaaacaaaaatcccaccaaaaaactttttcaggggattaaatcatttggattggacagaatcattgatatttggatccttcttcagccagaggaagaacggaggaaacgtgagtacccacctggccttggtgcattggaaggacgcacccaagtgacagggacgagaaagaagcaggcccagtctgagtcagggacccgtttccctccagagaagggcgagctagtgttgctgtcttcccatgacgaggggggtgcctcgggcctcctgttttcataggtactgacagatttttccagatcctcctcacaggagcctcagtctctttccaacactggtcccatagactgtcttcccctgcatccttctgtctgcctgggccaatttatacgttgatacttccacgtgggccccaagtgatagcgtcgagcatttctatagcgcttttcttttcctgttgactgcactatttcaaatccctgtgaagtaggtgaggatcttgagccgagggctttgctcctcagtcggagacggagaggctactgcactgcactgacttgcccagggacacacagcgagttagtgatgcagtcaggcctggaacccgggtctccccactttaagaccatctgctcttgcgcagctgcttaggaacgtgcagcacctgccaccatctgttagtggagcttgtgtcaccttaatttgtgtgtatattcttcttagaaaacctcgtcattaaagacaaatttatcagaagatgggtgcacaaagaaggctttagtggcttcaagaggtatgtgaccgctgccgaggacaaggagcttgaagccaagatcgcagttgttgaaaagtataacatcaggattccagagctggtgcaaaggatagaaaaatgccatatagaagatttggactttgcaggtaagggaagcagttggtttttaccttccccctaagaggaggaacagatggtcttctgctgttctttttttttttttgagacagagtattgctctgttgcccaggctggagtgcagtggcgtgatcttggctcactgcaatgcccaccttctgggttcaagcaattatcctgcctcagcctcgtgagtagctgggactacaggccccaccaccagcccggctagtttgtgtattttttgtagagatggagtctcaccatgttggccaggctggtctcgaactcccaacctcaggtaatctgcccacctcgacctcccaaagtgctagaattacaggcgtgagccactgcgcccagcctcttctgctgtttcttccctgtgtggaatatctttgagcaaggatggctttattgctta

SEQ ID NO: 59647 - DNA, 1048 bp, Homo sapiens
tataatgtgaatacacaatagttttctgaagattgagctggggataccttagcataaaataaaatccagaaatattctggaaatgtcattacaggcaatagttttgcatgtttatctgttaaatatatatatatttaaaaagcaattggactgtcagttggactgtcgatagctttggaggcagggaaaagttagaggaagtaagggagaacgggttaggcggggtttttctctctgggacttacagtgcatctaaagggttctcacagagccgccgctatcagtgtttccagtagaccctaacggaggtgtcgccatgactctctttctcgctctttctttctcaggagtacttcttgcaagcagagctgacaagcaacgtcttaaaaacaggcgtggtgcgctgctgcgtgggacagtgcaacaatgccatccctgttgacaccgtccttaccatgaagaagctgcccatcacctatgtacgtctgctgtctgtggaacttaattcagccatttgcattttttgcttgtgagctctgtgcttatctgggttgtaggtgaggagataagagagagctgtgtgatcctttattaggggcttttcatatgagaggcacaagaggtgtgtggtctgtcccagggtcagaggtcagggcacgtgatgctgcctggctgtgctgaagccgcaggtctgggaggctgggttgtgatacacgcttagagagagagctgttccctggggtcccagcgcagcttttcttggttctttatcttgactggataaatgactgtttctgagctcagggaatttgggggtgttgaggccacctagttggtggtgctgtgggaggtgttactctgaggatgtgcacccctctgaaaacatcagaatccaaatgcgttgtccctgggcagctgtgatgataactccatgctttttgctggaaaatccatgttctttggttgttccccttagctctctctcttgtccatcaccacagagcaacaggaaggaaaacaaggggggctacctctgccactcctgtgc

SEQ ID NO: 59648 - DNA, 1054 bp, Homo sapiens
ctttggtaggatcctggttcaaaaaaaaaatcagctgtttaaaggacatttttgggatatcttggagaatctgaatgtgaactggatgggaaatgacatgggaattagtgattttattaggggtagtaatctgacaggagaatgtccacggtttcaggagattggggtgaagtgtcatgatgtctccaactttctttcaaatggtctagcaaaaaatacaggtgtaagggcaagaagtatggtagaacattaacaataattgaatgtatagaaatgattttcttttaaaaacttttttttgtagattcataataaaggagataggaaggattctatatcctagtaggagggaacaaaactcttatccccaagtatcttttgaaagtgactaagtttactgtaaacctttcacagaaatggagaaaatctcatgtttttgaaaaagctgaaagaaaataatatatgattatagtaataaattaaaaggctgttgttttgagattatggttttctcatatctcaaaggtttgttgcagggaccagaaagaaaatctttgttgcaaacagtgtgaattttaatttgaaacttcagtatgttttccttgtttttgatgattttagagccaaaggacgaaacaaagtacagtcctcgccccagtcattgacctgaagcgaggtggctcctcagatgaccggcaaattgtggacactccaccgcatgtagcagctgggctgaaggtaagcccgcgcctgcctgtgagcttgatacgtgtctctgttcccatgtggcttattttgcatatgagttactcttaacagatggcctccttggtgggcctttgaaaccaagttagtatcattttccacctaatttttacttctgttttgccaattttaaaatgtatctatttgaaattaaatagtttgttgtagaaaaatcagaaactagagatacgcagaaagaaaaacaaattaccttcagtcatacaatccggaagtgaaaaacgtaatatttttccatcctgtgcctactccaccttctgctaacttgctt

SEQ ID NO: 59649 - DNA, 1483 bp, Homo sapiens
tgatgttgaaaatttttttctatgctgatactctgctataggttgactatcccttattcaaaaatccgaaatctgaaatgctccaaaatcttttgaatgccaacatgccgctcaaaggaaatgtgcattgggggattttggcttagggatgctgaactggtaattgtaatgcaaatattccaaaatttgaaacacttctggtcccaggcatttggaataagggattctcaacttgtaaaatcacagctatttaaagtacttgaaatattcttcttaactttactatttttgagccaggtggaatttttaaaaattcatatgcagcttttatttatgtttttgcaaagtacgagtagtaggatgtatttgtagttctttttaaaaatatttagtattatcaaatagttaacatgtattaaatattaatatactgtttcccatttattgaatcatttcatgagtgaaagtgttatagactattgaaatgattgaactattactatgttgataggctttaacattggaagaggtcaatgtcaaggaaccttttttttcatgctggttgctctcgtatacttattggttcaatttatctcttgaatttttctcacttttcatacttttatctactttagtcttttaccagttatgcttcctaccccctctacccctgcaacttcatagttgattgtgacaggatttggatatcttctggtcaagaggaagtcatcccaggttcaggtctctaaattggttcatctgtgatgaacatttatttcctttgttatcacagaaggcgtaaagacagacatgaagcaagtgggtttgcaaggagaccagatccagattctgatgaagatgaagattatgagcgagagaggaggaaaagaagtaaggcatgaacaaatatgtcttaaacatatataaatactggaagtgcaattccactatgtgctttttcttttcagtttgataaatagttcatttgacattgatttgggtaattttctttctggaatcccagcaatacacatttgcgtcacagttttaatttatattgggttttcatatgtattttcctttgagcttcacaaccactttctaacatttatttattggatactttgggactagcttaaaatctattcctgcactgtctttacctgcagcacagtccagttggccgatgctgaatccactctgttgtttctcttaggggggaagcatagttaacattgagtgtgtctgttttgggcattgtgacacatttcatatccgctatcttagttaatccccaaatgtttggtttttattaacttcttttggaattcagtatataggttgaatatttgtaggtctcatttttccagcttataaattgactgccctttttaataaggaggcatgctttccatactaaggacatttgtttttttttcttaaacaccagcaggaactagatagctttgaatgagaagacttt

SEQ ID NO: 59650 - DNA, 2533 bp, Homo sapiens
aagagtgtaagtagatctgtttcttcctcttttattctgatacaggtctttaacccaaccatgggggatctcagcttgggcccccaggtttcctgagcgtagagggaaacggcctgcaagcctgcctggctctgtcacctgaggccgcacctggatctcagaatgcagcgccctcctgcagagagagacctttctacgccaggctctgaggcttggatttcatgcagtgggatccatctcttttttatgcaattcactttgatttcattaacatttcttatttgttgttagattcatttggagttaaaacagcagatcgttacagttttttaactcagaggtttagaggctgttatattcatgatcctccacaaggtggcaatgccttccttgattagattttttcttcccgttccatttcactgcaggtgggtttgcgtgtcattgcgttgccaaaacaccctcacccactgttccttctcgcagtgatctgctctagaatttgggggttgggactggacttctgaatatcatctaggtcattttcccattctctggattggaccatacttaaactatcccaagcagatattctcatttatagtactttttaaaacttgttgaattctttatcttttaaagaagataatttctaagatattatgaaatacctattatgtgaaaacaacagacaaacaataaaccccaattgaaactagtctctgggagtggggctcaggcatctggatggtcttaaagcgtcctactgactttcatctaactagggttgaagccaccgctccagtgcgtagcccctaacctcggacacctttgtgggccatgagctgatgagatagtgaggtcggggtctagacaggtgcacccaagttactgcaggagtcaaaagatggccagattgtatctccttagaacatacagaacatctttccggcaagaatattcattcaagaagattttaaagggtgaataacatttcagtaagatataaaaaagacgtttgaggagatagaaatagcaaaaggaaagttagaatcaggaaagtagcgtcctccctctgtggttttaaaaaaagtcgtataaaggctgtaaaattgatttggtgtttttctctccttgtggtaaaccaaaaagtaggttaaatttgttcaagataaataattgatacaagtgaggtttcagagtgttttctatagtattttggtgagcctactttatttttctccaatagtaccccgagattttccttatgaagaggactcaagacctcgatcacagtcttccaaagcagccattcctcccccagtgtacgaggaacaagacagaccgagatctccaaccggacctagcaactccttcctcgctaacatggggtaatgatttaatgttcttatctaaggacttgagagacagtgtgaagcgttgatagccctttcaatagatgcagcttgtttgaaactgaggacattcaggacccttggtgtgtgcaggtcacacggtacctgcctcaatcgtgtggagcgtgttccagtgtaatgatggggcttgttcaaaacagcaacctcccagtagaagttttgactcattttgatgttgaacattattttcctagacaggcacagaacctgattaatgtttacatttgccttcataacgtttgcaaataaaatagctcatatgaatcagagctgacttactgtctccaaagggcaggtgataccttttttttcctgataaagtgggccatttgctttcaggtcatggttctaaacctttggtctaaaaaactcggggtcattctaactacaagttgacatgtttgccagcatataaaatttgactgtaaggctgacgctcaggtggggcttggggatttttttaaactgtgctgggcttggcaaacattttggttaagaggatattctgtgttgttgactttgatcctgtgagacggctgtcccatgaagcagtatcacatgaaggctttgttctgtgctgtgttgcatctgctggctgctgcctgtagcagaaatgcagccggtgagacagtgagtggggttgaaactcactagtctcctttcaagtgctcagtgaccacatgcaagtggtgacgatgttggatggtgcagacataggacatggccgtggctgcaggaagctttgtgtactggagggttggacagacatgaagctggttttgttttgttttgttttgttttccctgtttatgataaaaactgactttttagcgaatttgcttttaaccaggaattacatctttaacttgtgcttaggaaagatgcaagatggtaccattcagcagtttctggtctttttagccctagaatagcttgttcaaatgaaaatgttaagggaattaaatacaagaagtaatgtaggtgcagttccagttgaagcgggattttgtggcttaagccctaagcagcagtggtcatggggttggggtgcccttcagacccatgctgcgcctcagagcgcagtgtgagagccattt

SEQ ID NO: 59651 - DNA, 3653 bp, Homo sapiens
agtgtggcagtgaatatacctgctatctccatctcagaggtcgtctctacttttcccttttgccctttcagtatagatgtgatttctgattctcttacagattgtttgctttgcgagatctgatgttatgttgcagtctcttggtaaatgatgcctagttggtgttttattttcatttaatttttacagtctgttctgtgttgagggaattcaggaaagagacaaacatatgttagcattttaatcagggaattaagtttgagtcagcctagctgaacttcctttgctaaagaaagaagaaaacttttctggcagccccgttcatgcacagcttaggatacatcacgagcctgacaggtgagtgccagaaaccaacagttgtcccgacttgtgaggttatctgaagtaaggcagccggtggctggattagtaactgcatattcccctgggcccgtgaccttgaacgtttgctccaagtcaactcacctataggaattatcactcacatgccctgtcagccctttgggaagtgagatgagcaaaaattgcaagtaatggtggaggctcaaaacatccagatgctattgtaaaaacatgccaaagcaaagcagaggcttttattgcagataaggctgtgttttcgctcagagaccaattgtgtagatgcctaggacataaatggtggggatcgctattgaaattaaattaattattgtaagtaggactcagttctgtaacacatctaatgatatgctgctcagttctgtaacacatctaatggtatgttttgatacagatgcatccaagaagtcagattcaaatccgctgactgaaatacttaagtgtcctactaaagtggtcttactaagggtaagaagctgaggaaagcaagctctctgcctgcctagatttgtgtgtgtcaccccagcctaccctgctccccctaaaagttaaaactgaaaatgatacttttgcaaataatactttgggcagatcccacgtaaggctgattttagatttttcactaatgtgtaagtctctttgctaagtacagtgtttaagactgcagtgagtaattaaatatttgaaattgctagagcttcagatagtttatacattttggtgcttgcatagatgcttttgtaactctttacaggcttaatatatgttttagtgttttaagaaatactaacttttgggtactttggggatgaaatttttcattatgtcgtttgggattgagaacatttaccatcactaagtcatatttatatacctctgctaggtgtttgtaagttatacttggtacttgaatttgtttatttttgtgtttaaagaacatggttggtgcgggagaggtggatgaagacttggaagttgaaaccaaggaagaatgtgaaaaatatggcaaagttggaaaatgtgtgatatttgaagtaagagtgttttcttttgatgtttataacacaagttgtaattggcacattacaaaacattttctacaaacaggacagggtatgctataagtaacattcttactgcagaaggtgacaggcgttggttatttgtacttctcttgctcaattattacagttttaaacataaagacaatgatttcaagttttatttgatgaagaaacaggaatgcttcatgattgaggatcagtatgatgactgaagaccttgattctagcgtgctcagtagtttagttccttagacatgcctttggtttcagtcatttggtgagtatttagtgcctctcacatgcactgcactgtgcggagagcacttggattacaggaagcatgctctgtactctcagtggtgtgttcagttgaagaaacacataaaataactgaaagatattcagttactagactaggtagtattgactaagttcaggagttgagaaaaggattagatcagtgaaaaaatagactgccttgtgagcaatagcagatatgggctgcgctttgaaacgaacaggtgggatttgcagggaagggtattctgattgggataatggctcgtaggagacagtgaagatcaggactaccaaaatggaatggatgggcctgttggggattagcagaagtgcttaggtgggtggaattacagagggctaggaaagctagacagagctagtcaaaatgagacctgatgtgaaaggccactagggcaccagcctttttaatctgaaagctctgcttcctctgtttctttatcctgttgctgtttgttgaccacataattatttgtttacgtcatcagctggcacagggcctttatgaggtcagagactgcctagccctgtgttcctggcacctaacaatgcctgtcataaaaacaggcattcagtacgtttttgatgatgaacaaattatacttatttccttggtatttgacaactacttgactgtatatgatgataattagaatatccactctgagaaatcatttaaaagagaaaactcattcaatgcaatctcaaatgcctttactcatcacgctctcattttcttccagattcctggtgcccctgatgatgaagcagtacggatatttttagaatttgagagagttgaatcagcaattaaaggttagtggtacagctaaatattaaagaataaaaaagttgaatttacagccttaatctttacaagtaaagttactgtttaattaaagttaaacctttatcttataggatacctgtattaactgtcttttgtttgcctttcagcggttgttgacttgaatgggaggtattttggtggacgggtggtaaaagcatgtttctacaatttggacaaattcagggtcttggatttggcagaacaagtttgattttaagaactagagcacgagtcatctccggtgatccttaaatgaactgcaggctgagaaaagaaggaaaaaggtcacagcctccatggctgttgcataccaagactcttggaaggacttctaagatatatgttgattgatcccttttttattttgtggttttttaatatagtataaaaatccttttaaaaaaacaacaatctgtgtgcctctctggttgtttctcttttttattattactcctgagttgatgacattttttgttagatttcatggtaattctcaagtgcttcaatgatgcagcatttcttgcactaaaaaaaaaaaaaaaaaaaaaactagaaagttttgggacatggggttatattaaattattctttgtttttctttttcttttaataaagcctgcaagttactaaattgtagtttcataaattctgtagtaaagtatcatcttggcagtgtgccaaaggtgaaaatgatgctttctctaacagagaaattcttagtgactccagtcgtagaaaaacgtctttacaacctgaataagattgaagaattgtgaacataccatggcctattggatgaatcatttgccgtaggctaaatcagactgtagggtttgtgatggatttatggagtatgtgggtatagaaatcatgaatctagcatttgttttcagagattcaagcatagtcttaagggtagatcagaaatgacaaatgaattcaaaacctagcaggtgcattgtaaatgtgtgcccagttatgttttggaaatggcagttccttggggtcatgtttctact

SEQ ID NO: 59652 - DNA, 1111 bp, Homo sapiens
tctctaatccctcacctggcttttctgggcaaaggccagcccgcttctcaccacccccttctctcttgcatatgcatccccccaacattcacacagaagcacgcacacacacaccccttgaggtctagactgggggtctgggtgcaggagggtctgagctgggagacctccccactgcagcagcagtgtcacaaacaagttgtcctgcacctaagactaatctggagtggaggctgggaaggaagcggtcctggtgctgccggcagcctttccatcctagggccgagctggctggggagaatgaggggcctttgaagtcccaggccgatcccttcgccagacctcccaggccaggtctccacgccagcactgtgtttcatcacaagtgcaaagcttccagcagagcagtaggtcccgagcgggagtgccgggatgtggcctcgaggcccccgcctgtcattgtctcccagcctcaggccctgttccccttctaggcttgtgccacaccaggctaagaatcagagcctgggtgtgggggcagggggagctggaggagcgggcaggactgcccagtgctttcctggcttagctgggcgaaatccaaatgcagtgaagttcgccttgcagtccagtgtccatggccagggcaggagggcagagggctgagcctctgccagacagagcagtgcccttcccagccccccagggtcttcacttgcttcacagagggtcagctggaaggactatggggccccacagacccacctgtcgccacaggttgagaacatggatggggcggtgcccagcacggtccctggctccaggacacagtgcacagccacagcccatacacgccccagccccaaacctaggagacttggtccttctgtgtcacacctctgttctccctggagttgcaggggattttctctggaaactacctagtagtttagggtcctaagaatttatccaatcttctttcagaagatcacccagttcttcattctcaaaaacaaagcacaaagactttgaacagctgcggaatggcttgtcataagccacacaggagaaaagtccgcaggcccagcaccacgccaactttggggttggc

SEQ ID NO: 59653 - DNA, 1041 bp, Homo sapiens
acacacacacacacacacacacacagctttctgaggaggagtacacagaagggaacacgatccagtctcaacactggcgatgacagaccgtcccattctctcatatgaaccctacacattgatccagcccagcctggaggtttcctaacatctcgtcagcagctagcatcgctgtccaaaacctgcccgttttttttttctttcttcttttttttttttttttttggcttgatttggctctatttttagaatgttttccactgggagaaggaagaaatatgaggggaacagagcagggagaggtgccagctgtggcttgccagcctagggttgctccgtggcatgtgtttacactgcagtcatgggccggccttgcctggcccctgcgggtcacccgggcatgcttcccatacccagcagaacgtgatctgggttccagtttctgttctccctagtcctgggttaggaaactcagttgttttgacattgactcttcccctcacccgtgtgtgtgtgtgtgtgtgtgtgtgtgtgtgtgtgtgtgtgtgtgtgttgggggatgtcactgatctgctggggaaaccaaggggtgaagaccaaatcatagagcagcccagatcagagggaatctattcagacatctggggtgggcttgcacagttacaaaaagtgctcatccagggattggttgacctaatactttatagtttttccaaaagtgcttttgctcatatccagtttggtcttcgtaaggacctcttgaggtagatggggctgctgttctcattctacagatgattttactgtgaatggctgtctgtccacctcagagccctgcaggatttatggaagctgcttccagcttcttatgtgagccagtactcgctcctacttaggattatatattgaggttggacatggtggcttatgcctgtaatcccatcactttgaaaggcaggagatttgcttgaggccaggagtttgagaccagcctgggcagcataatgagaccccctgtctctacaaaaacaaaagatagaa

SEQ ID NO: 59654 - DNA, 1068 bp, Homo sapiens
gggtgtggctggggggctgtggccactagggttgcctggtcccactgtggtacaatgccaggggcttcaggatggggagatgaaatgaaaatttcgatgaatgctgggtgtggtagctatgcctgtaatcccagcactctgggaggattgtttgagaccaggacttcgagaccagcctgggcaacacagcgagaccccatctctacaaagataaaaaattagccagggatggtggtgtacacacttgtagtcccagctattggggaggctaaggccggaggattgtttaagtctagaggtttgaggctgcagtaatcatggtggccaccgtgctcccgcctgggcaacagagtgagaccctgtctcaaaaacatttttggtgaaattcttcagtgttattgttgggtgtggcctctgctcctcttctccggtcacttggttgatgacacacccttcttgcttgtttttccagcctgtgggccaaagctgaccaactcccccaccgtcatcgtcatggtgggcctccccgcccggggcaagacctacatctccaagaagctgactcgctacctcaactggattggcgtccccacaaaaggtgagactgggtctcgaggccggacccctgctcgtgcaaaaacttgaccttccatctcagttgctggtttcacaggcaggaccacccctgggcgcctctgtcccctggtcggggagtctgatcctgcctcccatgcagctgggtccccttcacactgtgtctacaccctttttcttctgttggggttttctcctcactggccattctctttcccactcctctaagtcctgccccgactcagatttcacctccttcaaagccatctccagccacctcagtcctttacattcctgtcgcactcagtcctagctaacattcctctgctgatagccctaagcactgcctaccgtagatcaagggtcttcaacccccaggctgtggactgctatgttgggtggcctgttaggaacctggctgcaggaggtgagtggcagtgagtgcgcattcctgcctgagctccgcctccagtc

SEQ ID NO: 59655 - DNA, 1015 bp, Homo sapiens
acacgggacttttagtttgcgaagggcctagatagggagagaggtaacatgaatctggacagggagggagatactatagaaaggagaacactgcctactttgcaagccagtgacctgccttttgaggggacattggacgggggccgggggcgggggttgggtttgagctacagtcatgaacttttggcgtctactgattcctccaactctccaccccacaaaataacggggaccaatatttttaactttgcctatttgtttttgggtgagtttcccccctccttattctgtcctgagaccacgggcaaagctcttcattttgagagagaagaaaaactgtttggaaccacaccaatgatatttttctttgtaatacttgaaatttatttttttattattttgatagcagatgtgctatttatttatttaatatgtataaggagcctaaacaatagaaagctgtagagattgggtttcattgttaattggtttgggagcctcctatgtgtgacttatgacttctctgtgttctgtgtatttgtctgaattaatgacctgggatataaagctatgctagctttcaaacaggagatgcctttcagaaatttgtatattttgcagttgccagaccaataaaatacctggttgaaatacatggacgaagtaaacctctggtcttttcgtgggggaaagaagagtctttaattgatgtttacggcagatgcgccacggagctgccaactcaccacttcattatcttcctttcaacaggatgttcaagtacagagtgtctagtgcctgcatttggggagaatgagctgtctcaatttttcttctaattgataggcttcatgttttatttttatttttaatttaatttttttcttttttttctttttttttttttgagactgtttctcactctgtcgcccaggctggagtgcagtggcgcgatctcagctcactgcaacctcctcctaccaggttcaagcaattctcgtgccttagcctccct

SEQ ID NO: 59656 - DNA, 1079 bp, Homo sapiens
cctttagaattaagtagcttagataaattttcatcaaaatctttatatagtagggaatagaaaaaagtcaattctgttttatttgaggatgtatgaatatgttaccatttttcagactctgatttaccttccaattattgtttattggggtcattgtaaattagttatcattttttgaatacacattcactgctgacaaagtggtgaagccagaagttatgtttgaccagggaagattatgaccctcaaaggagaaaaattcacagggggtagttgattattggtggaatggagtgagagtgaattccttaaaagtttaaacgaaagcagaactatattcatatcatggagggaacttagtttctaatatgatgaactattgccccaagtcatgacaataccttgctctctggaagagaatgagtgagtttttcatccgccaagatacacactctatatttccaaccatcacatctgccttgcaggctgactgaacccagagcaaatcaatcacaaaagttaatccaaaagacttcccttcagctgctggaaatcagtcatcacatctgtgaaaagagtgctagttataacaaatgagatcacaaatttgaccattttattagacaccctctattagtgttaacagacaaagatgaaggttaagttgaaatcaaattgaaatcttcttccctctgtacagattgcaatatctgataataccctcaactttcttggtgcaaattaattgcctggtactcacagtccagtgttaacaggcaataatggtgtgattccagaggagagtactaggtggcaggaaaataaatgagattagcagtatttgacttggagccataggcatcaattctgctccagctgtcgaccaggttctaaaaacaagactcggagcagcttttgctcttgctagtgatgcagggccaggagagcccccacactctgcatttgcaggtgtccatgaggggaagccactcctgcatttatcctgtgagtggagaagctcagaggaatgaggacattccaacagggtatcagaattctcttttgtttatgctaattga

SEQ ID NO: 59657 - DNA, 1769 bp, Homo sapiens
tgggcatcatgccacttggaacttattggaactggcccgggagactctgcagtctgcgccgtttgaaaaccctgagaaagagatgccacctcaacttgaatcatgacagcccatcgctcagtctcaccctaaactcatggagcttgtttcagctcctcacttcttgactgtatttgtactatgttgaaaaaatatcctgtccacaaagacataagcctaacaacctagaaaaacaacagggtactactggcattacagaacttctttgcctttcaaaacaaaagcaaaacacagtgaacttcaccacggagctgcacagcgtggggaactcatccatcactttcaaaattagagtcatttgatccaagttggagtcagacacagtatttgagctgcacggcttctgggttctcccaccttatttgatcatattcgaaagattatttcctgtgtttgctttgatttgttcctcagtacattaaaatgatccacaccttgaacactgccctctctagaaggttgattttgatcagccttttgaagatgggtgtcgtttccctaacttatctcacagaattttgagtgttgtatttggcaagttctgagatttgccttctgtcttatgccaaacacccctttctaagagctgtccccgcttagttttagaagtactaggggttttcatacttattttatagaacacccatttatatttatttctgtatatagaactaaaaaaaacagtagtgttaaaaatctttgttgtggtttgagcatctttgctgcttttggattgagatggcgaatcaaggcttcacttcctctctcttctgtctttagaaagctgtgatcgtgcgtgcaattatttgaaaggcaacatagtcaattaagaaacctgtagttgttaaggaagaaattgttggcaagatatccatactgcccatatctcgttggtgcaataattaaatagcaaaggaaatctgtattggcaactattataattcaataattcttttgtttactgcccttttctgttcaagaattttctggaaattactccctttcacatggttgaactcttaagttgaccagttctcatagctctatcactagaatggtttgcagataccccaaacatactatgataaaatcaaattgtgctacttttgacccatgtaatttacctaaaagttgtaattgctgacagagtactgccttgaattttggtttaaaacctctctagtttcaatgacaagtaacaactcaaataattccatattgtttgaggaagaggccataatccttctgaattgttggcactaagtaatgggatttggcccagtaagtatgacggtcgtgtcgcctaaccaacgcagagcagtgctttttgtgtggctgaagcgatgtgctgacgaaaaaaggaaaattctaggacaatcgttggctaaaaatcaccttaggatgaaaaatttgaggcaaatttttttaaatgacagaaaaagataatcatctcacttgcttgaaacaggagccagcatgatctctggaagcatcaactatccctcgtcgtgattgttgaaagctctttcactgttttgcattctagtttgaatagtttgtattgaaattggattcctatcttgtgtatgtttttggtgcgtaaaagggaaaaattggtgtcattacttttgaaatttgcaggacgaagggcatgcttttggtttgctgtaagattgtattctgtatatatgttttcatgtaaataaatg

SEQ ID NO: 59658 - DNA, 1024 bp, Homo sapiens
tattttaaaacttttctgcaaaattcaatacagtccacgtacacctaatggacacagatataataaaagtacaaaaatcttagctcccattaaaaccttccctgcctctaaataagccagaaactcgctcccgctccacagtgagaggaagttcattttgcaagtgtttgcactagttttcatgttaccaagtcgatcagagctttttattaaatccagcctgatacaatcaaaacagacatggtgaaacccagctctactgaattgtaaaggcagcatattacctattatatcaaatatgacaaaaagttccatggcaaactcttacacagcaacttctaatgagaaaatgtctgtctgaactgggtttcaactgtgcgagatcatagcagcgtctcaaagcagctgctaatgatgacagctttacagtcagcgggagctctcctgctctgatactgtgtgttgagtcacctcttcccttctgatgtgaaatgacaactttttagatcttgacaactttgctattttctttggtgcaaatgggaggagagagagctggcatcttcccatttagctgaaaggaaggcatgttttctgtcatgaataaattaacgtacaagaggagagactcacattcaagacatttggtccaggccaggcgtggtggctcatgactgtaatccctgcactttgggaagctgaagcagcaaatcgcttgagtccaggaattcaagaccagcctggacaacatagtaagaccctgtctctacaacaaataaaatatttttatatatatatatatgtgtgtgtgtgtgtgtgtgtgtgtgtgtgtgtgtatatatagtatgtatgtatgtgtatatgtatgtatatatatgtcatatatacatatgacattcagtcctcttggttgattatgggagctgttgtacacaattataaagactgttttcaggaagagaggatgtgagattatccctagggcagtgtgattgctctcatttggcatctaggatttctggtt

SEQ ID NO: 59659 - DNA, 1049 bp, Homo sapiens
agaggtttaagggactcacagatccacatggctggggaggcctcacaatcatggcagacggcaaaaggcacgtcttacatggcagcagacgagagaatgggagccaagcaaaaaggggaactccttataaaaccatcagatctcatgagacttattcactaccacgagaacattatgggggaaaccacccctacaattcaattacctcccacaaggttcctcccacaacacatgggaattatgggagctacaattcaaggtgagatttgggtggggtcacagccaaaccatatcagtggaggaagatgagacacctaaggtcctattagtttgggggcaggggcaggctccctgctaccctctctgatcaagcacataatgaactgaactccagtgttttgcaaagcacaataattcagtctaactgtggctagtcatagcagctgtccacttagttattttcattaggtaactataatacatgacattgtcatgtgcacagaaattattcagctcacaattccaaagttttatagagagcttgttgaatttggagacggatgatgtggcatcaagaaaagccaagggaaaaacattcaatatccgatgcttttcataatttaattgctgcctgctcccaggctgaattgaactccagaaggcattttcttttcgcagtcacaaaatgcatctcgatatgcagcaaataacatgcagctctggggttttctcagcgaaacccaatgaaaagaatctgttgaaattttattgtctgttgataaacactgtgtgcgttattgcagtcagtactaattagatttatttttaaactgagtttctgtaaattgtactgacagtaaacaataaaatcagatgattattctaatacagaaaacacaaacgcaacaaaactgccggtaccgccttgtcatggctttttagcaccttggcaagccacattctcttggtgggtggctttgaggcccttggaacatagcaagatgttacccaggcagagaaaaggccgtcgccgggctgaccgcgtagtg

SEQ ID NO: 59660 - DNA, 1037 bp, Homo sapiens
caaagggctcaggtgactctggctcctggtcacctgcagtttgggatctttccagtgggacctggcggtttgggatttggcctcagctgttatttacggtttcgatttctgcccctgtggctgatgcattaagcgatttccctccgtgtttttgtttggggtgtctggttctcacatctggggagtctgtcatgtgctgtttgaatttccccttcattgtggagctctgagcatttgtcctgggctatcactcacaacaacatgtacctaaaaactagaaagctttctggtcggaatcctgaaagtcggctgccccaagcagccttcagtgttcatagacttggtggtaggagaagagctttcattcttcgaagcagtcgtaagtttatcggtaacacccaggggaggaggtgttgagggagtaggaatgacgatctcgtattgaggacttttccatgtgatattggacagagggaatgtcttacccagctgacctcagcgaagtcagtcctcggaatcaaagacagatgcagacaggcctcttgaagatactgtgctgtgtttttgttgctgctgttttcaatttatgctgaacattagttaacccactaagaataatgtgccaggcttacgggtgggtgtgaacttgaacacactcacatggtctggggtgctgagggaaggttggcaaaggaaaagtgcacatttttttttttgcatgtcaggcttttctttattattttctcatagagaagacaagataaatttgatgaactttcttatcatagcataggataagattttgtagcaatgaaaagcaatagcaaatgataactcctgagcctccattcatgtagattatatggcatcaaatacttggagtgaatttattgttaatttttagatgaacagaataatttaatttcagagcccatattgaaattattgaactaattcaaaaaatatctatagagcacctactcttgccagttatggttgtatctgccatggatacagcagcaaacagaatgaagtcc

SEQ ID NO: 59661 - DNA, 1041 bp, Homo sapiens
ccaccccgctaacaaagaccaggggagacaagtattccaaactcatttttcacctgagagatcctaagtctggacctttttgtagtagtaactggaattgaatatcagatagtcaagagtagcgggatcttattgagtatttttcttatttatttttgcttgcatttcttgcacatacattttgctttaaagaggcaaactccaactccaaacctgccagactctagcagctttagaagttttgttggaattaatttatgcttatgttggaagatgtaggattatctgagccaaagttagtagatgccaaaagctttggtctatttttgttaaggtgatctgaatcagttacaaatataaactggaaatgttcttatccaaagaaatcactatttgctcatttatgtcaatatttgaccaggcgtatttgcgagctactggttctccttttgtgaataacatgttttagttgaaatgcatgcctctgacagcaccttgggagtgtgctgtgatagtaacatgatttgcttcatcacaatttttattggaaaaaaatcattccggataactgcttgcaacaattgatctgaacatgtgtgctaatgtgaggtacaacaggtgtactcttttgctttcttaaatgcacatttaaaaataaagtagctagtgtaatgataagattaaatgaacgaagttgtactaagatctgacatctggtgagttaacgtctatcctatgctagaagaaactgataggaaattgtggcatgaatgacgtaacttttcagcatttaaattgctactttaaaatgggtacctctttgctttataacctatttttaaaaatggacttgccccactaacaaagctgattttctttttccgttttgccttttctacagcacaaaagaagagaaagattgcagtcgtgcaaccagagaaacagtacgtgcttttttcccctccagactacactgtataccgataaactgtagtgtctttatggaggatgggaagcatggctgtttttattggagttatc

SEQ ID NO: 59662 - DNA, 2153 bp, Homo sapiens
atgaactttttgcaatcctcaaataatcaaggagaagcattgtggacattcttttaatagattattttgcatgctattgggtctcctgtcttggaaaataattagtctgagtccagccagataaatgtagactcataagcttggtaaagggaaatgaagaacttggtacccattatttagaatgggatttgtttagggtcagaaacactttcccaggtgataaataactgacttttccatcagttcttatttaatagatgccttaatgggatatatttggggtgggagaaggcataattgtaacctttttgagggaaaggtagccgacgcatctgacctcataaatacttgtttaattgaatgggaaagatgatcaaaggattctaaagtatggtaaagacggccctagcaatatactaatgtatacattgtactgaagcgtatgtattaaagccataatacgatgtgatgtttgaattagcagaacattggaagatgaaagttgtaattgaggaaggaataagccataaagttactttttttttttcttttttttttttttgagatggaattttgctcttgttgcccaggctggagcgcagtggcgtgatcttggctcactgcaacctccacctcccaagttcaagtgagtctcctgcctcagcctcccaagtagctgggattacaggcaccctccaccatgcccagctaattttttgtatttttagtagagatgaggttttgccatattgggcaggctggtcttgaactcctgacctcaggtgatccgcccgcctcagcctcccaatataaagttactgttatgcttccttttgaagtactacttttaatgaccttgaaaatgttatttgtagctaaatgtaaatctggaaagataaatatatttagtagaggaatctaacctgttagcaaaatgtttgagtagctaagaaacaaatgctctttgggtctgcggaggagaaaatgaccttgtgtaccaggaacctgcccggggacctgctttattggactctggggaatcaatcccacacccttcaggacgggcagaggcacttccacattggatgcctctggggagagtctctttacgttttgtctgttttgaacatattctttcttgtttgattcctttagcaattaggctaaatgttggtcaagtcttacaatattagacagaaacaatgtctatttatttaaccttgttcaaaaataagccctgtgaaccttctagcattcctttaaattctatattctttaaattacaggggaattaaacatttaaaaagttaagactgacagtggtgataattgatttgagaaccaatcaaaagttcaaaatgatgaatgacaatgatagtatgtgtgtataagcacctgctgtccatgttcagagcacctgagatacaccaatatattggcttaactctaaattgggaccccacgtttagcaagtaaaatactccatcttcaccatgtctacttgacgatgaaaagtcagagccggtggagctcgcaccagatttaggaccattttgtgtttggttgttggcatttagcttcgtgaagttatggttttggtggggagggaggatgtgattcagaattcttcagatgttatgagatgacttggatggtaatggggctcaccaggttattttcttttctctctccttcccttctttccttccttccttcctccctccctccctctttcccctttccttcctccctttccttccttccttccttcctttctctttctttctttttctttctttccttctttccttctttctttctttctttccttctttctttctttcctttctctctttctttctttcttccttccttcctttcttcctttcttgacagtgtcttgctctgtcacttaggccagagtacaatagtgcaatcactgctcactgcaacctcgacctcccagacgtgagcagtcctcccacctcagcctcccaagttgctaggacttacaggtgcctgctaccacgccaggctaattttgtattttttgtagagacaaggtgtcttcatgttggccaggctgatctcaaactcctagactcaagcaatcctcctgcctcggcctcctgagtagctgggactactggtgc

SEQ ID NO: 59663 - DNA, 1974 bp, Homo sapiens
ctgcctgcaggtctggggttgacctggcttttcctgtagcagcaggcaacagctactacatggtgggaattctgcaagaactgtatggggccctaacaggagggagacagttgctagacacataccccccacccagaaataaaaacgaggaaggaaaaagatagccgcccaccccaggtgctttctaaggctctggagctggactgcccaggtttaaatccttcagctgccacttgccggccgctggatttcttccggtgcctcagtttactgatctctgaaatggggatgaaaacaccccgtatctcttagggttgttgtgaggattgaacgcttggaatggagtaagcactgtgtttgctactgtgtgggtctctctcctctctcccctccccacaccccccccatactcgtctaatcccatttctgtcatttccttcagcctgtttcctatgataccttgatcctggccaccagtttcgcccaccgtttttggttttgtttttggttttgttttcccaggccttcggctccagagctgacccagggaggctttgcgcgctgggcttcttgataggcatctgcaaagggaacacgcccagagggcaggtggggcttccagcgtccaggtcttgcttgcgggcactcacaccggctttgcattctgctggtgttttgcctgttcatctcacactcaagcctgtcagcatttgccatgccctttaactttcagtggggacatttattaggcaaggttaacacattcccttaaatacttcttttccttcttctgattccagcctttaactgagctgaagcagttgttccgattttcttcctgaaggaggtggaacccatttgcctcctcatggtgggcttgtagcctccctcgccctgggtccctcctgcctctgctgcccagtggcatctctcaccccaagctcatgcatgctcgcgctctctcctgtgattcgctctgagtgaagtaattacataattttaggagtttgatagaactgtgttcctaggaagacactcaggtgtcctcccaagccataagcatctccctttttcatcctggggctctgggtagcataggtcactgtctcgattacagtcacctgtgtcatcggctgggtggagccgtggtgtgtttgcagtgagagcaccaggtagacctctgtgtcctgctgaaccggggacaagggggtagcaagctgcagaactctttaaggttccaaagggattctcagaaatctgttatgaatttagattgtgagtacggaaagtctttgttctcttagaaacggaaatgttgattgctgtttagttttattttccttcatggtaattggcccctcattaacctgacctctgtggcaataccgtatttatgtataagagtcttactttcttctctgggtgtctatggttgtattgttacaatggtggtgattgtggaggccttggttgcaaaataggtaactcattcacaaaggccaaaaagtcataaaggtttatcttgggtcagattctccctccactcctgtgccccggcctccagccaactggttcctttccctgtggacacccactgtgttagtattttgcatttccttccagatttattttatgcacatatgaatatatgttatttcccccttttaaacagatggtagcatactatatatgcacagtgttctgcaccctgccttttatactcggcagtgcatcttggagatctgtacatctgagtatattaagaggtgtctgattcttttttatagctgcagaatattccttcatatggatatacccagatttacttaagtgctttcccatagatggggaattaagcttcctcatggtttttgagacgaaggttctggataaaaataaacaagtagaatccatactgaccagatgcagcttagccaaagtcaagagattgaacatggtcttgtgttgtttgtc

SEQ ID NO: 59664 - DNA, 1051 bp, Homo sapiens
gtcgttttataaactacagtcatgcattgcttaatgatggggttatgttctgagaaatgcatcatcaggccgcttcattgttgtgtgaatgtcatagagcgtaccttgtacctacacaggcctagatggtatagcctatactacatacagctctgagattcatccatggcctggatggtatagcttataccacatagcctaggttatgtggtataaccatataatcatatgggaccaccattgtatacgcatttcatcattgactgaaacgtcactatgcagtacatgactgtagtttacaaaattatcaataattcttcaatcctaggaactgtgagtagagatatcaattatctctgttttaagaattaggcttaaatgtatagtctactgtgttcaacatgcttttagttaggaaagttaatttatgttaagacaaaaagattatagcctcctcttacttgagatctgtaacaacagtgcaaagcactcgctggtcagagacttgtttgctgagcatgtcttcctggagcttgcggtttcgttgctgccacactgtcattgcactctagacataacaatatgaaaaacgaagcgagaaaggggtggctgcataggcagaagttcaaaagtgagtgcaagtcaaaatcagagtttggaggattcagtaggttgatgactgggtcagctggtacttgtaaatacagaagcacatcagcagcaaggttggaaatcaaggatccttctatgattgaacgaccttgagaagtagctcaaatctcagtcgagttctctccttatctaggctgcttggagcctgcctggcacctgcatgatccggggagcagtcaaaaatctaggcagaatttacacatagaatttgtggttcccagtccgggctctccgcaggattgccaccgaatgatgtcgcctttgcacaagagcggtttctctgtatcttgaagaaccgagtggtgtgtgtttaggtgacagggccagctgcatagccatgcccccatgaggactgcagctggttaactctgaaagcttt

SEQ ID NO: 59665 - DNA, 1005 bp, Homo sapiens
tctggattgatcgaccaatgccttaattaccatttaaaatagggcaaagattctgtgttttcaaataattttttattaatgaaataattttgtgatcattattaaaaacttggaaaaatacaaagaggtcaaagaagaaagtagccaagagtcccaccacccaacaattattgtaatatttattattaaggtttttgtacattttctctggtcttcatctttgcatattttatatgaatctaataattctgtatatgtttatagcagtcttttcatctaaagccatagcagttattttttatgaattttttaaaactacgtgccgtttcatgcctgtgtggcattctacagacttggagaagtctcatctcattttctattactgcacagaaggttatttcattttttttcctccagtgttaccagtcataatgccgtaagtgtcttcatgtataacacctttttcagtttttagggtcatttttatgggataagttcccagaagtgaaatggttgcgtcaaagggtaggagtttttttttaatgccaaatagtttttccaaagaattgtccatttacactgccaataatgatgtgtgcaaatagagctgttttatgtcaattagtttgtatccgagggaaatgggtcatcaacctcttcccttttggacctgtaagggttgaaacttcattcagaataaacactaataaaagcttaaataagtctaatggttgtggttcaacagtctctcagggaagcttgctgcaaagtttaattgcctaaggggttttatttcctttcattttcttctcccctctgctgttttcctccctccctccaggtttaaaatgtgttttcctggccacagttaagccttagtacgtcttgttctgtctttgttgattaatgagtataattgaccctgtcatctctattataccatccacagcaatttgtttttatgtcgcagttattttctgagctgtcacaaaactgccttacaaa

SEQ ID NO: 59666 - DNA, 1063 bp, Homo sapiens
gtaatgttcctccttcttagtaattctagagagtttggggggcctaaagcaacctaattcatgtcagtggaccatggctttacacaattcagatggtcaatatatcaaagcagtcagagaattacaattttagggaataattttacaagggtctgtggttaaaagacagtcatggcttcattcattgactcccttactctcttgtgagagtgcagtatatttatttttgtaattaaactgaatgagcatttagaggaggaggtggtggtggtgattgtggtagtggtgttttacggtttccttttgaggtggttggtttcacatcttgcatctcaacaccaggattaagagtcatattgtagagatgtttcaaagaccattcttcactttatgaaggtatgcaagtagaagcttttttaaaagtaaaaggttattgtgtctaaattaaattcttaggttgacacgtagaatatgtgggatttattgtacatattgccaagtgatttcagatgtttccacatgtgtatgtttcccatgaatgtattgggttgtctaaatttctgttaagaacatggatgctgcctacaattacaatgtgttgcttgacttcaaaaagaggttgggaagcagctgttgaaatgaaagacttccggtggtgtaggagaaatatatgcaaataacacagatattttattgcgttgttttgactctgttcctacttaaaaaaaaaatttgtcctcacaccttagagacaagtgagctagagtggatacgagtttttcagtgtggctttctgtgtagtaaggattttcctggtaagcaaaagttagaatgttggagattttactcaattagtttaaacccaataaacagcaagtcagtttcacaggcactatgaaaagtgatcaacaaataagtagatcacctaagcaaaaatgtgtataggttatcaaccatgactttctattttaaaattatttcattaacctttcttgtgtcacatcaaagattagttgtataattagtggaggaaaagttccacccaggaacttttgtagaaaat

SEQ ID NO: 59667 - DNA, 1847 bp, Homo sapiens
agttcttaaggaatttgtaaatatttagagtggccagttcctttgattgggttttgtcgtatttgaccgcatcctgtcttgttctgattaatgtcctctttggacatggccccagcattcatcatgcatcccccaaaacagagacctttgccgactgccctggggacatgaaaaatgaaagggtccatgcagttctataggcgtttacattctgttaaccttggcaactcggtgcactggtggagagttttataagcagttcttctagtctgatctcctcttggacgctgacggtactgaccagcttttgggggctttggggaaacaggcactgcccgactgggctctgtgcagtcctcagagttggatatagagtggcgtcgttggagtaattaaaaacccactttagatttgcaggtaaaagaaagtaacaggtccccagatatttttgtacttcacacccaattgatgtatttggaaatcgcaggatttatttgcaggtattatttcctcagggacagactgcaaatacattcatttatccactgctgtttatccagactgtgagttatgaggtgacctccatctccgcaagataaattctggtatccagagtccagccaacctcctctattgctgtgtagctgaagtggatattgaaatttgttatcttaggaggcgggaaagccccatctctctcacataaggttgctgtaagcaggttataaaactgccagacccctattaggaatggggtgttgctcacctttattgagtaggagacaggttctaatcgtctgtggggcaggtttggattcttacctgcaggcatctctaagatcatgggatcttgagtacccctacccttactcgtgccggtgagctgtgtgccagcttacttctagtaactggtaagctgtgtgctcttagacacgggaggtggtggcagaccttgggtacaaggtgctgactgaagccctgagatgtgactccagtagcaagagacctggtgttttctgaagacaccctgctgtgttaggatgacagattgcctcccttactctgctgtgcttcagttaatagcaccaaggacgagcaaagcagtgtcatgtgaacttttgcttagtgtaaatttaagcatggccaggaagccttgttgcctctcccttggaaaagcaatttagcctgcagaaaataattaaatccgtggtatctggcaataattagaaattcgaaacagggaaggttaattgtctccataagattttggttgcccaataaaatgctccaggagcgcatccggacagtggctgaggtcatttacaataccgtggctttcaatattttcatctttctccctgcaggatcacgcagatttgcgaagccatttcttcacagttgggatgaagcttgagacagtgaatatgtgcgagcccttttacatctctcctgcgtcggtgactaaggtgggttttcctccctcgctcttcgacccagcccctagagtggatcaaattaagcctttcaactcaaagacgaccagatgacatatgttcgtgcaaggctatcagcaatgccaggcgaagctaaggaagattgccgcccttccagtccagcgctgctttaagctgtttttattactggtggcacagagtgactctaatcagatgccccctcttatcatggatagggtgaattttccttgtcttctgatagttgtccactgacgagttgcaggttgtaatcattacaagagtaatttgttcttcctgcatgggtagtagtaaatatgatctgtttatacttggaaaatacatgaaaatggtgcaaagcaaattctcatctcc

SEQ ID NO: 59668 - DNA, 1014 bp, Homo sapiens
ggcagagcacgtagaggggtttgcaagctctctgtgtttactggcctccacgttggtgtctgggaagggcaaaacagaagctcagactgctgggtggagaagttttgcgccttcccagctcttgcttctttctgtgaagcatgctggcgtcatgtttccatgacagcagttgagttaatgcatttaggggccccctcagcgtccaccacatcctgcctgttgtaaattgtgtggttcaggttgtgatctatgatactacggtcctaaatttctcattactattttttaacttgattgaatgcacagctactagacaaaatcgctctttacctctgtaagtaaaaaatagaaatgcttattagtgttcagcaatagattttaaaattacatttttgttacaaatacttcactggctaaattgaaatcagtgtgatcaaattgaaatgtcataatactattgatttaataaatgctggcctcctaatatctgtttttcaatgaaactagtattacgggagtaattttctaatgaacatctgagcactaggtcattggtaaaacaaaagaagaatgatatcataaatggttctggatggttttttcagcgggacctggcatgctgatacgaatagaggaattaaagcgtagctcattatatattaatttgaatgtaatactaactaaaaccttccattgacttcactgaagcctagtcttagaaattatgcagattaatggaggccttgaaaagaagcacatgcaatatttgagttccctttggaccaaaaaactggcatgttggaactgaaaaaattatatactgtgcagtatttttgtgtaagtacaatacactaaaagattttgttgcttaaaaaaactgggcagggtgaatcctatatctgttttttgtctattttattttatatccaaataagccgaaaggaagaagcaaaggaccgaaggttgacactgagattgctgctgcagagggagaatttcctgcagcttttgatt

SEQ ID NO: 59669 - DNA, 1042 bp, Homo sapiens
ggaggagctggactggggaaagctgtcatatttagggtgtggaaggaggaggatgaaaagaaccgaggccatttctgacattgctcatggctctgttcaccaggcttttctattcacttgccttttctctggacccctttgctgtgtgagataatggatttccttatggtttataccaggtcgagtagggttttctgtctggtctttgtgtgagaaggccctttaatagataaaggcttccttggggaccagtaccatttcaggtgactggtctgcttgtctgtaggttggaaatgattgcttactccttgcaaacagagaacccattgctgccatagtggtagtaggcagtgggttaaggagtacttgagttattgttattgtcctgtgcatgcaaagcacctcttgtaccaccatattgtggtcaccattgtttatggttattgctgtcattcataacagcatctttgaatcttatacactagacattcaaagtggaggcagtgggagggtaacagcagcaccaggtctgcagtgtagactggcagcaccgggtctgcagtgtagactggcacaaatgtaagtgtgaatttccagttcttgctgagacagcatcagagtgagtcaaaattaacagggttggttggcactgctgatcacaccaaggggctgaagggtgggtactagagtgagttaatgctggagacagaggcagagagaatccactgatgctgaggaagctcatcagaagtgtagggggaggagaccacaaggtcaggtgtctcatcagcgatacctgacttctctcttaaccgaatctgaatcagtggtcctcaactcaggggccaggggcatgtgcccttcagtggacatgtggcaaagccaggagacatttcagttgtcccaggtgggggatgcagtcagcatctagtggatagaccccagagatgcagttgcaacatcctacagtggcagaacagccccccaacaaagattctggcccccaaaggccaatagtgttgaggctgaccatccctgtttc

SEQ ID NO: 59670 - DNA, 1084 bp, Homo sapiens
tcaggtgggacacttacattctccaggcatttgccttaagcccatatatagagacagagcttaattttttccccaagtcatttagcagttaatgtttgtgggatacatgatggatatctccttctcatcatgttatccccaaatggctttgaaatagaggctgttggccgggcacggtggctcacacctgtaatcccagcactttgggaaaccaaggcgggtggatcacctgaggtcaggagttcgagaccagcctggctaacatggtgaaaccctgtctctactaaaaatacaaaaatttcctgggcattagtggcacgtgcctgtagtccacctactcgggaggttgaggcaggagaatcacttgaacccgggaggtggagtttgaagtaagctgagatcgcgccattgtactccagcctgggcgacgagggagaaactctgtctcaaaaaagaaaagaaaagaaaagaaaagaaatagaggctgttttgatggtaggtgattttgttagcagactggtgcatgtccctctgtgatctcggtgccattgattgaacttgggaggtttctaccccatggctggagccgggtctgttctctcaggcatccccagtgtctgggcctgaaagcatggttctgcagagtacgtgctcccctacctcctgttgccattcccgtttctttacagacttgaagaggtttgttaaacagaatctctttgggtggaaaaccccagagaagtccagttcgttgaatacccgtccctggcaacatacagaactgcgaggtggggttcatctgtgggatcctttgcctgttctgggtacttgaactgaagcacatgaattccatggcaaaaaaggaccagcggggccatctagtttttatgagtattggagaaaatcttataagagacacactaaagagggcaacattggtcaaacaataaatgtaactataaaaatcgcaaaatccagatctatacagagttcgccatcgcagctgcttgatcactggggcctgagctccgctgtctgcagtccgttagatagcaacttgcttttaatcctaaacgttaagaat

SEQ ID NO: 59671 - DNA, 1694 bp, Homo sapiens
cactcgctcccctgtgcagtgtctccttccgtgcccctccttgctgtaccaggaggtgcacttgttatgtttctgtaacgccctttgtaccttgatatggtttggctctgtgtccccacccaaatctcatcttgtagctcccagaattcccacatgttgtgggagggacccggtgggaaataactgaatcatgggggtgggtctttcccatgctgttctcgtgatagtgaataagtctcacgagatctgatggttttaaaaatgggagtttccctgcagaagctctcttctcttgtctgctgccatgtgagacgtgcctttcattttccactatgattgtgagacctccccagccatgtggagctataagtctaataagcctctttctttagtaaattgcccagtctcgggtacatctttatcagtgaaaatggactaatgcatacctattttgttctgttaaagtcctactcatctttcattttcaaatatagattccccaaaggaatccttccctggacccctgaccctggcccagatgaacttgagcctctgttggtgtccttcagcagcttgttctgtcacagttatgcttaatcatttgtgcagctccttgtataataccggcctctttttgcctaactttgaagctccaggaaggcaaggactgtgtctttcctgtccattcttagaaacatactttcttgaccatagtagcactcattaaatacctgtccaataaatgcgtgaattcatggacatatgtcttcaactccttgaatttaattttttttttttttttttttggaggcaatcttgccctgtcacccaggctggagtgcagtggcatgatctcagcttggccccctgcaacctctgcctcctgggttcaagagattctcctgcctcagcctctcaagtagctgggattacaggcatgcaccaccaggcccagctaatgttttttgtatttttagtagagctggggtttcaccatgttcgccaggctggtcttgaactcctgaactcaagcaatccacccacctcggcctcccaaagtgctggatttataggcgtgagccaccatgcctggcctgaatttaaaatttttgagttcatatatagattaaatggacatgcacacttttttagaggtatgaatactaagactcaaaaggtatacacattaatcattctaatatatttgtaattaaaaattaactaattcattaaacatttattgtctttgcacaaagctattatgtgctgttgacctgattccagagtttaatagtttgttcatattttccaaaatacaattaccttaccttcttccctcactttaatttcttcccataagaattcagactattattttggtagggtatgtgagcattatcatcttattcagtattttgtgcataattaaggagtgctttaagagcagatactgaatattacttttgggcctctcatgaggcagggtgtggggttaggcactttataaatagacattagttgcattgaatattatgtgttcttaaagctggtgagatactttcattaatgttttctcttatttcagttcaatggaagagacacaggaggtttcttaactatattttgtaatgagtgagaatctacacgtttaatttggagggtgtgagaacatcattttcttagtttgcaaaggc

SEQ ID NO: 59672 - DNA, 1023 bp, Homo sapiens
aaatctatcctttgaagatggcctctgaatggaaatgtactctggaaaaatcccttattgatgctgccaaatttcctcttccaatggaagtgtttaaggtaagatgttgattcttagcaatgtatctaccctttttgagaataaaatcatctacaaagttttccggccgggcgcagtggctcatgcctgtaatcccagcactttgagaggctgaggtgggcggatcacgacatcaggagatcgagaccatcctggctaacatggtgaaaccctatttctactaaaaatacaaaaattagccaggcgtgtggtgtgtgcctgtaatcccagctacttgggagtgtgaggtaggagaattgcttgaactggggaggcagaagttacagtgagctgagatcgcaccattgcactccagcctggcaacagagtgagacttaatctccaataaaataaaaagttttccataccaaatccttttccacttgaaaaggcaccttcttaaccagtttccattttaaatgcttaaggttttatctgtttcatgttgctttttaaaaaaataatcttcataatgacccatattacaagatgctgattaaaattgtttaggtttactgactttctttgtagcatattgttatggaaatattttcaccccctcacttcctactacagaaacaaaaggaaatatagcaagtctaattttgacatttagtaaaaatgacagaaaatgactcatctcgtggtggttcagttttcttgatgtcccgaggttctgctaagtaccaggccttccaccaggtgctcccgtgaaaatgaagggcttgtgaaatgcatctccaccaaaacggctaccaagttctttacacttcaaaaattatgcttcacacttacgtgaaatagaatattaggttctggacaaagatggtccattcaggttcatccaaggaaatcataaaacaggcccatggagtgtgggcggcgacccaacaccattggcgtccttggacagttctcaatgtg

SEQ ID NO: 59673 - DNA, 1035 bp, Homo sapiens
atgcacacacgcagaggatgtgtggttgtgaattaccctttgtgtgtctttgtgtaagtaacaatgacttcgggcagtgcaccgatggcttggctagttctggcaggatctgatacttactgtaattatgactgaataaactgcggaaacaggggcttaaagctcaaggtgagttcaaaagctatgaggatcaaaatagatcgcttcatgctaaaaagcagacatgcaagaaattaaaaatacagtcccaaaggtttactgttgctttttaactgtgcttaatttcatattcatatcctaagcgtctgtctgaagtagcctgggttgatatattgaaggcataaacatatctacttccagtgagggcttctgcaaatcctattttgataaggtcttaaatctgttgagatcaggccataaaattctcctgcagtttcagcaataggtaaaaacagtgctcaacgtttttttttttccttttaattttgcattcagactgtgtaacctccatctgtaaatcttgccccccctcccactgcctggggaaaaatatgggcaacatgtggtgtgttaagcaacatttcaagtgtaaatattaaacttggtaaattttaatttaccttttaataattttctgacttacagggactatttttagcagatgagagcttagagatttagtgaaaatatgttgtcataactgcaaatgccagactagagtcgtttgtagtttagaaatgtatcagataataagttcctcatcagtgggcattgctttcctaggtgataggtggaattttggcccatggatgactgaaggtttttgctaatgtgattaataccattaaattacttacagaatgccaactaaatgcatacaaatgttccctgaagaagagctctattaagtttattcttcatttctgacagcagaatcccaagttgctatttaatttcagaaagtcctttcagcaggtggctgctcatggtgggtatggggtgtgaacactcacggtcactgaccgtgctgaggta

SEQ ID NO: 59674 - DNA, 2597 bp, Homo sapiens
taattatacattctgtaaaccaattaccagcttaagtgtagaaataattttacatagtagtctaatttagctgatcattactgtgtgttagacatgtcattgacacacactcatgccttcgtcacataatcaaagtatgagagcattttggtcattagagtagcggccagtagagtaagatgaatgtctgggaaaccgtcatggtgtaaattgaatgctctgtattagaattatctgtctgttggaaaagtagaccgtttgctaccacgttttctaggtccaggcaaatttgggtagaactcttcttaaaagcatactgattgttaacaaaagcaattttatctgggaagggtgatttgtttggtgagaacttagcacaaactgttattttctattgacttgtgatttttttgttgttggatacggaatggggtacatggatgtgtgggagggaggaaagggaaggggtggggcatgggctgggcaaggatggggtggagggaacgccagactgttcgccagtaccttggatgatggtgtgaaaaaatattatcttctgctgtcatctgtttccatgagaaccttaaaataaagtttaaaataaggagttttgcttctgtttaaacagcctctgcgagggaaaggccctatagacctcattacagttggttccttaatagaacttcaggattcccagaacccttttcagtactggatagttagtgtgattgaaaatgttggaggaagattacgccttcgctatgtgggattggaggacactgaatcctatgaccagtggttgttttacttggattacagacttcgaccagttggttggtgtcaagagaataaatacagaatggacccaccttcaggtaagggccaaagcttttgctgctgtaaagtattttagaaaaagatgtgatattttcctggatgtgtttctagaaaatgtatgagctttctggtatcttttatatctgagtatgtgaatattaagcactttaacttcacaatgctttccatagagactaaaacctaagacctcaatcaatagtgttctcaaaggagaaagcaatgttagaggccttagggaaattgatctagttccttgggaatcactggttcagaaaggaaagacacagtagattgagacttgaggatattctccacgtttttctttaggaattttgatagtcttgtaagtaggttccgaaatctctggccatctgtgtacccatctctcagtctgtccattcaccaatccatccacctactcatccacccatctatccatttatctattcatccatccattcatccacctatccatccagcattcatctatttatctgaccatccattcatccatccatctaaatatccaaaccacaatccagtctgaccaagaagcagcattgagtagatagaccatcatgttttctcctggcatgtaagattttagttagcttcaaatgcactgtcaaatggctttgcagaggcttaattggaaagaatcctgccttatgctctctgtcatacctacctagttaaaaatcagcgtatttacaaaataaccattcttgaatgtttactatgtgccaggtgattttacatctggtacattgtttgttttgattctaaaaaaatgctgcatgtttgttgtgaatttcatttcacagtagagaaaattgagactggagttcagctagttgtccaaggtcccctgttttaagggacaggcagtgcaattcagattcccaggtgctgggcccctcccacccctcttaccggcctcctcttaccggcctttgaatgggaaacctcagaacagaaatactggattcttgtagaattagagatgccaaggaggaagtacgtattttttcagaaattggtgaatcttcattccggtgagttttgtagctgtatttggaataaggacatggctctttgctttattaaaatcaccagagaatttcctcccatattagttgccgatgttagtgttgagtacatgaaggagaggagttatatttatcttttctgtcactcagaggctctaattgaaaacacttcctggtcctgtgtcccgtgtgtttgcatttgcattaagtttgacaggcttagagacgcgtaatgtggtattttattagtattattgctgtcaaaatgttgagaagcagccaacacctccatctctatcctgagtaatttttgactctgatgacaaacaaagagcctgtcgtgttgtgaagaaggatgtaagcccgggtttgccctgggattcataacccagcaggaaaaatttactttgtgcgtaaagttgtgtgtatacatctctgcttagtatctaattgctttataaattttaggagcaatatctacttgccagtgtacaaatttacagcaaagcaaaggatgactagtggcttcttatgttctctgtgatgtttctttcctgggaagttatgggactcacgctcacgagcaggaatggaacatgcctccgtggaagcttaggaaatactcgcttatgagctgtctccctctttagataatttggggtctttataatatatgaataaattgtgttt

SEQ ID NO: 59675 - DNA, 1278 bp, Homo sapiens
ctccatttcaccttcagtccacccctcttgttattttgtgcccatttctctgcaaattccttcttcttctgaaactgtataaactgttcatgtaattcggggcctggtttgattttcccacctggaaagcctttctctgatttccctagcctcactggtttctctctccttggaacctcctgaattgtacactttataatttctttgtggtttgtgaaaagtttctaaataggctgtaagacttcggattctttcatctccttggtgcccaagcatgtggtatgtgtcaagttgctacttagagacacattttcagtctcagttttagtatttacttaagcatggtgatgaaagttaagaaaaacattgaaatcaaacctacatggagaaaactgctgtgattttaagttgattggatactttgctgctgtgttgaagtgttttttttgttttgttttgtttttctttctcctttgtcttgccagcaatcaaagagaagtacacagactggacagaatttctcatacgtgacttgactggttcgaggacagcacccgccaacctcctggaaggtgtatgtattgttgttatacatctaatgtatctctgaagcaccccagttacgtgagctcagacctgacagcacctttgcatatatccttcagcagatgcgtgctttctgcagacactgccatccaaatagcctcccttcctcttttgtcctgaattacttaggtgactgatttgaatggcattgatgaaacttcccctgtgatgcaatcagcaaatggaaaatttgctctatgtgaatccaatttttaaatcacaatatgctaggatgtcttcctactgtcctatatctttaagcctctttcctatgtgagtgaatataaatcaaatcctgtagaatcactgttttgaacaggtgacaagatcatgtatgtgctaatatagtctcttggagtacattgataagtcgttccattaaatgttctattttgacgcataaccccaagatttgaacatacacacgttaaccaataattgaattaacttctcttgtaaaaacaagaggagaaatggcagatcgtatttcagtgtagccaaggaaattttaatgtattgaagaaaacatagtttaatctgaaatcttgatggtttatttgaaaataattttatgttgaaacatcttagtatgtatatgtagtatttgtatttgtataatggaacaggaagagaaaggcactgtgtcataagtaattattgaattacctagtc

SEQ ID NO: 59676 - DNA, 1092 bp, Homo sapiens
tctagttagaagtttaaatggtcacactgagcaatgccaattagcttccattgcagtgaattctaaggacttgcaaggcaacttttatttaccagaatttaactgaattaatcagtggttaaggtaactccatggtctaggaattgtaaattggttatacttagtttttattttatagcaatatttattgtaataggtttatggtacatttgaatattagagctttgagagctaaatgttaactgatatagtttttcttataaaattagcaagattcttgagaacgtttcttttctactttttaacctaaagtggtctgtatacgtttatggctttatagatacgtctaccatggagagcaattcatttaggtagtctgtggctcataaaagattgcttgagtcttgtgcagacacatataaaggaaagctataggacctctgggaacttgaggctcgcaagatgtaaatgtcagagccgtccctagagctcccttgctatgactttgaccgtttaaatttcagcattgtgcagtgacttcatagggtgcttgcatattttaaaaattttcacttaactgttaacttggattatacgcatgttagaaacaaccctgtggaaaatagagctttcttcccgtagtggatatagacgtctgtgttaggcacaggaccatttatcgctggattataataattgttcttcttttgtaatgggataggaaatgcatatttatggggtacagttgtatattttgtcctaatcttgaaacttatgtgagtcattttcatattatctccatcatgcctgcattttaaattactgatttatctgtttgcaaaagctttggagaatcagagaatctactggaaagactccatgtgagattgggctctgaacacctgggggcttgaggctgtttctagtttttttttttttttctgagacagtgtctcgctctgtcgcccaggctagagtgcagtggcacgatttcggctcagcctcccgagtagctgggatcacagatagctgccaccacacctggctcatttttctatttctagtggagatgggggggggggtttcaccata

SEQ ID NO: 59677 - DNA, 1039 bp, Homo sapiens
ttcggactggttttaaatctcagtaatttattttattggggttattgaaatactggatatactgacagaaatcatcaagagcttatggttattggataagtgaactctaggttgtggttatatttagtgtctaaataaggccctattttattacaccaccctttctttctctttttctgtctctctgtctctctctctctctctttttagtctcggattaccccatctttccgtggtggaaagaataatggttgcaaagtgagtaggaaatttatttctctgtactcatctggcatgaattgtttgctctacataaattgatgaattactgcttctaaggctgacataatagtttttgttttgttaaacaactataaatttcatctaatacagtcttagtgttaacaggaagaaaaccataagttaatatctgctacatttcattgcttaaaaataattgctagtagtaaagcttcatttttcacaaacataatttgatctcaggtaattgatagaagaagaattcagggaatttgttcagggtctgtttacaactgactttttcaagaactgccacatgcaataatccaaatgcattctggttatgaaataaagcaggcagaacttacagtcagcctcagaatgacttattgacagctacaggtgcagcatttttttttttttaacattgtaacccttttgcaaagtttttattgaaatgttttatgatatagtgtttttgatttgtctatttgaagaatcatagaagacaaaaccttaggaactttacttattctaaatttcctgttctgttattgataagaaagaaaaagagagagagagtgagggagtcagttattcaaatacacctcctttcattcctactggtgcttacaaaccaaatgcagcttgtattttaggcgcggggactcctcagctccacctaaactgaggagggaaaggtatgtcataatttttgttctttctcaacagttttcctttaataacaacctgatttatgatgttgaatcatgatcct

SEQ ID NO: 59678 - DNA, 1049 bp, Homo sapiens
actatcgaagattggtggcattcacctgtactcccagctacttgggaggctgaggtgggcagattgcttgagcctaggaggtcaaggctgcagtgagctgcaatcgtgccatcttatttcactccattgcttctgtgcagtatggatatgtcacataactttttagtcaatgttgaatattatattcgcccctctaggtttttaccatacacagtgcaattgcgttgtagaacaatacaattgagaacaattgtattatatttattatataaataatgttatatgttattatatataatatatattattatgtataacaattgtattattctctctgtattttaaaatttattttcttcatgacttatgggatgtacaggctctgggctcagcatcttgcacggaggtggtggatgctatgaggataacgctgctgggaatactggctgcaggtcatatctgagagcagaactcagtgttttatttagtttatttctcccgaggtggatggagcaccccaatcctctcattacagtcctttggcagagccaaacctggaagcatccccaatcccagaaaatctgtctagtttttactttgaaatgctgtccctctccttctggaattaggttatattgtctgtttacctggtaagtaattaaaatctcagtttcagcactttataattaactaaagggaaaaaataactccagcatgactttctattctggggggttcagtaaacaccattgtgattcgctaacgccccttaggaagatcactaatagctataaacgaaacagaccattaagctgagaacagaggtctccgggcagttgcagtctactgatttgctgattattgctggatgtttatgtgactatgtgcagttcaaacccctgtgagtgggtgaaacatgaggctgtctccggccggttgtccaggatgtgggttctaaggcaaaatttctggattctcgtcattctcttttcctctattttattctgtattttacttctggcctcagcattcctgttcccccaaatctg

SEQ ID NO: 59679 - DNA, 1001 bp, Homo sapiens
ctctgtctctctctctgtgtctctctgtcttcatctctctctgtctctctcagtctctgtgtctctctcagtctctctgtctctctctcttagtctctctctgtctctctgtctctctccctctctgtctccctctgtgtctctctctgtctctctgtcttcctctctgtctctctctgtctctctctcagtctctgtctgtctgtctctccctctctctctctctgtgtctctctctgtctctctctctctgtctctctatcttcctctctctctgtctctttcagtctatctctgtctctcagtctctcagtctttgtctctctctgtctctctctctctctctgtctctctctttggtagcacctagtttaattcctgtagcttacatgctacaaaaagattttacaaaatccagcaataaacaaaatgaaacttcctgatataccataactgatacctgtgactctgggaatttcttaagacatccggaaataagtgtacctttgtacgtgaaggacgtttgttttccccaagatctaggtcaaattaagaacagacttgtgtcccatccagtttgagataggctggttggctttctcagggaccttgtgtttgcagctctgtgacagtattcagttttaaactttggatttctttctcctgaatgagcaaaagtaatgcttttgcagaacgccggggaattaattgctgctaagatttgaagaaagacatgtgcacagttcctagctctgtatttttaccccaggagtactgcgaacttgatgattttggtttagtgacttccttgccagcggacttacgttttttgtttgcatgttgactgctttgcctagaagttctgagggacatagtttaaagatgtcttgcagtgcacctggttaatgaatccacccacggaaactctgcctccgtgtctctgactttgtcttctgcgatccctcgtgtggccctgctccagtgggcttggcttccttccc

SEQ ID NO: 59680 - DNA, 1042 bp, Homo sapiens
ggctaatttttgtattgtttttttcagtagagacagggtttcaccatgttgaccaggctgattttgaactcctgacctcaggtgaaccgcctgccttggcctcccaaagtgctgggattacaggagtgatgcgcacagggtcccatgtgaagcccaagtcatgcttctctgggtgtcagtcacttcatctgtgacttgagtggatgtgactagcttgcaagttctcagtgttgggggcgcaggaagagaggaaggatctttaccaccacagtggacagggcggcagtggtgggtgcaggagacaggtgctcttctgaaaagttctgcatgtggggatgccttttagtctctgatcctctcctgggaagatgcctgggtttaatgaactaaaatgactttccgactctgacatcctgtctttataaggtaaagaccattagattcaagagcataattggatagatatgtttaaaggttgtctttcaggattattgtgctgatcacagttttcacctggctttcctgtcccagtggatagtgagaatgatttccctattaaaaaattacccatcaacagactcctggttagacagtgtgttgagaattaatggtgtgtgccatcgagtgatgaaaggcagagagaaggtcttagcctatgggggaattctgagctagaactcacagtgtaatttttccttctttacaatgacatggtttataatgaagccttggtaggctggaggacttgtgtcagaatacaagtaccaaagaagtcacagaggaatattaactgagaaggcttttaagaaagaagaaaatacctatccttgtgctaggccaggcattgagggagggacagaggcctggctgcatcaaggtgtcctgacctgccttggagctggacagtagctgggcttgaagatgaccgcaaactgctgcctgtcccccttccagggaggacgctaccatgggatggattagacaggggaaaaagcatcagaagtcagatgagagaccttgtctttgttcctctgtttcctga

SEQ ID NO: 59681 - DNA, 1009 bp, Homo sapiens
acaaggggataagagcaaaaattatacagtgtgtattataggatgcatatagtcaaatgtcaggctcaaaattaggccagtagcttctgctgcttggacgttaatcttgaagcaaggaagaatgagggaatttcgggggggtgagggcgacagagttaaggtgttcagtgcttttatttttgtcctacacatggtagcaaccgagtgctctgcgaaatagcagtgacccgttattccagagtcagggactgttcttggcactcgaagtggaatgttgaagtggaagttttgcctcccagaggatttccgttccagctagtgtctgtgtcgctgtgaagacatggaggaagggtgaatgccatttatgcaggagattctagaacactcggttaagaccatctgttgatgggtctggggagaagggaaggacacacttctgtgtttgtggctatttgctgctaggcagcttgttgatactccaactcttctgtagttgtagacttggccatagaatgaagaatgtaaaaaagatatttgggctgggcacggtggctcacgcttgtaatcccagcattttgggaggccaaggtgggtagatcacgaggtcaggagttcgagaccagcctgaccaacatggcaaaaccccgtctttactaaaaatacaaaaattagccgggtgtggtggcacatgcctgtaatcccagctacttgggaggctgaggcaggagaattgctttaacctgtgaggcagaggttgcagtgagtggagatcctgccactgcactctagcctgggtgacagagctagactctgtctcaaaacaacaagtaaaaataaatatttttgtagttattagtttattaaactgtaattttcttatttctgtaggagataattatgtatttagaatggtcttgaagggacatcatgacatctagagaggtcgtttgaagctacaaggtctgggacatggaatttgtcttttataagccctggcaccttctaaggt

SEQ ID NO: 59682 - DNA, 1050 bp, Homo sapiens
ttccagggccatgcagatgttctagggccatgctgatgtctcagggccatgcagatgttcaagagccatgccttcattccagagccaccatgcctccattccagggccaagtagatgttctagcgccatgctgatgtcccagggccatgctgatgttctagagccgtgcctccattccagggccatgcagatgttctagggccatgcagatgttctagaaccatgcctcccttccatggccatacagatgttctcgggccatgcctctgttccagggccatgcaggtgttctagggccatgccggtgttctagggcaatgcctccattccagggccatgcagatgttctagggccatgcagatgttctagggccatgttgatgtcacagggccatgcagatgttctagggccatgcagatgttctagggccatgttgatgtcacagggccatgcagatgttctagggccatgcagatgttccatggccatgcagatgttctagggccatgttgatgtcacagggccatgcaggtgttctagggccatgcaggtgttctagggcagtgcctccattccagggccatgcagatgttctagggccatgttgaggtcacagggccatgcagatgttccagggccatgttgatgtcacagggccatgcagatgttctagggccatggtgatgtcacagggccatgcagatgttctaggcccatgcagatgttctagggccatgttgatgtcactgggccatgcagatgttctagggccatgttgatgtcacagggccatgcaggtgttctagagccatgcctccattcattccggggccatgctgatgtcccagggccatgctgggttccattgggtttcactccagggctgtgccaacattccagagccataccaacggtcgtgcctccaactcgagtccttaggttctgccggtcattagggagagtctgcctttttgagcctggctctcagggaatggttggtttgtgcaaagcttgtctcctgagtctagaatcatgttaaagcttggtga

SEQ ID NO: 59683 - DNA, 1483 bp, Homo sapiens
ccatgttttcttgcatggctcttttaaattaatgtaagctgtgaattaatgcaagccatcattagtctgtgaaatggtacaaggaaggagaaacagcatggcggcagctccaggagatgtcatcactaggggattcccatcagcaggcagagctccattaataaagacgcatttagagacctgggctctgtgaccaatcggccgttcagagcagcgttcctgcttgtgagctaatcagggctaatctttcatattaaaagtattaaggaacatatgacattaaagcgtcacccagtgccgcggaggattatggctcttattagtggagcaaaatgtaaaacgttttggtttagtaaatctataaggcttgatttattcataagcgcatgcaatgcttgcaaggggcagctgccaaataattattgtttatggtgagaatgtatggaaatcatttaatccagtgacgacttcattgttatttattgaaaagcagtgacattacctcttaatgtctggggctggggagctttggagatttagtcggtgcctgccgagcccccaaaaagatgctcgtggaagattgcaggtaagtatgtgtgatgatgtggctccaaataacaccccttggcttgtaaatggagacgtatttatgagtgctttctactgttgccataaaagtgttggaattatagtgccttaggagtcatgctgctaatttttattttccccgttattaaaatttctgtcatttgaattgcgtactctgcagtcttggcagaattactcaatttaccattcaaagttaaatcaaaattagtggagttagttaatatacaactcatttgaataaaggaatgtttattcatgaagtgtgaggagaaagtgtgaagatggccttatgtttatgtgggcagctcctgccaagttttaaagcctggttttaggaacgtttttgggaattgccatttttactgtagttgattgtagaggacaagatgctggcaggtggcacatgggacaggaaagtgactagacaagcaggacttacccagctgtgacatggctcaactgtggactccaaaaagtagaattaggttgtgtttttatgagactgaccctttttaaaatttatattttataatgtaaatgacatttcagtaatattaagggaacttaaacaatcacattattttctttggttatctgacattgtaactggagttccatttgtttatcaataagaaaatttagtatatatgctaaaaactcataatgaatcctaactgggcacccaggcttgagggaagcagagagacactcattaaatattagatagcttagtaataagagagcagaacacattggtataagaaagggtaggattatttgacaagtatgtctgtaaataaaccaaaagtcatagttagatattttattaaaaaatgtttaaatattctaaaagttttaaataaatattttaaaa

SEQ ID NO: 59684 - DNA, 1168 bp, Homo sapiens
tagggccatgttgttcatggaatagcccctatcatgtggtcctgtgagtccttgaaaaccgtgtagtccacattcagatgtgctctgagtgtagaatacacaccaggttttagaggctttattcaaaaagaagacagttggttgtttcattaatgttttttatattgattacatgttgaggtgataatgttttggatatattgggttaaaatatattgttagaattaaatttattcttttttgttcttaacgtggctggctgcaaatgtaaagtttagcattacgtttgtggcttccatagtgtattacttagataaatacatgcctgttttagagcaacaggaatattgtttgtaagtgccatattttttagtggtttttgtcatcttctggatgtattgtgtctagtgtagtaatgggttttctctatttctgattccttaaggttgaaatcagcattcagagcaacttccagccaggaatgaaattggaagtggctaataagaacaacccggacacgtactgggtggccacgatcattaccacgtgcgggcagctgctgcttctgcgctactgcggttacggggaggaccgcagggccgacttctggtgtgacgtagtcatcgcggatttgcaccccgtggggtggtgcacacagaacaacaaggtgttgatgccgccggacggtgagcccctgtttcaaaggcttcgatttacgagccgccatccttcatgacgcctgtaattttgcaaggagcagagagaaccttgcgtagaatccctaatggtcttagtgcaaaggtctcacagttctttcagagtggtttctcaggtttccttagctggagggagatcagtgcattttcagatgtcagagctggtgctgacaatggagccaaacttggcttttcggaactgaaagtatgcctaatccttaaattccttttggagggtaagaaaggaaggctgaaaggacatcaggaattggagggtaagaaaggaaggctgaaaggacatcaggaattggagggtaagaaaggaaggctgaaaggacatcaggagttgaggtcttgtgtttggtgattggccatgttgcttttcttctgctttagcaagtcgacatttgaacagtaacagagtgtcttaagcaggcttctctaataacttt

SEQ ID NO: 59685 - DNA, 1035 bp, Homo sapiens
gggagctgggggatcctggagggtgggaagtggctgattctcggtggccggacactcatccagagcctgatccgtactcgtgttttcttggaagcgccacaactgcggggaaggagtctttagaaaccgtgccagtttcaatatggcgggctaaggtggcttttaaaaactgaaaataaaggttttgaggtgggaaaaaacccagctgaagtttccaccccttagtttcgactctctttggctaccccaggaagcgctttagcgaattaagtggggaaaaaaagaaggaatgggctgtccggttttttttttccgtggttagagtctgtgtgtcaagtccattgctaggggggaaagggatggagaagtgcccctggcccggaccagggcaccgaaacgcaactgtcgtgtgtgcctgtggattagtgtgcaggcctgcgtgtgcgcagtttttttgggtgtgtgtgtcaaagagaaccaccccgaatgtgtgtgtgcgtcttggaaccagaccctgccatgatttgacgtgacaaactgcggacacgtggtgtaaagtacatgagggcagagggagtgatttattttgtctttctaggagacgagctagctctcgccttgtgtgtgctggatcctgcgcgggtagatccccgagtaggtggggcgaggaggtgcttattaaaaggactaactgtcccgggtattgggtgcaatcgggctgcagacgccagccggatttcgtgtgtgcagggggcgcgctgcacttaatagtgggctcctgctttcctccacgccgctctggggtgggaggtgggggaccgggaccgaagcttggagaagaccaaagtggtggtggtggtggtggggtggggcagaagggcgggagcgcgcggctctgggagacaagcacgtagggtcgaggcgaggggttgccttccttacttttgggtttcgcgctctagggaaggtgggggatggggacagcgtttggggaagaaattgtcccttgctcggcttaggaaccctctcggcgca

SEQ ID NO: 59686 - DNA, 1001 bp, Homo sapiens
tgcctctaaatagtataaaccatgttgaatgagccaatattttccagtttaaaaaaataccaggtgtttttttcttcattccttttgccaactaagaaaaaatgtttagcaattttttagtagtgaaaaaatacatgtctgaaaattagaacctgagtctgatagaccatagtcattggtacatagaatgagctccacgaatgtttgcagaattagatcctggctttggcattgacctgaaggtaaactacgtggtgatacgtctccttctctccctttctgtaaatgagagtgatagtatcatgtgcacatttctggaaagatggtatgaaagtcattacagttccattacgttctgagcttcttggaccaaaagggacaatgaagattttgttttttgaaagcaaaggttgtttatgcagcttccgagtgactgacgtgctccacatatccattgtttgcactcctgggtttatttactttgagttttgtcattctgggacaggaggagacatcctgctggggggaagctgcaggggtgagctgcagatgctttgaataagaaggctattttcatcgacttaattttagtgacataagaatccgggggatgctggggcttgcctggagactctcaaactggagaaccctgggggtagaaggaaagatctcaaagtcgttctcatggccaactctgcagctttgccagcttcaacgagccatcccaatgtgaactgtgctcaatattcttaatattgctgaattgagggggtaaaccccaatacggtcagtggcccactccatcccagttttctgctctggtatttcttcacagtatgttataccatattcttttattatcagtcactaaagacaactatcttttcttttttttattgaccaatatatttataaactgccacaccagtgacaactatactttagtaataatttctgacaattctactgcattctagtcttgtttcggtaaacagatggtg

SEQ ID NO: 59687 - DNA, 1593 bp, Homo sapiens
agaacacttgagtgagaggcgagggtgtgcattgtggtttaggaaggctcttgtacataagcatgggagaaacggagagatgtcttgcagtgaaacactttgccttatgaaaaaacaacctcatttgtttgatccttgccatggttccaaaaaggatttgaggccagagttgcaaattgtcttcctttttcccttgactttctatgcttccaaaaaaagaaaaaaaaagtgttttgaaggactttttgctctcaaattttttaaaaatagatttccaagtagattgcaggcatgatccaagccttgcctcattagttaccttaatagtcctctgattataatcccacatttataaacccgcacttgtagagagtggatcctttaaaaacccagtgaattccattaggactgacacatgcaggaacctccaggagttaagggtcactgctggatgtcagctcaaaccttcccagtaactctgctctattggaagaccagagctcagcagcaggagacactcaactttcacttgttgccccgttcagtaaaagcaagatcctaaatgaaaaactgaccaacgtaaatagcaagaaaccagcttcccatccaactcagatgtaagtagcttgatctacatctcaagatggttgaaatgtaagccatgttcctactcttattttataggtcattgtaagtagagagaaacaggagcattgactacactaaagatgactactacatagattagtaaaatgtgatcatgtaaattctgctagttaatgtctagtctttagtaattctccatgatcgcgtacagtaattctacacaattgggtttacatggtgtcatgcaggtaatgctgaaccacaatttaggtttgcattcgcttcctgttcagcctttcatcggctctataagcttgaatgaaggattgaacctcttgcactccaaatttctttgtattaaaaaagagacagaaaaaaactaaagttgccattaggccttataaatctaataatttctatttcactctcctacttagatgctaagtgtcatccaggctcagagatctacagagctattctgatccccttccaattctacctacccccttgccattaaggaaaacattaactatgacatcaacattagcagcgcatgagtccattctcagaaataactcaaagcttcaagagtggagtaagggatttccttccagaaagcagagacacaaaaatgaaattcaaccgggagcatcaaccatagtttatctccaagacccaatctcatcccttccaccatgttcctacctggcaatctatagatgatgctggaggtaaacaaccctcatcccttccagccacgggagacaagagatattatccctttagttcctacatataaaccacaatgcacctctgttccatggagggacacctggggagaaatgactcatttctttagtcattctatgccttttttaaatttcaactttgtaagcatatccgttgcccagatattgaacttctgtaagtattgtctaagaaaataacaagacaattacataaatatgcacgaataagggttttcat

SEQ ID NO: 59688 - DNA, 1034 bp, Homo sapiens
aattaattccaattttagcaagctacattgaagtatcaaaatagcacccggatgaatgtagcggaatcagcccagaggaaggtggaggtggtttggggagaaggtactaatccatgcaataaaagccagcacatcgtttggggctcttatctctgttcggatcatgacataaccattgcctgtcatccagaacactatcacttgcaggccgcgccaagattcaatctccaactccacttttaatagctgttgtcagcttgttgctagagaaattatacttaattacgtgagtaatgtggtgggtgtttgtgtgtgcattttttttaagaagaaatggcttaagcaaactgcatggggcctgggatgggtgcagactgagagggagacgtggtatcgactaggagagggagaacttcctgtgaaaaataggaagtttaatgagacgaaaatagaatgagtgtgataaaaagcggcgcaagggaacggatcagggacagagcgtctcccgtgtctgtgtgtttaagggtgttagggattgccatcaattgagatcgtgtaatgcactgtctacttggacctaatgtccactgtatgcagtgctgagagctacagcaattgaaagataataagaggaaaatgagtaatgaatccgttttattgtatgctgtaaatggcctccattgaaacagtctgtgtttagactggtaataaaaatgagtgatgaaggcagacgtttaacatgggaattggttcaagcaagaaacatattttctcgttgttttttttttaagcctcacaaataatttggtttatgaagtaacttcttgcttggaaactttatgtaactactgcacagtttttataagccttggcaaggggtgtgtgtgtgtgtgtgtgtgtgtgtgtgtttctcattttgtggcttgaaacgttggcaagggctatcacagtagccaaggaagtttgaattttatttgttaatttgtcatatgtggacctttgtctctccactgggcaaacacaggagccccagg

SEQ ID NO: 59689 - DNA, 1101 bp, Homo sapiens
tctttttttctgaaataaataaggctgtggatggatagcagtttctataacaatctccaattctttcagctgagtttcctgaaatcatggtccttcactctacttctttgactgtgccaaccttgctgaaacaagacttccctgttctttggccccgtgtgctgttttgttagctagaaaatgcagccttctaatcggtatgcgctttactggtctccggtgtctactaaacagccaaaagcccctctcgccctagaaagagtagaactcagaaacgcttatggcctgcgggtgagacaagattgactacaggactgcgatttctttggatttcacaacaagacctgtgttgtttcctctaccccagtctacctagaatgggatttcacccacagctgctgccagcacccactcacccctgacgacacacacctgcctggccagccagagatccacggcgctaatgcactgcttttccgaggcgggagaaagataatggaaagattgatagacagaaagaggagttcaacaagacaacagaatgctcagaagtgcacatcctagttccatttctaactgcacctggccttgttatatgcgtgtagcttcttacgctgccatgcatgttgtgtatgtatatatacatgtaaaaatatatattcttttaaaaatatttaacaattgtgggctctgataaaagagactttagtatttttcagatcaagaggctatcgtgtgcctaatcacatattcggttgagagcgggtccagaatttggtcttggttgttctgattctcagccggaagcaagtgctgctgtgtaccatggtgtctcttctgtgtgcctcaatatgaaccatttgcacctgaagtcggctacataaaaaactcaaactctctttttatttatttacttttttttttttttttttttgagatggagccttgctctgtcgcccaggctggagtgcagtggtgctatctcggctcacagcaacctctgcctctgagttcaagcgattctcctgcctcagcatcccaagtagctgagactataggcacccaccaccatgcccggctatttttttgtatttttagtag

SEQ ID NO: 59690 - DNA, 1431 bp, Homo sapiens
tcatagcaacctaaggcccccaaaacagggtggggtttcccaagagcaaggcacagctcgttcctattgctggaactctcccttctctacaaaaatatcgtgtcctcataagtcattcacaccaacttccatttgtcaagataattggggacattttacaatgctgtaacctagatgttatcgtggagactcgccctgtttccaatttgcaatcttcaggaaggtggccatgcgcctgccattcagcagggccacggacccactgccaaaggactcatggcttgcagtgtcactgaccctcaccatcctaagatcatccgaggtgaggcgctgaacacagagcctcaggcagcccctcagttctctcctgcaagtccagacaaggacttgctggtttatttcacttagattcttgcctcttgggggctttgagaacatggagtggtattgacataaccttagggatctatctctgtgaccagctaaatgcaattgtcaccattttgattattcggtgacgtcagacgtcacctggctaagctggctccccactgaaaatgtgactctggttttttgtccttgcgatagtttgctgagaatgatggtttccagcttcatccatgtgggaattgaacaatgagaacacttggacacaggaaggggaacatcacacaccagggcctgttgtggggtggggagatgggggagggagagcattaggagaaatacctaatgtaaatgacgagttaatgggtgcagcacaccaacatggcacatgtatacatatgtaacaaatctgcacgttgtgcacatgtaccctagaacttaaagtataataataaaatatatatatattttatatatatatataatatatatatataaaagaaaagaaaaaagaaaatgtgactctgatacaacgagaatgctttcattgaattttaacttcaaggacaagtgggaaaacttggcttcggtgaaccggctgcaagtgcagtattccatgagtgtggcacgtttcaaaccttaaacacccctccaggctggggggcatagatgataggtgcccagccagcccttcctctactacaatacgtcctctcacttttaggtggtatctttcattttgttttggaaaaattagcttcatgccatgagctgaatggtagtaccgtggggaagggcaaagagagctgattagccgctttgtcaacaataaaatccccttccagccacttctgtagctctaaggagccatcacagcgcattgaatgtggtggagactcattcacagtcagttacattgaagagaataagccatggattgctgtattgtcatagttgcctttttattgtttttggaataaaggtagcccagtactacagccctgaaaaaacaaacagcaaaataagtaattactgtcttaccta

SEQ ID NO: 59691 - DNA, 1050 bp, Homo sapiens
caatttgcaacctctatgggaacttctgtacaaagaggaaagaggctaaaactatggattccaaaccatgtcaaagtaggacaacataaacacgaggtcaaagaaagaaagtggcttcagcttccctcgggacacgtagtttcacgttgattaaagattaaacaatactcagaattatgtgaaggttttatccggctcagtgcagcaattcaggctctttctgaatggagaggccgagaaaccctccctctcctggcgtccagcatttgacgttccccagaacaatgatgaataatgagtccaccaaacatcatatcatttaaccttcaaaaaagacatgtcagtactctcattaagggcattttacccagagagaaacaggctgagagaggattaaccacgtgcagaaggtcaccaaccagcagtggcagagctggaattctaactaggttttctggttcattttcattttccttgtagttaattcataaatgtactttgtctttatccttgttgatgtaccacaggaatagtaagtttatgctgctcatatttcagtaacattctgatttaaacaatgtaaatcacaaatgggacccgtaagcatgttttttgttttttgttttttttgagacggagtctcactctgtcactcaggcttgagtgcagtggtgcgatcccaactcactgcaacctccgcctcccaggttcaagcaattctcctgcctcagcctcccaagtagctgggattacggatgtgtgtgccaccacacccggctaatttttttttttttttttttttttttgtagatatggggtttcaccatgttggccaggctggtcttgaactcctgacctcaggtgatctgcctcccaaagtgctgggattacaggcgtgagccaccacgcccagccagcatgttttcttataaagctgccttggtcgatccccctaaaggttcacatccaatgtcatgggatcgagggtgatttggggtgctcagcacatgatatcctgtagttccacacctctgcctggtctacactgaa

SEQ ID NO: 59692 - DNA, 1054 bp, Homo sapiens
aaaaaagacatgggagagatggtgtttttcctctccaccacctggggatacgatgagaagatggccacctgcaagccaggaagacggccctcaccagacaccatgtctgctggcaccttgatcttggacctcccagcctccagaactgtgagaaataaatgtgttttgtttaagctactcaagtctgtggtattcttgttaaggcagcccaagctgactaagacaccaaatcattcaaaacgttaattctttttctgttctttaagcttcccagaatgtacacaaacaatgctgttattaaaatttaaaggactcttggaactgtaggacatgatccagctaaaataaataacaaataacacagctaagcaaatacttataaatgtagctttaaatatttattttagttttaaataattagtggggtacgagacagttcacattcaagagacattttacttagacaaaaaatttataagagaacgatgcataaaaacaaacaacatattggtctgtttatttttctaagggaaaatggaattggagctgttgagaataaaacttgaagaatctaactgcactgcttgtttgtaggcatttctgaattacacacaatgatatgtaaatggggtagcaacatgggaagaataatgttaacgtaatacaatttattgtagagaacagcaaattcacagcagtgattcctgtgctcttctgaaactgtcaggtacaccggagggtcttaaacctctcagtccattcccgtctggggattctagcatcccaaactttgatcattattgggaccagtacattattgggtactcttttgcacacactttgcccaccgtcttgactgatgctgcttccactgggctcagggtcatttccctcctaggtgccatttctaactcgtggttctggcactcctacctccggttctgagtggttttactggatcgcgtttagatttcggttgagctatattacaagctgaacgggacaacagatgcttagaaccaaaacagacataggacacaaaggaggcatcgct

SEQ ID NO: 59693 - DNA, 1020 bp, Homo sapiens
atttgaggcttaggaaagtgaactactccaagtcctaatagaagtagcctcaaaccctgatctgctcaacaccaaaacctaagctgcctaccatcattctactatacaaagtatagtagcagtgaccgaaggagtgaggagaaggtacagagagttaaagacagcatgggttaaatgctcacacagtgctgataggtacagagagttaaagatagcacgggttaaatgctcacacagtgctgatggttctgtaagagatgtggacagggactccatggttttcactaatctcctgtaaattactatgtcacacatttattctatattgtgaattttgcacatcgtaaagcattcgtctgtgtatggttcttggtaacaagcatggttctcctgttcatcagtactctgggaccgagtgcactgaagacgataggaagttcagcatcagtgaaacgaaaagaatcttcccagagctcaactcagtctaaagaaaagaagaaaaagaaatctgcactggatgaaatcatggaggtacagtttatggattgcgtgtggacaccttagaacccaaggaaaattaaatcatttcaccatttattagattaatagaaaattaggaaaattatcatgtacggactagggaatagtgacctagctacatacagttccccgaactggagttggagcccccctaaataggtttatttatttatttgttttttatttttttgagatggagtctcactctgttgcccaggctggagtgcagtggcacaatctcagctcactgcaacctccgcttcccaggttcaaatgattctcctggctcagcctcccaagtagctgggattgcaggcgcttgccaccatacctggctaatttttgtatttttagtagagatggggtttcaccatgtttgccaggctgatctcaaactcctgacctcaagtcatccacccaccttggactcccaaatgctgggattacaggcatgagccaccatgccccacctaaataggt

SEQ ID NO: 59694 - DNA, 1550 bp, Homo sapiens
acctcagaagcctcacgacccggaccccgggagccccagccccgcgccctcagccccgcgtccaggacctgatcctggattgccaggggccctcctgggaagacggggccactccgggcccactcacctcgtcccggcactgcttctggcacatctggcaataccagcgtagcttctgcagccccttggacttgatcctgttggcgatagccttgggagtaagaaaatccgacttccccatggcgaccacggcagcgatcactttctggaccccagtactcagccagccggaaacggaaccgggctggcggcggtgggcgggacaaatcccagctgagaggcggaaggaggtggggcctgggaagactgggttgcaacggtcgcgagactcccctcgccgtagcgcgaagaaacgagactgaagaagagagcaaggtgggaggggcgcgctggggagcttcggcgcatgcgcgctgaggcctgcctgaccgaccttcagcagggctgtggctaccatgttctctcgcgcgggtgtcgctgggctgtcggcctggaccttgcagccgcaatggtatggcagcttgcgggaagatcggcaggaccgcaagggatggaagagcttgggcacggggcagggaggaggagatgggcgcgggggcagatgtggggtcgcagggcctagctgggcccctggcccgtcggaggcgccgggtagcgggggctgcaggaagcggctctgaggtcgggcaaggtgtgcgcagggccgggctccggcggagcaaggtcccgcccggttccctgaggtcggagggccacctgggacctcgggactgcggcctgagtccaaattgacgtctgggcggtcttgagttccctcagctaatcagcacttcctgagcttccacttccactgcaagccaggcccccagtctcagggcctgcaaggtgacgggagcctgagcaatagcccaggggaaggttaagtcgtgctttttgtccttgacgccctttgaaaccctgtagtgctggacagagtgaccctttaagattcgatcgagtcagagagcgcggccgtcgagcacctcccgtgttgcagacgctttgctgggtgctgcaacagcaaaggcgaacatcctagatgcctctgagggtggttttggtgcagaagggaccgtacagatctgtctgagggcggggaagggaaggacacctagcactaccttgaaaccacttgctgaaaccgtaaccctgcaaggtcatgaaattgcccccaggtcctgggggaggagttcggtgggcttttaagtggcatttgttaactgacatgcaactaaagggtgccacgagcctcgagaattttaaacattagttccgggtagggggacctgggctgggggaagtgcatattagaaggcccgggaatgggcaggtaaaagttggtttgtgggtggtgctgttcagttttgaagcttgacggaatctggaagaattccagacacgctgctaaggggattctaggctgtgtcgtagcaattccctgctcttaacag

SEQ ID NO: 59695 - DNA, 1020 bp, Homo sapiens
ttcttgtcttactgcattagctaagacttccagtatgatactgaagaagagtgatgagtggggatttccttgtcttgttcgcaatcttatggggaaagctcctagcctctcccattaaatcagagattttgtgtgttgttttttttttttttagcaggttgaggaagttctctattcctagtttgctgagagactttttcatgactgggtgttagattttgttggatgctttttctgcacctattgattgtatgattttttctttaacctgttgacgtaatagattatattatttgattttttaatattgaaccagctttgcatacctggagtaaatcccacgtagtgatggtgtataattatttttaatacattgttggatttgatttgctaatacactgttgaggatttttgcctctaacctatgctcatgagagatattagtcactgtccaccaaggtcattcaattagagaaaccttagatcattcttactgctttcctttctactacgaatgtacatgtgaagaagttaaatgcttgcaaatctagtctcctattgctttgccagcatcttcatccaggttcttgaggtctctcctgaggctgtggcagcctacatccccatgtcttctgtgttcatcaaaactccaacctcattttacgcttgtcactgccatgtgagatactttgctgaaatactaaactgatttgtgggcttataaacattcatttccctattaacctacaaataagatttaaaccaatttgctttttttgatatttaaaaatattaattatttaaagtaacaaacccaactcatgtgtccagtttccccttctccatttctcactctttcctgatcatgaatgctcttaaaatgacattctgttcccgagaatcccctcctcacatctctactttgtgcacacatttcatcatgctcagttctcctgtgtagctttgcctgcaaacacaggcactttgtatggatttgaaggcagaaagatcatctaatat

SEQ ID NO: 59696 - DNA, 2054 bp, Homo sapiens
tattgagctaaattgaaaaagttaagaatcagtttatataaactacttttacacgtgtagtcatgttcgactatatcattgactctgttactggaagaggttgctgtgaactaaggaaatttttagagtggctggccttgattcgaagtatagttgggcagcttaacaaggggaggggcttttctgtcatggaaacaagataagcaaagatatggaggtgggactagagcatgtgtgagtcaatagagcatgttgacttctgggaaggtggtggtacagacaggccaaataaaaggaggccttcaatacagggatttgcgccactactaagggatttaaatatatgtctattcatatacattctgagtcctgtatttgatagattgtttctttatggggtattctttaaataaatatatattaactgaaagtttttcttgtataatggaactatttttcaaaaaactgaaacatttttaaaacttttatcctcaggattcaagttcgaaatatggcaactttgaaagatagtaagtatgttgtttgtctcaatatgtgaattgagaaaaactaaattttgacaaatacaaatactttcaaaaatatactgctttagcccattgtgtatttgatcaaaactgaccaaatggatttccattgtatgtttgggacattggacttgttctgaaaagaccagtaagaaaggacacctgagacagctatgttctgttgtttgtagaatgatcatgatataactagaaaaaattataccagtgttggtgtaggtgggtgtatgtgtgggaaggggtaaatcatgttatatataaataatgttatggaatatgtggttaaggcaactttcaataccatttaatgttttaaatgtatattattgtcttatgttgccatttgcttgtcctaagtagtagctagttttgccttccttttattagtactatttctattttttttttttggagatggagcctcattctatcacccaggctggagtgcagtggcgccatctcggctcactgcaagctccgcctcccgggttcacgccgttctcctgcctcagcctcccgagtagctgggactacaggcgcccgccaccacgctcggctaattttttgtatttttagtggagacggggtttcaccgtgttagccaagatggtcttgatctcctgacctcgtgatccgcccacctcagcctcccaaagtgctgggattacaggcgtgagccaccgtgcccggctattagtactagttctaatattaagactggtttagcatcgtgctgtttattgtttatctaagcgctcattattctgccttgcacttcagaaaaatatgtcaataaattcacaaggaagttatactgtaattcctttgtcttaacacagtacttctatttttcagtcaccaggagactaaagtccatcaaaaacatccagaaaattaccaagtctatgaaaatggtagcggcagcaaaatatgcccgagctgagagagagctgaaaccagctcgaatatatggattgggatctttaggtaagggaagagtgtaattcacaaattaggaagaactgtttcacacaaggaagactactgatgacttacatttagagcttacagtgatgtcaagcctatctgagcacttgccatgtacttatttttcatctacatccacttgacacgtaatgataacaacccgtgtaggtagtacaggtagggactgttagaatccctgctttccagtgagaaaaactgaagcacacagaagttaagtaacttgcctaagatcacatataaaaggatgaagagcctctgtttggacctatgtggtttggtgtcgagtctgtgtatttgttagccattatacgtgaccatgttaacttttaaaatattctgaaatgttcccagttgttaagtataccatcagaagaacttggaaaccgtgcgttagatgtaagggcttaatttcatcctatgaccttgtagtgtggcattttaggactgcagcgggggcgggtgaggggcagtgcagtggag

SEQ ID NO: 59697 - DNA, 2094 bp, Homo sapiens
tcccgggttcacgccattctcctgcctcagcctcccaagtagctggggctacaggcgcccgccaccacgcctggctaatttttttgtattttttagtagagacggggtttcaccgtggtcttgatatcgtgaccttgtgatccgcccgccttggcctcccaaagtgctgggattacagacgtgagccaccgtgcccagccaatttttatatttttaatagagacgggatttcactacgttggccaggccggtctcaaactcctgacctcaggtgatccgcccacctcggcctcccaaagtgctgggattacaggcgtgagccactgtgcccggcctcagcttacagctgtcctaagaacacctgcttacactaggcagttgccagctaaatttaaatgcgtattttggaaataaccaactgctttgtaaattagagatttattgtatttagtgtattgcatataaaaaaattactgcttttgtttgtttttaagctctgtatgaaaaagctgatatcaaggggcctgaagacaagaagaaacacctccttattggtgtgtcctcagatcgaggactgtgtggtgctattcattcctccattgctaaacagatgaaaagcgaggttgctacactaacagcagctgggaaagaagttatgcttgttggaattggtgacaaaatcagaggcatactttataggtaatttaaatatatattgtttattttcataaagatgtaagcacgaataaatcttctctcaaaagttttgacaaactctcaaaaccttcatcaataacaaggtatattcttcagggccttttttggtatattcacaagggggtgtttgtttcctttttcttttttccaggatatattggaacatttctgttttccttcccctgttttctacctttgcttcttcatccggatcataagttgaatgccatgtgaatatcaaaagctatcagcattaagccaaatgaggcatctgaggagctgttacagcctggaaatgttagcaatagttcattaggattagaaggagaggaataaaggggaaaagaatataaaacagacctcatttttagttcttagttctttgcaggtgctgaaggaaaggaatgatgatagtgtgtggaacaactcaggaaatcaccaccacccataccccaaaagacctgatccatggtgacaatgttttctcctgcctgtcccctgtgctctttcagcagaaatcttattaaactagctatgtgagctcttgcttttcttataggactcattctgaccagtttctggtggcattcaaagaagtgggaagaaagccccccacttttggagatgcgtcagtcattgcccttgaattactaaattctggatatgaatttgatgaaggctccatcatctttaataaattcaggcaagacagatttagaaatcaaagcttttttatgttcatgcttttgttcatattttgaaataacagtttaaaaattattttgagatttacatttgtttttgtcaattctaggtctgtcatctcctataagacagaagaaaagcccatcttttcccttaataccgttgcaagtgctggtaagtagtttttctatgatacatattttttggcatatagaatggagagatttgtacactaaggcagacagtgtcaagatatctggtggtagctatagcaaatgatttggggctgtttcttttttagatggaatcttgctgcctcccaggctggagtgcagtggcaccatctcggctcactgcaagttccgcctcctgggttcacaccattctcctgcctcagcctccctagtacctgggactacaggcacccgccaccaagcctggctaattttttgtatttttagtagagacggggtttcaccatgttagccaggatggtctcaatctcctgacctcgtgatccacccgcctcggcctcccaaagtgctgggattacaggcatgagcccagccttttatttttttattttttattttttgagacggagtctcactgtgtcacccaggctgaagtgcaatggcatgatctcggctcactgcaaccttcgcctcccgg

SEQ ID NO: 59698 - DNA, 1736 bp, Homo sapiens
ttcagattttggagcacttcagattttggactttgggattagggatgctcaacctgtattacactaaattcgtttcaattcattattattcttttttactggaaaaagcattgagtgcttgctggctttgtaacaggcacatgctaatgctgtccagagggcttcataaccacgagatatagtgcagttatttcaaatgttgacctaatttttctaaagttacacatgtggagtagaatatcaaatggtttatttacacattatattttgctaaaaatatgctatcatctgtagtgtggaaatagatgacattattagaacagattcatttaccttatctagcattaatttctgctctgtaattataaaggagttttacactgaaaagctgtttttgatgaattactattccttccatataacttgaaagaaactcatcacttgttttaacagacagcatgagtatctatgacgatattgatgctgacgtgctgcaaaattaccaagaatacaatctggccaacatcatctactactctctgaaggagtccaccactagtgagcagagtgccaggatgacagccatggacaatgccagcaagaatgcttgtaagtacacagtatggacagtgccagcaggagtgcttgtgagcacacagtgaatctcagctgagaggagtccgtggccgagagtagcatcaacaacattaacatgatattcctgtacctgtaagaaagtatatcttgataggtagttgatttgcaagtactgtgaaaaggtatcctatggaagatgtaaaaatatcttcataacattatttgagaggccaattttggtatccaaaaatttcttacttttaaattaagcaacagaagttagttaacaagttattctactctagtttcagattttttatgtagtgtttttgttttgtttgtagctgagatgattgacaaattgacattgacattcaaccgtacccgccaagctgtcatcacaaaagagttgattgaaattatctctggtgctgcagctctgtgagtaattgtagattgtcgccttcagagaattttttttcctcttgctgtgtctgcttgtttggatgcttaaaagtttttcgtttttttcttttgaagttgaaactcattgctgaaacttgcatcctaactcttaggctataaagatgtggtaaaaatgggacctctttgctttatttttattgtttcagctggaaacactcgggcttagttttcggttttctaaaggattaggaatgggatgtggataattcagtatcatttatgaaatctttttttggaatttaaacaattgtaagccaagctttctgagttacagggctagtttcagatttggttttacataaatctataaaccattgcatgttgggaaggtccaggaattttttaatcattatgttttttaatcattatgttttctatatcagtaccaaaagatagtatagccatccctcagtatctgcagtggattggttccagtactcactctcacctcccccaggataccaaaatctgaagatcctcaagtccctgaaataaaatagcacagtactacatataaaaaatgcacatcctctcgtatacttttaatcatctctagttataatgctatgtaaattgttgttgtattggtttttgtttttattattttatcattatttttgtcttttttccaaatattttacatcggctgttgg

SEQ ID NO: 59699 - DNA, 1930 bp, Homo sapiens
ctgaggatacagtggtaacagtatttgccttcagagagctcagtcttcacagtaaaggcagacactaaataagaagtcacagcagaacagaggttgctaaactgtggcctggagctaagaatgggttctgcatttttaaagggatataagaaaaaggagagtgatagcgtgtgacccacagagtgcagaatacttgctgtgtggcccttcaccgaaaaaatttgcctattcttgtgacagtgttatgaggaaaataacaaaatccattctctgttatacactcattctgcagaaacactcgatgtatgtgatcctatattttctggtcaccagcactcttcccagtccagtctcttaccattaccatttctcacgtccttgaacctcagccaccttgatctacttccagatctacagattcgtcactctttctcgcggccagggagtggcatgtgctgcagcctgaaaagccactatttcttcccttgctcccttgattcttcatctgactgcctcctgtgtatccttccttactcagctgggggaatcctttcttccagaaaacactccttccttcagtctgagtgaggcagccttctgcagcatcctgtcttccatttagcttagctcttacagccttgtatgaggaattggctttttatttgtctgtgtgctcctcgaggctaggatgggaccatatcttattcacttttgtgtccccattgcctggtacatacctccttcgtgaatgttgaatgaatgaatgaaatgccatatgtattcagaactggaagttcagaagagggacaaataacattttattgggtgtatgaaaatgtgggtccatggttttaagagtcagggaaaagttcatcactatttaaagtgttccttaagtgttacttttcaagggcagaaactgggcagaatgccagagagacacaactagaactttttgagccaacagagacctttgtgtaagttgttagttggatccatcagcctcgctatcctaagcattcttctcttattttactttctaagcacagctgtgttaggactaacccattcacagcctggtcaccaatgttctatcagcatcacagaatactgtctcatggtgtctagcttgatgaacttggttaggatactctctctgttactcagctttgtcatctgtaacatggggactaatacaaggactaaaaccttctattagccattatccttcttgccatctaccccatgttaaagccaggctgatttgttcttggatcttaagtgtgacaaagcctgcgggaaggaaccacattctgaaggtttgtgggctgtgtgagatccagagaacccaagggggtttttttgctcttgacaaacgaatgttaggtatgacctatgatgatacaacttctgcaaaattgaggaccagcctatttcttcattagaaatgcaggaaacctggccgggcgcaggggctgacgcctgtaatctcagcactttgggaggcagaggtgggcggatcacaaggtcaggagattgagaccatcctggctaactcggtgaaaccccgtctctactaaaaatacaaaaaattagctgggcgtggtggtgggcgcctgtagtcccagctactatggaggctgaggcaggagaatggcatgaacctgggaggcggagcttgcagtgagccgagattgcgccactgcactccagcctgggcaaaagagcaagactccttctcaaaaaaaaaaaaaaaaaaaaaaagaaatgcaggaaacctatttaaaagtaacagaaacagctgggtgcattggctcatgcttgtaatcccagcattttgggagaccgaagcgagtggattgcttgagcccaggagttcaagacaagcctgagcaacatagcaagaccccatctctacaaaaatgaaaaa

SEQ ID NO: 59700 - DNA, 1155 bp, Homo sapiens
tcatagtcttgcctacttgcatgagcatgtttttattgcttctaacctggattgaaatctatgactttttataacagtcattgagtctgtttcaaaggaatcttgtggtaagtatttttgcatgatgtactcaaggtatcaagtttaacaattgactttttttcattggaaagcatatgtgattaactagcatggattgcttcttgacctgcttgttttgtgtttgtctttttcttctaatataataaccagggattaatgaaaatcaagttccatcctcagacaagaggtaaagttcacacattcttcccatgtctgttcagaaaagaaacctattcagatataagttaagctaatttagtaatcctagaattgtcctctgagagatttagatggatgggccacttcacagtagcagccaactcacgggagcacctgggcaacgctagtggacttttttgtagtgagtgtgttgatcatagaaaatgtagatataaggaaataaactttgaggatagagaattaacattattttgagatattatatataggttgtgaagagtggtggttgtcacactttatggtctctggaccccttaatgtctgattcatgtagcagaagccagctagattttcatctgtctctattcattttgttgtgatgtcatggatcatgtggcctctggaaaactctactgtatactcgagaatgagaatataacaggcaaaataacattatcatgaaaatagttttgacctcatgaaccccatgaaaggttccccagaccaaaattttagaatcactggtatagggtaacactttattgtgtaaattcagttctctgtaccccacttaaatatgtattattatctcttgacattattttcccaaaaaatgctgtttgatttcttacttgttctgtactttgtttttcaggtaaagaaggaaaattcagccagttgattttgtttttagcttactgctgcctttgtccgaagaaactgttcctccattatttgaattactgaagacagcaagatatttgtaaattatcttaaaataaacaacttaaaataaaatcattgtttttcttatatataagaacaatagatatagtttttgaaatgagatgatactaaaacatttaaaaatat

SEQ ID NO: 59701 - DNA, 1342 bp, Homo sapiens
gttacaggctaaaaatcgaaactcttagcagtacacagttccctttgtgagctagcattttgcttaccttttgccagcctgccatgctaatctgcgaccacgctgagctacctgccttttccaaaatgttttaagctgtccattcctacatgcgtgctgtttcttacctagagtgtcctttgcccgtggcccaccaatagtattacttttattttcagatgcacttatcacttgctctagggaactcatgttatctgctttcataattctgtgcatatttcttttatattatttgtcatcttgttttgtaatcacctgtgtatgtctctttcccctctccaggagaaaaattgattatatttgtattctgtaacctgtagggccattatataataggcacctgagaaatatttgttgaataaatgaatgaactgataaaccactaccctaaaagccacttattgactttacatattgagttccaaaaatgtatatgttttgaatgcttgatttcactgatacttctattactcttcttcttttgagacagggtctcactctgtcgccgagcgtggagtgcagtggtgcgatcttagctctctatagcctcgaacttcagggctcaagtgatcctcccgcctcagccttccaagtagctgggactacagggatacgccaccatgcctggctaatctttttattttttgtagagatgtggtctggttatattgctcaggcttgtgtcaaactcctgggctcaagtgatcctcctgcctcagcatttcaaagtgctgggattacaggcatgagccaccatgcccagctcactgatacatctgaatgtggaaccacaaagtaatatgcgtgcatttttatcttgaaagtacatcaccagctgactactcttctggcttttgtttctttttcctctggcctccgctgcagtggtccttgagtataccgttagtgataggctaggctaggctaggctaggcatagtccagattatgtttgctaccatgtatctttagatattcaaaatgtctcctgaatacatagttacctttactgccatttatacaaaacagaagggagctgccactctatgtgactaggtattccaaagtcatccaggggtcactgcagctcttcagtgtaaaccttgttcctaattaccaagtttccgtagccagtttcttggtttcagtgagaatgagattgtcaggttcattattcccacgtaatttggtgacttttttttaatgctaattttggtatacttattagatatttttagattcttttttctataccagccttattctaaaatcaaattctgtag

SEQ ID NO: 59702 - DNA, 1317 bp, Homo sapiens
ggcattttctgtgtgtcaggtgctgttccagatgcttttgatcatctgtaaactactttgaaatttgttctataatagctaatcatgaatgtggtttttctgtggtgttctggctagttgtctgattatatttaaacttgactttaataatcagcttaaacatgattctgtgatactctttaaaatctattaaattctttccaataactaggttaaaatgtttgattctgagctgcatatttacttactactttttcttaatatttaaaaatatattcgtgggatttcttcaaataatttgatttgcttttcactttgtttcagatggccgaacagacccaattttggatgatgttggtgaagctttccagctgatgggggttagtctacatgaactagaagactatattcacaacattgagcctgtcaccttcccacaccaaattccgtcatttcctgttagcaagaacaatgtacttcagtttcctcaacctggaagtaaagatgcagaggaaagaaaagaatacattcctgattacctgccacccattgtgtcttctcaagaaggtttgtgagtgtttcttcttcatatgttagtgattattttaatggatttttaatcctcttagctttccatgctatgtcaactttataaattctggaaacacaatagaaacatttactgttacttacaaattattctaacccttaaaccaacaaacttgcaactgacattaccaagccgagtcacggtgtaatcaaggtcatgtctgaagcatttatctcctttgtaaagttcaagtagaggaaaacagtgaagccaaagagaagcctttcaacagccctattatatgagaatgggatattaggtaaattagaaaacatttgaaacaaaaagaaaaattggggtagctcttttcctcctcgcttattattcaggccatgagttgaatgccatggctttatactggaaacagtgagtgaatcgtgagtattcagtgacattgtgtagacttctgttttttatcatgaggagcaatgtttattgtttgatcatatagaacttttgattataaaatgatagctaatcaggtataatggtcagtccaattgcagagttcccttttttcctgcataattttagatgttgatcactaagttcactaagattctaaggagatatttaagtaatttctggtctctaacacaagtacacgatattttttcttataagagttggaaaagttgcaataagttctttcattttgtaaaaaattctaaaacctgtatacttcaggacaatgcaaatgatgccag

SEQ ID NO: 59703 - DNA, 1121 bp, Homo sapiens
ggccaggctggtctggaactcctgacctcaggtgatccgcccacctcggcctaccaaagtgctgggattacaggcgtgagctgccgcgcccggcctagagctttcctatttcagataaaataatagcaagttatttgcttcttttacggtggttatatactgatggtgtgccattggtgccaaaagtaaattcaaaataattgtttccttccttcattcgtcaaggagctgtggagagcctgctgtctgcaggctcactgcttatttctgaaaagagaggtaaagaaatagaggtccttccctgctttcctagagcttacagtctacttggggaaagaagggctggactcatgtttatatactatttaaaattataatttgggattcttaaaggaaaacagagtgctccagtactataaacatcagaggtctctaacctagtgtgcttacaggaataagggaatcaatggatattttttaagtagggggttaggatgatttcattataaattctgttggtactgagaaggatggactcaagaggagatgtcactggaagagtcttgataaagcttgtggtagtcacccaagggacatgataggaaggaccaaatttgggagatattggatggtcaggatttggagatagataaattgtagaggatgtgctacagagaggagcctaggtttcaagcttgggagattggctaggtaatcagatatctaaatatccagatcttaaacagactggccagatctggagtgagaatttagaatggaccttatagtctgcaggcaatcctctaacaaaactttttatttattttttttaaataatcaggtagagctcaggattgtaaaacatgacacgaacctcgtacccagggcagacttggttgcttatgttaagggcagcaggtacacttgctttaaatcaggtggatggtgggcttttaccaaatgactgcctatgttggccaggcaccacgcccgatgtgggaggcagaggccctcctatcgttcattgagttgcgtgagtaccctatttaattaaagatggccctgtttgtcattgtaggatattgaattaatattgttttttttttttgtttttttttttg

SEQ ID NO: 59704 - DNA, 1011 bp, Homo sapiens
gcctccttagtagctgggactaccagcttgcaccaccatgcccagctaacttttttttttttttgtagagatgggctcttgctgtgttgcctagactggtcttgaactcctgggctcaagcgatcctccccactcagcctcctaaagtggtggaataacaggcatgagccaccgttcccagcttacagtcatcttttaaatgtctgcatttgtcttccatcattttttgatctgcttttagttgtagtcatctacaggtttaagtaacttttaatcttttttgaacccttagtcatattgaagatgttttatttaaaatactacttaaatgtagttattcgtatctagttttaccacaggaaaaaagtataataatatttctctctccctgttgtgtgtctcccctatctctttctcactctttttttttttttgagcactgtgatcagtcgttggataattgtgttgcttaattattgatattttgtgcttatgtcacacatacaattaacatgcattaattgattatttctcccatgtaatcagacttggtttaaatttataattcattttcactacatattatgtagtgaaaatataatggttaaatacactcttgttagttaaattttatcatccattttactctttgtggacttcaaattttgcagtataaataagaaaacggactgttttatatggaagtgattacaattcagtaggtggcactctttcaatttctgttagtgttaatgaatatccaattaaatgtcaaagaatgttttaaaatcttgagaaaaagcatacaactttagtcattgatgccttgttttagaaaggatagtaacaatttgttcataatttagcgtctctggaactttgtgagaatagttacgtatgaatatacttaatatttatttgccttgaggaaacttacctaaaacagaatttcttttaataaaggctttgtgatatcctatctgaaactgtagattttctattcagaaattt

SEQ ID NO: 59705 - DNA, 1048 bp, Homo sapiens
tagaagtttttaggtcaaaggtataaacacatttatggtttttgacacatattacccattgatttccaaaagagttgtatcagtttacagtgccgtaatgaatgtatgattacaccagtgtcccagcagtctccctggaatagcatttcaaagtgtattgtttttttactagcttagattaaacaatttgggaggtgtgtcattttgttttaaaatttttagttgaaatgtgggaactaccaaaaaaaaaaaatctcccactggaatataactgctgttatttttttgacgccgccctccaggtctttgtgtgtgtgcgtgtgtgtgtgcacacggttcctgctttagcatagcttaagtgtagtgttgaattttatgtcctccgtttttcgtttaattaagtcacttactatatgctagtcattaatttctatttgctgggcagtgctaggggtaggggtgaacccaaagtgcataaaatgcactgaaatgatttggtttgggtggttctgttagtcacgaaagggtatgtggaagcgagaatgtgtttgagataggtggtaatgtgaaaatatttatgtttgtgaaatatttttatcttaaatgcttgcttggtgaatatctgtgagtattatagcagtatctgatcagatttagagtgaaggtgagaggtctcatctgaaatgaagatgaagagccttactccgtgtggctgtataatctcagcatcattttcaattggccgtgtgagaggccattccttagtattgagcatcttagtcttttctgatttttaacttatgtgaatagcattgctttcttgacatttcagattttttgtttttaatttttatttctatttgtttcttttcaaatgcgttgaaggcaacagattatttcttatggttgaaaaagtttgatttctgagtttaaaaggatgaagtggtttgtgtgtttttgttttttttttttttttttgaggcaatgtctcgcctgtcacccaggctggagtgcagtggcgcaatctcggctcactgcaagctccgcc

SEQ ID NO: 59706 - DNA, 1021 bp, Homo sapiens
cagcaggcacccagtcatcagccagcaaccccttccaggtccctcgacctggtccctcgacagctgctagatatcctgttgcaaattaaatatgaagcagggatggacttaattttgcatttaaaggatttcttaaagttcagcctcaaatgaagttgttagtgttttcatttttattgaagctggctttgttggaaaggaaggggcagctagaattgtcctcagtggtattaaagaaaaatgctctggaaaaaataaagtttatgcctaaagtttggcataaactttatgccaatatgcctttatatatctatatgccacatttcataactcttcttataaatactgcacagttgtcaggcctgccaaaatggtatgtagcctactgtgtcagtacagcctgttagtaaacatatgtttatagtttaactgtttcccagtagggtgtttttgagactttcctttttcagctttgtctttctgaatggtagtaacaaagggaaataaaacatggtgagtttatatcacactttgagggacaggaggctaaactctagaattaaacttatgaaccgcaacaacacttacatgtttccttaggtaccaagtgcttcacacacattaactcattgaatcctcataataatcctgtgaaggaagtactagtattatctttttttttcttatagatgagggaaataaagtgtagggataacttttaaggtatgttagaaactggtagatctaggatttgaattcagacagtctgactctaaagagcttttttaaaaaaattactgagctatttttgtctttagattatattactacaagtgatattcccgtttgtaagacatcatcctaaaggttcagtgatccataaggaatatttgggatatgttatgccactggtgtcatcctgtagatcttgcacttctgggacgatttagggttattgcatgggatgtgtgaatttatgtttcataagcattgtatgtaggctaaattttaaaaaattatg

SEQ ID NO: 59707 - DNA, 1032 bp, Homo sapiens
tacagtcctggcttgctgcagcctcaaactcccaggctttaagcaatcctcccacctcctgagtagctgagactacaggcgtgagccaccatgcctggctttttttttttcttaattttagtagagatgacgtcttgtcatgttgcccaggttggtcttgaactctcgggctcaaacgatccttccacctcagcatctcaaagcactgggattataagtctgagccaccatgccaagcctttcccccaccatctcccagagacggggtctcactttgttgcccaggctggagtgcagtggtgtgatcatagctcactgcagcctcgaattcctgggctcaagagatcctcttgcctcagcattcaaaagtgctgggattacagacgcctggcacctagctagccactaattcttgaatgtcatcaaataaccagtcttttcacattttaaattttctctcaaatgttataaacgtttgttggtttattatgtactgttttttgaattagggtccaaataacatccacacgttgtgactggttgatctctctccctctctcattctttctcattctctgtctctttcccttttacattttcatatttgttgcagaaactgcgttgtttgtcctgtagagttttttatagtctgaattttgcttatggcatcctaatggttttgtttcacgtggtcctctgtttatcccataaattggtatagtcggttctaagagcttgatgaaatgtcatgttcaattgttttggcaagactacttcatagctgggggtgtgtaactccgtcagagtacacataatatcaacataatatcatttgtgaatgtgtgggtgtgattttagcaaacattgaaccattaagtcaatagaagttgcaaattggtaacagtctaattctgttttcttcacaagctggagtgcttctataaagagaaacttcctatcatctactatttggtttcctggtggtagagtttgtatatgaaaagctggatgaatgcttgatcccttttcttc

SEQ ID NO: 59708 - DNA, 1209 bp, Homo sapiens
atgtttttgttaagaaagaaaaaggcaggggaaaattagagaagttatgaaagtactattagctttctaaattcattgggaagaaactctcttgattttcagctatatcacaccccagggttcttttcaacatttctgattttttttttttttttctgctaaccttagggatttctcagaaactttgccagctgaattatctgggggaggtaggagtaggggagagtggaatttgaggatttatggagttgacagcttacaaagaggtttgaacggcctcagtagaatattaacatttgggctctgttttgttacaaatagggacatgaaatcatattgcttcctcttatatcccatagtaaaagaactatgggatgtagttcaaaatatataatcaaaataacgattggcctggctgttaagaatcactgtcttttcccagagaatttttgtgatagaatataagatcctcctctttattctaaagccactggtctgcaggtcatcaaagaagtgagtgatgttacaagcaattgccagtaatattgtatcatttggacttggattctggttctgttcctgaattgtatgtttagtttttcttcctggcgcttgatcctttagaacctcctggatgatacaatcgtttatgtcagctaggctacaattatgatcattagcaggggttgttcttgcatctatacttaactgttttttcactagttccggatcttactgattaggtactttctgaactgggaggcagaaaaatgtcattgattggcaagttcgtatctgtgtcatgttgaaaattgtcttagattattaactaagttcagtctttttgtgtgttctgcctgtcaatatatctactgttaatgagaacttattttaggattgcagtgagtttaatgtgtataacatgcttagaaccgtggccgggacatattcacatgcttagcacatgttagcagctatgaattattttaatgtcaacattatcatcatcagatttcactggtacattataggctctgtgtgtgtgtgtgtgtgtgtgcgcgcgcctgcatgtcactgaatgtacgtgtgagtgtgcgtgtgtgcatatgaacatgtgaatgtatcctcctccattactgctggcctcttcagcgtcttctgggctctattcatatgtcatcttgtcgaggcctttctagaacaccttat

SEQ ID NO: 59709 - DNA, 1909 bp, Homo sapiens
tgttgtggtgcctgcttgcatttgtgcttcttaatccttcaaaatgtgctgtttttcttttgatactcaattatagatagcagtttgtaggttttccttgttttaagtgaagctttcttatcttagctgataattgaaataaggagactgaaaccaatcttcatattgattttatgtattctttatcagtcactatttatatggtagtaaataatcaccattgctgtcataattgttcctcctcgatattttttttctgtctccatacattgtttatttatttaaccatttaagttgcaggtaatataagcatgtgacatcctttctggaaattgtaaactttttttttaaagtcctataaatgacgttctttgagcctttggcttattaatctttataatattggtctacatttccacctacttagccatttctctttctggctgaatagtgataatttttcctcaacattaggtcaatttattttattgctggattagattgattgtgttataagaaagagaaaaccaagaggtacagaaggatgtgtggaaacctccactgaaaacggatgctgtccttccagagccagcgggcacgaaggggttgttggcctccagttgaaaagtagcatgaaagagaagttgactgcctcttttcaaaagttatctttgtgtggtggtcctaatgcaatattaagaaaattagagctttaaaaaccagaacaatggtccttttaaaatatatctagtttagtgaatttaccccccaaagcctctggtgtctaattactcaaaaaggaaaagaaagaggagaaatctttactagcagaaaaataaattgcaaaaagtggcaagtttttacttttatggaaaacattttaattctgttttaatccagaaggcaataaaagcagcaaattttaagagtattcatttttttcttgtacgactaattttaccgacagaaaataattgaactccaaacaagtgatagtaatcttatattactattaaacttttattttatttatttttctctttaagtttttttatcatactattaaacttttaaatttatatttataaaaaggaagtttgttttcctcctttttacttataatttatcttgtctgtataataaagggagacgcttaatgaccaaaagaacaaatctgtacatagataaattaattttgtgcggtgttttatatttttcttttctttgttcccaaatagtgatgaaatcgactattttagtaagagaaagactggattattgtttagggttaattttctgaaatattgtgaagcagtttttaaatttaacaagattaattattacctgaaagcaatactttagcttcacatttagaggtcctcgtatttcagactgtgggcctggttttctctaaaattaattaggaacccttgtaaagaggtattttcaatgaaatgggccataagcaggtattttaaagtacatattgttttctaaaagttttcttgttggttttataagaatcgaatatgaaagaacaacttatttattgtagcaggagttcctgtaatgctgtttttggaaatgagtttattgtccacataggagaaagaggagagaggcagtcttacctattcctgtaggtgagcaccgtatacagaatcacgggggtcagtggttatgtgacagtttgtgtgtttactcagcttacttgaaaatacagctatattgtcctaaaagtcaggaaagttctttgacttaattatctttatctttggagcatagccaaagtcattatttccactgaagttgtcatctgtgctttacattttcttccatctattaaaactatttttcctcttcccccagcagattgttgaaactttgggaagtgcatgattcttcctcc

SEQ ID NO: 59710 - DNA, 1142 bp, Homo sapiens
tgttacttccttttggtaaacacaaatttaggtgataattacttagcttaagtgagaaaattgtcagtctccatgagtctttagaaataatttatactgatttcataatttctaaaaagctacctgactttgtgactttggggatcatcattaaggactgaggtggcaagaatggtggtatggaaatctgggaggtttttcttctttcatatttgagtgtatttcacataataatttctcaatattttacaaactgtgtaaaataagtagatacatttcttagcccagaatagcccacaaatatttaatgaaagttggaatttcttgttcagttctttaagacacatagaaaaaattgtcatagaaagcaccttgttatttaattcctaaatatttagaatatgaataagaatgtaatgagaatatggcatttattgttagaattttccaatattgctttgatataatgaataatataaatgctttccctttatcattatcttgtagtaagagaatttaagaattttagaggtaaagtgccctctgagattacaaccctactatttaaaaaataagacaactgagacccattgtgatgaagtgacttggccaagatcttaaaagctcattagtgacagacatatagagtgaggtttcttggttcttactccattttttttaaccacatgctcaattctgtgtccctctctctccttctagtaccgtttatacaccgtgtgtgttattttgagaagggactagttaatttctatactgtaacggcaattcagatctcaaatacattggagctaatgtttctgtcaccttacctgtcacagtgtcctttgagtagacgcgtactttgcaacttggcatttattcagtaaacattttttttaagtatgtaccatgtgcctctggcgtgcaaaataatagggaacgggtattatgcatctgaccttcctgtgttattaattctaaaacatgatttttaaaacaatacatttaatcatatagatgtacccaggagcagatcctgattttgtgaggcctaaagcttgtacaattttgggagcctttttaaagaaagtaatataaaatagcaaatgcaaaagcagattcaaaggcctgtcagtagtaga

SEQ ID NO: 59711 - DNA, 1133 bp, Homo sapiens
ctaaccccttgtttttattggcccattggacatctgcctagagcatgagtgccttctgtttcagtgatttcaacttttctggaaaatcctttgctgtatctgtacagcaatggcttcagtttcccattaaatttatattttgtgacaattatttctcttctgaagccagcagacagttcttatctcttccttagacatcccacggctctgtttttaagcattttgaagacagacaatgcttttcttgaaaccaatgcatcacactttcttactgacatcatggtcctggcacgaacaccttggcctgccacatctatgctgctgagttgtcagtaagacttttggtcataagtataagagtcttatttataatcacaaggaaatgggtaaaagcagagggctccaggttgagtcttgggaaattggggcatgattctaattgaaaagggcctgggctttggaatgagactttccattgcacacatttttttccactaattgtgtggcctctatctacagttatagaatttttgctttctcatctacaaaatgaggatgacagtatctgtttcttaggggtgaagtgaagataaagtgagaaaatgtgcgcagtttttctggcgttcagtaggcattcaccaatgtcagggctgctttctccccacccctgcgcctagttatcacgtgacaggaatcaagtgccttcagtgaacaccgaagctgaccatgcgggggtggaaattccaagttgggccagtgactgtaaatagtataaatagtaaaatatatatgagtagcaggagtgggaatggaataggagaattcagagaaggaaaaggagtgggttaccaatgatagttgaagtaactgcatcggttgctgctgataggtccctgggcctcagtttaccaagccctgaaatgaaatattggaaccttgttctattgtgtatgctagtaaggtaaaaacaactctgtttgaacctttcagttttctaataaaataataacccttctctatattctttttctcagatctttactcttgtgactccgtgaatggggggaaaacgtagaccaaaaccaattcttgccagaaccgttttcattctggggatggttgtaagttctaat

SEQ ID NO: 59712 - DNA, 1866 bp, Homo sapiens
gaagaatacaaatagtgttttgtagcaattattgataaattatacttttaatggaggcatttgtttcaaaatcattcttataaggaaacatatgataatgtgttatttcttgggtttggaattgttttggtagcctgaaattggagataaaatgggtgacagctttgtacatgactgctactcctcggtggatggctggagagagctcagaggcccagctatccaaccactattgtgtggtcctgaaaggagccaagaaaacaagcacacaccaatgctggcatcattgaaaactcctgtgcccctataatgtggggcatgaaatcgaatctcaactaggaaaaggtagaaagttatgaaatgattcagattcttttaattactatagaaaaactatttttataaaaatttttatttctaaaacacatttaagtagcagtttccccagtttggggggaggttacataaggaaggtatagggtagggtagtgtttcactgttttactgaactttttgctctttaggcttcgtattaagaaggtaaagattttgattagaagcacatggattttctcctacattagcagatcataaaactttttaaaaatcataataaatttatcacaaaacaattcacgtttaggataccatattaatcttttaaattattttttaaatgggtgcttcttgaagtagcggtgtatgtagatatttataatttcttctggtgtgcttgtggtgatcatccaaaaattagttttctggttacacatttgaagctactaagatccactgcatttgattataatttatttttaaatgccctcatattataaacctgtatcttttatggggacttatctaggtgttggctgtcaatgattttattaaagctatttgtaattaagtttaactaacataaaactataatgcatatcctttggatgaagaaaatactttaaaaagaaaactttaaaatacataaatacattcttggaatgtttccaaacctctgcgtagtccatgccacagaagtaaagggtctttctcaaatgaagttaattacccacagggtgcatgttggtcactctttaaaattcttataaaaacaaagaaattaattatccagtatgaaaacaagttctactctttctggcaaacattcaattaactttttagtgcttgctatttaatgttgtttttgaccaaccaaccattgaaaactactttcctttgaaattgggcttgagtagaaaacagtattatgtgtggctgtttagatggccagttccatttggccatcagcttttttcccatgatctttgaattcaatggcttgttatattttagactcactgtgaggtgtgcattgagcacagttattttgtgtatttagtgttggaattaacatctaaaatgtgttgggaatacccagtaaacttcttaaattaatattttatattaagacgcttcagaaatacaatggtattaaaagcactttacagctgaatgactaaggctgtgacggtcacatttaaataactttgttttttcagaaaataggtattttcattgcctttctttctgatattttgtggatgtttccttcctatgttttggaaggtatattccaaatttgataatcttatcattttgccacattggctttcttccctttgaactgacagatttgtgtgtgcacgtggacgctcctccagactttatgttcggaaccactgagaatactggcagacactaactccgcaccccacgttcgtcagtgtgtgtgttttcttagaaccaggacatttcttctccataaccaccaattaacatatttagggactttaacattgatgtaacatc

SEQ ID NO: 59713 - DNA, 1087 bp, Homo sapiens
tctgtaatcccaactactcgggaggctgaggcaggagaatcacttgaacctgggaggtagaggtttctgtgagccgagattgcaccactgcactctagcctgggcaacaagagcgaaactctgtcttaaaaaaaaataataaaaaaagaatcttttcttaggagatgttattaagagtccgggccaatattgactgcgtgtggttgttttctcatgacgaaactcaggggaaaaacgtttctcagggttttcataggtgctgttgtttccttttcagtgtgttacatcaggaggcgtataatgtcaggctctctgggtgctgggggatgactgtgtagttcagatggtgtctatcggatgtttttcatgtaaaggtcactttctccctttataattaatgagtaataggctgagtgatactgtgagactttgcaaatgttctgatcctccgcgttcatttagcatttattgatgattcttgtcagttattatacttgtggctgtagaatgttgattttctatcacttctgtattgaaattcttccatttaagaaaaaaagaattgtctctcttccacttctgtacccttttttagtggttagaatagactcaggttttttttttatttaatgtttaaaaataataaagtcatgcttgtgctcacctatggtcccagctagttgggaagccgaggtaggaggattgcttgatcccaggagtttgaaaccagcctggacaacatagtaggaccccatctcttaaaagaaaagaaaaagttatcctggcatggtgacacacccgtgctcccagctacttaggagagtaaggtgggaggatcgcttgagcctagaaagtcgaggctgcagtgagtggtgattgtgccactgcactctcagcctgggcaacagagcaagactctatctcacaaaaatgtaataatccatttctgtcatcatgtatgctgctgctcaaattgtcccaaatttgacaaatgagaggcccctacaggtgacccctgtgtcctttgacaagtgtccatctcagcttttgaacattttcttactcttctggcacaagaagccccagg

SEQ ID NO: 59714 - DNA, 1001 bp, Homo sapiens
gagatgaaaatcacagttaattgttgtcattctttaaaataatatggttaaatctgaaaagctttttgaattgtgggcaaaacattcttgaaataaagcttatcttaccaaatatttgaaggaaatttggtagcattgaaatagaatttttgtcaatttagaaagttaataatttttttaacagtgatttatactgtagctaaaaagctgttgctggtttcccaaatcttaaagctaactgaccttccatttgaacctagctttaatgtaaacattttcttgaggtggttaggggttgggccagccaatctggaggatattagtggcgttctgtttgagggaagttggaatccctagataattctcaggagctcttttctaggccagaagctgtctcagacattatatatttattttttaaggttttttttttactctttctttactgcaatgccatattatatatttcttaattcttccttggctttgttaataatgtctactatctgaaatctaattaataaaatacataattagctttactttgaagtagaaggaaagagcagttttatttggtagtttttctatcctttccactttagttgctgagaaatataatgtagtatgtaggctactgagagtgaggttattaccctactgcctttaaaaattctcactttttagtcatctattacttagccaaaatattgttgttcaaagctaaattaagtactttatcaactttctttgatacctcccctcccccgtttaaactttctgagcggtgtttttcaaacttcaggtcatgacccattaatggttgttaaatcagtttagtgagttgaaactagcattttaaaaaattaaataatacatagctcctagtaagacaaggtattatttcaacttttgttgcacttacacagatatatttgtgtgaatctatattgaaaaatgtaaaataccttttactgtgggtcaccaccaaagtttgaaaatga

SEQ ID NO: 59715 - DNA, 1070 bp, Homo sapiens
ctacttcataaaaatcacttataaccccttcctccttaaattgtgatgtttaattgtgatgaaataaatatgataatatatgtagttgataatacaataggtaccacccgaccagatttataaaagaaagtataaaaattatgttaataaaataagagttataatcatgttttgcttatgaagaggcactgtttccttttcttctcagcaacaaggaagttgcagaaataacgggctatgtttaaaagtgtcatcacccttggaattacagggtcaagattttcttctcaaaatctggacattgtttttttgctcccccacttttttttttggagttctggatgtttgatgaagaattatttgttttacggcctctaacattttattttgaaagggactagtctttaaaacttggctgtaaaacaaaggattaagagctcttccatttgtgcctattttagatctataaggtgggagtaacaacactgatttagagacctttgaccttccgcaatgaaaggacaaggaagtaaatactactcttactgttttgtatattccactaaaatataagtttcggtggtcaggcatttttgcctgtttaactcactgccgtgtcccagtacctgatacctagtgccacataggaagtacttaagtattttttgagtgagctaattgatattgttacactatagcggaattaccttaatcctgcacctttaggtaactgagtgggccacataaatgtgtttttcatgtagttttaccttttgtgtcaaaaaatgccattttaatgcatttatggaaatcttcaaattgtgtcatagtttttatgaatttcctaactagagtatttcaaacatattttgcctgttgactcaagggtgtcattatcaataataattactgtaattcctaggtgggccagtgaagcttgtaggattgcccttgtgttaataaccatgaactgttgtgttggcgatttagaacagataaggatgaatgttgtaatggtttttctattccttctggggttgtctgtcattctactcacgatgatctaggta

SEQ ID NO: 59716 - DNA, 1029 bp, Homo sapiens
attagttctgggtagtcaatcaggcaacaagtattaatactgagtgcttatttcatttaatccacaaacatttctgggcagttaactatatgtaaaggactagatatacaaatgactgacagttcctacctgctcaaagtattgttttgttgtctttggcctcatggataagacaaaaacagaaatgaattcattacaatgtaatgtggcagatgaaataatagaaatgtactgggtcttgaggagtacaaagtgctagagatacgcaaccagaatatattttcctataattacttttattcaagcaaattattataccaccctatatagagatacagaaatgcagagatcccctatggatttatgttttagttacttcttggaaaaactgagtcttagaaatttaactcggagcatattcaatactgggagtatagtcactgttttaaaaagtaaaaggaggtgaacatgctacctctatcagtcagtgtgacaattgatcctatttaaaatattataaggaatgacctgtgcactaaagggtagtgtcagttttcacctgggcagataattctcttttccccgcttcttggaaaacacaaaaatctcatggaatactgtgtgtacagtccaccacagagagggaatggcatctcaactagctagtgttccagcagatagcacacatgccggaagtactgattcagtgttttttacagcaaatatccaaaggtcaagagacagactgagagaaagagaagcagggtgtgagagagggaggagagagattgattatgagtctggggtcatgttttaaatgagtaaccagaatcaccagtcaaaacaaagcattcctgtattctctaacttgaagtactcccaatgtaaagatcagttgtgttaaccccattcttagtccaaaatacaagtgtgtagctgacgttgatttatgttccacttaatttttttttttttttttttttttttggagagagggtcttgctctgtcatccaggctagagtgcagtg

SEQ ID NO: 59717 - DNA, 1048 bp, Homo sapiens
aacacgagctctccatagtgagatttagagtgcactccataggtgaatgaatgaattagtcccagttaacacagagctctccatagtgagattcagagtgcactccatatgtgaatgaatgaattttagtggcattgagtcacttcaaggaactggttacaataaatatacctaaattcagacgaatagaaaggtattttttgaaaaaagtatgcttttttgtttttcaacctctctgccccacctctcccgtgctgtctaagcattcatttaaatgatcctttcatttgctagtaaaagaggaatctattataaaaacagtgacatgtatggactaataggaaagtttgtgcatcattgtagaaattaatttctacatctgcatacatttttcatttacagattctgacacaagattgtgtgtacacttttaaccaatcataagaagtctagctttaaatacgtttaatttttgatgaaatatatgcagatagcattttgttgttcctttgcttaaagtttaagaatacaagcatattttctgcttagttggagaacatgccactgaattttaaagttgcatgcgtctgtgtagttagtcagataaaaagcttctatgccatgtgcaaacaatttccctttatttcctaatgtctatgaactttttagattatagtgtttctttaaaggcatttactattctagttaaaaagatattttgttctaagtcaatatttatagtagcttagaattaacctcccaaaaatccttttggtgtgtcagaccttattgccttgttctgtttttgtctgagaagtttagaaaagaagcatgtttttctcattattcctcaggagaatgtagggagtgtggattatttgtttgtgttattaatgaaggaaaattgaaatggagtttgtggtgtcctgctcccatcaacatttgtaaagcttttgaaagatagggattaatatggatacattttgttgcttttatgtgattaaaaggaatttgacaattgttctgcagtcacactctgatgctttta

SEQ ID NO: 59718 - DNA, 1030 bp, Homo sapiens
ttttctgatcatctgtattatatttcagctgccgagtaggcattgcagactaaatgttcatcaaactctgtgtctagggattgagctaataatcattgtccttttctatttccttatttcctgtttctgttcatcactacatttatcactcaccaaggctcaaagctttctttcccttttttttttctttaaaaatagggtctcgctctgtcgcccaggctggagtgcagtggcgcaatcatggctcattgcagcctcaaccttctgggctcaggtgacccttgcacctcagtctcccaggtagctgggactacaggcacgcaccacaacacccagctaatttttgtattttttagtaaagatggggtctcactatgttgcccaggctggtttcaaactcctgggctcaggtaatcctactccctcggcctcccaagatgttggcattacaggcatgagccaccatgcctgaccaggctcaaagctttgaaattgtgtttgagtccttgctcaagtcttataccctaatcatttatcagattctatccattctatcctcagaatatccttcacctctgctgcttcctgatcatttccactgttctagctctgacccttactgcctctcacatcacttcagtaatccatgttattgctctccttcagtacccatcacctcccaccctcatccatcctgcgtgttcctgccagtgtgacttttcccaacacataccccacacgtttttctctgttgtctaaaatccttctaggtccaaactaccagtagaataaagattatgtttctttttctggaattcaaaagtcctaggatctggatgcaattttactaaacctgcttcctactgctccccaccttgcactctactttccagacaaataattttctgtttctcttacactccccgtgtttcaccttcatctatttgtcatctgaccctttgtcctggacttcaccacttccagtctccaactatcccaaacgctgcataattaatcaagcctcctccgc

SEQ ID NO: 59719 - DNA, 1046 bp, Homo sapiens
aatcatatttgaagcattgtttttatttcttaggttttgttacattccaataatatttatttttttcttcctttttcttcctttaccagaagaagaagaagagcaggtgcccactgatggaggcacatcagcagaagccatgcaggttcccttggaagaagatgatgaattggaggaggaagaaattattaatgatgagaatttcctgggcaagagaccactggatagtcctgaagctgaagaactgccagccatgaagcggcctcggctattaagcactaaaggggacacgctagatgttgtgttattggaagctcgagagccactcagctcaataaatactcaaaagatcccaccaatgctttctccagtccatgtacaggacagtacagacttggcacctccctcacccgagccgccaatgttggctccagttgcaaaatcacaaatgccaactgcaaaaccattagaaacaaagtcatttacacctaaaacaaagactaaaactagctctccaggacagaagactaaatcacctaaaaccgcccagtcaccagcaatggtcggaagtcctattcgatcaccaaaaactgtatccaaagaaaagaaatcacctggacgttccaagagccccaagagtcccaagagccccaaggtcacgactcacattccccaaacacctgtgagacctgaaacgcccaacaggactccttcagctacactcagtgaaaaaatcagtaaagagactatccaggtaaaacaaatacagacaccccctgatgctgggaaactgaacagtgagaatcagccgaaaaaggctgtggtagcagataaaacgattgaggcctctatcgatgctgtgattgcacgagcctgtgctgagcgagagccagatcctttcgaattttcttctggatcggaatctgaaggagacatttttactagccctaagagaatttcaggcccggagtgtactactcccaaagcttccacttccgcgaacaatttcacaaagtcaggatccactcctctgcctctttccggtg

SEQ ID NO: 59720 - DNA, 1005 bp, Homo sapiens
atattttaaagagcaggaaagggatatcctttacactttgatgactttagcaatcagaacaattaaaaattttaatgtttctttatccccaagtcctgtaggatttgcccccaaataatcttttattaaatttaaacggtttgttctttagagaatgataaatcatctaattggtttgtacctttaaggaagggttttcatccttttcctcttttgtttaaagtaatgtagtctcattccaagtcttttctcatcagctattgtaattaattcgtgaaatgaagggttttttttgtaaataaacccaataaaggggagggaaatgtttccttcctgtttctcataactgtatgttccaagagaaaacaagaaacttaatgtttaaatgagtatatttaaatttgtagttcacccaaggccagctcccagcctttctgactctacactctgagcacggacgggaaagctcatattctgtctcagctgtctacatggggtggcacttgttatacttaaccacaactgcacatcttctgactctctgtttaatattttaaatagttatcagagtttacttagactgtgtttctaaatggaaataatgtaaagaccttaattgctgagaaatacaagatggttacagccatagttcagcatccaaatgttaggttattctgttgagctttcatcagtactatttgtgagtttttttctaacataccggcatagatgggaatctgaactagcgcttgctaaatttgctgctaccctagctagtatacatatatggtgtttttttttttttttaatgaaaggagtttaacattaaaagaataaaaaaataaaaaaccttggacagattatattgacaaagctgcccattacctttgcagaaagtccctgtcaaaagataaactttaaagctggaatgcatgaaagagttccaagatagaatttaaatttgaactgattctttatagataagctttttaaaaatccacctct

SEQ ID NO: 59721 - DNA, 1100 bp, Homo sapiens
tggtcctggatgtatggtggaataactaagaggtaaaagggttggggcaagataagttgataattcaacaaatgtctgccgagcatctcctgcatgcaggcatcatgcaagggagctgtcgaagcagtagatcttgatgggctgagggatttgaaaaacaactctaggaagagacagataaatacatgagagaaaataatagatttgatctacatgtactatattaactttatgatatgttgatcattattttatgtgttcccctttagaaccactatactgttcaattatgatgtaattcatgagcttgaaatacataaattaatgttgcagctagtcagtgactaacagtaaaccagtgacattaaacatctggcagtgcttgggacagtgccttacaacaaagaaccatcccaccaaaaataccaatcctacagccccaccgaaagacttggagatagacagtaatttggaaatgcagagcttttgtttagcttgttaattcaaaatgttgattatatgatctgcaaaccaacaattgtgaagagaccctttaacatcagacttagtttctgtgttctcttctgacgaacaggtcagatctttctgaggtctttatcttatttggcagccattgccttcaccacaaatccattccaaaagagaatatctgttttcgttttctttcttttttctttttttttttttttaagatggagtcttgctctgtcacccagggtggagtgcagtggcacaatctcagctcactgcaacctccacctcctgagttcaagcgattctcctgcctcagcctcttgagtagatgggactacaggcacccgccaccatgactggctaatttttttttttttttttttgagacggagtctcgctgtgttgcccaggctggagtgcactggcatgatctcggctcactgtaagctccgcctcccgggttcacaccattttcctgcctcagcctcctgagtagctgggactacaggcgcccgccaccacgcccagctaattttttgtatttttagtttcaccatgttggccaaactgatctcgaattcctgacctcatgacgcctgcctcag

SEQ ID NO: 59722 - DNA, 1413 bp, Homo sapiens
agccgccttggcctgtggctccgtggcagtgcgacagaaggaaactcaagcagaggcgtggcctgggggctgcccctcctccacttctctaataccagtgacaagtattattaataaagagcgtacatcttcccttttgatttcctttattctctccagggccttttcattgaggtattagatgagaagataatgtacaaactgcctcaactgtaatttaaggatgatagagtctgtatacagttttcagcccctttccctctatagtaagataatcagaataacataaaagaaaactccagttggagtaccggtaaatatttttgtgataagaatatatgaagcttccctccttcccccgtttttagtactaacatgtaaaatgttcaggcttttgtgaaataccttatattttttaagaaaaaggtttctatcatgtcctgtttgcttttgtgcaaattatttttgtttaatgtattttatatcttcgttgcattctaattttgcccttctttaaactgctggagtctcttctcactgcttgtacatttcatcaacttgtataaaaactcttcagactaaaagattgcccctaatgtaaataataaatatttatgaagtagttattttttaaatttttatcgtgtttaattctggctttctctgaaatccactgtgatttcagccaggtctgtaatgacgctggacagaaacaaggctagagaaaaagccatcgttcaaagaaatttcccttgagctcagcctgcgcagtgcccggaaacatggtggggaaagggcccgagcagttggaaggaaaacaaggcaatttaaatttagagtttatgacttgaagttgttttgtttgttgtctattttgtttttgtaaatttctttgacagacttttactaaaaggacatgtagtttccatgaaagtaaaaaaaaaaaacaacaaaaaacccacatatactgtagcattttgtctttatattgttttatttctacaaatctgttcattaatattgtgctttaaggctgaaatgaagtatattatgaatttttttaagaaaactcatcaaatttcagggtatcacaaaactttattatattattatactgcccactatttattatatgttatagatgtctgagaggtaaaccaaatattttatttttaatgttaaaaaaacatcaaatttaactttattagcatattttagcaactttgggataaatacggacttttacttgattttgaaataatcccagtgtaggcccatgtgctggatctgttggatgctagaatatgggctttgaacctaatacaaatatattactagaaaatgtgatttttttaaatgccaagtaaattgatattagtgtatgaattagtcatattttaaaacattatgtgg

SEQ ID NO: 59723 - DNA, 1050 bp, Homo sapiens
gtttgcttttccattttctttatttaggatttagttccttgaggcgtggtccatgatctgaagttgccacgtttaagtgagcaggtcacgctactgaaatcagaatggaggtgcctatatataactttccccccaatcttactgtctgagagacttcagcccatgctacatttaaggaatttcaatcagtttgttgtcccttgctatttcatggttgctttcctaaatccagttcatgattttataaatggtctttgcaataataaaaccaaagaatcattttcagggggctggagagctcgagggattagtaatggaatacagagcctttcacctctaggtcagtgagtcggatccagtccaggtcactagagaccaaaagttgtcaccatcttatgactgttcagtggcctgtgtgaaatgaactggtggtctcagtctctactgggtggctggctgtgacaccaaccaaaggaagttcaagaaactgcaaagagaaatgtggattagaaaataaaacatccacattacaaagaaaaagttagaaagttgggcgtagtcattctccagaaagtaataccgaagaaaaaagagcaacttacaaataccacagacaaacagagattaatttactttccttaatgaagtcaagcaaaaccggaaaagaaaagcctatattgggtgagaggggagagggttaagtggggaggatgatttgatcagaagaaaaagttcagggacccaaacatcagggaaaaatgggttttgacttttgagggagaaggaaatcgcaacagcagcaatttgaggaactactgtagcagaattcgacacaaaggaatgagaagtatttccctttagagggcttgcagtgttccagttggaagcaaaaccctgaccggctttcatttagcccagcactgtcatttgaatagcatcaatactttattaagagaagtaatgcggggggggcggggattgtcctgactagtgattttattgagggagatggtatttgagaaacagaccctcacctcatgaaaccgagac
